United States Patent Application Publication US 2017/0114356 A1 - sequence listing, part 76

SEQ ID NO: 114131 - DNA, 441 bp, Zea Mays
tgatgtgacaggttgtaggagagcagcatgagctaagtgaatgcataactctactattatattatatcattcctctcaatccatgtcttttaactagtgaatcatttaggtttctgtttgatttacttatgcttgttctgacgtgtctttatgctttatacaggcttacacagacctgttttaacaagagccgggcagcaatgcttccatttcggaccacgacctagctaaaagctaatagttccaagtgtttgaaataccaaaaacagggctagctcctcgtttttgtcatgtcaaaaaattgtgtatgattgcaacaatattgacaaaatatcgttgtactttatattttgatatactgtgaacaaaacaagtgccctctgagactatcgtgatttatgcattttcaaactaaattttacgacaaaaacataaatagaa

SEQ ID NO: 114132 - DNA, 925 bp, Zea Mays
cggacactgtccggtggtgcaccggacagtccggtgctccaaaccagaggtgccttcggttgccccttagctctctattttgaacccaacattggtctttttaattggcttgttgtgaacctttggcacctgtataacttatatactagagcaaactagttagtccaattatttgtgttgggcaattcaaccaccaaaattatttaggaactaggtgtaagcctaattccctttcactatcgctcccctccgtctccccacccgcggcgcacccgcggaccggccccgcgccatggctgacccgtcgtccgagctcgacgcggcggccggggagggggtcgccggtgccaccaccgtgctgctcgacgtgagcagcatgatgtgcggcagctgcgcggcgcgggtggggtccatcctagcggcggacccgctggtggagatggcggcggtcaacctcctcgctgagtccgtcgcggtgcgcttgtgggcgtcggcgccaccgagcgcgggggaggagctcgcggccaggctcacggagtgtgggttccccgccacgacgcgccgagggggagcggccgcgggggctggggagagcgcgcgcaagtggtgggagatggcggccaggaaggaggaactcctgctgtggagccgggaccgagtcgcgttcgcgttgccgaagagcgggcccgatatgctggagctggagaggtcgagggagctcacgcggccgtccacgtcgcagccgactccctgtcagctgccgcacagcgacggcgaggcctccgaccatccatctgctctggtagcacgtccatactatggcatgtgtgggctggcgaaggagtgcctacatcagcggtacttcagcaagatgacagtcactgataggcagtcgttctgggtttcctatgaaaaactgcactaa

SEQ ID NO: 114133 - DNA, 198 bp, Zea Mays
atgctaatgatgagtcattctcattgcatcctctgctttctaagcctctcaagctccttcaccatctgccagtgctccaaagaaagactcttctcgccaaagctggaggccattatttgtgccattgttagccacctgctaagttcagaacaacccaagctcctatcatcacgcatggcactgaccatttcatcctga

SEQ ID NO: 114134 - DNA, 2260 bp, Zea Mays
gattatgcctttctagcacctcctggccaccaaagaagcaaaaatcttccaggttcccacccacacggccacacccactgttctacatgctcatgcatcctcctaatgtaacctgaagctttaagaaaacaaagtgctcccggaagactccaagctgcagctaccggccttcctctcccccattccaattccgagaacaggggcggcggagtcaaccaggtacgatgtgctcggtagcgaggctggcgtttgtgcttgcactggccatagccgcctcgtcaattgaggttgcggagagcagagattttaatatctttggtaagctttcaatctactgatttttgctccttactctctttattctttgttgaatgttgatccatagcagtgaattatcaggtctagtgatagtttcttttcgatggagatctcgtgatagtttcaattagtttatctaaattccttctttgtttgacaagttcgtatcttcatttagtccggtgacatgttaaagaaagcaattacgtctaagccatcagttctactcaatgtagagggcgtagcttcagcttagctgctattcctcacaggaactcaagtttttctgaagttttgcatttctggccaatcctttcttctgtcttcaattcagctcagggcagcttgcctgatgcaaccaagggatcgtctggtctagctgcaaccagtggaaagttgtgtcagttatgcgagcagtactcatccgaggcgctcctctatctcacacaaaacgagacccagactgagattcttagcattctacaccatgaatgtgccagccttgcccctctcaaacagcagtgcatcacgctggttgactactacgtaccccttttcttcttggaggtctccatggttacccctgagaagttctgcgagtcgatgcatctctgcaagaaggggatgaagattagcctacccacccgggagggtacttgtggtttgtgccaccatgttgttgttgaaattcttatcatgcttaaagaccccaacatgcaggtaataaccatattttcactatctgtcaccaacattcttctgtgttgtactgctctgtactctgtacatactgtaatgcctttctttgtttgctgcaatcttgcagctggaagtaatcgacctactcaccaaaacatgcagcaaggcgcagaactatgaacagtaggtgagctaagttcaagaaagggaacctcagatgtgctatgagtgcacggggctatattcaatggtatctgagaacaaaaaaaaacagcgagaattgagaaaccttgaactgattgagcacttcagaaagtgaatacttacaaactagaccaacctaggtgacattttattttatttaaatacaaaataggcatctaaatatttacatcaaagagaacttgaacctagattgtctaggcacgcatccatgcctcgaccaactgagctagttcggctttctaattttagctgtttattccaatctgcctaaagatatatgaagttaggctgttgctgatgcctgcaccctgcagaactgtatcttaagttaggttgttgctgatgcctgcaccctgcaggtttgtgcaaaatactccatatacagaacagggggtctctttctttgaaatctgatgtttgctacctctgttatcttctgttcataacattcttcttttcatccctcagtgcaagcggctggtcctcaagtatattccacttattctggtgaagggccagaaattccttgagacaacggatgtctgctctgtgatacatgcatgcaaagcaggcacacaagcatcaatggaagccatgcctctgtctgccatgttgtgaaggtgatgcgaatcagaataaggcttatttgcctaggagatcaaattggggagaaacgatgaaaagtcagatgactgttttaagctctcttcctctattgctgaaacactattgatcggtgaaaattcggctgtgtaaaaatcttgtgtaaatttgggggtatatccattgtttctctgaagtatacagcaactgcagctacatcaatctcttcggcattgggttgagaagttctaagcagtaattgcattttactgtatcatctatttgtttgtaactactgggagttattaattccttgtttctctgttgctctgtcaaattctctgtaacattagagttatactaaaacattaagtttgctttcgaaataataaaaacatttataatacagagatgg

SEQ ID NO: 114135 - DNA, 1307 bp, Zea Mays
tctgaaacttctactgatccgttacatgacgtagagagagggccctaggatacatttcctttctcttttttttttggttaccttttggctttatggagaagctttgagcaagccagcttttctgcgtccatcagccacagctgatttcactgcgatagttttcttcaagcagtagttttgttcctgtcaactgaccaactggtagtggtaagcaggtacgatgtgctcggtagcgaggctggcgtttgtgcttgcactggccatagccgcctcgtcaattgaggttgcggagagcagagattttaatatctttgctcagggcagcttgcctgatgcaaccaagggatcgtctggtctagctgcaaccagtggaaagttgtgtcagttatgcgagcagtactcatccgaggcgctcctctatctcacacaaaacgagacccagactgagattcttagcattctacaccatgaatgtgccagccttgcccctctcaaacagcagtgcatcacgctggttgactactacgtaccccttttcttcttggaggtctccatggttacccctgagaagttctgcgagtcgatgcatctctgcaagaaggggatgaagattagcctacccacccgggagggtacttgtggtttgtgccaccatgttgttgttgaaattcttatcatgcttaaagaccccaacatgcagctggaagtaatcgacctactcaccaaaacatgcagcaaggcgcagaactatgaacagtagtgcaagcggctggtcctcaagtatattccacttattctggtgaagggccagaaattccttgagacaacggatgtctgctctgtgatacatgcatgcaaagcaggcacacaagcatcaatggaagccatgcctctgtctgccatgttgtgaaggtgatgcgaatcagaataaggcttatttgcctaggagatcaaattggggagaaacgatgaaaagtcagatgactgttttaagctctcttcctctattgctgaaacactattgatcggtgaaaattcggctgtgtaaaaatcttgtgtaaatttgggggtatatccattgtttctctgaagtatacagcaactgcagctacatcaatctcttcggcattgggttgagaagttctaagcagtaattgcattttactgtatcatctatttgtttgtaactactgggagttattaattccttgtttctctgttgctctgtcaaattctctgtaacattagagttatactaaaacattaagtttgctttcgaaataataaaaacatttataatacagaga

SEQ ID NO: 114136 - DNA, 1266 bp, Zea Mays
gattatgcctttctagcacctcctggccaccaaagaagcaaaaatcttccaggttcccacccacacggccacacccactgttctacatgctcatgcatcctcctaatgtaacctgaagctttaagaaaacaaagtgctcccggaagactccaagctgcagctaccggccttcctctcccccattccaattccgagaacaggggcggcggagtcaaccaggtacgatgtgctcggtagcgaggctggcgtttgtgcttgcactggccatagccgcctcgtcaattgaggttgcggagagcagagattttaatatctttgctcagggcagcttgcctgatgcaaccaagggatcgtctggtctagctgcaaccagtggaaagttgtgtcagttatgcgagcagtactcatccgaggcgctcctctatctcacacaaaacgagacccagactgagattcttagcattctacaccatgaatgtgccagccttgcccctctcaaacagcaggtctccatggttacccctgagaagttctgcgagtcgatgcatctctgcaagaaggggatgaagattagcctacccacccgggagggtacttgtggtttgtgccaccatgttgttgttgaaattcttatcatgcttaaagaccccaacatgcagctggaagtaatcgacctactcaccaaaacatgcagcaaggcgcagaactatgaacagtagtgcaagcggctggtcctcaagtatattccacttattctggtgaagggccagaaattccttgagacaacggatgtctgctctgtgatacatgcatgcaaagcaggcacacaagcatcaatggaagccatgcctctgtctgccatgttgtgaaggtgatgcgaatcagaataaggcttatttgcctaggagatcaaattggggagaaacgatgaaaagtcagatgactgttttaagctctcttcctctattgctgaaacactattgatcggtgaaaattcggctgtgtaaaaatcttgtgtaaatttgggggtatatccattgtttctctgaagtatacagcaactgcagctacatcaatctcttcggcattgggttgagaagttctaagcagtaattgcattttactgtatcatctatttgtttgtaactactgggagttattaattccttgtttctctgttgctctgtcaaattctctgtaacattagagttatactaaaacattaagtttgctttcgaaataataaaaacatttataatacagaga

SEQ ID NO: 114137 - DNA, 1311 bp, Zea Mays
gattatgcctttctagcacctcctggccaccaaagaagcaaaaatcttccaggttcccacccacacggccacacccactgttctacatgctcatgcatcctcctaatgtaacctgaagctttaagaaaacaaagtgctcccggaagactccaagctgcagctaccggccttcctctcccccattccaattccgagaacaggggcggcggagtcaaccaggtacgatgtgctcggtagcgaggctggcgtttgtgcttgcactggccatagccgcctcgtcaattgaggttgcggagagcagagattttaatatctttgctcagggcagcttgcctgatgcaaccaagggatcgtctggtctagctgcaaccagtggaaagttgtgtcagttatgcgagcagtactcatccgaggcgctcctctatctcacacaaaacgagacccagactgagattcttagcattctacaccatgaatgtgccagccttgcccctctcaaacagcagtgcatcacgctggttgactactacgtaccccttttcttcttggaggtctccatggttacccctgagaagttctgcgagtcgatgcatctctgcaagaaggggatgaagattagcctacccacccgggagggtacttgtggtttgtgccaccatgttgttgttgaaattcttatcatgcttaaagaccccaacatgcagctggaagtaatcgacctactcaccaaaacatgcagcaaggcgcagaactatgaacagtagtgcaagcggctggtcctcaagtatattccacttattctggtgaagggccagaaattccttgagacaacggatgtctgctctgtgatacatgcatgcaaagcaggcacacaagcatcaatggaagccatgcctctgtctgccatgttgtgaaggtgatgcgaatcagaataaggcttatttgcctaggagatcaaattggggagaaacgatgaaaagtcagatgactgttttaagctctcttcctctattgctgaaacactattgatcggtgaaaattcggctgtgtaaaaatcttgtgtaaatttgggggtatatccattgtttctctgaagtatacagcaactgcagctacatcaatctcttcggcattgggttgagaagttctaagcagtaattgcattttactgtatcatctatttgtttgtaactactgggagttattaattccttgtttctctgttgctctgtcaaattctctgtaacattagagttatactaaaacattaagtttgctttcgaaataataaaaacatttataatacagaga

SEQ ID NO: 114138 - DNA, 94 bp, Zea Mays
ttttatttattcataacttaatattgttcgtatatacttcgtctgtcctgaaaaggttcgaacactgctatcggcggtggtacatatttacggc

SEQ ID NO: 114139 - DNA, 2024 bp, Zea Mays
tatatatctactacttattaagacactaagagtagcctgtcgttctgccttcgatcgatctcgaccgtccacgtccggctcgctcgttcctcccatctgctcaaccgtccgcccacacgaactcgtcggttcgtcacctcattctcgacgcccaccttgcttccacgccctcacaaaactcacggaggccattgtcatcggcgcccttccgcctcatcctttccacgcccactactcttgccccctcccacgacctcaactctgccatggcacctcttcacgaagtattcctcctccacgacgcccttgccctccagtggtcgacgcctccacctcgagcacacctgcctcatgcccgcggcctaatctgctcaactgagggagagcgaggtggtggtagcacgtcgacaattcggtcgggagtcgacactcgggcttggggtatcgtctcgcttgcccgtagcccctttgcttcttgccatccggcttctcggcggcggagaagaggaggggaatggcgcaccgactgttgtgggacgtgcaggcgaacgggtgggagcgatcaaatttcaccatcgtctgcgagtcatgcctcggcgacaaaccctacgtccagatggatacagaggagatgcggtttcagggtttgaacgttactaattatgcttctcttgtcatgatgggggactatgggaagtcaatcaaagatctggccctcgctcgcatccctactgtcagtgagagggggttctaggtgatggctaatgccctggtcctaaagaagcttaggcatatgactattgtctcctacccgggactcatggatcttgctcttgcatctgttgccaagtttagcccaagtttgaggcttgttaacctcaagaagtgcagcaaggtctcagacggatgtctgaaggaatttacataatcatctaaggcctggagagtttgcagatcgaggaatgcagcaaggttactcttacgggcattattgctttcttcctcaactgcagcccaaagttcaagtccctctctctgtccaagtgcatcgagatcaaggacatatgctctgcatctgcacagcttccagtatgcaaatcgcttcggtccctggccatcaaggattgctcaggcttcaccgacaccagccttcctatggtgggcatgttctgtcctcagctggagaacatcaatttgagtggccttagtgcaatcaccgacaatggcttccttccactaatgaagagctcggacagtgggctggtcgacattgatttgaacagctgcgagaatctcacggtcacgaacgcggctgtttctgccttggttaaggcccatgacgcttcccttgccacctcagtctcgagggatgcagcaagatcactgatgcaagcctgttcgccatctgtgagagctgcagccagctcatcgagctcggcctttcgaactgcatggtcagtgactacaacgtcgcggtcttggaagcgacgaagcagctcaggctgtgtgtcctcttgctgtgtggctgtatgaaggtcacccagaagagcgtgagcttgaagcccttcatcaaacgtttctaaggatatagagttcatgaaaaagaaacttaaggaccttggtaagccaatgaagaggagcaatgataagctgctcaaaattgagcatgaattatgtgagaggattgatccagcataatgtcgaggagactggagactaaacttggaggtgctactgaaggatgtgactttgagtcaaagggtaaaagtgataatgagatgtgtgtgttgtattttcattcctcgggacaataatgttatttgtaggtagaagttattgtacatatgttatgtgttttctgcctgatcgtcgtttatgcttgcctcttaaagtaacaagtagcacatggagagcttgaattgaattcaagcttggatatgattggaaaatatttgtattagatcacctagaagggtgattgatgcttgttattggccaagcaggtaggtatcacatttgtcttt

SEQ ID NO: 114140 - DNA, 944 bp, Zea Mays
gtccgtcagttatttctcttcctcctccaaaccaccgatgtcgctaccggttctatccctgcgctgccattgctcgtccgcatcctccttggatttccctcccaggctgatgtgagctgtgcaggaaggttagggttttctgatgcgctcatacatggggcagcaagaagatgggatgtctgatggcttgtacacttacaagcatcaccgcgagcgaggagctgatatccacaccatctttgtgaagaagagcaaattcaggattctgctgtcatttatcggcacaacgttccttcttgtgtctgtttgctgcgccctgttatcgaaggatggtttatgtctttgttccctttggagcatttcatttgccagtgtaattgcgaaatgcctgcgatgtgaccctgtgaagaaagagtcattggtgatcatgccgacttttggaattcaattagagcaacacttttggagtggaagagttcatcgcaaatttgtgcccattggcaagattctaagaccagtgctgaatgagcatgtgacccctgtctcatgctactggagcttggccttgcttgtacgcgaagaatatgagctcatgcttgttttcaagagcttgaatccaccagtcaagatgttggttccaatctggaaagcgttatgtgcattcgtagactccaatacgctgggcaattctgcattgcctcaatccacatgattacatgaacatgcttaaacaagttggtggctgtgtgcagccctgatgataattcgaacatatggttcgctgaagactttgctgactgacaacataatgtttagtttcgatacaaatgatgatggaatgtacggaatgttaccgacactggggctattacgtctcacgtggagtgtgaattgtgaaaggatcgtgatgcttaagagtggatgaattgagattctctaaaaaa

SEQ ID NO: 114141 - DNA, 1005 bp, Zea Mays
gtccgtcagttatttctcttcctcctccaaaccaccgatgtcgctaccggttctatccctgcgctgccattgctcgtccgcatcctccttggatttccctcccaggggagacgaggagggcgcataaaattcacaagaactgtttttgatagattcacaatttgccgtctgagcatgcgaaggctgatgtgagctgtgcaggaaggttagggttttctgatgcgctcatacatggggcagcaagaagatgggatgtctgatggcttgtacacttacaagcatcaccgcgagcgaggagctgatatccacaccatctttgtgaagaagagcaaattcaggattctgctgtcatttatcggcacaacgttccttcttgtgtctgtttgctgcgccctgttatcgaaggatggtttatgtctttgttccctttggagcatttcatttgccagtgtaattgcgaaatgcctgcgatgtgaccctgtgaagaaagagtcattggtgatcatgccgacttttggaattcaattagagcaacacttttggagtggaagagttcatcgcaaatttgtgcccattggcaagattctaagaccagtgctgaatgagcatgtgacccctgtctcatgctactggagcttggccttgcttgtacgcgaagaatatgagctcatgcttgttttcaagagcttgaatccaccagtcaagatgttggttccaatctggaaagcgttatgtgcattcgtagactccaatacgctgggcaattctgcattgcctcaatccacatgattacatgaacatgcttaaacaagttggtggctgtgtgcagccctgatgataattcgaacatatggttcgctgaagactttgctgactgacaacataatgtttagtttcgatacaaatgatgatggaatgtacggaatgttaccgacactggggctattacgtctcacgtggagtgtgaattgtgaaaggatcgtgatgcttaagagtggatgaatt

SEQ ID NO: 114142 - DNA, 958 bp, Zea Mays
gtccgtcagttatttctcttcctcctccaaaccaccgatgtcgctaccggttctatccctgcgctgccattgctcgtccgcatcctccttggatttccctcccagattcacaatttgccgtctgagcatgcgaaggctgatgtgagctgtgcaggaaggttagggttttctgatgcgctcatacatggggcagcaagaagatgggatgtctgatggcttgtacacttacaagcatcaccgcgagcgaggagctgatatccacaccatctttgtgaagaagagcaaattcaggattctgctgtcatttatcggcacaacgttccttcttgtgtctgtttgctgcgccctgttatcgaaggatggtttatgtctttgttccctttggagcatttcatttgccagtgtaattgcgaaatgcctgcgatgtgaccctgtgaagaaagagtcattggtgatcatgccgacttttggaattcaattagagcaacacttttggagtggaagagttcatcgcaaatttgtgcccattggcaagattctaagaccagtgctgaatgagcatgtgacccctgtctcatgctactggagcttggccttgcttgtacgcgaagaatatgagctcatgcttgttttcaagagcttgaatccaccagtcaagatgttggttccaatctggaaagcgttatgtgcattcgtagactccaatacgctgggcaattctgcattgcctcaatccacatgattacatgaacatgcttaaacaagttggtggctgtgtgcagccctgatgataattcgaacatatggttcgctgaagactttgctgactgacaacataatgtttagtttcgatacaaatgatgatggaatgtacggaatgttaccgacactggggctattacgtctcacgtggagtgtgaattgtgaaaggatcgtgatgcttaagagtggatgaatt

SEQ ID NO: 114143 - DNA, 909 bp, Zea Mays
gtccgtcagttatttctcttcctcctccaaaccaccgatgtcgctaccggttctatccctgcgctgccattgctcgtccgcatcctccttggatttccctcccaggaaggttagggttttctgatgcgctcatacatggggcagcaagaagatgggatgtctgatggcttgtacacttacaagcatcaccgcgagcgaggagctgatatccacaccatctttgtgaagaagagcaaattcaggattctgctgtcatttatcggcacaacgttccttcttgtgtctgtttgctgcgccctgttatcgaaggatggtttatgtctttgttccctttggagcatttcatttgccagtgtaattgcgaaatgcctgcgatgtgaccctgtgaagaaagagtcattggtgatcatgccgacttttggaattcaattagagcaacacttttggagtggaagagttcatcgcaaatttgtgcccattggcaagattctaagaccagtgctgaatgagcatgtgacccctgtctcatgctactggagcttggccttgcttgtacgcgaagaatatgagctcatgcttgttttcaagagcttgaatccaccagtcaagatgttggttccaatctggaaagcgttatgtgcattcgtagactccaatacgctgggcaattctgcattgcctcaatccacatgattacatgaacatgcttaaacaagttggtggctgtgtgcagccctgatgataattcgaacatatggttcgctgaagactttgctgactgacaacataatgtttagtttcgatacaaatgatgatggaatgtacggaatgttaccgacactggggctattacgtctcacgtggagtgtgaattgtgaaaggatcgtgatgcttaagagtggatgaatt

SEQ ID NO: 114144 - DNA, 948 bp, Zea Mays
gtccgtcagttatttctcttcctcctccaaaccaccgatgtcgctaccggttctatccctgcgctgccattgctcgtccgcatcctccttggatttccctcccaggtacgcctactccatgcgcacgcattcctattccgattcctgcacattccgtggaccgatttggaaaagctgaactggtacatagcgtatctttctctcaccagtctgctgacggtgatgtttataagcgaatctgtactcatatagatttcttgtcttcttacatcgtcaactgtccagctagagatttctgttttcttagatatcttctgtcttcttaaggggagacgaggagggcgcataaaattcacaagaactgtttttgatagattcacaatttgccgtctgagcatgcgaaggctgatgtgagctgtgcaggaaggttagggttttctgatgcgctcatacatggggcagcaagaagatgggatgtctgatggcttgtacacttacaagcatcaccgcgagcgaggagctgatatccacaccatctttgtgaagaagagcaaattcaggattctgctgtcatttatcggcacaacgttccttcttgtgtctgtttgctgcgccctgttatcgaagtgctgcaaaagagagagaaaaattacatttcttggtatccatgttgaaaatgagtacaggaaagttccgtttcacagtggaagagttcatcgcaaatttgtgcccattggcaagattctaagaccagtgctgaatgagcatgtgacccctgtctcatgctactggagcttggccttgcttgtacgcgaagaatatgagctcatgcttgttttcaagagcttgaatccaccagtcaagatgttggttccaatctggaaagcgttatgtgcattcgtagactccaatacgctgggcaattctgcattgcctcaatccacatga

SEQ ID NO: 114145 - DNA, 2490 bp, Zea Mays
ctttttacagccagcgcgcgtggaggcctcctctcctgagccagcgcgtggagctctcccagacggccgccctcctcagccagctgcccacaacagtcagccgaccggcacagaccagcagccagtgcgagtgtggtgtgcccgtcaagtgcggcaagtgcggcagggcgaccgtcgacgcgggcaccctacgcaagccttcttctccagggcgtcgtttgccagcgacgagcaccaccaggtgctttgtgctaggatagcagtgctatgtcaaaagctccagatgatcatttgcaagcaactgagcaggaaggaagtgtccattcaagtcaacaagcagggcaacaacatgtgaatacagcagaccagttctcaaaaacagaactaactgaaggttcaaaaattgaacagcctgtccaagtagagcaacagagttcccacctacaacaagcatatccagaaattcaactacagcaggctgaaacagatagcttccagttagctgaaaaagaaacagggtattttggtcaacagagttctgcaggcgccaaggtggatgtagcccagccttcagtagttcagcagaatgcaaagcaaactgttggtcaacaagcatcatctggtacccaggatacaaagaaaggaccatcgataccatttaatatgttaattccaatcctacaggcacatcttgacagagacaaagatatgcagcttcaaactgtttgggcaaaacttaggcgtaatgaagtcaacaaagatgatttcttaagagttatcaggaatattgttggggatcaaatgctcaagcaggcagctcataaagtttttgtacagatgcaagcacaggcgcaaagaaatagccaggcaaattcaagtcagcagtctttattctctcaactttctgcacagcagatggcttccagtggttcagcacagttacatgatcagaaaattcggccacctggaccacccaaccaaggccagaaaaaccaggtgtcatcttcacctcaggcttttgcaccaccatcaggcacccaaccgcagaatagtgtacactatcttgctcatgataaccctaaccaaaaccctgatgcaaagggaacaaatgttgtaccaaatcaaccatctagaatgaacacatcagttccattgcaaacaaagaacaaacagcatcaaccaacacagttgcagcaggcctcacaacaaatatatggagcaagtaatcctggtgcccaggcttaccctcggtcaatcactggttctcttagatcaccgagtcttgttccagaaacacagccatccatgcatgctcctggaatggctcctgcaaaaatggttcctcctcctactcatccaatgatgcagcacaatgcaactgcatggcaaatgcatcaaaacagggaattgaaaactaacgctccccctccaaatgctaatatgaagcaaaattctgaatctgttggcaaagtacgcatggctggcacaggaaattcttcagctaaaggaaagcagggaactcctaactctacaccaaatgctagtggaggtacaaagagtagcaagaaatcgggtgggcagaagaaatcattggaagcagcaggctctatgcaaccttcaagcaaaaagcagaagacatctggaggctcccaggaacaaagtatcgatgaactaaatgatgtcacagccgctagtggtgttaatattagggctgatggcagtggtgctacagaattggaaaaagaaaaagaagaaagtcgcccaaagaacgtcaagcccaacaaggaagaagatgataaaatgagggcgaatgctgcaaacgtcgctgcccggcaagcagttggaggaagtgatatgctctcaaagtggcagttgatggctgagcaagccagacagaagcgagaaggcattgatgtgtctgctgcttcacagccaggcagagggccaggttccaggcaattatccaaatttgggaaaggtcctggtgagcacccagaaggttcaaagaggagccattcgatggcattcggaactggaggcatgaaaagacccggcaggacagcgtttgctggtccacagcgattgatctccgtgaaggatgtcatttgtgcccttgagagggagcctcagatgacaaaatcaaggctaatctaccggctgcacgagcgattgcctgtagattctaccgtagattagaccggaatagtcatatactttattgtgggcatgcccaattgcccttgcatggtattgaacagcgaagaagcatacccgccactcccatttgttgtgctttggagcggcactgtatattggtgtaaaatttgtatcgcaaaggcggcgaattaccagcaaaaaagggtttctgtacaaaattcactgtaagcggggtctggcatttgccttttctgcaaccacgtctgtgaggttatttctagcagactactcatctcaatatctatatttttaagggttaattagatttttgcc

SEQ ID NO: 114146 - DNA, 1808 bp, Zea Mays
gtacacccccggtggtctctgtgtcaagtctcaactctcaagtggacagggcgaccgccgaccccgacgcctacactacaccctacccttctacaggccggcgaactcaagtctcaagtgcggcagggcgaccgccgacgcgggcactctacgcaagccttcttctctagggcgtcgtttgccggcgacgagcaccacgaggtactttgtgctaggatagcagtgctatgtcaaaagctccagatgatcatttacaagcaactgagcaggaaggaagtgtccatccaagtcaacaagcagggcaacaacatgtgaatgcagcataccagttctcgaaaacagaactaactgaaggttcaaaaaatgaacagcctgtccaagtagagcaactgagttcccacctacaacaagcatatccagaaattcaactacagcaggctgaaacagatagcttccagttagctgaaaaagaaacagggtattttggtcaacagagttttgcaggcgccaaggtggatgtagcccagccttcagtagttcagcagaatgtaaagcaaactgttggtcaacaagcatcatctggtacccaggatacaaggaaaggaccatcgataccatttaatatgttaattccaatcctacaggcacatcttgacagagacaaagatatgcagcttcaaactgtttgggcaaaacttaggcgtaatgaagtcaacaaagatgatttcttaagagttaccgtgaatattgttggggatcaaatgctcaagcaggcagctcataaagtttttgtacagatgcaagcacagatgcaaagaaatagccaggcaaattcaagtcagcagtctttattctctcaactttctgcacagcagatggcttccagtggttcagcacagttacatgatcagaaaattcggccacctggaccacccaaccaaggccagaaaaaccaggtgtcatcttcacctcaggcttttgcaccaccatcaggtacccaaccgcagaatagtgtacactatcttgctcatgataaccctaaccaaaaccctgatgcaaagggaacaaatgttgtaccaaatcaaccatctagaatgaacacatcagttccattgcaaacaaaggacaaacagcatcaaccaacacagttgcagcaggcctcacaacaaatatatggagcaaataatcctggtgcccaggcttaccctcggtcaatcactggttctcttagatcaccgagtcctgttccagaaacacagccatccatgcatgctcctggaatggctcctgcaaaaatggttcctcctcctactcatccaatgatgcagcacaatgcaactgcatggaaaatgcatcaaaacagggaattgaaaactaacgctccccctccaaatgctaatatgaagcaaaattctgaatctgttggcaaagtgcgcatggctggcacaggaaattcttcagctaaaggaaagcagggaactcctaactctacaccgaatgctagtggaggtacaaagagtagcaagaaatcgggcgggcagaagaaatcattggaagcagcaggctctatgcaaccttcaagcaaaaagcagaagaaatctggagccccccaggaacaaagtatcgatgaactaaatgatgtcacagccgctagtggtgttaatattagggaagaggaagaacagttactgtctgcccctaaggaagagagctttgcttcacaagaagcacgaagaattgcacaggaagaagaaaatattttcctacgtaagggtccacttctgaggaaactagcagaaatcggttag

SEQ ID NO: 114147 - DNA, 1696 bp, Zea Mays
ccccccttcactttctcctcctcgtgaagcgagctctccacgcccctgcgattccatttccatcctgcccgctcccaacttcaaaacggccgcggcgcagatccacacgcacgggcaggcaggcaggcatacggacaggaccgccgccgcagctttcaaatcccggggcggattaccctgcagacggagcccacagcccagcaccgcagcagtccaccgggatctcgccttcgtcgccccgtgtcgcgtcgcgccggtggccgagcctggggacgctagctagagcctactactgtagaccgtagagccatggggaacagcatctaccggttcctatgcggcctgtgcgcgccctcgtcgtcggagcacgggctccacggcgcgcaccccgccgtcgccgcgctcggccgcgacgtcctcagcttccagagcacctcgcaggttccggacgagctgagccggcacgtcgtctcctccaagaaagcgcaggcgaattggtacaagaagctgctggtggcatggaagaaagcccggccgcctccgaagacgcccgaggaagccgcggccttcgttgtgcagacgctcaagaaccatcagaaagcagatgtggagggcctgttgtctttctacggcctgccgcatccgaacgcggcggcagcagcagcaggcgcgcccgccgctcgcccgccgcccaagaaggcccagcagggcgccaagttcgagctgcacacgctccccattgaccccaagtctgtggccgacggcgacacggtgaacgtgtacgtcgacgcggcggacccgcgggaggccggcagcgtgccccgcgaggtgcagaaggctgcggcggagcgggccagggcgcgggctgccaaggactaccagaaggccgacgcgctgcagaaggtcatagtcgacgcagggtacaggccggttcctaacgcgagaggcgaggaggtgctggcgaagaagtacaggatcaggctgagggggatcgatgcgcccgagagcgcgatgccgtatggcaaggaagccaaggaggcgctgctcaaacttgtccaggggaagagcttgaaggtctacgtgtacgacgaggaccggtacggtagatgcgtcggagacatctactgcgacggggtatttgtgcaggagcaaatgctgaagaagggtttcgcgtggcactacaccgcctacgatcaacgcccggagctggccaagtgggagaaacaagcgcagaccggccggaagggcctgtgggcggcgtcgaagccacagaaaccatgggagtggaggaaggacaagcgcaacgggacagcatgaacaaacccccccgtgcatggttcagtgtgtgtgtgtccatgaacacctgatacattgatgtacctgcagacttttaggacggtatgtgtcggggattcagtagcggtgcagtatggttgtgtgtacactgtaatagacgattccttacagttacagggatgtgaagcaggacaagagagattggcgtgatccctaatttcgtatggggattcgtcgtgcaactgtatcaaatgcattgtaccatcatttacacccatgtgacctgtcatcatttacactcatgtgacctgttgtgaaggagagtagctgagattgtgacctgtgttgtatgcaaagcaaatgttgatggtgggagcagttccacgtagccgaaccaagt

SEQ ID NO: 114148 - DNA, 1785 bp, Zea Mays
ccccccttcactttctcctcctcgtgaagcgagctctccacgcccctgcgattccatttccatcctgcccgctcccaacttcaaaacggccgcggcgcagatccacacgcacgggcaggcaggcaggcatacggacaggaccgccgccgcagctttcaaatcccggggcggattaccctgcagacggagcccacagcccagcaccgcagcagtccaccgggatctcgccttcgtcgccccgtgtcgcgtcgcgccggtggccgagcctggggacgctagctagagcctactactgtagaccgtagagccatggggaacagcatctaccggttcctatgcggcctgtgcgcgccctcgtcgtcggagcacgggctccacggcgcgcaccccgccgtcgccgcgctcggccgcgacgtcctcagcttccagagcacctcgcaggttccggacgagctgagccggcacgtcgtctcctccaagaaagcgcaggcgaattggtacaagaagctgctggtggcatggaagaaagcccggccgcctccgaagacgcccgaggaagccgcggccttcgttgtgcagacgctcaagaaccatcagaaagcagatgtggagggcctgttgtctttctacggcctgccgcatccgaacgcggcggcagcagcagcaggcgcgcccgccgctcgcccgccgcccaagaaggcccagcagggcgccaagttcgagctgcacacgctccccattgaccccaagtctgtggccgacggcgacacggtgaacgtgtacgtcgacgcggcggacccgcgggaggccggcagcgtgccccgcgaggtgcagaaggctgcggcggagcgggccagggcgcgggctgccaaggactaccagaaggccgacgcgctgcagaaggtcatagtcgacgcagggtacaggccggttcctaacgcgagaggcgaggaggtgctggcgaagaagtacaggatcaggctgagggggatcgatgcgcccgagagcgcgatgccgtatggcaaggaagccaaggaggcgctgctcaaacttgtccaggggaagagcttgaaggtctacgtgtacgacgaggaccggtacggtagatgcgtcggagacatctactgcgacggggtatttgtgcaggagcaaatgctgaagaagggtttcgcgtggcactacaccgcctacgatcaacgcccggagctggccaaggttagactagcgctcgtttgacgccacacagatatgccaatcacttgactggacaaaagagaaaaaacaccgtacaccttacgaactataccctggcctgaaataagggtccaatgcattgtatgatatctgaaatagaaatgcccttcttctttaaccaacagtgggagaaacaagcgcagaccggccggaagggcctgtgggcggcgtcgaagccacagaaaccatgggagtggaggaaggacaagcgcaacgggacagcatgaacaaacccccccgtgcatggttcagtgtgtgtgtgtccatgaacacctgatacattgatgtacctgcagacttttaggacggtatgtgtcggggattcagtagcggtgcagtatggttgtgtgtacactgtaatagacgattccttacagttacagggatgtgaagcaggacaagagagattggcgtgatccctaatttcgtatggggattcgtcgtgcaactgtatcaaatgcattgtaccatcatttacacccatgtgacctgtcatcatttacactcatgtgacctgttgtgaaggagagt

SEQ ID NO: 114149 - DNA, 1017 bp, Zea Mays
atgcaccaacacatgccacttatttatgtgaagctttatatgtaccagatatgtagagcattggcttacattcatgatgaaattgtttggtacttagaaattgattttcaaacttcagtacaggtgaacccacacacccaccagcttaaactatgtgactttggtagtgcaaaagttctggtcaagggggaaccaaacatatcatacatctgctcgcgatactatagggctccagagctcatatttggtgccactgagtataccacagcgattgacatttggtctgctggttgtgttcttgctgagcttatgctagggcaggtccttggtactccaacaagggaagaaattaaatgcatgaacccgaattgcacagagtttaagttcccacaaatcaaagcacacccatggcacaaggtattcaacaaaaggatgccgccagaagctgttgatctggtctctcggctactccagtactccccaaatctgagatgcactgctgtggaggcgcttgtccacccattctttgacgagcttcgagatcctaatactcgtcttccaaatggccgcttcctgccaccccttttcaacttcaagcctcacgaattgaaaggagtcccagcagacattgttgcgagattggttccagaacatgcgaagaagcaatgctcttatgttggatcgtgagatgaccgtgccttgggactggaacctgaggttgcaatcgtgcatttcccctggtatgttggatgatcttgaggcatgcgagcctgtcgttgaagatgcaaggttacctactttacgacgtacgccaatgcgacctgtgtagctgtgagtagtctaatgttgcagtgacatgtaatggcgcacccccgtcctactaacagatgcttactggagattgccatagctgatcttgtaatttgttatagggcagtatgaatatatttatggtagcttgaatctatttgtggattcacttcgtttttccatgtttccttgtctccagacctggac

SEQ ID NO: 114150 - DNA, 1623 bp, Zea Mays
ccatccaactcacacacaggctcaccccaccaacagcaagcgaaaatctcccgatcccctctagtctccgcggcgaagatgtcggggcgcggcaagggcgggaagggcctgggcaagggcggagcgaagcgccaccggaaggtgctccgcgacaacatccaggggatcacgaagccggcgatccggcggctggcgcgcaggggcggcgtgaagcgcatctccgggctcatctacgaggagacccgcggcgtcctcaagatcttcctggagaacgtgatccgcgacgccgtcacctacaccgagcacgcgcgccgcaagaccgtcacagccatggacgtcgtctacgcgctcaagcgccagggccgcaccctctacggcttcggcggctaggctatgccggtcgcgctcgcgcctcgctgtcgtcgctgcggttcttgtttctgcaattcgcaaggtgtggcttgacggggaaaatgctggttaatgtagcactagatcaagcatgttgtgcgtgtctgaagaaatgccaattgtgacttgctgtttgttcaaacatgttccgtttcttcacatatcaacacccgtcgtccctgcgtgtgttacaaatgtagttaacttagtcatgatgtgtcttgcgcgcattccatctctgtccaatatgcttaatgtatttctgtactaggtaatccattacctctgtttcattttatttcaatgacgaactagcttattggatttcgtatgtccaaagtaaatatttcgcttacagggcctcattggagcacgtgaacggtatcccccccaccactgtttgtacacttttcttgtggaattaaactgttttctgtgaagttcttgaacaatttctgtatttttttctttctaaacaggtcgttagctgctgattatatgttgcaatggatgcgttgagtactagcctctaggatatcactggcttggtgaaccgcacacacaagactgaactattcatccgaagagagtcaaatttaccagtgattctcaaagttgtttgggagtgtcatctaagcatcaagagtttcaaaatacaattttgactatctaaaattataacaggtcttattccatgatatattttgtttttttctaaatcagggctactagtttaaatgaaaatccaatataacatttaaagaacaattttagtttcaaaattacaaaatctataatcccatgtacaaataaaacgtgtcgtacttaaattttaaatttcatttaaaaaaccatatgatttttggaggtttctaagttcttcatttaaattgataaaatagagaaaaaatcaacttgaagactaaatgtcgttcttacgtagagcaaattttagagcaactcctatagaaactctaaacaacgaaataaattgaaatgtaggacctaaatttaaaaggagcctcattttaataaaatcaatctaaacattttaggacccaactttaagggcagcatatttgggactcataagcatggtcctatacagttccgctccttccaacctccacggaaatttcttgcttctctgccgctcgtacaattgttcaattcaattgacttcatctataattattcggttcatttgacttc

SEQ ID NO: 114151 - DNA, 353 bp, Zea Mays
acacacaggctcaccccaccaacagcaaggcgaagatgtcggggcgcggcaagggcgggaagggcctgggcaagggcggagcgaagcgccaccggaaggtgctccgcgacaacatccaggggatcacgaagccggcgatccggcggctggcgcgcaggggcggcgtgaagcgcatctccgggctcatctacgaggagacccgcggcgtcctcaagatcttcctggagaacgtgatccgcgacgccgtcacctacaccgagcacgcgcgccgcaagaccgtcacagccatggacgtcgtctacgcgctcaagcgccagggccgcaccctctacggcttcggcggctaggctatg

SEQ ID NO: 114152 - DNA, 267 bp, Zea Mays
atgtcggggcgcggcaagggcgggaagggcctgggcaagggcggagcgaagcgccaccggaaggtgctccgcgacaacatccaggggatcacgaagccggcgatccggcggctggcgcgcaggggcggcgtgaagcgcatctccgggctcatctacgaggagacccgcggcgtcctcaagatcttcctggagaacaccgtcacagccatggacgtcgtctacgcgctcaagcgccagggccgcaccctctacggcttcggcggctag

SEQ ID NO: 114153 - DNA, 261 bp, Zea Mays
atgtcggggcgcggcaagggcgggaagggcctgggcaagggcggaccggcgatccggcggctggcgcgcaggggcggcgtgaagcgcatctccgggctcatctacgaggagacccgcggcgtcctcaagatcttcctggagaacgtgatccgcgacgccgtcacctacaccgagcacgcgcgccgcaagaccgtcacagccatggacgtcgtctacgcgctcaagcgccagggccgcaccctctacggcttcggcggctag

SEQ ID NO: 114154 - DNA, 951 bp, Zea Mays
ggtaccatggattctaggtattacacaaatctcctggttaatggtattgaagaatctcaagcaactcgtagtgatgtaagaatccaacatggtcgtgcaacagccaagagttctcagggtagaagcaaaaattttagagatgaggaggacattcttcttgtgtcagcttggctgaatgtgggcatggatcctattcaaggagttgatcaaacacatggcacactatggagaaggatacatgaatatttcaatgcaaacaagaagtttgactcaaatcgttctgaagtatctttaatgaatcgttggtctggtatacaacatgatgtgaatctgttttgtggatgtctgtctagggttgaagctaggaatcacagtggttggtcaattgatgacaaggtcgcaaatgcatgtgtaatgttcaaggccgaagacccaaaggataagaagttttcatacctgcattgctggaaaatcttgaaggacaagcccaagtggatggataggcggaaggaaattggaagtgcaaaaaaatcagccactaagaaacagaagacaacgacaaattcttctccagcatcagttgcaaatgcaattgccgtagatgcccctcttgggggtgctgatcatgatgaaccatcatgtaggcccgacggtaagaagaaggagaaacaaaagctacgacaacgttcgtccatggaagttgtagactatctaattgcaaagaagaaagattctgaccttgaaaaggacttgaagaaagaggagaggtgcaataaagcctttgctctacaggaagaaaggatcaaattggacaaagaaaagtttgcgttccaaagacagctcgaagaggacagaataattggtttggaccttagcaccatgaactataaacaacagcagtattatgaagatcgtcagaacgagattcttgcaagacgtttcaatatctag

SEQ ID NO: 114155 - DNA, 851 bp, Zea Mays
gtgaggagggactagggagacagggggagggaacaagccgggcgcagtcacggcatcaaacacgagccgcggcatgggcaacagcctgcggtgctgcctggcgtgcgtgctgccgtgcggcgcgctggacctggtgcggatcgtgcacctcagcggccgcgtcgacgagtacggccgcgccgtgtcggccggggaggtgctggcggcgcaccccaaccacgtgctcagcaggccctgctcgtcgccgcagggggtcgtgcgcaggatcctcatcgtgtcgccggactcggagctcgagcgcggggagatctacttcctcatcccggccgcgtccgtgccggacgccaagaagggcggcggcggggctagcacgccaggccgccacgtgcgcagcaagtccgaaggcagcgtcgtcgccgccgccgtgaccgaccggcagctggggctcggcgccgagtcgccggaggaggcggcggccgcgcccgcggccaagaagaagaatcagcagcagcacaagagggccgccgcgcagcagcaccggcggcgcatgagcaccggcagccacgccgcgccctggcagccgcacctcgcctgcatcgcggaggacctctgagtgccttgccgctaccggttcggcgagcacccgtgtgattctgccgccatcgatggatcaagtccgttttctttctcatcaactagtgtctgcgtcgtaaatactcccggtttcctcctccacgacccattttcccttccgtttgcaagtgtaaattcggccgtcgcgtatgaacttcctctgtcgatttttgagcgtcttttgcaacttcgcatcagttcaaaccaaaacctgtata

SEQ ID NO: 114156 - DNA, 565 bp, Zea Mays
gaggcgattccttaactgacgctgcgactccgatcacccatcaccgctgccctctctcctctgcctacgccggcgccgacgccggggctagaccgtcggggagtcatgtcgcggtctttgagcatgagaggtagcatgaggtcgcgccgcgacctacctcctcccgggaagacaattgaaaggcttgagagtatggttgatggaggaaatttctatgaagctcaacaaatgtacaagtcaaccagcgcaaggtatattgctgtccataagtattcagaagccttggacatccttcaatcaggcgctttggtacaattgaagcttggacaggttacctgtggtggtgaacttgctgtcctctttgttgacatcctcatcacaggagagtttccatatagtgaacaattttttgatcgtatcagaaagatatatgaggcattcccaaggataaccgttccacatttccttggagaggactatgatgatgagggacataaattgtctgaagctatttctgctgccaaagtgcgcgcagagagttgttcatcattcctgaaagctgcca

SEQ ID NO: 114157 - DNA, 390 bp, Zea Mays
atggagacagttcaagaaactttggatacactgataccaatgctccccaaaatgcaatatttctgctttaatccagatgtaactggtcctgctatctgtcttaagttggaagctgcaactgatgagtacattcagaagaattttctagctttcaagaatctttgtgagcttctggtcccaagcactctagcatttgtaacatgtgacactgtttacaggcttgagagagatgcttatcctctttttaggacacttcgacagaagtataagacaagcacagatcgtgacgctgtgtttcaggagttactggacgaaatagctgcaaaattttacaatatacagcgccagaaccctttagaaggacttttcagcgaaatgttcaggatataa

SEQ ID NO: 114158 - DNA, 704 bp, Zea Mays
cagccaaactgaaaggattcagataagcaggccatatcataggccccatccagttcccgctcagcagtcaccacccatcattaatcatcaaaccaaagaaaaaggcactacttagccgtggggcatgcacagcttctgtgcaaaattccaattgctgtaaaattggatcagcatttcaaaaaaaaaacatttttatggtttcctatcttcttttgctcctcaatttactcctcccttcgaacttcttagacccacttttgcattttcctctctgcttggttttcttctgcgccttgttgcccttcttcctctcgtccaagttgctcccatccccatcggaagcttcgccatcagaatctccgaacccagtgagcttctcgtactcctcttcatcgatgtctccacgtttgagcttcttcagaagccggtactcgtgcgccagctcatccaggtcctccttggtttggattgactgacgctgcttgcccgtcttcttccgctttggcttctccggcttctctggaggtctcttcctctccggctttggattttgagcctcctcttctgctttccttttcagcgccttcttgcgttgtttttctcgagctttatccctgcagtgaagcaaaacagaaaatcatgtcaaccccaatgtgatactaccacacaaaaagaactagtggcaccatctttcgactacgaag

SEQ ID NO: 114159 - DNA, 1329 bp, Zea Mays
ctcgaacggtcccaaaccctaggcctaggcgcgaccagagtccatgtcggggtcttacggatccgacgactaccgcggcggcggcggcggcggcgtggtggtggaggcgggggcagaggaggatacaatcaaagtggtggtagtgaccgtggttttgatgaccaccgtggtggcagaggtggcagctatggaggacgagaccaggagaaccaaaagggtagtgaaggtggctacaatgctggtggttatggacaaactcctcaaggtcctccttcctacggtggtcctgcaggtgactatgcagcacctacgagctcttatggaggcaacaatgcttatggttcagaatctgcagtgccgcctcctaatagctacagtggtggcccaggctcatacccaccaagctatggtgccccgcctccacaccaatatggtggtgccccaggcgggcaaggcggcctgcctcctacatatgctggtggatatggtggtcagtccatgcctgggggtggaggatctgggggtgcaccgccaccttatcgtggcggcgctagtgtttatactggtagtgctggtcctgaaccagctggaaaagtcaagcaatgtgatgaaaattgtgacgagacatgtgacaacgcaaggatttacatatcaaatttgcctcctgatgtcactgttgaggaattacaggagctatttggaggaatcggccaggttgggaggatcaagcaaaaacgtggttacaaagaccagtggccctggaacataaaaatctacactgatgactctggaaaagccaaaggagatgcttgccttgcctatgaagatccttctgctgctcattcagctggtggattttacaataattatgacatgagaggctacaaaatcagcgttacgatggctgaaaaatcagcacccagagcagcaccttcttatggtcatggcggtggccgcggtggtggatatggtggaggtggacgcagggataattacagagatggtgggggccatggacccaatagaaaccagggtggtggttcgcgttcccgaccatactgaaagcaactaatattcttactgtgattgttgcctgtgagaaaccatttctattcctgttctacggatttgtactcattcaggcgcataaggtaggttgtctgcttcccttattagacttgtgtcaaattgtcatacaccagtcttggtcggacttatgtttgtcctgaagtgattgatctatgttgtatgaatttttgcatagaggcagatggggatataagctccaaatgctggtaggtttgtgatactatttcaggtgagtgccga

SEQ ID NO: 114160 - DNA, 1772 bp, Zea Mays
atggagggattacatgcaggcgtccacacccacggcgcggtgcacgttctgcctcccaccacccgccccgcccgcggccgcatccctcccgcggcagcaccatcaacgcgcaacggtcgcatccagtccctcccgcatcaacagtgtcgcagttcgcgcaatccatggtccacagttcacatcccagttcgcgcaatccatagtccacagttttcgcttaatccccggccgcatcccagttccatcccgcggcgcaatccattgactccctgccgcatcccagttccatcccggcagcatcccaggaacgcgcccgtgttctccaggagcaacagcacgagtaatggcaccgcggaggaggcggcaggggctggggaggagctgcccagtcccgtgaacggcgacacggcgccggtctttcctcgtcaggccggagacgcgctcttggacgacttgcagctgcaggagcagctcgcgttcctcaacgagggcggcgggaacccggcccaccagatccaggggttcgacggcgtggagtgtcggagccccggccccggtgatgccgatgggatgatcgcgttcggcctcgggtggcacaacgggggcccagcgcaccgcaggagctcgtcagtcaacgagatatgccttggcggcggcggcggcgatggtttcggttggaagccctgcctctactacgcgagcgggttctgcaagaacggcggcagctgcaggttcgtccacggcggcctctccgacgacgctgttgcgctcgctggcaccaagatggaggcagcggccgatcagcagcagcagtgccaggacttcctcatccgctccaagggccagcgcctcggccccgccgtcttcccctactcccccaccggctccctcccaggctcgccctccgccgctagcaagtgcctcagcttcctgctgcagcaacggcagcagcacgacagagccgcggcggccgcgtctctgatgctgggcggcggcgacgaggcgcacaagttcatggcccggccgcgcctggaccgtgccgacttcgccagcctgatgaatcccagctcgcgccagatttatctgaccttcccggccgacagcacgttccgcgaggaggacgtctccaactatttcagcatctacggtccagttcacgacgtgcgcatcccctaccagcagaagcgcatgttcgggttcgtcaccttcgtctatccagagaccgtgaagctcatcctggccaagggcaacccgcacttcatctgcgacacacgcgtgctcgtcaagccgtacaaggagaagggcaaggtccccgataagtacaggaagcagcagcaaggggacttctccggctacacgacgcccactggcgggctggacgcccgagatccctttgatctgcaccaactcggcgcgaggatgctgcagcattcgaacagcgccaacgagctgctcttgcgccggaagctggaggagcagcagcaggctgccgaacttcagcacgccattgagctccagagccgccgcctcatgggtctccagctgctcgacctcaaggctcgcgcagctgcgacagcagcagcggcatcggcactgccaacaccagttgtcaatgccttcgcgtccatccatcctttgagcaccatggcagtcgagtcgccactagagtctggagagcagctcaagctgagcagtgggtttgctctagaggggaagctcaacgggtggcgacaaggaagaatctgcttgcgaggcgagccctgacgccgctg

SEQ ID NO: 114161 - DNA, 657 bp, Zea Mays
ctttcttatttgctaataaaagttattggtgaactaggtcatggtcgtcttattttctatgtgcacaatcaggctcttaccttggttttatgtaggagcaatattggccacctagtgattttgatcacttattgtctgcaaaactgaagtatttagctaccagtgggaaattgttgaaggtgaatcggaagtacaggatagcacctagtttgctggaagacgtgcaaagagaacccttgaaattagggagtgatgctagtagaacccttacaagatcccaagtcgatgctgaattggtccgtatggcaactatgactgttgaggcggcggcggcagctgctgctcatgcagttgcagaggcagaggctatcatggcagaagctgaagcagctgctagggaagcagaagctgcggaagcagaggcccgagctgcacaggcctttgctgaagcagcagttttgacactgaagaacagaaatgctgcgaaattggtatagctcgagtccatgaatcttagatatgccctcttgtccttccacacgtagaatccagttccgtagctctgtatgcaactaattggttactaaaagaacctgaaatcagaagttttcacaaacacaccgacttattcaccgaagattatgatttccaaagtaa

SEQ ID NO: 114162 - DNA, 1491 bp, Zea Mays
atcatctaaaaaggctaatataataaaaaaaaactgcgcgcactgctgtcaccgcggcggagggaaaaatcgggcgtaccccggtgcccgttcaccgccgttcacgccgcgtgtgcgctctggctctgccgctctctctctctcctgcgcgtggcgcaactgccgtcctataccaggcgcccaggtctagcctcgtcggtgccttcgccaggtctttctcgggcccttcgccaacgacgagcgcccgctaggttagaaggtatgcattcgtgttcataatattgtatttgactaaaaagactgggcctacgcatgggggctccaaaacagaggtggacttctgaggaagaggctgctcttagagctggagtagccagacatggagttggaaattggcgcatgatattgaatgatccagaacttagctccacattgcgctaccgctcgaatgttgacctaaaggttaaatctattcactcgtttttacgtaagattgatttagtgaagggactgccatatttgggtattccttgaaatcatgtgtcttttggttttcaaatttctagattcatcttcaatcttaatgctcatatgttccttttttattaatcactacttaggacaaatggcgcaacatgaatgtaattgtcacttcatcgagtactcgtgacagggggagaacttccacgaggagaacccgagctgctcctaagaataatgaccaattgttggcaatgagcacaatcacttctgaggttgatgatgagattgttgatgtaaagcccatagtatcaatgtctgttgaaggatggaatacttcaaattcaaagaaatctcactcaaggctagacaatattataatggaggctataaagaacttgaatgagcctacagggtcccacagaactactattgctaattacatagaggagcaatattggccacctagtgattttgatcacttattgtctgcaaaactgaagtatttagctaccagtgggaaattgttgaaggtgaatcggaagtacaggatagcacctagtttgctggaagacgtgcaaagagaacccttgaaattagggagtgatgctagtagaacccttacaagatcccaagtcgatgctgaattggtccgtatggcaactatgactgttgaggcggcggcggcagctgctgctcatgcagttgcagaggcagaggctatcatggcagaagctgaagcagctgctagggaagcagaagctgcggaagcagaggcccgagctgcacaggcctttgctgaagcagcagttttgacactgaagaacagaaatgctgcgaaattggtatagctcgagtccatgaatcttagatatgccctcttgtccttccacacgtagaatccagttccgtagctctgtatgcaactaattggttactaaaagaacctgaaatcagaagttttcacaaacacaccgacttattcaccgaagattatgatttccaaagtaa

SEQ ID NO: 114163 - DNA, 1333 bp, Zea Mays
atcatctaaaaaggctaatataataaaaaaaaactgcgcgcactgctgtcaccgcggcggagggaaaaatcgggcgtaccccggtgcccgttcaccgccgttcacgccgcgtgtgcgctctggctctgccgctctctctctctcctgcgcgtggcgcaactgccgtcctataccaggcgcccaggtctagcctcgtcggtgccttcgccaggtctttctcgggcccttcgccaacgacgagcgcccgctaggttagaaggtatgcattcgtgttcataatattgtatttgactaaaaagactgggcctacgcatgggggctccaaaacagaggtggacttctgaggaagaggctgctcttagagctggagtagccagacatggagttggaaattggcgcatgatattgaatgatccagaacttagctccacattgcgctaccgctcgaatgttgacctaaaggacaaatggcgcaacatgaatgtaattgtcacttcatcgagtactcgtgacagggggagaacttccacgaggagaacccgagctgctcctaagaataatgaccaattgttggcaatgagcacaatcacttctgaggttgatgatgagattgttgatgtaaagcccatagtatcaatgtctgttgaaggatggaatacttcaaattcaaagaaatctcactcaaggctagacaatattataatggaggctataaagaacttgaatgagcctacagggtcccacagaactactattgctaattacatagaggagcaatattggccacctagtgattttgatcacttattgtctgcaaaactgaagtatttagctaccagtgggaaattgttgaaggtgaatcggaagtacaggatagcacctagtttgctggaagacgtgcaaagagaacccttgaaattagggagtgatgctagtagaacccttacaagatcccaagtcgatgctgaattggtccgtatggcaactatgactgttgaggcggcggcggcagctgctgctcatgcagttgcagaggcagaggctatcatggcagaagctgaagcagctgctagggaagcagaagctgcggaagcagaggcccgagctgcacaggcctttgctgaagcagcagttttgacactgaagaacagaaatgctgcgaaattggtatagctcgagtccatgaatcttagatatgccctcttgtccttccacacgtagaatccagttccgtagctctgtatgcaactaattggttactaaaagaacctgaaatcagaagttttcacaaacacaccgacttattcaccgaagattatgatttccaaagtaa

SEQ ID NO: 114164 - DNA, 712 bp, Zea Mays
atttcatgtagaatcttttgttaggctgcaggtttcctgttgatcttactataaatgctattttcagcactactcgatttgtgacccatcttccattgctgaatgttcatattttgatccaatcagaagttgcatgttctcaaattgaagaaccttgtttcgtacactttctaataaagctgtgctgagcctttgatctaaaaaaattgaagaaccttgagtttttcagcattaccctgtgggagtttgcaggtgaatcggaagtacaggatagcacctagtttgctggaagacgtgcaaagagaacccttgaaattagggagtgatgctagtagaacccttacaagatcccaagtcgatgctgaattggtccgtatggcaactatgactgttgaggcggcggcggcagctgctgctcatgcagttgcagaggcagaggctatcatggcagaagctgaagcagctgctagggaagcagaagctgcggaagcagaggcccgagctgcacaggcctttgctgaagcagcagttttgacactgaagaacagaaatgctgcgaaattggtatagctcgagtccatgaatcttagatatgccctcttgtccttccacacgtagaatccagttccgtagctctgtatgcaactaattggttactaaaagaacctgaaatcagaagttttcacaaacacaccgacttattcaccgaaga

SEQ ID NO: 114165 - DNA, 537 bp, Zea Mays
atgcggttgcaggctgcgatcaagttagacagcaagggtgttaccatgcaccccactatatctcgagaacgaggtgtctctgaagggtgggggatgtcatgggatagcagtccagggcatggaggccatatggatagggtcaagccagtcggccacgcgcccacacgcccacctgttgctcggctgctcggcttcctccagcaacaacagatcggcttccttcatcaacaacagatcagcttcctcctgtcacaacagggttctttaccatctgttaatgactccgaagcagtaggaggaaatgcggaagtggaagagattgaagtttctaaggatgaagaccaagaaggtggtgttggttcaaagagaaagttgacttcagctgtttggaaagaattcaaaagggttaaagtaggggataaattaaagcaaagtgcaacgaggaaagtgtcagtggagaactatacttttgatcaagaaattgctagaaaggagcttgcatctatgatggttttgcaggatctggtatcaatctag

SEQ ID NO: 114166 - DNA, 141 bp, Zea Mays
atggccaccgtggccggatcgccgtcgtcaagcatcgccatcgtcgttcatcgcgccgaagtcttcgccagcagttcgtcgtgttctgcgtccatgccccaccatgcacggccgacgtcatcaggaggagagacgccgtga

SEQ ID NO: 114167 - DNA, 1448 bp, Zea Mays
cgcctgtctgtcatcactcatatcataagaagatgatcacatctcgcacacaagcatatgcatatcactcattccagagaatgagatgacaagacgttgttgcaccacttttatttgaaacgaacctgcactgcaggtgaggatgatgcctggttcaatggctgcgcgccaacctctgcaagggaagcaggagctgcagccatacgatggccgtgacccttcagcgctcggggccgggggtagtccagttcttctgccccggcagcaggaaagcgccgctccaccggccgtgcgggtagcgccgccgccggacatgtcgtcgtcgtcggggtcggggaggagtgcgacggaggcgagggccctgaaagtccacagcgaggccgagcggcggcgccgggagaggatcaacgctcatctggctacgctcaggaggatggttcctgataccaggcagatggacaaggccaccttgcttgccagagtggtggagcaagtgaagctcctgaagaggaaagcaagcgaggccgccaccaccaccacccagagcacgcccctgcccccggagaccgacgaggtctccatcgagctccacaccggcgacgccggcgccgacaggtccgtctacataagggcctcgataagctgcgccgaccggccggacctcgtcgccgggctcgcccaggcgttccatggcctgaggctgaagacggtgagggccaacatgacctcgttaggaggaagggcgcggcatgtgttcgtgctgtgcatggaggagggctggggaagtgcaggtgcaggtgcaggtgcaagcctcaggtctctgaaggaggctgtcaggcaggcgttagcaagggttgcttccccagaaacggcatacgggagtagtccctttcagagcaagcggcagatgattcttgagtcgcattagggtcagggctttggcaccgaaaaaaaaaccagagcctgccaaacagcggtttttaaaaacacctctttcgaaaagtacttcaaaaatctgagcattttatactatggaggaaaagacacaaatcctaacttcactagctctctgctcctttcagtaagtggtgttttataaaattgaggataagccatatttgtcaaataatttatgaaatggctttagctccacccaaaaagatactttcaaaaaaaaaacggagtcagagtttgggcaagctaaggcttgccaaacagatccttactcgatcatgtccatacaacaggataaagattgctactgtgctagtataaaaagtatttagaaaattggaagagacacgtaggtctaagaccgctggatcataacgtcgacacaatggtatgtacatacaaggtttatagagatttagtctgcttgagcgcacgtcatatgtcctctggataattaatgtttaaatgcaagagtgagcagatatcacgtgatc

SEQ ID NO: 114168 - DNA, 837 bp, Zea Mays
cacacaagcatatgcatatcactcattccagagaatgagatgacaagacgttgttgcaccacttttattgtaagcaacaggataaagcgctctctctctctctctctctctctctctctctctctctctctctctgcttgttggtgctgcgtctcatctcctgttattctgatccttatgcttgcttgatgcaccaattctttcttccaatttgcagccgcagttgatgctggctcaggtattctttcaacggtccggtctctttgtttgcatgcagtgaaacgaacctgcactgcaggtgaggatgatgcctggttcaatggctgcgcgccaacctctgcaagggaagcaggagctgcagccatacgatggccgtgacccttcagcgctcggggccgggggtagtccagttcttctgccccggcagcaggaaagcgccgctccaccggccgtgcgggtagcgccgccgccggacatgtcgtcgtcgtcggggtcggggaggagtgcgacggaggcgagggccctgaaagtccacagcgaggccgagcggcggcgccgggagaggatcaacgctcatctggctacgctcaggaggatggttcctgataccaggcaggtcggtgtgtgatccttccaccctcaatgattcacttcatcacttgtgtgaatgaatcatctggcacacacactttgtgaaagactgaaacaatattttaccagcattaatcttcttggtttttcgcagtcctgatttttgtagaaattcggctggtttagtgagtattagtaaaagtaggcgaaatactggaagtaaaattggaaagaagttaatctcca

SEQ ID NO: 114169 - DNA, 295 bp, Zea Mays
atatctccggtggttctggtcgatgtgcgcgcaacgtcacgcgcgtgcaggcaccagcgccggccggccctgagggcggggcaaagggggcaaccgccctggtgggcctcgtaatctggaggaccccaattccgtgtacgcattagttatactgcatatgagtttttgcgtgtgtattactccctccgtttctttttatttgtcgctggatagtgtaattttgcactatccagtgacaaataaaaagaaacggagggagtacgtgacttgattataagaatcacactagaccaac

SEQ ID NO: 114170 - DNA, 352 bp, Zea Mays
atccacagatatgttaagacgtacaaccagcctctacaaaacctgcactgcattggccgaccattccattcccaaaagaaacaccgccctagctagcaccacacaccgcaggtatggagaaggcgacgaggctggccttggcagcggcgttggttctgtgcctgcttctggcgaccgggccgcaggaggccgccggcgccgaggggatgctgtcgtatgataagttgctcagctgcaaggtgctgggcaactgcgacaagaacaggggccccggggccacccgcccggggaagcccgtaaacaagtacacccgcggctgcagcccgctgacccggtgccgcggcggctgatc

SEQ ID NO: 114171 - DNA, 606 bp, Zea Mays
attacaccaccaaaaaactgccctagcttgctcctcgatccatcaattgcaagaggagcaagataccaccaccgtagcaccacacgcaggtacgaagaaggcgacgaacatggcgaggctggccttggtagcggcggtggttctgtgcctcctgttagcgacagggccgcagggggccatcagcgccgaggggatggtgtcatttgacaatttgatcagctgcaaggtactgggcaactgcgacaagaacctgggccccgaggcctcccgcccagggaaacccgccaacgactacacccgcggctgcaacccgatcaccggctgtcgcggctgatcatatctctctggtcgatgtgcgcgcaatgtcaatgtcgcacgcgcgtgcaggtaccaggcctcagcgtgtggtgccgcgtgtgtgtatatattacacacatgcattatacattggtcgtcgatcgttactgtatgcatggcaactgatgtttcttgcctcgcatatctgaggtgtatactgatgtatgtggctcaacttttgatgattaatgtataagtatgacaaccaaatatgcagataagaaatatatatacatatatatatatata

SEQ ID NO: 114172 - DNA, 249 bp, Zea Mays
atgaagaagcggctggctgtggcggccgtggtgctgttatttggcctgctactggccgtgcaggaggccgccgccgccgaggaggccgcggaagcggcgccgacgacgcccggcaacagcaaggccgactgcgaggtccccggcacttgcgaccggaacctcaaccaagccgccgaccccaaacgcccgggtgcggcggccaacccatacacccgcggctgcagcaagatcactggatgccgcggctga

SEQ ID NO: 114173 - DNA, 217 bp, Zea Mays
tccttacagcacgcccgattccacggcgcaaagatcatgatcccctcactcagtcattcactcactcctcgtcgcagcgaattgagtgaggaaaaaaaaaagaataaagctctcaccggacggcgggaaaatggaggcaggcgtggcctgcgggaacgcgagggagatgtccatcgccgggagcccggccttggcgccgccctcgtcttgcccatcg

SEQ ID NO: 114174 - DNA, 751 bp, Zea Mays
atggtagagttcttgttggcaaagaaacaggcacttggttcatttccactggtgcacttgaggaagcacttgcggttgaaccgaatgacggcacatgaacactgtttatgtttaatgggtatgttgaagctgatctgggtactaatggaatactactgtggcgtgctctcacattcctctgaaacccttcttggtgaatcaagtgttggatatcccaaccactttggtcaatgcttaaaggtatttgacggagaaagggctcagcaagtggagctgcatttggctgcacagagttagatggctgagtactggaagaacttccaacataataaccagtagcactgatccctgcagggtgtacactgggaccttttcgcttcattgcagcccttctgttgtccatatgggaacccactggagcgaagccttcctcagacctatgtggataattcacagcagggtctggtaaatggctaccagaacttccagcatgaaaatgaacaaagggagcatgcgaggttcctgggttcccaactctataacctagagtctgcacagtgcgacttgaagatggaagatcatttattctaagtcccatatttccatgacttgaatgaccaattctaaggggcgcatcacttccatgatgcaggagaagcttctggcctgagattagaaaaaatgttatttattttatcacacatttcgataaaatttaaacaagtaaagagtacttgagtcagtccagcta

SEQ ID NO: 114175 - DNA, 586 bp, Zea Mays
atcgtttttgtatgcatgatttcttcagatgcgaggctagatacgaggctagggcggatgtggtggccaccacgagctgtaagaagctcgtcgtggacatgcactatgaggcccgaatctaggccatcgtcagctaccacggctccgtccttggggagaaggtgaccaagcagcaagcccgaaccatgtcgttgaccagggaccagtacctgcaggtaaagtcatgcatgtttggtaccattactccatgcatgaattttattttatcttctcatatgcactttacgtgtttactttgtagatgattccacattggtgcgccgcacatcctctgtgctgggagcagatggtggataggtggtgctcgcctgagtgggacgaggcgcacaacgctagccgggaacggcgtatgatgatgcatggtccctcccatcaccaaggcagcctgagcctgggccaatatggagaagcatggtcggcgtcacatggtggccggccttgctccatcttctcggcctatgctatgacccataagggcaaggcgacgtccgacgtcacctacaacctggatgacgggcccgaggcc

SEQ ID NO: 114176 - DNA, 111 bp, Zea Mays
agtgtgatactaaatttaccagtatcattttatataaattctgtcaaagtttagattactgggacaaagggaatattgacatgtatagaaagaaaccgatttgatcaaatt

SEQ ID NO: 114177 - DNA, 1225 bp, Zea Mays
atggagggtggtgcttcaggatctgcagctgtgactgactctgctatggcagaagctagtgcagttgaccctgacttagcgttggctcatgactcatatgctttcttgataaattggttggaacggttcccacagtacaagcatcgtgatttctacatcactggagagagctatggaggccactatgtccctcaattgtcttggttagtgtaccaaaacaacaaaggaattaagaatccaaccttaaacttcaaaggcttcatggttggaaatgcggtaattgacgattaccatgactacatgggcacatttgagtattggtggacacatgggcttatctccgatgaaacttatgcaaagttgtgggaggattgtaaaaatgatgtgtctgagaacccctccgaggaatgccaaaagatttatgaggttgctgaggctgagcaagggaatattgatttgtatagcatctacacacctacttgtaagaagacttcattgcaaaagcgcagactaataaggggaagaatgccctggctgccgagaggatacgatccttgcaccgagctgtacatcacgaagtactgcaacttgcccgaggtgcaggacgccttccatgccaatgttactggaataccatacgcctgggtgggctgcagtgacccaatatatgagtactggaaggattcgccgaggtccatgcttccgatctaccgtgaactcatctcggcaggcctaaggatatgggtcttcagcggcgacaccgactccgtcgtgcccctcacggcgacgaggtactccatcgacgcgctgtctctgccaacgatcaccaagtggtacccttggtactacgacgaagaggttggtggatggtgccaggtgtacgagggcctgacgctggtgacggtccgaggcgcggggcacgaggtccccctccaccgtccgccgcagggcctcaagctgttcgagcacttcctgcggggcgagcccatgcccaagcctgtcgagagcgtccagtcgttctagatgagcttgctgccgcgcttggctagttggctttgatgaatagtaaggccggacatgtggcaagccatctccactccacatttcttcaccacgttttcaataactggcgctggccgaaataataagagcagaacgaataaaatgccgctcgctagaatgatctggctgtgcgtgtttgctttcgagttatttttatatacca

SEQ ID NO: 114178 - DNA, 1648 bp, Zea Mays
ctgcgagcgggagcggcgccaatggcggcggccgccgccacggtcgtgctggccgccatactagtcgcgctgttcggctgctgtgccgctgccgcgtccgccgccgccgccaccgacgtgatcacggccgcggcagagctggaccgcatcgacaggctgccgggccagcccccagtcaacttctctatgtactccggctacgtcaccgtcgacgccgccgcgggtcgggcgctcttctactggctcatggtggcctccggcgtgccggcgggctccgcgccgctcgtgctctggctcaacggcgggcccgggtgctcctctcttggctacggcgctatggaggagctcggcgccttccgcgtcaaccccgacggcgccacgctctccttgaatccctacgcctggaacaatgtggcgaatgtgctgttcttggactcgccggccggcgttggctactcctacaccaacaccaccgacgacctgtacgctgctggtgacaacaagacagctcatgactcatatgctttcttgataaattggttggaacggttcccacagtacaagcatcgtgatttctacatcactggagagagctatggaggccactatgtccctcaattgtcttggttagtgtaccaaaacaacaaaggaattaagaatccaaccttaaacttcaaaggcttcatggttggaaatgcggtaattgacgattaccatgactacatgggcacatttgagtattggtggacacatgggcttatctccgatgaaacttatgcaaagttgtgggaggattgtaaaaatgatgtgtctgagaacccctccgaggaatgccaaaagatttatgaggttgctgaggctgagcaagggaatattgatttgtatagcatctacacacctacttgtaagaagacttcattgcaaaagcgcagactaataaggggaagaatgccctggctgccgagaggatacgatccttgcaccgagctgtacatcacgaagtactgcaacttgcccgaggtgcaggacgccttccatgccaatgttactggaataccatacgcctgggtgggctgcagtgacccaatatatgagtactggaaggattcgccgaggtccatgcttccgatctaccgtgaactcatctcggcaggcctaaggatatgggtcttcagcggcgacaccgactccgtcgtgcccctcacggcgacgaggtactccatcgacgcgctgtctctgccaacgatcaccaagtggtacccttggtactacgacgaagaggttggtggatggtgccaggtgtacgagggcctgacgctggtgacggtccgaggcgcggggcacgaggtccccctccaccgtccgccgcagggcctcaagctgttcgagcacttcctgcggggcgagcccatgcccaagcctgtcgagagcgtccagtcgttctagatgagcttgctgccgcgcttggctagttggctttgatgaatagtaaggccggacatgtggcaagccatctccactccacatttcttcaccacgttttcaataactggcgctggccgaaataataagagcagaacgaataaaatgccgctcgctagaatgatctggctgtgcgtgtttgctttcgagttatttttatatacca

SEQ ID NO: 114179 - DNA, 1641 bp, Zea Mays
tgcatgttttccacgaagcaggaagcagccagtccccggcccagtgcggccccattggccaacttgcataataatccccgaaagcctccataaatccatgcctcaaggcctccactgtccactcctcacgtacaaccataccataccatgctgttcgttgctctgtacgtagctcttctccaactacgtaacgtaactagtacgtgtacgtccagcacttggattggaatattggatggctcccctgcgagcgggagcggcgccaatggcggcggccgccgccacggtcgtgctggccgccatactagtcgcgctgttcggctgctgtgccgctgccgcgtccgccgccgccgccaccgacgtgatcacggccgcggcagagctggaccgcatcgacaggctgccgggccagcccccagtcaacttctctatgtactccggctacgtcaccgtcgacgccgccgcgggtcgggcgctcttctactggctcatggtggcctccggcgtgccggcgggctccgcgccgctcgtgctctggctcaacggcgggcccgggtgctcctctcttggctacggcgctatggaggagctcggcgccttccgcgtcaaccccgacggcgccacgctctccttgaatccctacgcctggaacaatgtggcgaatgtgctgttcttggactcgccggccggcgttggctactcctacaccaacaccaccgacgacctgtacgctgctggtgacaacaagacagacggtttataacacgttttcaatgtcatttatcacttacggttcttttaaagtaaccgctagtggaaaattatttctacttgtcgttctcgtgaataatcgccactgcaaatactttttgggttttctaaaattagccggcagtggtagtttctcgcccttttcaaattttccaccaaaactgaatttttatatatttacacacaactatatatatatacatattatattaatattgaaaacaatacaaaattaaattctatcatacattatatatcaaattttgtgtttacaactataaagattcacttatatgtatcaaacattctatacatcaaagttttcacctaacctctaataactatctcggctaagatttaatatactaatttcggttagtactctaaactatgtcctagttaagatattggtatcatcgtgatattttatttcacacgaaatgacttctttcaaaataaatgagcacatgttctcaattatgttgtcagacaacgacggcgagactactaccactatacgacggttgatctttagcgacccttattagggacagacggttggtcgctaaaagttatgtaccgacagttggtcgctaaatgcatttgtagcgacgggccatcggtcgctaaaagtctagaaatttaactactcaaggttggtcgctatagagacaggtggacatccggcggttggttgctattgattgacatgtgactgttggtggctaaaaaaatttggcccgaacaggcccaactcagcaactcgtccaaatcaaaatcacttctattgaaaaaagcaaaccctaccccctcttctccccttctctcgacggcgccaccatgccgcctccgccctcaaccctagccgcc

SEQ ID NO: 114180 - DNA, 519 bp, Zea Mays
ctgcgagcgggagcggcgccaatggcggcggccgccgccacggtcgtgctggccgccatactagtcgcgctgttcggctgctgtgccgctgccgcgtccgccgccgccgccaccgacgtgatcacggccgcggcagagctggaccgcatcgacaggctgccgggccagcccccagtcaacttctctatgtactccggctacgtcaccgtcgacgccgccgcgggtcgggcgctcttctactggctcatggtggcctccggcgtgccggcgggctccgcgccgctcgtgctctggctcaacggcgggcccgggtgctcctctcttggctacggcgctatggaggagctcggcgccttccgcgtcaaccccgacggcgccacgctctccttgaatccctacgcctggaacaatgtggcgaatgtgctgttcttggactcgccggccggcgttggctactcctacaccaacaccaccgacgacctgtacgctgctggtgacaacaagacagacggtttataa

SEQ ID NO: 114181 - DNA, 688 bp, Zea Mays
atggagagagtacctggggtggaagagcagaagtcagcagaccaagttaaccaagctggtctagctgatgagagtaccacagtaccgtggctgaagttgggtcttgatgcaccaaaaagtgaagaagtcaagcctcaagaggtgaaaccagtgggcactccacataggactttctcctgcaactactgcatgagaaagtttttcagtttgcaggctctcggtgggcaccagaatgcgcacaagaggggaggtgtgcagcaagaaagacatacagacttcagatgatgatgggccttcctccatccgcttcctttctccatccttcgagaatgaactcacactccacgattctgaagggtcatggtgaaagagctgcggttcccgtagcaagattcgacggaggccgaatgagtggctggatgccttttgcagttgaagaacctggagggttagtatggccaggaagcttcacagcaagttcagatgagtccaagaagcaaatggagaaaaatcttgacctaaccctacgtttgtaaattaaactgtaataagaagtaggtcatcatatgtaagcattttatgattcgaccagacgagggaaggcctgcaggagaaccactcggggctcgaccggcggtcactcgcggtctcgcgcagtcggccgtaatttcacagcaaaaaaacacaa

SEQ ID NO: 114182 - DNA, 324 bp, Zea Mays
atggcggccccggcagccgccgccgccaccgcgtgtggcagagccgccgggagcacgctggctctcagcagagctcgcggcacggccgcggcgccagcgcttgtctcggcgctgccggagatgaggacgcacacgagaaccaccactaggaagttggagacctgcatgttgcttcttttatttctgccttctggttctggtttctgcttcactgtatttgcatggacggattctgggtttgtctgcggctttaatcggctgcggctctacggtattttgtttacagcggcagcagctgcagctagagggcaaccgaaccattaa

SEQ ID NO: 114183 - DNA, 780 bp, Zea Mays
gaaatttgtacatggtagtaattgaattgagactagcatatttgcatcagtttgtattgatttttgagtttatatcgattttcatcctctatctatgtttgcttctaggacttgctctagctctgtgtcaaagtaaattatgacacggttctttgaatccttctctgttcagggtagctttgaggctttcaccaggcaatgtgggtgctgcggcgatctggtcgaggacgaggagaggcgtgagcacctagaggccgcctgtgaccttgcgacccactacctctgccacccctgcgccctctgccaggagggtcgcgagctgcgccgcagggttccccaccctggattcaacaatgggcactccgtctttgtcatgatgccgcccatggagcagaccatggggcgtggcatgtgagctattccaccaccttccctaccctagttttatctgtgcttcccgtggtttatcatctgctgctgttggccttgatgtgtgatgtgtcgccgtcagtaaatacgagtttgtgatatgaggtcgtgctgggaactttggattgtttgcttcttatcgactgcagtttggattctggacagtcacttatctcctgtgttactgtgtttgtacggtggtcctcgatgggcctgtcaatgtgaaatgcatttcgtcgtaccttattctgaatgtttttccctccaaaatatgagccccatacactaatatggcggtagctctcgtcacaaaccctcggatacagcagcgtttgtgcgtggaaagaaaaa

SEQ ID NO: 114184 - DNA, 1496 bp, Zea Mays
ccaagtccccttccctcgcctcgcgttagtagcctgcttccgacccgcacatctccctccggttctcgccatgggcgccggcgccaacaaccacgaggagtcgagccccctcatcccagctgcggtcgccgcccccgcgtacgagaagcccgtgtcggcccacgccttcggcggcgtcccgcgggagagctggaactccgggatcctctcctgcctcggccgcaacgacgagttctgcagcagcgacgtcgaagtgtgtacgtgccgtgccccttgtcctcgaaatcgatactctttgttcgagtcgtgcgtaatcttgggggtagagatatgcgtggttttgcgcttggggatctcgaggaggaataggtggttgtattaccacgaattttgagttagatatcttcggaaatggctaaattgttcatttccagatttagataccatgcctaaatgtagtgccctgataccatgaattagctgagatccaacacctattttattgatcacaattgtacttttatgtatacaacggcacatgatgctcttgatctgctccataaaaagctaaaagtgcatgatctaggaatagaaggagcgggtgcctttgttaaccatagcattttgcaaacttttaccatgaatttatgattgccgaacttgttaactgaatttatcagttgaactactttgcttatagcatacacacttaacacaatatcagcctgtgaaattctgggaaggtggattttgctttttttcccttgtaattcgcaatttcacagatgatcttgaattacttcatttttttaatttagatgttgaaccaagaactaactacatattgtttggatgtatcaggtcttcttggaacggtagcaccatgtgtgctctatggtagcaatgttgagaggcttgctgctggacaaggcacatttgcaaacagctgtttgccttacactgggctgtatttgcttgggaactctctctttgggtggaactgccttgccccatggttctctcatcccactcgtactgcgccgcagggttccccaccctggattcaacaatgggcactccgtctttgtcatgatgccgcccatggagcagaccatggggcgtggcatgtgagctattccaccaccttccctaccctagttttatctgtgcttcccgtggtttatcatctgctgctgttggccttgatgtgtgatgtgtcgccgtcagtaaatacgagtttgtgatatgaggtcgtgctgggaactttggattgtttgcttcttatcgactgcagtttggattctggacagtcacttatctcctgtgttactgtgtttgtacggtggtcctcgatgggcctgtcaatgtgaaatgcatttcgtcgtaccttattctgaatgtttttccctccaaaatatgagccccatacactaatatggcggtagctctcgtcacaaaccctcggatacagcagcgtttgtgcgtggaaagaaaaa

SEQ ID NO: 114185 - DNA, 2396 bp, Zea Mays
atggagatgtgcagaggtgggaggaagggatcgcgggcggccgagaccttgccgatggccgccatcgcggggctcggccacggcgacgcgagtgcaggtgcgggcgccgatggagatgtgcagaggtgggaggaagggatcgcgggcggccgagaccttgccgatgtcatattcaccaacgagtcaaacattgtgcgctggaagaacaagcgacaacaagctgttgactccaaagttggccgccttgataactttattgaatgtgttaaagcccctattcaggaagtaggtgtccctaaaatccctatgatctatggaagggttggcgttattgcccttgacaatgcgcgccaaagtgctaagattattgaccaatctcttaccccaggaaagatttatgatggagatgggttcaattacatcaaagaatcttttgaaaatggtactcttcaccttattgggttgttgagtgatggtggtgtacagttaagttacaagcgtaccacaagatttacttttatttgctctatccagttacttctgaaaggtgttagtgagagaggagcaaaaaaaattcgtgtgcacaaccttaccgatgggcgtgacgttttggatggaagcagggttggtttcgtggagaccctagagaatgatcttttggagcttcgaggcaagggtattgatgcacagattgcatctggtggtggaaggatgtatgttaccatggaccgttatgagaatgactgggatgtggttaaacgtgactgggatgctcaggtgctcgaagaagcaccctacaaattcaaaagtgcacttgaggctgtgaaaacactgagagcacaacccaaggctaatgatcaatacttgcccccatttgtgatagttgatgacagcggcaaagctgttggacctgtattagatggtgatgcagttgtcactatcaacttccgagccgatcgcatggttatgcttgcgaaagcactagagtatgcagattttaacaactttgaccgtgtacctgtccccgaaattcgatatgctgggatgcttcaatatgatggtgagttgaagcttccaaatcgctaccttgtttccacaccagagataaatagaacatctggggagtacttggtgaagaatggcatccgcacctttgcttgcaggcaaccagggaagacaacgcgttcatcctcccacgcgcttcctccgccctattttagtctgctcgacacgccaccggccactgacatcccatatcgccaagtccccttccctcgcctcgcgttagtagcctgcttccgacccgcacatctccctccggttctcgccatgggcgccggcgccaacaaccacgaggagtcgagccccctcatcccagctgcggtcgccgcccccgcgtacgagaagcccccgcaggctccggcgccggaggccgccaattactatgccgacggggtcccggtcgtgatgggcgagcccgtgtcggcccacgccttcggcggcgtcccgcgggagagctggaactccgggatcctctcctgcctcggccgcaacgacgagttctgcagcagcgacgtcgaagtgtgtcttcttggaacggtagcaccatgtgtgctctatggtagcaatgttgagaggcttgctgctggacaaggcacatttgcaaacagctgtttgccttacactgggctgtatttgcttgggaactctctctttgggtggaactgccttgccccatggttctctcatcccactcgtactgctattcgacaacgctacaatcttgagggtagctttgaggctttcaccaggcaatgtgggtgctgcggcgatctggtcgaggacgaggagaggcgtgagcacctagaggccgcctgtgaccttgcgacccactacctctgccacccctgcgccctctgccaggagggtcgcgagctgcgccgcagggttccccaccctggattcaacaatgggcactccgtctttgtcatgatgccgcccatggagcagaccatggggcgtggcatgtgagctattccaccaccttccctaccctagttttatctgtgcttcccgtggtttatcatctgctgctgttggccttgatgtgtgatgtgtcgccgtcagtaaatacgagtttgtgatatgaggtcgtgctgggaactttggattgtttgcttcttatcgactgcagtttggattctggacagtcacttatctcctgtgttactgtgtttgtacggtggtcctcgatgggcctgtcaatgtgaaatgcatttcgtcgtaccttattctgaatgtttttccctccaaaatatgagccccatacactaatatggcggtagctctcgtcacaaaccctcggatacagcagcgtttgtgcgtggaaagaaaaa

SEQ ID NO: 114186 - DNA, 1092 bp, Zea Mays
aagcatggggccaatgctgatcttgtgaatgctctgaagctggtccaacctatcaaggacaagttttcaagtgttacctatgcagatctgtttcagcttgccagcgccacagctattgaggaagtaggtgtccctaaaatccctatgatctatggaagggttggcgttattgcccttgacaatgcgcgccaaagtagcctgcttccgacccgcacatctccctccggttctcgccatgggcgccggcgccaacaaccacgaggagtcgagccccctcatcccagctgcggtcgccgcccccgcgtacgagaagcccccgcaggctccggcgccggaggccgccaattactatgccgacggggtcccggtcgtgatgggcgagcccgtgtcggcccacgccttcggcggcgtcccgcgggagagctggaactccgggatcctctcctgcctcggccgcaacgacgagttctgcagcagcgacgtcgaagtgtgtcttcttggaacggtagcaccatgtgtgctctatggtagcaatgttgagaggcttgctgctggacaaggcacatttgcaaacagctgtttgccttacactgggctgtatttgcttgggaactctctctttgggtggaactgccttgccccatggttctctcatcccactcgtactgctattcgacaacgctacaatcttgagggtagctttgaggctttcaccaggcaatgtgggtgctgcggcgatctggtcgaggacgaggagaggcgtgagcacctagaggccgcctgtgaccttgcgacccactacctctgccacccctgcgccctctgccaggagggtcgcgagctgcgccgcagggttccccaccctggattcaacaatgggcactccgtctttgtcatgatgccgcccatggagcagaccatggggcgtggcatgtgagctattccaccaccttccctaccctagttttatctgtgcttcccgtggtttatcatctgctgctgttggccttgatgtgtgatgtgtcgccgtcagtaaatacgagtttgtgatatgaggtcgtgctgggaactttggattgtttgcttcttatc

SEQ ID NO: 114187 - DNA, 283 bp, Zea Mays
accaagactaaactgcggtctacagtatcttctaatgctaaatttagaggcacaaaattatccttctagcagagagtgcattcttaattctacaatcagaaggccgacccacctccttttgttttccctgacaacacatccttcgcctcattaatctttgacgcaaggtaatgacttccaccagcatctggatggttggcgaccataaccctcttgtgcgcctcttttaccttctctgcgttggcagtttccctggaaacatcaataattataagctagcatg

SEQ ID NO: 114188 - DNA, 1025 bp, Zea Mays
cggcattctcttgtttgtccattgcacatgcacgcgctcaatggcaacggaggagcggcgattaatggatctggcacggactgtgccggcgatcctcctgctcgtcggcacctcgggaaaggccgtcgcgagcatcaagtgcgcccgcgagctgttcgccgggaagcagtggggcttcgatgactccgacgaccccgagtctccgccctccaacaccgaccgaggcggaaactgcagcgtcggcgaacccatggagacgtccaccggaggagacgacgatcacaacggcagcgccgtaccctggaagaccacccgcggcagccagtcccagacgaggcttccatcttgggccgtggtgcaacacggcggctactgggccaacatcctcgccttcgcgctgtcccccgtagagggccacctccccgtcgcctaccgtgagatcacgcgcctcgtctcgctccacgccgaggccggccacgtcttcgtcaactgcgccgagggcctcggcctcaagccccaccccgccgcgccgtgggagcggtggatggacctccgggaggcggccgtctgccacgcccacgacgcgctgctggcgctgagctccgccgcggcggcagccacggcagccgaggacttcctccggtggcagttccccgagtccccgcgcgggaaagggtggtggtcggcggcgcggcagctcgtggaagacgcctggcgcagcctcggcgaggccaagaacgcggcgaggctcatggacaacgccgtgctctgcgagttcttcaccacctggatgattctgacgcgcgcttaactgaaggcgcattgctgatggcgacgcccctgcgtccttttgcaactcgttattactccagtacttgtgctccaatttcattcgatttctgtgtgcacatttgaataagtggttctttgctggtacaaatggaaatgacctgatccgcctgtgtcgataagattgtaataagtggttctttgctccaatttcattctttgacggttgttcttct

SEQ ID NO: 114189 - DNA, 91 bp, Zea Mays
cgtgattctatcgtccacatgtcggcgactacgtagaagtagacgtgtgcatggaaatacggttgcatgtgttgtttgcttgatgtcacac

SEQ ID NO: 114190 - DNA, 1520 bp, Zea Mays
tatttttctttgttttcttctcatttgacactatataaatgatccgaaaaaattgtatttattaattttgaaagcaataaatttgaaatatcaataataattacattgattgttttgttgttgtgtaattattgtcggtaacgcgccacatagtataatatcgttgccaaaataagttttcaaatggacaagcttgcaccgtaagccagtactcttcttcgagaagccatagccttgcttcccttgcacgacaagcgcacgtcttctatccgaagcgtacttcctctataaataccaagtgagacttccatacttcactcaaccttgcctttacaaactcgacaaccatgaatccctacttagaaaacaattttcttgtgcgcttgatggaagaaatggaagaggaagaagaagagttgcagttggcgaggcacatggtcaataggaggcgacgtgcacgcaatgagcgtcgtcatggtggttcgattccagggcgtgttaggattcatcgtgatcacatgagcggcgatgcaagaatccgagccgactactttggagccaacccggtgtacacggatgctcaatttcgtaggaggttccgcatgcgtcgccatgtctttgagcgccttgttgatgttgtgcaacaagtggatccttattttattcagcgtccaaattgtgcgggtgagattggtctttctgctctacagaaagttgttgttgctgttcgaatccttgcttacggtattccagctgatgtcgttgacgaatacgtacgtattggggaatctactgctcatgaggcattgaaacacttttgcacggccgtccaaaccgcgtttgctccgtattatctccgtgcaccaaatgcagaagatatcgcacgccttctacaagttggcgagtcacgtgggtttcctggtatgcttggtagtgttgattgcatgcattgggagtggcgtaactgcccaagttcatggaaggggatgtttacagggcgtggtaaacatcctaccatgatcttggaagctgttgcgtcgtatgacctgtggatatggcatgcatattttggtctgccaggtagttgcaacgacataaatgttcttcaccgttcaaaccttttcgaaaggcatctgagcggtgacacacctcctgtttcattcactgtgaatggtcacacgtacaatatgggatattacctagccgacgggatttaccctgactggcccgcatttgtgaagacaatccataacccctacgacgttagaacccaacactttgcaacaattcaagagtctgctcgaaaagatatataacgagctttcggtgtactccagaagagatggggtgtggtccgtggacctgcatacggttggagtcctgaacacattggggacatcatgaaaacatgcataatattgcacaacatgatagtagaagacgaaggtccattgtctttgaacacaacctttgaaaacatcggagtgctggcagacacaactcaaggttcaatggaagag

SEQ ID NO: 114191 - DNA, 1089 bp, Zea Mays
atggcgttcaagaaagcggccatcggactctcttcccttctcctcatcctcgtcctcctcctcgtcgcgcccagcgctaccgcggcgagaccgacgcgtcagctgacttccgacgacgacgacgacggcactggtgctgcggcgcccgctgccgcaccggccatagcgcaccctgctgctgacgcaccggtcactgccgatgccagtccacctgtggtaggaggcgccggtgtggtggcggcgcccggaggcgccgtggcagcagacgcaccggtcgctgccaatgccatccccgctgctgctgcggcagctccggtcgcagccagcaccatccctgtgggggccggggccggggccgcgggagcgggtgcagcgagcggcgctgacggccacgggatggtcttcttcatgcacgacatcctcgggggcacgaacccgtcggcgcgcatcgtggccggcatcgtggacaacgccgcggtcaccgggcagctgcccttcgcgcggcccaacggcgccgtgctgccgctcaacagcggcgtgaacgtcaactccggcgcggcgggcgccatcgacaacaacaacattcccttcctcacgggcctgggcggcgccaccaacgccgccaagtccgtcggcagcaacggcaacgggaacgggaacgggaacggcgtgccggtcttcgccggaggcagcctcccgcagggcaccacgctgcagaagctcctcttcgggaccatgaccgtggtggacgacgagctgacggaggcaccggagctggggtccgccgcggtgggccgcgcgcagggcttctacatcgccagctcggaggagggcgtcagccagaccgtggctgtgaccgccatgttcaaggaaggcgggttcgacgacaccatcagcttcttcggcgtgcaccgcaccgcggactcggagtcgcacctcgccgtcgtcggcggcacggggaagtacgtcggtgcgaagggcttcgccaaggtggccgtggtgaggcccggaggggtggcggcgtccggcgcgctgctcgagaccgacggcgtcgagtccgtactccagttcaccgtgttcctcgtgtaa

SEQ ID NO: 114192 - DNA, 1326 bp, Zea Mays
agcagacagcccaacattcgtagaactggcccggggaattgggcactaggtgaggctggcgatccgcatcgaagccgtcccagccaatcacctcgcagatcactcaacacgcggatcgaccccgccagcaggcagcagcgacaccctcgccctccatcccaattcccaatccaacgacccatagttgtccgccgcccgcgccagcgcccagcgcttccgaaaattttcgccatcccagcgtgcccgcccaagcaggcaagcacaccctctgccaccagtataaacccaaagccccctccgacggcagaccgcatcacacagcttgcaaggcgccccatctctcaaaccatccgaacccccctcgccgctcactcccaagctaatccccgccggcagcgatggcccgcacgaagcagacggcgcgcaagtcgacgggcggcaaggcgccgcggaagcagctggcgaccaaggcggcgcgcaagtcggcgccggccacggggggcgtgaagaagccgcaccgcttccgcccgggcaccgtggcgctgcgggagatccgcaagtaccagaagagcacggagctgctgatccggaagctgccgttccagcggctggtgcgggagatcgcgcaggacttcaagacggacctccggttccagtcctccgccgtggccgcgctgcaggaggccgccgaggcctacctcgtgggcctcttcgaggacaccaacctctgcgccatccacgccaagcgcgtcaccatcatgcccaaagacatccagctcgcgcgccgcatccggggcgagagggcctgagcacccccggtctctactgcgattccttcgcttcctgatttctgtagcgggaagaactactgtagtaggcgaggaactactgcgtgttatattggggttgtgggtaggaaactaggaatgttctgttggtttcgatgcagtgccccccgtgatactgacatccgtgctgcttgttctgttcttcctactacgaatgcgattgttactattattttagcgtttgtttatgcggttatgcttctggaactgaacagtgctacttgttaccgctttctgccccaacttccaacagaaataaatccgctactctgctgcgtcagtagaattgtaaaaatgaatcgaagtcacaaaggcgcgaagtgtaagctgtgcaatgttttaaactgtacgcgcaagtgctttgtgtgggccaaaaatgattggtacaaattgaagtggaccaaaatccccaaacgattagttggacgagcaggttcctaggagtaaaatgatagaaaacaataggtaaacactaaaa

SEQ ID NO: 114193 - DNA, 150 bp, Zea Mays
ttccacctctctctctgcttctatgaaaaaaatgttccctccttatttttaggaagagccctcagaggagcacctcatttggttagaaaatgcagctcctccttttgaaggagagaggacaaaagagagaaggagaagcatcttttttgg

SEQ ID NO: 114194 - DNA, 283 bp, Zea Mays
gggagaagcggaaggaggtgggggtgggggggggggggggggtatggctaggaaggagaaggtgccaaagggattcataccgattctgatagggcagggggaggagagggagaggatcctcgtgcacatggagcagttcaagcagtcctacttcctcgagctgcttgatctggcggcgcaggagttcgggtacgagcagcagggaatcctccgtatcccctgcacgaccgaggccttccgatccgtcgttattggtgccgtcgttagaaagcccaagtcatga

SEQ ID NO: 114195 - DNA, 1313 bp, Zea Mays
cgacgagagaaggtccacctgatttggatctacagcggggcgggtgccggagagctcctatggctgtattgatctgggaggacgaggatatagaggagataggttttccccttaaatcattttggagctcggacctgctgcacttgcgccaatgttcatgagtaagtaaaaaaacagcccgttgacctggccgcctccctcgcataagcccaagccgcctccgtcgaccgtggttcccggcggtttcttcttccgacgatatcagcgacactcctggtcccgatcgtctccctcgctgcatagccctctcgccaggtcgtttcgttgctttgaaccatcgaggatatatttttacatcctgctttttctatcaagatcaggtcgctgaagcacttggaacaatcgtagcttgcttttgaaacgttacatcccctaaaggaccaggttcaaacagggacagcaacgcatcaaagaaaaaaaacagacaccaaatctttcaagaactgaagattttaatttctcagatcgtcgacaaccttttaagttgtgaaatgccctctgtataattatatatgtctgctcaactcctttaaagacatttcgtgtaaatatagcaatctaggtttaaatattgtaacaaacatattagctcctggcacatctaacttaactctattttatatataagcctgttatgctctatattgtctttcatgctctatattatctaaaaaacacaactaacatgaaccatcttcaatactaaagttacaaattatttcccacgcgtgcaaggcgcgcgaacgttactagtgatacataatcaaagatcagattgcaacaactgacctcactctttgtctctatcatgctctaactggcagcacaaaaatttgctacatctaattggataaagtggcttggccaattcggtgagccacgactcggcggcggcgacgacgcttggggcggcctcctcgatggtgggggaggcggtgctcgggcgcgaggtggtactggacggagagctgtgagcgtggctgcaacgaagaaggacaagcagtgtagaaggaggagtctgcatgcgccagctatgagatgaagcgagaaaggaaaccaaatacaaaatacattgggccaacatgggtcgtgtaatagtggattgtagttccacaaatcacaggggtgcgtttggatgcgtgtatcaagccagccagactctcgtaacgcagccaagccctatgtggccagactctatgcatgcaactggttactgtttggatgtctgtatgcgtagcatccggtccagctga

SEQ ID NO: 114196 - DNA, 668 bp, Zea Mays
gctaaaattcctctaaattactccttcctcaaagaaatttaattttttacaacctcctaaacgaaagtttcatcaattatatatgagggagaaaaaaacgataaatgtgaacatcactgtccattccaggtacaggttcttattgcgacgtgtcaactgcgagctggactaaggctggcaatagcgacaaattcacctcagccgagagcagcgccctggttcacgaagcgcttcaagattcgcatcagctcatccctcgcctcgctccacggtccgacagagaagccatgcccttctcccgcgaactcggcgagctccacgggcttccccatctccctgagcctggcggcgtagcgccacacgtggccgtgcagcacgtcgcgctcgggcgccacgacgagcgccggcggcagcggcagcggttccaggctcgggctgcccgggccgaacgggttcgccagcgggtggtcccggatggcccccaccggcagcgccatgcgccagagctggtcaatcgtttccaccgtcaggtacacgccggccgggggatcggactccgtcgccacgcgctcgacgctgccaaagaatgcggagaagaggacggcacgagccgagccgagctcggctcgctgcggctcgctcgtgtaacgagccgagctcggctcggc

SEQ ID NO: 114197 - DNA, 795 bp, Zea Mays
atctacccacgacataccaagaaaactagcgagatttagagaggagatttagattacgagatgtcaaacacatccacccccacgctgagcatgaagctcctcatcgacaggaaggcgcagcgggtgctgttcgctgaggcgacgaaggacgtcgtcgacttcatcttctccctcctcaggctgcccgtcgccacggcggcgaagctggtcgggaagacggccatggtcggctgcatcggcaacctctacgccggcgtcgataagcttgactccatctacctgcaggacggcgtcgccaaggacgcgctcctctgcccgactgttgtctcgcaggcggcaaaaaacgccaacagctccctcctccctctgccgaagccgtcggtgcagccaaagatgtatagatgcgccaacaactacagcgaatgccccaactacatcacggacgagcacggcaaggcgtgcccgcgttgtcgctgttccatgacgacggaagtgcaatacctgccgtccgcgagtcacagaagcggctccggccaggtggtggcgtcggcgtcgcagcagcgcaaggcgggagggttcgtgcagggcatcgtgacatacacggtgatggatgatctgacggtgacgcccgtgtccgccatcgtctccagcgttgccctgctcaagaccttcgccatgaggaacaccggcgacctccagcagaagaccgttcagctgggctacaacgagggtctggcgattctcaaggcgtcgctgaaatccaagtccgtcctcactgacgtcttcctctaaacc

SEQ ID NO: 114198 - DNA, 585 bp, Zea Mays
atgacgacaacgaggagccgcacaacaacaacgactacaagcggtgccaagcttagtaccaagggtaacacacttaaacgctcaatacaggatattgagcggattagtcccaatgtgagcgacagtgtcatacacaacttcttggatgacgtccatgtcccatcccttgttgtgccaagggagggtacctcaacacaccaagttgtgatgcctgcagggcaaggatttggctacgacgacactccagacgatattggtccttcccagcttccggatgctccgccatcacagccttcgcagccactagaacgtaggcggcacaagattggccaaagtgcatgcatggagaattgtgggttcactcgttgggtagatcctcgtccgatttttccgcatgcggaatacatatcctacctacataatatgatatttgatctagagagggaagtaagcaacataaatgagaaggaaggaggagacaacaacaatggaggtggttcacaggtgcaagtatgcttagatccatattgtggctacccttgtcacaacaagaatgttggtcctccatctccaccgcagccatag

SEQ ID NO: 114199 - DNA, 916 bp, Zea Mays
gtagcgagctttagcgcttacggttacgagatgccaaaaaccaaagccaccgcgctgagcatgaagctttacatcgacaggaaggcgcagcggttgctgtttgcggaggcgagcaaggacgtcgtggacttcctcttcgccatcctcgcgctgcccgtcgccacggcggttgaactggtcgggaaggaggccatggtcggctgtgtcggcaacctctacgccagcgtcgagaagctcgactccacctacttgcaggccggcgtcgctaatgttgatctcctctgcccgaccgttgtctcaccgtatgcgattgcgaacaccaggagatccctcctctgtctgccgaaggcaaagaacctgtttcgatgcggcaagactgtcgctggatccacgtactgcggtaactacataacggacatgtacaataagaagtgcccggggaattgtggcaaccatatgacggcggcagtgcagtacctgtcgtcggcggttcccagcaacgactccggcaaggtggcggcggcggcgccacagagcgcggcagaagggattgtgcagggcgtagtgacgtacatggtgctggacgacctgacggtgacgcccatggccggcgtctccagcgttgccaccgtgctcaacactttcgccgtgagggacatcggcgacctccaggagaagaccgtgcagctgggctacaaagagggtttggctattctcaaggcgtcgctgaagtccaagtccgtcctcactaacgtcttcgtccacgccaacaacagttcggtcgcttgagaatgaaactgaaaggcgcccattctaccgctcatcatcttaattatggatgacatcaacgggcaagattaataatgtaggttcgggtgacttttgtgatgcttaaacatctgtttctacttcaatg

SEQ ID NO: 114200 - DNA, 907 bp, Zea Mays
actatgatactaccagaaaaactagcaaggtttagcacttacgtttacgagatgtcaaccaccacagccaccgccgggctgaccatgaagcttctcatcgacaggaaggcacagcgggtgctgttcgcggaggcgagcaaggacgtcgtggacttcctcttctccctcctcgtgctgcccatcgccacggcggtgaagctgatcgggaaggaggccatggttggctgcgtcggcaacctctacgcaagcgtcgacaagttggactccgctacctacgtgcaggccggcgtcggcaagaacgcgctcctctgccctacggttgtctcgccggcggcgaacactagcagctcactcctccgtctgccggcgccgtcgtcggtgcagccaaagcagctgtatagatgtaccaataccaacaatatgaacgtcaacaactgccgcgcctacatcacggaacagtacggcagggcgtgcccggcatgtggctgctccatgtctaccacagcgaattacctgccgtttgcggggggcagcagcgcctccgtcggccaatcggtggcgcagagcgcggcgggagggttcgtgcagggcaccgcgacgtacacggtgctggacgacctgacggtgacggtaacgcccaagtcctccatctcaagcatcaccttgctcaacaccttcgccgtgagggacatcggcgacctccaggagaagaccgtgcagctgggctacaaccagggtctggcgattctcgaggcgtcgctcaagtccaagtccgtcctcactgacgtcttcctctacgccaacaagtgacaaaggcttccggtccgtgcggtacggtagtgcctgaaactgcaaggtgccagtccctcccgctcatcatgtcgttgatgacatgaacggacaaggc

SEQ ID NO: 114201 - DNA, 834 bp, Zea Mays
tgcagggggggtaaaaatataattaaatttgagggtgatcataattctctaagacctcaatcatatattatgattcattttttatattcttctacaaatctttgcatcctcctctactgcctgcagcacgatcaaagcttcatatgggagcatttaaagttggtaacataactaatgagaatttctttgaaatcatcaatggtctacggccagcaaacactgcaggttgcagttcatcaaccgatgcacctaacatcccacatgatggcacatctgtaattgaattgttgtctgatagcatgcaccaactgtccattaaaaatgagaatcagttgctacatgattttcttttagatgaaaaccacagcctgcaagagattgatagtgatagtgttggatcacgattgcaggataaaagtaggcgcaatgaggagtcatgttcattcacaagctctaacagagaaagttggggcatatgttcatctttaggtgcagccagtgatgaatcattctcaggcgataataatgataagcagttatccagtgtctgcattgaacgtatctgttatggtgtctgttaggtggattggctatgaggtatgcttatttatgttaaacccatattctaactccagaattatcaagggagtattgttgcatttcacaagattaaacgggttcctcttcagtgtttgtagctggagatcaggagaataactttaaactacacctttctactttcaagaatctacccctggctagttgatgtacattggctgcctttgtggaactcccatgtggttaacttgtggttgcagtgcctgctgcatgccg

SEQ ID NO: 114202 - DNA, 855 bp, Zea Mays
atgactgttgaagaaaagaatgagaaaaataggaagcgtcatgaagcacatcaacgaaataaaggactattgatagagccactctcatccagagaagacgttaatacagaccagacatgtgaggtggttagctttccagatgactgtagcaccattgatttcacaaatttctcaacacaagacattgcaggttgtgtgcatgaaactgttgataacatacctaagcatactatgaaaagggccgcctactttagcgagcggtacaaaaacatgactcccgtcgagagggagtctagacgtgtacgccttaggttgtataataagacaccaagacggaaagatgctaacaaagagtgcagcagaaaacgtagagcactgcgggctaacactttgaatcaggagtccatcgccatggaggacccaatatatacccctgaggttgtatgtcctacaacatatggaattgaaccatatggatcctcagttaccacttgcgactgggttatccctgaattcgtcatgacacctttcctaccaacttcaacacagactaagaacatccttagtccgactaaacgtgtgagtgcaggcatggttaaacaaggagtagaccatacacatacgaagccaaagttcatttccaatggtgatgatgatgagggtgtcacgaagaggatgaggatgatgatgagaacgatggatacctattcgctgggcaatatgatgagaccgacgaggacatcgagatcgatggtacccaagatgaatctactgccactgatttgcctgacttgtacgacaaagtgtacagtaacgtgcctgaagaaacacatatgctgaagtctgtccccaaat

SEQ ID NO: 114203 - DNA, 474 bp, Zea Mays
ctcacctgcaccatgccggagcggtctcgaagggtgacgaaggtgagcccggcgtgcgcgcggcgtagcgcaacccagccgcatagccttaccctgcgcccagcgtccccggcgcccagctcgctgcacagcgcatccctgggcggccactgcagcggctgcaacctctctaccttcacaccagccggggcgggcgccgacacttcctccggcggggtcgcagccgcatcggtggccgccgcggacactagggttcggaactggggcgcggggacagaggccgaggtggaggtggtggagagcgggaggaggcggcggaggtgcaaggcggatggcctgggctttagacgggagaggagggacaagggcgaggcgcggaggagggaggaggacattgggaaccggagaagatagcaagcaggggaagcgcacagcgcagttttggactgaactagacgaagaggcgaagacgcc

SEQ ID NO: 114204 - DNA, 402 bp, Zea Mays
atgccggagcggtctcgaagggtgacgaaggtgagcccggcgtgcgcgcggcgtagcgcaacccagccgcatagccttaccctgcgcccagcgtccccggcgcccagctcgctgcacagcgcatccctgggcggccactgcagcggctgcaacctctctaccttcacaccagccggggcgggcgccgacacttcctccggcggggtcgcagccgcatcggtggccgccgcggacactagggttcggaactggggcgcggggacagaggccgaggtggaggtggtggagagcgggaggaggcggcggaggtgcaaggcggatggcctgggctttagacgggagaggagggacaagggcgaggcgcggaggagggaggaggacattgggaaccggagaagatag

SEQ ID NO: 114205 - DNA, 106 bp, Zea Mays
gttcagttatatactcttttcagttctgctctgtcgtgattatgcatttatctgtaatggtttacgcctttttatttagttttttacgatatgcgccagtatatac

SEQ ID NO: 114206 - DNA, 3496 bp, Zea Mays
agcatatcatgcatccggtcactgtcgtgtaagaccagaccgtcaatggctcatctgcagctacgtgcttggacgtaagtgcaaatgatccggcggcaagcaagcatgcacgtcacggaggaacatgaataagtatctcagcttagcctcacttgccagaagccagaaggtcaatcaatcatcactcacccgttgttttgttccccgcactgcccgctgcagaggccacaggcatggcgccgcgctcggtgagcctgctgcttctgctgacgctcgtggtggccgccgacgacgaggccgcgctgattgcctttaaagccgcggcgatctttggcggcgacacgcttgcgtcgtggaacagtagcggtgccggcggattctgcggctgggtgggggtgacgtgcgggggcggggccaagcaccgccgagtggtggcactgagcctgcccttgcacgggctgagcggatcactctcgcctgccgtcgggaacctgtcgtttctcaggactctcaacctcagctccaacgcactcagcgggggcatccccgacagcctcggtcgcctccgcctgctccgagaactcgacctgagctccaacgccttctcaggcgaggtccccgccaacctgagctcctgcaccagcctagtcctcatgcgcctccgcttcaaccagctcaccgggagcgtgccctacgagttgggtgagaaactgatgaatctcgtggtgctcagtgtttggaacaacagcctcaccggcaccatcccagcgtcattagccaacctgtcgtcgcttagcatcctgtcacttgggttcaaccagctccacggcaccatcccgcctggcatcggcgccatccaggccctccagcacctcgacctcaatgacaaccacctctctggcgaacccccacattccttgtacaacctaacctcgttggaaaggttccagctcagtgataacatgctccatggcagaattcctgatgccataggcatcaggtttcacagcatgcagatgcttgagttttatgctaaccagttcaccgggtccatccctgtttcactcttcaacctcaccacactgcagatgcttgacctctcagaaaataggctcggtggatatgtgtctggtgcagttggaagattggtagctctgcaaagcctattactgtacgggaacctgctgcaggcggacgacaaggagggctgggaattcatcacgtccctgtcaaactgcacccagctcgtggaatttgaaatcggcctcaacgccggtttgactgggcagctgccaagttcaatagcgaatctatctagcctacagacgctccgctttgatggatctgggatctcaggaagcataccatcggccatcggcaatctgctcaacctacaagtcctcggtatgtcaagtactttcatatcaggggttattccagagagcattggcaggctgggaaacttgactgagatggatttgttcagcactgacttgtcaggcatcattcctttatctattggaaatctcaaagggttaaatgtctttgatgcacatcattgcaacttgggggggccaattccagcaagcataggcaacatgtcgaatctgttgacacttgatttatcaaagaactccctcgatggttcaatttccaatgagattttcaaactgtcatcccttctctatttaaacttatcatacaattcgctatcgggacatcttccttctgagatgagtagtttggggaacctgaaccaactagttctgtctgggaaccgattgtctggcgagatacctgagagtattggggaatgcactgtgctgcaataccttatattggataataactcaatcgatggaagcatacctcaaactctgagtaacataaaaggtctaaatgcactcaatttgtccatgaataaactaactggtgttatcccaagtaacattggaactatccaagatcttcaggtgttgtatctggcacacaacaacttgtcagggccaattccttcgctcctacagaatttgacagcattatcagaattggatctgtcattcaacaatctgcaaggggaagtgccaaaggagggtatcttccgatattcgactaacttttcaatcattgggaacagtgagctttgtggtggattacctcaacttcatttagctccatgccagacagatcccatgaaaaagaacagaaaagggcagttgaagcatcttaaaatagctctggcaacaataggtgccctattgatcttagctttctttattgcactccttcagtttattaagaagaaacttatacgaaatcgtaaccaacccttaccaccaatagttgaggaacagcatggaagagtttcttaccatgtattagcaaatggaacaaatggattttcagaagccaatttgcttggtaaaggaagctttggggcggtctacaaatgcactttacagcctgaggaaactgttaccgcggtgaaagtttttaaccttcagcaatctggatccactaaaagttttgtggctgaatgtgaagcattgagaatggtgcgtcaccgttgtctcattaaaatcatcacgtgctgctcaagcatgaatcaccaagatcaagagtttaaggctttagtttttgagttcatgccaaatggcagcttagaaggctggcttcatccaaattctgatattctcactatgacaaatactctaagcctagaacaaaggctagacattgctgtagatatcatggatgctttgaactatcttcataatcactgtcagccaccaattgctcactgcgatctcaagccaagcaacattcttcttgcagaagacatgagtgctcgagttggagacttcggcatatcacgaattcttccagaaaatgcaagtaaaatcctgcaaaattcaaatagcaccatcggaataagaggctcagttggttatgttgctccagagtatgctgaaggctctactgtctcaactattggtgatgtgtatagtctcggtatattgttgcttgagatgtttactggaaggagccccatagatgacatgttcggagacacagtagatttgcataattatgccaaacatgcactcagcgaaagaatcttagatattgttgattcaacaatctggctacatgtagagtcaacggatagtactataaggagcagaattaaggattgcttggtttctgtcttcaggctagccatatcctgctcaaagcttcgtccaggggatcgaacagtgatgagcgatgcagcagcagagatgcacgccatcagagatacataccacatgttttgctgctagcttggcatcaaacaatggacctacagcatttgttggcgcaatgatcaaagtctcaaagatggatgtagacagaatatgttgtgaaatacattaagctataatatgctcagattcgttgttcttttcgtaagagtgacaacgaaaagttatgttggttttaccttattaataac

SEQ ID NO: 114207 - DNA, 128 bp, Zea Mays
ctattggaaatccctcaaagtttgctaaaaattgttgtatgcctgcattcaatagcaatcttaaaggaccagttttaacttaactaggcaagctgaagaacctgtatgaccttgatatgtgacgaacc

SEQ ID NO: 114208 - DNA, 2967 bp, Zea Mays
ctaaccttatacagaaagcagtggccactgtatatttttttggcaaacaaattcacttgtcactgatggtgcatcaggtcttgtaaatataagcatcaggccaccagctagtacagaacaccaatcacttttccgcgatcgtgtaatcgtgtgccaaggcaagaagcaaccggcatggcaatgcgatcgctgtgcttgccgctgctgttgttctccgtgtccatctcaatcccccccgccgtatcagcaaacgaagagctggcctcgcttctggccttcaaggtggcggcgatcagcggcgggtacggcgacccgcttgcttcgtggaacgagagcagcgccggtggcggtgggtactgtagctgggagggggtgagatgctggggcaagcaccggcaagtggtgaagctgagcctgccctcacgtgggctcacaggcgtcctctcgccagccatcggtaatctgtcatccctatggactctcaacctgagcaacaacgggttccacaacagcatcccggcgagcctcggccgcctgcaacgcctccataacctggacctaagccacaatgccttctctggtaagctccccgccaacctgagctcctgcaccagtctggtgtccttgggcctaagctccaaccagctccatgggcgtgtgcctcccgagctcggtggcagcctcaagcgcctcaggggcctcgatctcttcagcaacaacttcaccggcaccatcccggcatcgctggccaatctgtcgtctctgactactctggaccttggattaaaccagcttgagggcagcatcacgcccgatctaggcggcatccagggtctccaatggctctcactggattacaacaaactatctggcgagctcccgcgctccctattgaacttgtcttccttaataacgatgcaggtccaaggaaacatgctccatgggggcattccgtccgacatcggtagcaagttccccaacataacgatccttagctttggcaagaaccagctgacgggatccatccccgcttcactctccaacctcaccactctccaggatgtcgatcttatcacaaataggctaagtgggcatgtgccccgggcactggggaggctgcgagctttggaatcactaagcttgcacgacaacatgctagaaggaccaattcccaaaagcatagggaggctgaagaacctctatgcccttgatatctcaagtaaccgcctaaacggttcaattcccgtcgagattttccagctaccactcctttctagatacttaggcttattacataattcattatcaggtaccctacccgctgaggttggtagcttgataaaccttaacatcctggcgctgtctagaaaccaactgtctggtgagatacctggtagcattggggactgcaccgtgttgcaggaacttgggctggatgacaacttatttgaaggagccatacctcaatctctgagcaatataaagggcctaactggactcaacttgtccatgaataagttgtctggcgtcattcctgaagccattggtagcatgcgcaaccttcaacagttgtatctggcacacaacaatttgtcagggacaatcccaataatattgcaaaacttgacattgtcagaattagatctatccttcaacaatctgcaaggggaagtgccaaaagaggggatattcaaaattttggctaacttgtcaattactggaaataatgatctttgtggtggggtaactgagcttcgtttacctccgtgccacataaatgtggtgaaaagtaacaaaaaagagaagttgaaatctcttacaataggcctagcaacaaccggtgcactcctgttcttagcttttgctattgctgctcaattgatctgcaagaagcttagacaaaggcagacgaggtcattccaaccaccaaaaatcgaggaacactatgaaagagtttcttaccagacactagaaaatggaaccaatggattttcagaagctaatttgcttggtaaaggaagctttggggaggtatataaatgcacttttcaagatgaaggaaatattgcagctgtgaaggtttttcgccttgagcagactagatctataaaaagttttgtggctgaatgtgaagctctaagaagggtgcgtcatcgttgtctcataaagatcatcacgtgctgctcaagcatcaatcaccaaggtcaagagttcaaagcacttgtttttgagttcatgcccaatggtatcttaaatgattggattcattcaaaatctgccatgcccactttgagaaatagtctaagcctggaacaaaggctaaacattgctgtcgatatcattgatgccctggactaccttcataatcactgtcagccaccaatcgtccattgtgatctgaagccaagcaacattcttcttgcagaagacatgagtgcccgagtcggagactttagcatatcaagaatacttccagaaagtgcaagtaaagccctacagaattcaaatagcacaattggaataagaggctccattggttatgttgccccagagtatggtgaaggttcttctgtgtcaactattggtgatgtttatagccttgggatattactgcttgagatgtttacgggaaggagcccaacagatgatatgtttagtggttctttagatctacacaggttttcaggggatgctctaccagagagaatatgggagatagccgatacaacgatgtggattcacacaggtgcatttgacagcaccacaagatatagaattgaaaagtgcttggcttcagtatttgctcttggaatatcatgctcaaagaaacagcctagggaaagaacactcatacatgatgcagccactgaaatgaatgctatcagagattcgtacctccatattagcagatcgcctatggtggaatgtggagtggacaactctgcagtaatttgcaacgataattaa

SEQ ID NO: 114209 - DNA, 489 bp, Zea Mays
atgtccgagccggcacgagacctgccatgggccatgtttaggttcggatacaagtccatcgggcggcatagtggacggtgcggcacgtggcggcgcccggcggcgtggcgggcggggggggccgacctcgtcatcgtccacgccaagccctcgccgtcctccatcgtcagcttcggcggccccggagccggcgaggcgatcaggcacgtggacgccggcctgcgcaagacggcggaggccgtcgtcgccagggcgcgccgcgtctgcgccgccgccagctcggcgcgcgccctggtcgaggtggtggaaggcgagcccaggaccgtgctgtgcagcgcggcggagaagcaccgcgccgacctgctcgtgctgggcagccacggctacggcgccgtcaagagggcgctgctcgggagcgtcagcgactactgcgcgcaccacgcgcactgctccgtcatgatagtcaagcagccaacaaaatccaaatga

SEQ ID NO: 114210 - DNA, 99 bp, Zea Mays
atgaatgaatacaacagactccgaacccgatcagtgtactctggaggatccgccagggtcggagatgaatccgataccaattataagatcactgctgat

SEQ ID NO: 114211 - DNA, 429 bp, Zea Mays
atggacatcactggcggcgctactggggttctggcggcgagagagggcttgggggctgggttctgcgaaggacggttgcagcacggatattatgcgatgcacatcgggtccaagcgcggttcgatggccggagatcgcggcatggctgaacggcccgcgaccggtagtcgtccgaggaagacggacctggtcatcaggtcccacaggtccaccatatcaatagaaatgcaatgtagatatttaagtagtgagtacataaaagcgcttaaaggcaccgttgctcatgttgcagccggaggttgcagctacacaggaacacaaattcagatgacacaacaacagttgcaatattttgctttgacaacattgataaacatattcttggtaaaccttgtgaaccctgatgtcgtgaatacctttatgcagtag

SEQ ID NO: 114212 - DNA, 1834 bp, Zea Mays
agcattagagtgcatttacagtacgttcacccccgcggcccgccccttcagccatcgcaaaactgaggtattcttcttggctgaatgctggcgtcgacagcaaagtccacaactccatcctgcatgcgctcctccctgttctccgttctcactcagcacccccccccccccccttttggcttattgcatagtatatgcatgcccacagtaagtcgcattgcattctgtatgaggtagggtatttttgcagttcttgaatcgtgggaagaagaagatatggaatcgatggatttgaaggtgcaggtggtagagtcatcatttatagcgccgagcgagccgacgccaaggaagggcctctggctctcttccttggacatcctggtggccaacataggccataccccaaccatctacttgtacagctccaatgatgctgccgcggctgattttttcgacgtgggcagactcaaaaaggctatggccaaggctttggtgcccttctaccccctcgccggccgcctcggcaacaacagcgacgatggtaggacggagatcagctgcaacggcgaaggtgcactctttgttgtcgctcacgcggatgatgaactcactatcgacgacgtcaagaaattgaagccatcgccagagttgaggaggctgttcgttccacgcatcgagccatcgtccatcatgttggccatacaggtgactttcttgaagtctggaggggtggtgttaggaacagctctccaccacgccgccatagacgcttcaagtgcgttccactttttccagacatggtcggcattctgcaagcatggtgaccgtgctgccgtggagctcccgtgccacgaccgcaccctactccgcgcacggtcgccgcccacagtccaccccggcacactcttgacattgcagcctcggctaaccctctctgacctcgagggacctcttgccatcgaagtcttcaccatttccaaggatcaggtcgcctccctgaagcacctctgcggtggcacgagcaccttttgcgccgtcagcgctctcatctggcagtgtacgtgcgttgcgcgccgccttccaccggattctcaagtgcgcatggtatttcccgccgagctccgccgccggatgaggccgcccctcccgaaccactacttcggcaacgcagtgttcaggctatacgtcactggcgcggctggggatattggcacggcggcgttgggatccgtcgctacccgcatcaagggcgccatcaagcggttggatgacgagctggtgcggtccgccattgactacttcgagaacgagaaggccgccgagatgaacaagagacgggctctgagaggcaccctgccaaagacgttcctgaatattacaagctggttgggtaggccacagtacgacgcagattttgggtggggaaagccgcaattcatgtcgctggcggagtccttctgcggcggctttgtgcacttgatgaacgatgagaggacaacgtactacggtggtgccaccggcgacgtccgcatgatcgtgtgcatggaggctgtagatatgaaggagctagggcggttgctttatgtgaagctcaagcaagctgcttgtgctatgcactaaaaataagggccgtaaaaataaagctctagcaagctgctcgtgctatgcattaagaataagggcagtaaaaataaagctatagcaagctgctaatgctatgcactaaaaataaagctcttccaaactgctagtgttatgcactaaaaataataatatggtttgttactatatatgctaaaaataataataaatgagctaaggcagctgtattaca

SEQ ID NO: 114213 - DNA, 815 bp, Zea Mays
atggcggatgtagaggctcggaagtttaaatgtgaatgcaaacagtgggagcacacaggcgaagaggatgttgttggaaacgatgaaggtgaacatgtatcgcaatgtgataatgaggagcatgtggtagatggaagcagcaatattgatgcacatcatcaatctgagttgcaaatgacgcttgttggaaatgatgattgtgaagggacacaatatggggatgttagaaagagactgaaatatgatgtagatggcataagcttagtgcgcccaaataatgcaaggccaaatggaagaacgataaaaactagtgagcaaagagttgtgaaactgggtgcgaaaggagaaaagaagaagactcgaaagtgccaaaaatgtggcattgctaatggacacaacagtcgcacatgcttgtctgtggaggaaaatagagttaaattggctagccttgctgatagaaaaagaggacgaccgtctgtgtctagaaacaagaattcaacaatggcccccagtggaatgagacatccacatcaaagaagcataaactgattaattctggagaacatggatccgatgatgatgatttgacatgattgtgaaacatacatgcaaaaatattctataggattgtatggaaatgttatgatcatgatactatatgatgattatttacgttaaaagctcactatatggattatatgtattaatgcaacataataatttcctatgaaatattgtaatgttggatttgtttggccatataagcagaaattcattccatgacacaaagtatttatattgcaaaaactaaacag

SEQ ID NO: 114214 - DNA, 525 bp, Zea Mays
atgattttgggaggaaggagatggaactcaaagacgacgcgacacgctacacaggggatggttggcgggccacgacgtttgctgggcccggaggacggacggaaggaggctggaaggcttcgccttttttatttctacagaaatcagcctctcgaggcttctagcagctgcatcattgaggcttgagcttggcacatctgcaccaagggagactgctgcagaggcaagtagttttcgcggaactagtgtctgtttatcctccgaagtgcagtcaagcgatgagaaacccatattgctggttgaaaacatccttgaagaatttgaagatgatgagaaaagggactaagccagagaagaaaggatttgatccgaagtggctaggtttagcagactgcatcgacagggcaggaagggacattgagagaatggtaaaagatgacctgttggaagagctggttggaagatcacttcttgttgtatttactccaatttacgatatttcttgatgcattttatgacaacctc

SEQ ID NO: 114215 - DNA, 234 bp, Zea Mays
atggatatggatccgaccgctgaggaggaataccgacttgaggaacataacaaggagcaggatgcacaggcctatatcgacatcgtcaacgatgatgctcctagtgccggtactggaacagggataggctcaactagccccctgctgctgatggaagcagtactggtattggtagtagcagtggtgtcgatgcctcaaggaagagatctaaagtctggaatggctttgaggtag

SEQ ID NO: 114216 - DNA, 1835 bp, Zea Mays
ctcctccacgcgaatccgcatctccacactccaatcagcgctcctccgtccccgttctttcctcctcccttcagccatcgcagtcgcagcgcaggttcttggctggttgctggtgtcgacagcgaagtccgcaactccaatcctgcctgcgctcctcccttcctccgtcctcactaagcacccgcgcacgccgcctgcctgtcgattgagatctctttcacgcccctttctgccatcgcacaactgagccgcagctagtaacatccattttgctggtcaataagtcgtgggaggaagaagatggattatttgaaggtgcaggtggtagagtcatcatttgtagtgccgagcgagccgacgccaacgaaggcgctctggctctcttgcttggacatggttcagtccaacaaagcccacaccccaacgatccacttgtacagctccaacgatgctgcggcggctgattttttcgacctgggcagactcaagaaggctacggccaaagccttggtggccttctaccccctcgccggccgcctcgtcgacagcgacgatggtaggaaggagatcagctgcaacggcgaaggtgcactctttgttgtcgctcgcgcggatggtgatctcactatcgatgaagtcaagaaattcaagccatcgccagagttgaggaggctgtttattccactcatcgagccatcgtccatcataatggccatacaggtgactttcttgaagtgtggaggtgtggtgttaggaacagctatccaccacgccgccacagacgtttcaagcgcgttccacttttttcagacatggtcggcgttctgcaagcatggtgacagtgctgccgtggagctcccgtgccacgaccgcaccctactccgcgcacggtccccgcccacagtccaccccgacgcgctctcgacattgcagcctcggctcgtcctcactgaacccgaggggcctcttgccatcgaaatcttcaccatttccagggaccatgtcgcctccctgaagcagctctgcggtggcacgagcaccttttgcgccgtcagcgctctcatctggcagtgcgcgtgcgttgcacgacggatcccaccggactctcaggtgcgcgtgatgttcccggccgacgtccgccgccggatgaggccgcccctcccgacccactacttcggcaacgcagtgatcaggctatacgccgctggcccggcaggggacattggcacggcggcgttggcatccgtcgctgcccgcatcaagggcgccgtcgagcggatggatgacgagctggtgcggtccgcgattgactactacgagatggccgagacgaacaagagacggactgggacaggcatcttaccacggacggacctgaatattaccagctggttgggtaggccacagcacgacgcagattttggctggggaaagccgcaatccatgtcgcgggcggagtctgtccgcggcggctctatgcacttgatgaacgacgacggtggtaccggcgacgtccgcgtgctcgtgtgcttggaggctgaaaatataaaggagctaggacggctgctttatgcaaagctctagcaagctgctagtgctatgctctaaaaataataatattaataataaggtttgttactatgcttaaggggaaccatactttttccctcgcgatttattattattatggcagtttcaataatgaaaaccatttgtaattcctgtgacaattaatttatgcgtccacgctagaaataaaaacttgtttgtaatactacagtttttttttgttatggcagtttcaataatgaaatccgtatgtaattcctgtgact

SEQ ID NO: 114217 - DNA, 1745 bp, Zea Mays
ctcctccacgcgaatccgcatctccacactccaatcagcgctcctccgtccccgttctttcctcctcccttcagccatcgcagtcgcagcgcaggttcttggctggttgctggtgtcgacagcgaagtccgcaactccaatcctgcctgcgctcctcccttcctccgtcctcactaagcacccgcgcacgccgcctgcctgtcgattgagatctctttcacgcccctttctgccatcgcacaactgagccgcagctagtaacatccattttgctggtcaataagtcgtgggaggaagaagatggattatttgaaggtgcaggtggtagagtcatcatttgtagtgccgagcgagccgacgccaacgaaggcgctctggctctcttgcttggacatggttcagtccaacaaagcccacaccccaacgatccacttgtacagctccaacgatgctgcggcggctgattttttcgacctgggcagactcaagaaggctacggccaaagccttggtggccttctaccccctcgccggccgcctcgtcgacagcgacgatggtaggaaggagatcagctgcaacggcgaaggtgcactctttgttgtcgctcgcgcggatggtgatctcactatcgatgaagtcaagaaattcaagccatcgccagagttgaggaggctgtttattccactcatcgagccatcgtccatcataatggccatacagacatggtcggcgttctgcaagcatggtgacagtgctgccgtggagctcccgtgccacgaccgcaccctactccgcgcacggtccccgcccacagtccaccccgacgcgctctcgacattgcagcctcggctcgtcctcactgaacccgaggggcctcttgccatcgaaatcttcaccatttccagggaccatgtcgcctccctgaagcagctctgcggtggcacgagcaccttttgcgccgtcagcgctctcatctggcagtgcgcgtgcgttgcacgacggatcccaccggactctcaggtgcgcgtgatgttcccggccgacgtccgccgccggatgaggccgcccctcccgacccactacttcggcaacgcagtgatcaggctatacgccgctggcccggcaggggacattggcacggcggcgttggcatccgtcgctgcccgcatcaagggcgccgtcgagcggatggatgacgagctggtgcggtccgcgattgactactacgagatggccgagacgaacaagagacggactgggacaggcatcttaccacggacggacctgaatattaccagctggttgggtaggccacagcacgacgcagattttggctggggaaagccgcaatccatgtcgcgggcggagtctgtccgcggcggctctatgcacttgatgaacgacgacggtggtaccggcgacgtccgcgtgctcgtgtgcttggaggctgaaaatataaaggagctaggacggctgctttatgcaaagctctagcaagctgctagtgctatgctctaaaaataataatattaataataaggtttgttactatgcttaaggggaaccatactttttccctcgcgatttattattattatggcagtttcaataatgaaaaccatttgtaattcctgtgacaattaatttatgcgtccacgctagaaataaaaacttgtttgtaatactacagtttttttttgttatggcagtttcaataatgaaatccgtatgtaattcctgtgact

SEQ ID NO: 114218 - DNA, 1839 bp, Zea Mays
ccgttctttcctcctccacgcgaatccgcatctccacactccaatcagcgctcctccgtccccgttctttcctcctcccttcagccatcgcagtcgcagcgcaggttcttggctggttgctggtgtcgacagcgaagtccgcaactccaatcctgcctgcgctcctcccttcctccgtcctcactaagcacccgcgcacgccgcctgcctgtcgattgagatctctttcacgcccctttctgccatcgcacaactgagctagtaacatccattttgctggtcaataagtcgtgggaggaagaagatggattatttgaaggtgcaggtggtagagtcatcatttgtagtgccgagcgagccgacgccaacgaaggcgctctggctctcttgcttggacatggttcagtccaacaaagcccacaccccaacgatccacttgtacagctccaacgatgctgcggcggctgattttttcgacctgggcagactcaagaaggctacggccaaagccttggtggccttctaccccctcgccggccgcctcgtcgacagcgacgatggtaggaaggagatcagctgcaacggcgaaggtgcactctttgttgtcgctcgcgcggatggtgatctcactatcgatgaagtcaagaaattcaagccatcgccagagttgaggaggctgtttattccactcatcgagccatcgtccatcataatggccatacaggtgactttcttgaagtgtggaggtgtggtgttaggaacagctatccaccacgccgccacagacgtttcaagcgcgttccacttttttcagacatggtcggcgttctgcaagcatggtgacagtgctgccgtggagctcccgtgccacgaccgcaccctactccgcgcacggtccccgcccacagtccaccccgacgcgctctcgacattgcagcctcggctcgtcctcactgaacccgaggggcctcttgccatcgaaatcttcaccatttccagggaccatgtcgcctccctgaagcagctctgcggtggcacgagcaccttttgcgccgtcagcgctctcatctggcagtgcgcgtgcgttgcacgacggatcccaccggactctcaggtgcgcgtgatgttcccggccgacgtccgccgccggatgaggccgcccctcccgacccactacttcggcaacgcagtgatcaggctatacgccgctggcccggcaggggacattggcacggcggcgttggcatccgtcgctgcccgcatcaagggcgccgtcgagcggatggatgacgagctggtgcggtccgcgattgactactacgagatggccgagacgaacaagagacggactgggacaggcatcttaccacggacggacctgaatattaccagctggttgggtaggccacagcacgacgcagattttggctggggaaagccgcaatccatgtcgcgggcggagtctgtccgcggcggctctatgcacttgatgaacgacgacggtggtaccggcgacgtccgcgtgctcgtgtgcttggaggctgaaaatataaaggagctaggacggctgctttatgcaaagctctagcaagctgctagtgctatgctctaaaaataataatattaataataaggtttgttactatgcttaaggggaaccatactttttccctcgcgatttattattattatggcagtttcaataatgaaaaccatttgtaattcctgtgacaattaatttatgcgtccacgctagaaataaaaacttgtttgtaatactacagtttttttttgttatggcagtttcaataatgaaatccgtatgtaattcctgtgact

SEQ ID NO: 114219 - DNA, 1929 bp, Zea Mays
ctcctccacgcgaatccgcatctccacactccaatcagcgctcctccgtccccgttctttcctcctcccttcagccatcgcagtcgcagcgcaggttcttggctggttgctggtgtcgacagcgaagtccgcaactccaatcctgcctgcgctcctcccttcctccgtcctcactaagcacccgcgcacgccgcctgcctgtcgattgagatctctttcacgcccctttctgccatcgcacaactgagccgcagctagtaacatccattttgctggtcaataagtcgtgggaggaagaagatggattatttgaaggtgcaggtggtagagtcatcatttgtagtgccgagcgagccgacgccaacgaaggcgctctggctctcttgcttggacatggttcagtccaacaaagcccacaccccaacgatccacttgtacagctccaacgatgctgcggcggctgattttttcgacctgggcagactcaagaaggctacggccaaagccttggtggccttctaccccctcgccggccgcctcgtcgacagcgacgatggtaggaaggagatcagctgcaacggcgaaggtgcactctttgttgtcgctcgcgcggatggtgatctcactatcgatgaagtcaagaaattcaagccatcgccagagttgaggaggctgtttattccactcatcgagccatcgtccatcataatggccatacaggtcgtccgctactttctctgcctccatgccttttaaaattttcaactttcgattctcacggtgtagtctgtctgttaagagtagataaactgggtcctcctgttggtttccaggaggattttttcccttctattttataaattatatagcaattggcgtgcttatgatggcaggtgactttcttgaagtgtggaggtgtggtgttaggaacagctatccaccacgccgccacagacgtttcaagcgcgttccacttttttcagacatggtcggcgttctgcaagcatggtgacagtgctgccgtggagctcccgtgccacgaccgcaccctactccgcgcacggtccccgcccacagtccaccccgacgcgctctcgacattgcagcctcggctcgtcctcactgaacccgaggggcctcttgccatcgaaatcttcaccatttccagggaccatgtcgcctccctgaagcagctctgcggtggcacgagcaccttttgcgccgtcagcgctctcatctggcagtgcgcgtgcgttgcacgacggatcccaccggactctcaggtgcgcgtgatgttcccggccgacgtccgccgccggatgaggccgcccctcccgacccactacttcggcaacgcagtgatcaggctatacgccgctggcccggcaggggacattggcacggcggcgttggcatccgtcgctgcccgcatcaagggcgccgtcgagcggatggatgacgagctggtgcggtccgcgattgactactacgagatggccgagacgaacaagagacggactgggacaggcatcttaccacggacggacctgaatattaccagctggttgggtaggccacagcacgacgcagattttggctggggaaagccgcaatccatgtcgcgggcggagtctgtccgcggcggctctatgcacttgatgaacgacgacggtggtaccggcgacgtccgcgtgctcgtgtgcttggaggctgaaaatataaaggagctaggacggctgctttatgcaaagctctagcaagctgctagtgctatgctctaaaaataataatattaataataaggtttgttactatgcttaaggggaaccatactttttccctcgcgatttattattattatggcagtttcaataatgaaaaccatttgtaattcctgtgacaattaatttatgcgtccacgctagaaat

SEQ ID NO: 114220 - DNA, 1975 bp, Zea Mays
ccgttctttcctcctccacgcgaatccgcatctccacactccaatcagcgctcctccgtccccgttctttcctcctcccttcagccatcgcagtcgcagcgcaggttcttggctggttgctggtgtcgacagcgaagtccgcaactccaatcctgcctgcgctcctcccttcctccgtcctcactaagcacccgcgcacgccgcctgcctgtcgattgagatctctttcacgcccctttctgccatcgcacaactgaggtacggttctttgcttattgcagagtatagtatggatgcccgcagtgagtcgtcgtgtcgtgccttcagtaggaggtacggtacttgtgctgtaggagcagttcataagtcgccacactgttttcaggaaatgacagtctttgtgtgtgtatttcatagatctagagcattcactgtcttgtccctttgcagccgcagctacgatactattaacatcaatttgtctggtcaataaatcactcggagcaatcgtgcgagtctttgtgtgtgtatttcattgatctcgagcactcactgttttgtgcctttgcagccgcagctagtaacatccattttgctggtcaataagtcgtgggaggaagaagatggattatttgaaggtgcaggtggtagagtcatcatttgtagtgccgagcgagccgacgccaacgaaggcgctctggctctcttgcttggacatggttcagtccaacaaagcccacaccccaacgatccacttgtacagctccaacgatgctgcggcggctgattttttcgacctgggcagactcaagaaggctacggccaaagccttggtggccttctaccccctcgccggccgcctcgtcgacagcgacgatggtaggaaggagatcagctgcaacggcgaaggtgcactctttgttgtcgctcgcgcggatggtgatctcactatcgatgaagtcaagaaattcaagccatcgccagagttgaggaggctgtttattccactcatcgagccatcgtccatcataatggccatacaggtgactttcttgaagtgtggaggtgtggtgttaggaacagctatccaccacgccgccacagacgtttcaagcgcgttccacttttttcagacatggtcggcgttctgcaagcatggtgacagtgctgccgtggagctcccgtgccacgaccgcaccctactccgcgcacggtccccgcccacagtccaccccgacgcgctctcgacattgcagcctcggctcgtcctcactgaacccgaggggcctcttgccatcgaaatcttcaccatttccagggaccatgtcgcctccctgaagcagctctgcggtggcacgagcaccttttgcgccgtcagcgctctcatctggcagtgcgcgtgcgttgcacgacggatcccaccggactctcaggtgcgcgtgatgttcccggccgacgtccgccgccggatgaggccgcccctcccgacccactacttcggcaacgcagtgatcaggctatacgccgctggcccggcaggggacattggcacggcggcgttggcatccgtcgctgcccgcatcaagggcgccgtcgagcggatggatgacgagctggtgcggtccgcgattgactactacgagatggccgagacgaacaagagacggactgggacaggcatcttaccacggacggacctgaatattaccagctggttgggtaggccacagcacgacgcagattttggctggggaaagccgcaatccatgtcgcgggcggagtctgtccgcggcggctctatgcacttgatgaacgacgacggtggtaccggcgacgtccgcgtgctcgtgtgcttggaggctgaaaatataaaggagctaggacggctgctttatgcaaagctctagcaagctgctagtgctatgctctaaaaataataatattaataataaggtttgttactatgcttaagggg

SEQ ID NO: 114221 - DNA, 1740 bp, Zea Mays
ccgttctttcctcctccacgcgaatccgcatctccacactccaatcagcgctcctccgtccccgttctttcctcctcccttcagccatcgcagtcgcagcgcaggttcttggctggttgctggtgtcgacagcgaagtccgcaactccaatcctgcctgcgctcctcccttcctccgtcctcactaagcacccgcgcacgccgcctgcctgtcgattgagatctctttcacgcccctttctgccatcgcacaactgaggtacggttctttgcttattgcagagtatagtatggatgcccgcagtgagtcgtcgtgtcgtgccttcagtaggagccgcagctagtaacatccattttgctggtcaataagtcgtgggaggaagaagatggattatttgaaggtgcaggtggtagagtcatcatttgtagtgccgagcgagccgacgccaacgaaggcgctctggctctcttgcttggacatggttcagtccaacaaagcccacaccccaacgatccacttgtacagctccaacgatgctgcggcggctgattttttcgacctgggcagactcaagaaggctacggccaaagccttggtggccttctaccccctcgccggccgcctcgtcgacagcgacgatggtaggaaggagatcagctgcaacggcgaaggtgcactctttgttgtcgctcgcgcggatggtgatctcactatcgatgaagtcaagaaattcaagccatcgccagagttgaggaggctgtttattccactcatcgagccatcgtccatcataatggccatacaggtcgtgactttcttgaagtgtggaggtgtggtgttaggaacagctatccaccacgccgccacagacgtttcaagcgcgttccacttttttcagacatggtcggcgttctgcaagcatggtgacagtgctgccgtggagctcccgtgccacgaccgcaccctactccgcgcacggtccccgcccacagtccaccccgacgcgctctcgacattgcagcctcggctcgtcctcactgaacccgaggggcctcttgccatcgaaatcttcaccatttccagggaccatgtcgcctccctgaagcagctctgcggtggcacgagcaccttttgcgccgtcagcgctctcatctggcagtgcgcgtgcgttgcacgacggatcccaccggactctcaggtgcgcgtgatgttcccggccgacgtccgccgccggatgaggccgcccctcccgacccactacttcggcaacgcagtgatcaggctatacgccgctggcccggcaggggacattggcacggcggcgttggcatccgtcgctgcccgcatcaagggcgccgtcgagcggatggatgacgagctggtgcggtccgcgattgactactacgagatggccgagacgaacaagagacggactgggacaggcatcttaccacggacggacctgaatattaccagctggttgggtaggccacagcacgacgcagattttggctggggaaagccgcaatccatgtcgcgggcggagtctgtccgcggcggctctatgcacttgatgaacgacgacggtggtaccggcgacgtccgcgtgctcgtgtgcttggaggctgaaaatataaaggagctaggacggctgctttatgcaaagctctagcaagctgctagtgctatgctctaaaaataataatattaataataaggtttgttactatgcttaagggg

SEQ ID NO: 114222 - DNA, 2065 bp, Zea Mays
gagattcgtcagttgggccggccgggggtggttccgttcagttccttatctgcgggcagtcgtcggcggcgatgggtatcctcgcgctcatcaccggcaaggcgggcgccagcgggttcgggtcggcgtccacggcggagcaggtcaccgacggcgctgacgccagccgcctcaccgtcgctatcacaggaggagctagtggcattggtctggagacatcaagagtcttcgccctgagaggagcccatgtggtcatcgctgctagaaacacagaggctgcatcagaagcaagaaagaccatcatggagaagaacccaacggcacgtattgatgttctgaagctagacctcagctccctcaagtctgtcagggcttttgtggaccagttcaactcgatgaaactccctctaaacatcctgataaataatgcaggcgtcatgttctgcccttttcaactgtctaaagacggggtcgagatgcagttcgcgacaaatcatctaggacactttctgcttaccaatctcctccttgataccatgaaggccactgccaagtctacgggcattgagggccgcattgtgaacctgtcatcagtcgcccaccaccatacgtatccgaagggaattgacttcgataacctcaacgatgagaaaatatacaacgacaaaatggcttatggacagtctaagctggcgaacttgctgcatgcgaaggagctctctagaaggctgaaggaagaaggagcaaacatcacagttaacagtgtccatcctggattgatcatgaccaatttgatgaggcactcctttgttctcatgaaggtgcttcaggttgccacttacatactgtggaagaatgtaccccagggagctgcgactacttgctacgtaggactgagccctcaactcaagggagtgacaggaaagtactttgctgactgcaacgtggagaagacgagcaaactggcgaggagcgaggagttggcgaagcagctctgggacttcagcgaggagctgatcaagtctgcgaagtgagagccgaaagagctggatcagagaaaatgttgtggtcctgcttggcatctagtggtacaagtgatgactgattagtatatagcacggaggaggaacctgggcgatggctggacctcatggtgttcaggaataaaatctgcttgctttcgtacattaattagtccggtgtggcaaacatcaatttgtagtgctgtcaatatctgttcaatatacgtgcagctcagttctgacttgaaaaatgcagagtcgtgtttgcctgaaacatgtcgtttcaaccagtgtttgattctttttcgttatttggttcagcatccgaattgtgagtacagctcttcttgttacattgtgggcatctctactattttgcaacagaaactgcaagccaagatccaagattcgtatcatcacactataatatgtagaccacaaaattcctgcttttcatgtatgtaaattgtgaacagatcgagaataatcacacagcctgagcctacacttgttctagaaaaacctccggcgaagttggctcgtcgtcgtgatcatcctcccacaccccaaaggccgtggtgaaccagacggcggcggtcaccacgacgacggcgaacactaggggcacgacgacgtcgggctttgcccgtccgagcatgccgacaggcacgcagacgacgtcccacggcggcccgtcgagcggcaggccgacgctgaacccgtcgccggcgccgctggagcccggacacgcccgggagagcggcgccccgggcccgacggcccagacgaaggcgaactccggcgcgaacgccgccacggccacggccgtggtggccaccgccgtccacgcggccgcgtagagcagcagcgcgcggcgcgcgaaggagagggaggggaagctggggaacgccataggggggtgtgtgcccgcccgaccggttgcgaggatcgttggagagctcggttcacgcgcgcggtgcgaggtttattagcggagcgggcggggagcggctagtgctgctggttgggggtgggtgaagagg

SEQ ID NO: 114223 - DNA, 411 bp, Zea Mays
ctacacttgttctagaaaaacctccggcgaagttggctcgtcgtcgtgatcatcctcccacaccccaaaggccgtggtgaaccagacggcggcggtcaccacgacgacggcgaacactaggggcacgacgacgtcgggctttgcccgtccgagcatgccgacaggcacgcagacgacgtcccacggcggcccgtcgagcggcaggccgacgctgaacccgtcgccggcgccgctggagcccggacacgcccgggagagcggcgccccgggcccgacggcccagacgaaggcgaactccggcgcgaacgccgccacggccacggccgtggtggccaccgccgtccacgcggccgcgtagagcagcagcgcgcggcgcgcgaaggagagggaggggaagctggggaacgccat

SEQ ID NO: 114224 - DNA, 1374 bp, Zea Mays
gagattcgtcagttgggccggccgggggtggttccgttcagttccttatctgcgggcagtcgtcggcggcgatgggtatcctcgcgctcatcaccggcaaggcgggcgccagcgggttcgggtcggcgtccacggcggagcaggtcaccgacggcgctgacgccagccgcctcaccgtcgctatcacaggaggagctagtggcattggtctggagacatcaagagtcttcgccctgagaggagcccatgtggtcatcgctgctagaaacacagaggctgcatcagaagcaagaaagaccatcatggagaagaacccaacggcacgtattgatgttctgaagctagacctcagctccctcaagtctgtcagggcttttgtggaccagttcaactcgatgaaactccctctaaacatcctgataaataatgcaggcgtcatgttctgcccttttcaactgtctaaagacggggtcgagatgcagttcgcgacaaatcatctaggacactttctgcttaccaatctcctccttgataccatgaaggccactgccaagtctacgggcattgagggccgcattgtgaacctgtcatcagtcgcccaccaccatacgtatccgaagggaattgacttcgataacctcaacgatgagaaaatatacaacgacaaaatggcttatggacagtctaagctggcgaacttgctgcatgcgaaggagctctctagaaggctgaaggaagaaggagcaaacatcacagttaacagtgtccatcctggattgatcatgaccaatttgatgaggcactcctttgttctcatgaaggtgcttcaggttgccacttacatactgtggaagaatgtaccccagggagctgcgactacttgctacgtaggactgagccctcaactcaagggagtgacaggaaagtactttgctgactgcaacgtggagaagacgagcaaactggcgaggagcgaggagttggcgaagcagctctgggacttcagcgaggagctgatcaagtctgcgaagtgagagccgaaagagctggatcagagaaaatgttgtggtcctgcttggcatctagtggtacaagtgatgactgattagtatatagcacggaggaggaacctgggcgatggctggacctcatggtgttcaggaataaaatctgcttgctttcgtacattaattagtccggtgtggcaaacatcaatttgtagtgctgtcaatatctgttcaatatacgtgcagctcagttctgacttgaaaaatgcagagtcgtgtttgcctgaaacatgtcgtttcaaccagtgtttgattctttttcgttatttggttcagcatccgaattgtgagtacagctcttcttgtt

SEQ ID NO: 114225 - DNA, 934 bp, Zea Mays
gagattcgtcagttgggccggccgggggtggttccgttcagttccttatctgcgggcagtcgtcggcggcgatgggtatcctcgcgctcatcaccggcaaggcgggcgccagcgggttcgggtcggcgtccacggcggagcaggtcaccgacggcgctgacgccagccgcctcaccgtcgctatcacaggaggagctagtggcattggtctggagacatcaagagtcttcgccctgagaggagcccatgtggtcatcgctgctagaaacacagaggctgcatcagaagcaagaaagaccatcatggagaagaacccaacggcacgtattgatgttctgaagctagacctcagctccctcaagtctgtcagggcttttgtggaccagttcaactcgatgaaactccctctaaacatcctgataaataatgcaggcgtcatgttctgcccttttcaactgtctaaagacggggtcgagatgcagttcgcgacaaatcatctaggacactttctgcttaccaatctcctccttgataccatgaaggccactgccaagtctacgggcattgagggccgcattgtgaacctgtcatcagtcgcccaccaccatacgtatccgaagggaattgacttcgataacctcaacgatgagaaaatatacaacgacaaaatggcttatggacagtctaagctggcgaacttgctgcatgcgaaggagctctctagaaggctgaaggaagaaggagcaaacatcacagttaacagtgtccatcctggattgatcatgaccaatttgatgaggcactcctttgttctcatgaaggtgcttcaggttgccacttacatactgtggaagaatgtaccccaggtctggagccagatctttgtatttcatttttgtagccaattcttgttcatagcgacgttattatctcg

SEQ ID NO: 114226 - DNA, 480 bp, Zea Mays
gagattcgtcagttgggccggccgggggtggttccgttcagttccttatctgcgggcagtcgtcggcggcgatgggtatcctcgcgctcatcaccggcaaggcgggcgccagcgggttcgggtcggcgtccacggcggagcaggtcaccgacggcgctgacgccagccgcctcaccgtcgctatcacaggaggagctagtggcattggtctggagacatcaagagtcttcgccctgagaggagcccatgtggtcatcgctgctagaaacacagaggctgcatcagaagcaagaaagaccatcatggagaagaacccaacggcacgtattgatgttctgaagctagacctcagctccctcaagtctgtcagggcttttgtggaccagttcaactcgatgaaactccctctaaacatcctgatgtaaccctcttcacctctcgttcatgcttgttttttgctttcatatatatgatagtttc

SEQ ID NO: 114227 - DNA, 1598 bp, Zea Mays
ggactttgcatgcttgggctcgtcggcaaccggacaggaggacagcaaggcggaagcgcaaccgggcgtcgctggtccgacgggcggcacgtgtcagggagcgtgacaggggcggcagatccggacctccacgtccgtatccatatccacatccatccatcaaacacggaagagagagaggaagggagggagggagaggagagattattttggaccagttccaccgcttaatttgcaggaccgccaccccccgcggcgccgacgatcacctcaggcgtgcgcggatatggggcgccgcggctcctacgaccgcctcgaggcgctctccctggagatcgagcgcaagctgcacaaggccctgatgtccaactcacagcgtcttcagatacttcagcaattgtttgctgacatcgcattgaaggtggatgatcgcgctcgagatgcaattatgagtgagagtgatgatggcattgctccagcagatgaacgggaggatggttggctatgcttctatgagattcttgccaatcattttgttagagtgcctgaaagtggcaggcgtatacttgagttgattgtgcaactctggagccagtccttcgcggccaacatatttgcacttcttttccagaaatggttgtttgaagcccctcttgatgaaaaagaaatatcgctacgatatagctctgctcttgttcaaggtgctacaaatgtattttggattgacatacagacaaatacaagacattttctctctttgtatcattatctccttgaggacgttgctctagtccctgaaagacttagtaaaatatcattacaggctggtagagaccttttccttctgctctctagattcatgttcttctatgatcaagatcacatgctttctagtttcctagagcattttcccaatttcccaaattccttcttggttggtggaccagcagattactttgtaattgaactcgctgatcagcttcaaaagctaaaaattgagccagtactactacactacctctcccgcatgagcatacttcaagggttggaactgaggttgagtacaagcaccagactaaaggcctgcctctacagcttcacttctcctggtggccctacctacccaacacgggcggtgcggcacgcagcctggaacaccttggatttgctgttccctatcggtcgttacccgaggcacgtgatcagcctgttcttccggctgctgtatccgtggtactggccttcctcttgctggaacttcgtgatgacctgtgccatgaccgtgtactactacatcctgaacctgctggtgtcgtgttgggagaacatgaggcggcggcccagtcaccggagaacgcacggtgaatgaagacgcggcggcccatccagtggcaccttgtgttgttgttgttgttcatttttctttcctttgcgcgagtggtgtagtagttagtagcagcggcttatgtgttcgtcgcgaaacaacattccctgtataatataaactgctgtacttgttcagctgttgttcatataggaagagccgaatgaagaggaacagctggtaatggagggagagcgtgtgcgcgcatttctcg

SEQ ID NO: 114228 - DNA, 396 bp, Zea Mays
atgtacatggagttcacatcagaacccgaactgatggtgggggcgcctgcgtgcgagttggagaagccctccatcagcgtgcctgtgccgactcctgctccagcggccgctccggtgacgggcgggcaatggaggccatccggggacgtggccaccatgggatcgaacaccgccagcatctcatcgtcgtccgatgtgaccaatccgtctctcccctcctcgctttatgtgtgcttccctactgcgggactcgcagacggaagtgccctggacgacacggtgaagagggtggactcatcgtcccaactggagatggcgctcctgcgtgagccttcggcggaggggatcggcaaacttggggcgacagcagaccgagggggcagaggcgggagctga

SEQ ID NO: 114229 - DNA, 1974 bp, Zea Mays
cgtcttcccctcctccgcgctcccgtcatctacacctctcgctcccacccacgagtcccaccgccaccaccaccagtctatcccctcgccatttgtttcctccccgtgcatgaaaccctaaacctaaaccccacctcccttcccgagccatcccctccagcgcggcgatggcaaaggcgctgctttcctcctccctcctccccgcgctgcccggcgctgccggaggcagccggagcgctgcgaggccgatgctgctcccaccgctccggttgcggcgcggccggcgcggcgcctccgcttgcgaggtgagggcgggcctgcacgggctcgactccgtcggcgggccccaccttcaggccgcgctggagcgcgccgaggcggcgctatacacactcgctgacgccgcggtcgccgcggcggacaccgccgcgggcgcaggggccgacgcaggccaggctgcggcggtccaaaagaacagcggctggttcggcttcatctccgaggccctcgaggtcgtgctcaaggtgctcaaggatggtctttctgcagtccatgtgccatactcctacgggtttgccatcattctgctcactatcattgttaaggctgcgacattgcctctaaccaaaaagcaggtggaatcaactctggcaatgcagaatttacagccgcagattaaggcaatccagcagagatacgcaggcaaccaggaaaggatacagctagagactgctcggttatacaagcaagctggtgtaaaccctttagcaggatgttttccaacgttagcaacaattcctgtatggattggtctttaccaggccctttcaaatgtagcaaatgaggggctattgacagaaggatttttctggattccatcactgggaggtcctacaacaattgcagctcggcaaagtggttctggaattacatggctcttcccatttgtggatggtcatcctccgctaggctggcatgacacgatatgctaccttgtattgcctgtgctacttgttgcttctcagtatgtatctatggagatcatgaagccacctcagagcgatgacccatcacagaagaacacaatgctcattttgaaatttcttccatttatgattggctggttctctttgtcagtgccatcaggattgtctatttactggtttacaaacaatgtcctcagcacagcccagcaggtgtggttacggaaaatgggaggagcgaagcctgtagtgactgagggaggtagtggaataattaccgcaggacgagcaaaacgctctaatgctcaacctgccggagagaggtttaggcagctaaaggaagaagagaacaggagaaaattcagcaaagcacttgctgcaggagattcagatgcgtcgtcatcgacatatgacatggatgatgaagagtcggatgagacgatagaagagggaggacctgtggaggaagcatctactagcagtgacaagaaacttccaaactactcagggaagaagggcaaaagatcgaagaggaagcgcatggtgcagtaatcgttgcagcataattggatgcgatttttgtcacaactggttaattcagctgaccagttaggtgccgtagtatcatggagacagttttggtgggggccttttggaggcataattgcataaatctgaggtgcagacaattagacagtttccggggacacaagtatttgctgctaagctatccaatgaactagctcagtcagtatatatgctttagacctgagggtaatggacaggagaacaggagtggggtaaatgcacaagcagagagacaggatctgtagaggtaggcgagagatactccggtgtactctgtacatggttctaaaaaattgggcagaaactggattgtccagaccgttcatatacgttgtactagccggttgttgtactagccagttgcgctacggttgttatatattatataaatagatattgagat

SEQ ID NO: 114230 - DNA, 2516 bp, Zea Mays
cagccccctgttgcccccgcttttccttcttcgctgggcgcctgggccctcccctccccctcatttctccctgcccttgcctcttctcccctgtcgccggcgagagctcgggcggagacgccgcagcacccgcaggagagcttttctccccgggaaacaaggagacctccggagggctcttccttccacgagggctgcggctgttggattgtgctgaaagatctcagtttttatctccaaggaaggattactcatcgcgaatccggatctgtcggtggtggaaactggaaagttgccacttttatgaggcgaggctgtgaggaacccgtgtccctcccgtggatgtggtgagccctgattggcgcaccaggcgagaaggggcaggagcccagtaggtggtgacagagcagggtgagagggagaaccggagaagagaggtagccggtatacaagacaagcaggcaactataggaaggacgaaggaaaaggagaggagggagctctccatgggggagcccctcctcgcctccctctctatggagaacagcaacagccacccctgcacgctcctctccatggaccctgccggctcgcacctggcctccgccgagtcctcgggcggcggtagcgccgcgaccaatggggttggcaatggtgttgaccgggaactctttgtcattccgcggcgtgagtcggcgcaccctgttccgccggacatcaacctcccgctctctgcagatcactcaccgctgcctccgtcgtggagcctcgacacgttcgacatacttgatgtcactcttggaacacacaactacgagtctgaggttgcgcttacgcttccaaagccgaccggcaacggcaatggcagtgccgctatcggcgtcggcgcgaggaaatacgctaagagaggcgacagcatctggggcgcgtggttcttcttcaataactacttcaagcctgcacttgtggagaagtcaaaggggaagatggtgcgagacgcgtccaggaacatctcgggctttgacaagtctgatctacgtcttgatgtcttcctggtgcagcatgacatggagaacatgtacatgtgggttttcaaggagcggcccgacaatgcccttgggaagatgcagctccggagcttcatgaatgggcattccaagcatggggagccgtctttcccgttcagtgccgataagggctttgccaggtcacaccgcatgcagcgaaagcactaccgtgggctgtcaaacccgcagtgccttcatgggattgagatcgtggcctcgccaaatttgtccgcagttcctgagtctgacttgaagaggtgggctgaactgacaggcagggaacataatttttcagtaccatctgaagccagtgactttgagtcatggaggaatcttcccagcactgattttgaacttgacaggccacatccaccggccgcaaagagtgccactcatggccagaagaagggattgaatggttcaggtctcaacctttcaactccaccatcatcagacgatgggatggacctttcaccgaaatgtgccaaacgccgcaaggatttctttggccatggcgtagaggaggactgtgtgatggcgaacaattcttgttccgacagagagcaagaggcagaagctcacactggtgagccatcatggatgcacgagttcactggtgtggctaagcatgcaagcggccctgtcactgctgccaagacgatatatgaggatgaggaagggtacttaatcgtggtgagcatgcttttctccgatccacatagtgtcaaagtatcatggaggaacacgctgacgcacggcatcgtgaagataacatgcgtgagcactgcccggatgccctacattaagaaacacgacaggacgttcaagctgacggaccctttccccgagcactgccctcccggcgagtttgtgagagagatccctctggcgacacggattccagaagacgcgaagatcgaggcgtactatgacgagacaggaactgggctggaaatcatggtccccaagcaccgggttggaccagaggagcatgaagttcaggtgtgcatgaggcccccacatcttggtgacaacgatctcgtgctctcctagaacaggaaaacagctagcttttagatgttctggtgtcatgctcatgccatgagatactggaacataaactggtggtgccatggctcagtaagagccgtcctatttgctgctaaacatgtagcttgtaagttgagaattcctttccccccataaaagtttgtgatttaggcaaaaggttacctcctccctctgttaatttccctctgtacctctgctacacaagtgcatcactattggtgatcttccttgactatctgaaagctgactagtcaagattctgtgtatattcagatgaccaggttcgtaataatgttgttgatggctacctatgattttgaggctcggttgtcggtttcgaaaattatttgcaatgattgccttaaccgttttaatgtg

SEQ ID NO: 114231 - DNA, 429 bp, Zea Mays
accaagggactggaaggcgttggtggaggtcagtgacctccttgtaccacacacggatcatctagagcgcgtagaggatgacggccatgctgctgagctccacgatggggttggtcgcccgtcagcgagcagtgacggcggcatggagaactccgtgggcgaggatctggtgcctcttggcggcgtcagggaggcgaatccgaatgtaactattgttgctttaagtgtttataaccaaattgacaaaaatataaaatgaagaggacaagcggtgcgtgaacttatcctttgggtgctatcatttgtcatggacacacatgtacttacaacacgggagaaaagaatgtcaaatatccatgggtgatttaataatactccatccatgttgaagagcaagattaagaagatatatattaaatagcacaagac

SEQ ID NO: 114232 - DNA, 1511 bp, Zea Mays
acacggatggaattggcgcgggcggcgggctggcagttgcgcagcaataactcccgctgcccaccggctcacctgtccttcatccgccccgatccgaccccaaatcaattccaaattcaatccggtctcagtggttggcccgccgctgccagtgccagatcgaatcggactctcggctcgtgtgcagcccaccggcgagacgccgaagctatatttttatgcccatctgatccgatgcgtggtgtggcgtcgtctccgcttttactagatcatcagtagccagctcaggagccgagcctggtcagggtagccaagcccatcccggtcctctcccggcgtcttctccctccgcaccgcggctccggcgatggcgggcgtcggctccgcgctgcgtcggctctacctctccgtctacaactgggtcgtcttcttcggatgggcgcaggtgctgtactacgcggtcctgacgctgcgtttgagcgggcacaaggccgtctatgccgccgtcgagaggccgctgcagttcgcgcagacagccgccatcatggagatcgttcatgggctcgtagggttggtgaggtctccggtctctgcaactcttccacagattggatccaggttgttccttacgtggggtgtcttgtggagttttcctgagacccagtcacaccttcttgttactaccctggtcataagctggtctatcactgagatcatcagatactctttctttggaacgaaggaggcatttggctttgcgccttcctggttattatggcttaggtacagcacctttatgttgttgtatcctactggtatctctagtgaagttggtctgatctacattgccttgccttacatgaaggcatcggagaaatactgtattaggatgcccaacaaatggaacttctcatacgattacttctattcatctgtccttgccctcctgatctatgttccaggaagcccacacatgtaccgttacatgctctcccagaggaagaaggcgctatcaaaggccaaagcggcatgatgatgccaagcaagggaatcggtggactggtttgcgtgatggatgccggaacatgttcaagttttcgacatcccctgtagaatctagtggtcgggggatatatattactagaatggggctcttcatatgaactgccccgtatgcgtaatgtgttgtaccggagtcatcatttcagatatcagctgttgcgtggttaaatcgtagtttgcttccggatcacccatcagttggggggtggattaccatgttgattatataaggcaatgcgttccgcatccttccctcaactggtgctgtgctctcttgtttctagcgtacgatgaatgatggattttatcccgggcctggaacattttgcatgctctagcttcatgttgattattatatagcaaaattagcaatgtatttcttacttatgacactgatttttttttaaaaaaaaactgccaagggggatccccacctgaatagtattgat

SEQ ID NO: 114233 - DNA, 771 bp, Zea Mays
cacacggatggaattggcgcgggcggcgggctggcagttgcgcagcaataactcccgctgcccaccggctcacctgtccttcatccgccccgatccgaccccaaatcaattccaaattcaatccggtctcagtggttggcccgccgctgccagtgccagatcgaatcggactctcggctcgtgtgcagcccaccggcgagacgccgaagctatatttttatgcccatctgatccgatgcgtggtgtggcgtcgtctccgcttttactagatcatcagtagccagctcaggagccgagcctggtcagggtagccaagcccatcccggtcctctcccggcgtcttctccctccgcaccgcggctccggcgatggcgggcgtcggctccgcgctgcgtcggctctacctctccgtctacaactgggtcgtcttcttcggatgggcgcaggtgctgtactacgcggtcctgacgctgcgtttgagcgggcacaaggccgtctatgccgccgtcgagaggccgctgcagttcgcgcagacagccgccatcatggagatcgttcatgggctcgtagggttggtgaggtctccggtctctgcaactcttccacagattggatccaggttgttccttacgtggggtgtcttgtggagttttcctgaggtatcatcactagcaagtcttccatgttttcatatatgacatccattttttaggaacacgtcttaattttttcatggactttagagtccatcataatttcatattttagatt

SEQ ID NO: 114234 - DNA, 939 bp, Zea Mays
caggacctttttgtggcgggggggcctactcatattggtgcagaaacagaccttcgctttgtatactgtgcagctgcaatctgctcaatgctagatgactggacaggaatggacaagttaaaggcaaaggagtacattcttaactgccagtcatatgatggaggctttggtatggttcctggttctgaatctcatgaacttgatttttgcttgccactgagcaatgggttaaggttctcattgcttgtctttgtgttagcgagtcagagacaagtcactgatggagggtttcaagggagaaggaacaagctcagtgatacatgctatgctttttgggttggaggcgtcttgaagatcttgggtgcataccacttgatcgacagctgtgctctgcggagtttcttgctcacctgccagtcgccttatggaggcttcacgaagttcccggatgatcggataccagacatctaccattcttactacggcctggcagccctctccttgttggaagaggaagggctggaacccctctgcgtcgaactggggatcctctccgctgctgcattatagaaacttgtgtttctaccgaatccagttactgtacaatgtttgtgggggggggggggggggggggtaatccagtacttaacacaggataaacagctgagaaatcgaagggagtaatttattgatagagtgagttggtccgtgctgtcagtgtgctgcgcagatcgtgtaacattacttcgtgagttcgaaaggcgtgtgacaattttgtttgcaaaagtgcgatgggcaggctaactgagccagtcttcttcccagttggttgatctgattgttgacagttgagttagctgaacgctttgtatgattgtatcgtcacttggaaaggtactcgaatgtttgacgtttctgtttccgtctgtttggcataac

SEQ ID NO: 114235 - DNA, 159 bp, Zea Mays
gagatggggaagcgcgatttcgagcgcctgcaccacgtggcgttcttcgaggccatggccacggagctccccgacgaatacgcctcccaggaggtcaaccacctcaccctctcctacttcgccgtcggcggcctctcccttcttcgggagctcgaccgg

SEQ ID NO: 114236 - DNA, 293 bp, Zea Mays
taatttataggaacgatgttagcgaaagtcaatttaatctggtgctgaacattgagttgcaacaaatcatcgatggagactgagtcaccacaactagaaaccactgtctcaaggtgctgaacattgagttgcaacaaatcatcgatggagaccgagtaccgcagccagaaaccactgtctcaatttgaggagatttcccatctatgtttgttagaagtcataatgcctatttatctcttgtattcgaacatttggcaattaagaaatagaatattacttccccaatatccctt

SEQ ID NO: 114237 - DNA, 473 bp, Zea Mays
tcaggtgcttgatgtaattagtcgaaggccagaaatcaccaaaatttctttccttgcacactccgttggaggattagcagcaagatatgcaattgcaagactttatagacatccagacatcgcgtctgatggaaatactaaaggaaccatctgtggcttggtaggaataaactttattactatagcaacgcctcaccttggttcacgagggaacaagcaggttcaacttttgactgcctcttttcagtgatctgtttgggtaatttgtctgttcaccataaagatgatgcatgaaaaaaggttccactcctgtttggatctgttgcaatggaaaaggttgcttgccacatcgttcattggatatttaggagaactagtagacatctctttctaactgacgatgatgaagggcagcctccactgctgcagcagatggttgaagatcatgacaatctctactttatgtaagtttt

SEQ ID NO: 114238 - DNA, 428 bp, Zea Mays
atggaaaatggagacacagcacgaaggaaaaaaaaaagtgcgcacagagcagcgggcatggcctggtgctgtgcatgcacccggccggcccacacgacgcaacactggcaggggccgaggaggaggaagaacaggacaattattcgtttaccaccaccactagctagctacgcgcgcatggcggcaaacacagacgacactgctacaacatactgcagagcttgatttagctagagatactgaagggtgtccttccgatctagctacttcctccatcgtcacggcctgcatgctgcacccggtcatcctcacttgcaggtgcaggggtcgcaggtgcagctggcgccgcacttgcacccgccgttctcagctccggcggccgcctcgaacccgcccgtggatggcgcaacacccatgatgagagtctg

SEQ ID NO: 114239 - DNA, 1411 bp, Zea Mays
gaagcttattcatggttcaagcatgtgaatagttgcttgccatgtgctcctgttcaagaacaattatggcttccaactaaatgattttgatgtaggccctggtaacatgctacggagaggaaacttttgatcgatcaaacttcaatgactgccttcttaatgatgtttgcaagacaatgtcaggatatgatatcgccagagactattttgtatccaaatatatcgatccctcttgtcatccaaaagacatggtccgcagattaacatatccatatcttcggagatgtgcattgctttgggagctgctaagatcttctgccacatcacccttgtatgacggttccaatatttgggaaggatcacatctttacttgagtaatagcacacaagacgacagttcttcactggcaatggaactggccgggttacgagaattggaagacctgtttcagattcagtcgctggatctgattctccaagatgaatctgtacatatgcttgccttaaaatggtctcaacatttctgtgaagagtacaatccccgtaaatatagaggcactctcttttctacccctgcagttccatttaggctgatgcaactaccagatgtgtaccaggttctcctagaaagatatatcaagatgcaatgccctgattgtggctcagtgcctgatgaaccggcactatgtttgctatgtggcaaactatgttcgcctagttggaaaccatgctgcaggactgggaaatgccagaatcatgcattgcaatgtggtgctggtattggcatatttcttctagtgaggaaaacaacaatcctgttgcagcgatctgctcgtctaacattttggccgtctctataccttgatgcttttggagaggaggataatgaaatgcacagaggaaaacctttatatctaagtcaagaaagatacacatccctgacgtatctggtggcatctcatagccttgaccgaacttctgaagttcttcggcaaacaacgattggcttttatggatctgattgagcccatttttcaaggaacaatgtgttcaaaggatcttgcggatgtgcatattttgggaactgtactgcaacttggtgtttgatcttctccggtggtaacgagagcgttacctcaaccaagattctgcaggctcgccacccgtcgttgctctatggcgcactggccctctgctgccctcttgtgcctaatgtacagtctacattcttttctttctttattatggacggtgctcacaaaatggatgaccttggaagttgtaacgctgtacgatcgactgcatgatctgtatgcacagacatagcgtcggactggtgtagtttgtcagtatgaaatgcaggcatcaggtgccatttcgtcgtcatttaatttcatttatttatttacca

SEQ ID NO: 114240 - DNA, 2664 bp, Zea Mays
atgagcacatccactgattagatatatatcatctttcccaactgggcatagcaacatcaatgcagatgaaaatgtatcgcttgaggcaattgaggctgacatttacaattctattttaaatgatctatttggatccagaaatgcacatattcaggatagtgaccaaatgttgccatcaaacacttcaaacatcacaattgataccaagagaactagaagccccaagcgttcagtgctgggaacatatgttagttgtctttcatcaaaacaccgccattcttctctatatgatgtagcctcaaaatcttctgcctctgtaactacaagaaacagatttggtcccgtcgattgtgatggcatccatatatcttcttgcggacatgctgtgcatcaggaatgtcatgaccgatatttgttctccttgaaacaaagatatgtccggagacttggttttgaaggtggtcatatagttgatcctgatttgggagaattgctttgtccagtatgtcgcagatttgcaaattccattctcccagcatcacctgatttctcgggtaaaacatcaatgatgctgagaccatttgttcaaaccttgacacctcaagttgttacaaccacatcagatgtgaatagaaattgcttacagttcgctcgcgcactatctctttttgaaagtgctggaaaaatcgttggagaaaccaagtttttaaaagctatatctgggaagcttaatgaaactacaaatccagccctcgatccttgtcttcgaagattggctatgctttactatcctcgcagtcacagcagtttttcaccatctaagaggctcaacccatccttatttctctgggatacactaagatactctctggtatctacagaaattgcttctcgtggtaggatgtcaagccactctgctgaatcgaagtcctgcttggagtctttgcgtggcgaacttaattcatcaagtgggttcatattgtctctcctgttccatgctgcccactctgcacggaatttgaatcgtctcgaggttcttctgaggtttgaaggtatccaactattagcaggctctatttgctcttgtatttcgggttataaagacattctgaatgccactaagcgaaaaggctctttgccatcgatggttgatccagccagtgagggggccctctttcctgatgtacaattttggaaacaatgtgctgatccagttcttgctcaagatccattttcttctttgatgtcagcacttttctgtctgcccgttcagtttctgtcatctgctgaattcttcatcccttttgtccatctgttctatgttgtttgtgccattcaggccctggtaacatgctacggagaggaaacttttgatcgatcaaacttcaatgactgccttcttaatgatgtttgcaagacaatgtcaggatatgatatcgccagagactattttgtatccaaatatatcgatccctcttgtcatccaaaagacatggtccgcagattaacatatccatatcttcggagatgtgcattgctttgggagctgctaagatcttctgccacatcacccttgtatgacggttccaatatttgggaaggatcacatctttacttgagtaatagcacacaagacgacagttcttcactggcaatggaactggccgggttacgagaattggaagacctgtttcagattcagtcgctggatctgattctccaagatgaatctgtacatatgcttgccttaaaatggtctcaacatttctgtgaagagtacaatccccgtaaatatagaggcactctcttttctacccctgcagttccatttaggctgatgcaactaccagatgtgtaccaggttctcctagaaagatatatcaagatgcaatgccctgattgtggctcagtgcctgatgaaccggcactatgtttgctatgtggcaaactatgttcgcctagttggaaaccatgctgcaggactgggaaatgccagaatcatgcattgcaatgtggtgctggtattggcatatttcttctagtgaggaaaacaacaatcctgttgcagcgatctgctcgtctaacattttggccgtctctataccttgatgcttttggagaggaggataatgaaatgcacagaggaaaacctttatatctaagtcaagaaagatacacatccctgacgtatctggtggcatctcatagccttgaccgaacttctgaagttcttcggcaaacaacgattggcttttatggatctgattgagcccatttttcaaggaacaatgtgttcaaaggatcttgcggatgtgcatattttgggaactgtactgcaacttggtgtttgatcttctccggtggtaacgagagcgttacctcaaccaaggtggtgtagattctgcaggctcgccacccgtcgttgctctatggcgcactggccctctgctgccctcttgtgcctaatgtacagtctacattcttttctttctttattatggacggtgctcacaaaatggatgaccttggaagttgtaacgctgtacgatcgactgcatgatctgtatgcacagacatagcgtcggactggtgtagtttgtcagtatgaaatgcaggcatcaggtgccatttcgtcgtcatttaatttcatttatttatttacca

SEQ ID NO: 114241 - DNA, 1712 bp, Zea Mays
ttttttttggcttatagaatttaatgctcaagtgaaccatcttctggtatattgacatatttgctgagttgtttgtaaattataggctgactctatattatcttagttatgcatctgtcctgtttatttctagcataattaatagcatagccacttggataacggggaatgaattaattggatcgatcataaacatctgaggaccagacccttgttggtttctgttttgagatgtgacattggattggaaaaatgttcataataagacagattgactacacttctgttattttatatgtcaacttaattcattgtgacttggaatgccctttttactatgttacttgcagacaaacaaatgggggaatttatttgatgcttctattcgattactggatgatacacgctatgtgttgagtcatgaagaggtgtctaagcatgttgcttatgggaggcctgatctaactaggtcatggattaaactcttatcacttgtgcaaggaatggatcctcagaagagagtgacaagtattcacgctgaagatgagaacgagcatctatctgcgccgtttgtgctggggcactatcttggaattgtccagaatcttctgatgaggggatcattttctcctcctgatcaacatgaatcaactgatgtgacagtttgctccactgcgataaaaggtgtggaaagtgctgaaaatcagcggcatgcaaaagttgggagggtctcccaggagagttctgtatccgatctaagtagcagagacagctctttgtgctgtggattgccatcacctgctgcctggttagttcttcaatgcctgaaagccattgaaagttggctctggctggaaaacgatatagctctgaggagcaaactgtcatcccttgatgctagcagcaatgattctcacaaacttatggctttgcttgaagacccgttgacttctcttacgggaaacagttcaaatacaaatatgtgtgtgatggacgtcaagataaatgaaggatcacaaacagattgtactgcagattattatgaggcatctagttctcctgttcaaggtcaaggccaagaagcgatgcctctggttagtaacagtacaggcaaagggaagatgcatggcagcagcaacagtacagttgtacagttgcaccctgaggatgccattacttatactctgactgatggtagcattttgtatgctcatccagattcaagaatcgaggaactaggaatactcaatacaagaggatggcctcatgttgtctttgatgtcagttcacaagaaacatctttccatatccctttgcaccgtatgctttcattactactgcggaaggctatgaagaaatgttttggagaggatggacattcagatgtgcaatccaatgagttctttcctcagatacttagaggttgtgagccctatggatttgcttcaattgttatggagcatccactgagagtgagagtattttgtgcacaagtgcgtgctggaatgtggcgcaagaacggtgatgcagctatcctgagtgcggaatggtaccgctctgtgcaatggtttgaacaaggtttggagtcagatctgtttctgcttcaatgctgtgctgccctatcttctccagagttatttgtgcggacaattcaagagcgatttggtttgtccagttatacagatttgggacttgcagagcaaaatgagtaa

SEQ ID NO: 114242 - DNA, 2529 bp, Zea Mays
atggccgggatcgacgccggcgagggggcggccgccgcgccgccgccggagatgtcgccacagcagcgtatcgagcagaagctcattctttatggagtgcctgaagaacaactgcaagagcaccaacaaagcctagtccagtacactgaggagcacaaggagcagatacctgatattgtaagacatatcttgtcagcaggtactgatatttcagaggctcggaaggtctcaaagaaggatgcaaatagcagcagcaacggcgatgcatacagggagagtttgtcttggttgcagtggctgatgttcaaaaatgaaccagcagcaatgcttgatgacctggagcgttccaatgcaggggagcgtgctgtctgtgggtctgtctgggggcacaatgacgttgcttatcgctgccggacttgcgagagtgaccccacatgtgcaatttgtgttccgtgcttccagaatggcaatcacaaggatcatgattactctatcatatatacagggggtggatgttgtgattgtggtgatgcgactgcttggaagcgcgagggcttctgctcaaagcacaagggtgctgagcagatcaagcctcttccagtggagcttgcgtgttctgtaggacctgtcctggatgtcctcttgcagttctggaaggagcggatatgcctgctggaaccacaccatgcaaagggtagtgatggtagctcgtgcaagaggattgccgaagagttgacaacttctatctctagcatgctgcttgagttctgcacacgcagtgaaaaccttcttagttttctgtccctaagaatccgcgagtttcctgatatgttagatgcattaataaggtcagacaggttgcttgacaagaaggttgccagaaaattgcatgagtttttattgaagcttatcagtgaccctgcttttaagtatgagtttgccaaggttttcatacactactaccctatcacatttggggaagttattaaaggctgtaatgattcactactggaagactatccactgatgacaactttttctgtgcaaatattcactgtgcctacattgactccaaggcttgtgcgcgaggttgatttgttgggtgtcctccttggatgcttgacagatctgtttctctcttgcatcggtgaggatggtcgtttacagacaaacaaatgggggaatttatttgatgcttctattcgattactggatgatacacgctatgtgttgagtcatgaagaggtgtctaagcatgttgcttatgggaggcctgatctaactaggtcatggattaaactcttatcacttgtgcaaggaatggatcctcagaagagagtgacaagtattcacgctgaagatgagaacgagcatctatctgcgccgtttgtgctggggcactatcttggaattgtccagaatcttctgatgaggggatcattttctcctcctgatcaacatgaatcaactgatgtgacagtttgctccactgcgataaaaggtgtggaaagtgctgaaaatcagcggcatgcaaaagttgggagggtctcccaggagagttctgtatccgatctaagtagcagagacagctctttgtgctgtggattgccatcacctgctgcctggttagttcttcaatgcctgaaagccattgaaagttggctctggctggaaaacgatatagctctgaggagcaaactgtcatcccttgatgctagcagcaatgattctcacaaacttatggctttgcttgaagacccgttgacttctcttacgggaaacagttcaaatacaaatatgtgtgtgatggacgtcaagataaatgaaggatcacaaacagattgtactgcagattattatgaggcatctagttctcctgttcaaggtcaaggccaagaagcgatgcctctggttagtaacagtacaggcaaagggaagatgcatggcagcagcaacagtacagttgtacagttgcaccctgaggatgccattacttatactctgactgatggtagcattttgtatgctcatccagattcaagaatcgaggaactaggaatactcaatacaagaggatggcctcatgttgtctttgatgtcagttcacaagaaacatctttccatatccctttgcaccgtatgctttcattactactgcggaaggctatgaagaaatgttttggagaggatggacattcagatgtgcaatccaatgagttctttcctcagatacttagaggttgtgagccctatggatttgcttcaattgttatggagcatccactgagagtgagagtattttgtgcacaagtgcgtgctggaatgtggcgcaagaacggtgatgcagctatcctgagtgcggaatggtaccgctctgtgcaatggtttgaacaaggtttggagtcagatctgtttctgcttcaatgctgtgctgccctatcttctccagagttatttgtgcggacaattcaagagcgatttggtttgtccagttatacagatttgggacttgcagagcaaaatgagtaa

SEQ ID NO: 114243 - DNA, 1992 bp, Zea Mays
atgccgcggcggggcgagacggcggtggtccccattgacgtggcgtccgccggcggcgggcgaggcgatgagcggcccaagagagagcgccaccggagtcacggccccggccgccacggtccgcaccggagtcgcccgccgcccccgcccccgccggcgttccggccgttccggcggtggttcccgttccttgtgccgctattcatcgtcgccaacatcgtcctcttcgtgctcaccatgtacgtcaacgactgccccgcgcacgcgcgggccaccggcgccgcgataggcggatcggtcggcgagagcgccaccgcgcagggctgctggctcgcgcccgagctcgggaggttcgcgttccagtcgttcaaggagaacccgctcatcggcccttcctccgccacgctgttggaaatgggggcactggaaaccagtaaagttaccaaagatcacgaagggtggcgcctcattacatgcatttggttgcatgctggagtcgtccacatactcgccaacatgttgagcctcttaatgatcggaatcaggctcgagaaggaatttggtttcataaggattggtacactgtatgtgatctctggtgttggtggcagcttgctgtcttctctatttatggtgtcaaatatatcagtcggtgcttcaggtgcattatttggactattgggctcaatgctgtcagagctcataacaaattggacgatatatgagaacaagtttgcagcactcttgactctagttatgatcattctcatcaacttagctgttgggatccttccacatgttgacaacttcgctcaccttggaggatttatgtcagggttctgtcttggttttgtgctgctaatgcgaccacagtttggatatattaaccaaaagaactctcctcttggatttcccatgggcgtaactaaacggaagttcaagacatatcaagtcatacttttggttatttctacaatgatactagtttctgggttcaccattggattggtgttgctatttcaagggttcaatgctagtgagcactgttcttggtgccattatatgagctgtgtgcctacttcaaagtggagttgcaacgcaccaaataactactgtatggaaattaatgctagcatatctatggattatatgactagaagcctatgcttacattatgattctctgctctgccctgagcttctcgttctcagcaccgacgccacggttcagctccggcagttcattgccggctatggctttcacctctgtccattgacaaacacaggggcatcgcggcgctgctcctcggcggcaccggccaagctgggctccaagaggccgtgctcgagcgggtccggaggcggaccgctctcggtggctggaggcaaggaggtggccgccgacgagtcaaagatccaaggagcgggtgcgaccgtcggtgttcgtcgccgtcgaaccgccatcgccaagaagctgagaagatccacgacaccgacgaaggaaggtggggagaaacgcaagcgcatctcgacgccgccatcgtcatcgtcttccattcggtcgggtggtccagatccgaagacaaaaaggaaatttctttgtgctagaagctttgttcatataggaatcgagaccatggattcggagaacgcaaagctccgaagagcactcgctcatttaatcagagtagtggagcggcgttgtgccgacatcgtcgatgtcgtccacggtgccttccaaccagttagcggaccagtcctcaatgaaatgaatcgtgctttagttcagatcgaggacctcaccaaggaccttgatcaccttgcactggaaaaagactgggagatggagcacatggccccttctccaattgctgaatcatcagaaacagaggatgagcttctacttgattatgattcagagttgaatcctgacgatatcgtcggctacgacgacggacgcgactactccaccgacgacacctatccctactag

SEQ ID NO: 114244 - DNA, 1310 bp, Zea Mays
cgcctcctgtgatcccgtctcgccgtcgtcgccatgggggacaactacgacgacgaaggcgagccaatcgtggacctcgacgaacgggagccctctcctgagccacagccctacgaagatctcgatgacgacctcggcgacggcggcgattggacccgcagccgctccccgacccccgtccacggcgacgacggtgaggcggggtcctccgccaagccccggaagcgcctcctcaagaagggcggcggtggcggcatgcccggcgacgacgggctcgatgactttgggttggaggacgaggacgcggaccccgcggctgaggcgaggaagaggaaggggtcctcggcgctgagggacctcgcgaggggcggggcgggcaaagagaagaaggagaagaaaaggcggagggaggacgacgggaggggaagtgatagtgggatggtgagggacaggcggggagcaggagggaaggactcaggcggtagggaggaccaggatgatggggagagggagatccaggagctctgggataccattgcgggtggtgactcagaggatgaccaagaaggtgttagaaccatagatgatgataatttcattgatgacaccggggttgatccagctgatcgttatggcagtgataatgagcggcattcacctgggcattatgcacaggctgaggagggtgaggaggatgatgaaattgagagactcttcaagggtggtaagaagaagaagaatgatcgccctcgtgcagatattggtcttatagtggaacaattcattgctgagttcgaggtagcagctgaagaagatgcaaatttgaatcggcaatcaaagccagccattaacaaacttatgaagcttcctctgctcatagaggttctctccaagaagaatcttcaacaggaatttcttgaccatggagttctcactcttctaaaaaactggcttgagccattacctgatggaagcatgccaaacatgaatactcgatctgctgtactgaaattattagctgattttccaattgacttggaacaatatgaccgaagagagcagcttaagaaaagtggcctgggaaaggtcattatgtttttgtccaaatctgatgaggagaccactgcaaataggaaattggctaaggagcttgttgataaatggagtcgaccaatattcaacaagagcacgagatttgaagacatgaggagatatgatgatgaaaaagcaccttacaggcggccacaaatgaagaaaccatcaagtagctctggaatggaatccagagatgatgatgttgatgctgactt

SEQ ID NO: 114245 - DNA, 2904 bp, Zea Mays
atgccagcgccgtctgcggttgcgtcggccgtagagaggctacaggcagcggcgcaggacgccgccaagtcctcgtcgcgctcggccggcgccttctccgagcaggcgcagcaggccctcgtgtccaggaccgccggctcacttccagccagtttgcccttacgtttacacgagcagtaccagacgggttgtttctctgtcaacatgtgcaaagtacaatgtccttaccttgcgacgtcacatgaagctgaacatgcgagagtccagtgccaggatgatgaaccagtgcagggcctgagaagccggaaagaagcccatctattatctataggagccgagcacctgaaatatctccctctcctcgccgcctgctttcttcagctgctgtccgagctcgcctgctttctttcagctgctgtccgagctccgaccaaacccaacccagcccacccgaaatatctccctctcccgcgccgcttcacggtgacgcccctcctcgccttccgccgcctccgccccatgtccacctctgcctccccgcacacctccatcctccacctcccccaccgcccgttcgtgttcaggcgaccgaggctgtcgcgcctcaggtgcttcgcgtcgctcgcgccggcgtcatcgggcgcttcgccggcgaacgacgaccacctcatacaaatgctctgcgcccacgggcgcctcgcccaggccacggcgctcttgcaggggcttcccgcgccaacgcagcgcacctacgagtcgctcctactcgcagccgcgcgggcgagggacaccgcgctcgccgcggccgtgcaccgcaggctcgaggcggacccggtgttccgctctgatcccttcctgtcgacccgcctcatcgaagcctatgctgcgctcagcgcgctccccgccgcgcgccaggtgttcgacgaggcgcctgtgaagaacatcttcgtgtggaacgcgatgctcaaggcgctcgcgctcgccgaccatggagaggaggctctcacgtgccttgctgacatgggccggctcggtgtccccgtcgacagctacagctacgcgcacggtcttaaggcctgcattgcagcgtcagcgtcgcacctgccggcctctgcccgtgtacgggagatgcatgctcatgccatccgccgcggctatggattacacacgcatgttgccacaactcttattgactgctacgcgaagcttgggattgtcagctatgctgagcgtgtgttcacttcaatgcctgataggaatcttgtgtcatggagtgctatgattgggtgctatgccaagaacgagcgtcctggtgatgcaattcagatctttcaggagatgatggcctctgatgcagacctggtaccaaactcgatcacaattgtcagcgtcttgcatgcctgtgctggggtaaatgcacttggtcagggcaaagtactgcatgcatatatccttcggaggggttttgacttacttgtttcagtgctgaatgcgttgatggcaatgtacatgaaatgtgggtgccttgagaccgggcgctacatcttcaactggataggacgcagaaggaatgtcgtgtcgtggaattcacttatatctggatatggaatgcatggctttggtcgtgagtcactccaggtgtttgaggagatgattgaggaaggcatttcaccaaatatcatcacatttgtcagcgtccttggggcttgtagtcatgttggacttgtggagcagggaaagaagctatttgaatcaatggtggagtacaatgtcacacctcgtgctgagcactatgcttgcatggttgaccttcttggtcgtgctgggcgcctggatgaagctgtggagctgatacagagcatgcgtattcaaccaagccctcaagtttggggctcgcttcttggcgcttgcagaattcatggccatgttgagtatgctgagatggcatgctctcatctctttgatcttgagccccgaaatgctggaaactatgtcctcttggcagatatttatgcccgagctaaattgcagaaccaagttgatgtactaaaggagttacttgaggagcatgcactggagaaggtgcctggctgtagctggatagaggtgaagaagaagctgtactcatttgtttcagttgacaacaagaacccacaggtggaggagctgcaagcattgattggtgaatttgtgacacagatgaaaaatgagggctatgttcctgacacgagatcagttctgtatgatattgaagaagaggagaaggagaggattttgcttggccacagtgagaagttggctgttgctttcgggcttatcaagactggcagtggagaggctatcaggatcacaaagaatctcaggctttgtgaggactgtcattcagtcaccaagttcatctccaaattcacagatcgggagattgttgtgagggacgtgaacagatttcaccacttcaggaatggagtttgctcgtgcagggattattggtgatgatgatgcaaactccttgttttagttaccttcactgattatactggatgataactgaaagtaggagctgttgtttcttcaaaccattgtgtacagcctaacatatttcattagcctaggcatggtgatagcttttcaggaggggcatcagattgatcaactagtctggagaaaagtggaactcatacctgacaaacagttttgacacgcttgtgaggatgcctcttgtttacatgtaaagagatcgaactcaagactgataggatgattatgatgcttagggtctatgcctcgtttgtatgactgtgactcggggcacaactatggagagggtttacgcctagggtgcgttgatcttgactcgatcacttggttgggtctgaggacacatctaacatttttccctttatt

SEQ ID NO: 114246 - DNA, 856 bp, Zea Mays
agtatttgatttctttcccctgtttcaagttgcagcctcgcccctctcgctctcgcggctctcggcggatcggcgttcagtgaaagctaaaagcctaaaaccctagttcgaacctctactagccggcgacagcggcggtggagcgcgggatacccggagatgccagcgccgtctgcggttgcgtcggccgtagagaggctacaggcagcggcgcaggacgccgccaagtcctcgtcgcgctcggccggcgccttctccgagcaggcgcagcaggccctcgtgtccaggaccgccggacgggttgtttctctgtcaacatgtgcaaaggtcagtgccattagctttgcgattggtgttgtggcagggttcacactcaagaaaaggctgcgcagatgggctgctagactgctgaagagaattaaggacgacgactattgactaatgcgatcttttcctcattgtctttggagtttgttcagaaatcagaactatggctactacgtacctcagcatcttgtgtagccaactgtttttgtgcctccacatatttgctatgaatgctggtatatgataatatgaaccatcagaagttcatcacattacagcatcgtgaaatgtgcaaatggtgatacaatgtcgccaacgacagtatgatcgtgccatgctctctggtgtccttcgtcatcaaactttgtcgagagtatgatctttcccagtgttgacatgcttcttgactgagtttcactggtgagctgctttactatttacagtacaatgtccttaccttgcgacgtcacatgaagctgaacatgcgagagtccagtggtataatggatcctccccagaaaaaacaaaa

SEQ ID NO: 114247 - DNA, 838 bp, Zea Mays
ggatgcaccatgaactatattttcactttttcagaatatgctcatttggtgtcacaaatatttgtagctttttttataaactcggtcaaaaatgaaaaagttcgactggcaactttaggtattattcatttatcgaggcaagattggaaatgaaggtagtagttacttgaggttaaacttttaagtggcagccaatcagtaaagccgttgtatcaaggtttttatgagttctaaatcctggaatatttgaccagtgttcaactttgtctccgatttcagttgaagcaaacagtgtttatccttgaactgcaaatgtgtaacaaaatatggagaccacgccaatgtcgctctatggctatcaatgttaggaaacctgagctcagcgtcagctatacattattcataatgtacatggactatgtgagcagaatcagccgcctgcaaaaatgtgacgggttgtttctctgtcaacatgtgcaaaggtcagtgccattagctttgcgattggtgttgtggcagggttcacactcaagaaaaggctgcgcagatgggctgctagactgctgaagagaattaaggacgacgactattgactaatgcgatcttttcctcattgtctttggagtttgttcagaaatcagaactatggctactacgtacctcagcatcttgtgtagccaactgtttttgtgcctccacatatttgctatgaatgctggtatatgataatatgaaccatcagaagttcatcacattacagcatcgtgaaatgtgcaaatggtgatacaatgtcgccaacgacagtatgatcgtgccatgctctctggtgtccttcgtc

SEQ ID NO: 114248 - DNA, 972 bp, Zea Mays
agtatttgatttctttcccctgtttcaagttgcagcctcgcccctctcgctctcgcggctctcggcggatcggcgttcagtgaaagctaaaagcctaaaaccctagttcgaacctctactagccggcgacagcggcggtggagcgcgggatacccggagatgccagcgccgtctgcggttgcgtcggccgtagagaggctacaggcagcggcgcaggacgccgccaagtcctcgtcgcgctcggccggcgccttctccgagcaggcgcagcaggccctcgtgtccaggaccgccggttgaagcaaacagtgtttatccttgaactgcaaatgtgtaacaaaatatggagaccacgccaatgtcgctctatggctatcaatgttaggaaacctgagctcagcgtcagctatacattattcataatgtacatggactatgtgagcagaatcagccgcctgcaaaaatgtggttagcctgaaggaaccagtagtgcagtgttttttgtattaactgttgctgtacttcaaacctgtcatgagaagtgctgctatgtttctcctgatgttaatttattctgcattgcagacgggttgtttctctgtcaacatgtgcaaaggtcagtgccattagctttgcgattggtgttgtggcagggttcacactcaagaaaaggctgcgcagatgggctgctagactgctgaagagaattaaggacgacgactattgactaatgcgatcttttcctcattgtctttggagtttgttcagaaatcagaactatggctactacgtacctcagcatcttgtgtagccaactgtttttgtgcctccacatatttgctatgaatgctggtatatgataatatgaaccatcagaagttcatcacattacagcatcgtgaaatgtgcaaatggtgatacaatgtcgccaacgacagtatgatcgtgccatgctctctggtgtccttcgtc

SEQ ID NO: 114249 - DNA, 855 bp, Zea Mays
agtatttgatttctttcccctgtttcaagttgcagcctcgcccctctcgctctcgcggctctcggcggatcggcgttcagtgaaagctaaaagcctaaaaccctagttcgaacctctactagccggcgacagcggcggtggagcgcgggatacccggagatgccagcgccgtctgcggttgcgtcggccgtagagaggctacaggcagcggcgcaggacgccgccaagtcctcgtcgcgctcggccggcgccttctccgagcaggcgcagcaggccctcgtgtccaggaccgccggttgaagcaaacagtgtttatccttgaactgcaaatgtgtaacaaaatatggagaccacgccaatgtcgctctatggctatcaatgttaggaaacctgagctcagcgtcagctatacattattcataatgtacatggactatgtgagcagaatcagccgcctgcaaaaatgtgacgggttgtttctctgtcaacatgtgcaaaggtcagtgccattagctttgcgattggtgttgtggcagggttcacactcaagaaaaggctgcgcagatgggctgctagactgctgaagagaattaaggacgacgactattgactaatgcgatcttttcctcattgtctttggagtttgttcagaaatcagaactatggctactacgtacctcagcatcttgtgtagccaactgtttttgtgcctccacatatttgctatgaatgctggtatatgataatatgaaccatcagaagttcatcacattacagcatcgtgaaatgtgcaaatggtgatacaatgtcgccaacgacagtatgatcgtgccatgctctctggtgtccttcgtc

SEQ ID NO: 114250 - DNA, 824 bp, Zea Mays
agtatttgatttctttcccctgtttcaagttgcagcctcgcccctctcgctctcgcggctctcggcggatcggcgttcagtgaaagctaaaagcctaaaaccctagttcgaacctctactagccggcgacagcggcggtggagcgcgggatacccggagatgccagcgccgtctgcggttgcgtcggccgtagagaggctacaggcagcggcgcaggacgccgccaagtcctcgtcgcgctcggccggcgccttctccgagcaggcgcagcaggccctcgtgtccaggaccgccggttgaagcaaacagtgtttatccttgaactgcaaatgtgtaacaaaatatggagaccacgccaatgtcgctctatggctatcaatgttaggaaacctgagctcagcgtcagctatacattattcataatgtacatggactatacgggttgtttctctgtcaacatgtgcaaaggtcagtgccattagctttgcgattggtgttgtggcagggttcacactcaagaaaaggctgcgcagatgggctgctagactgctgaagagaattaaggacgacgactattgactaatgcgatcttttcctcattgtctttggagtttgttcagaaatcagaactatggctactacgtacctcagcatcttgtgtagccaactgtttttgtgcctccacatatttgctatgaatgctggtatatgataatatgaaccatcagaagttcatcacattacagcatcgtgaaatgtgcaaatggtgatacaatgtcgccaacgacagtatgatcgtgccatgctctctggtgtccttcgtc

SEQ ID NO: 114251 - DNA, 2027 bp, Zea Mays
agtatttgatttctttcccctgtttcaagttgcagcctcgcccctctcgctctcgcggctctcggcggatcggcgttcagtgaaagctaaaagcctaaaaccctagttcgaacctctactagccggcgacagcggcggtggagcgcgggatacccggagatgccagcgccgtctgcggttgcgtcggccgtagagaggctacaggcagcggcgcaggacgccgccaagtcctcgtcgcgctcggccggcgccttctccgagcaggcgcagcaggccctcgtgtccaggaccgccgggtaagccgtatccgctgacaccgacctccatcttctctcgattcgatgcatccgcggtcgcaggctttatgcttgctctgttgtttgccctgatttggtatggccacgcggaatttgcagcgtgcttcttccgatccccatttatgatttgaattgtgcttcggatgatcttattactgtacttcatggattcagctcacttccagccagtttgcccttacgtttacacgagcagtaccaggtagtatcgtgcgatatgagtaattcatggtttggtaggcaatgtactccatttataacatccacagatgaaaaccgtaaccgaaaatcccgtaatcagggcctcataaccgtatcgtttctgtaaacacaatatcatttccgaaaatcactatatttaaaatttaaatttcaaatatctgtcaacatttattgtaatcgacaataagttgattaattatgaaaccgagtaaatttacgaccgaccgacaatcattttcgtataaacgatatcgtttccgactgtttcaatccctattaacttcatgtttatagtcgcttaaattatatcaagggcatgtggtcaatggttaagatgttttccccagaacccttatgtaaccaaattcccaaaagagaagcataagaaatcccttttcagtgaacccttcagttgctgtcaagttaagctcaaagtggtagcttgatgtattgaattttataggtttaagaatttcaaaggactattttgcctgaataaatcaattcttacacttttcttaagtcaaaaaatttaaagcttgtctgaatttatagaaaggagtgtcaagatttatggcactacattagcattattggattggatgcaccatgaactatattttcactttttcagaatatgctcatttggtgtcacaaatatttgtagctttttttataaactcggtcaaaaatgaaaaagttcgactggcaactttaggtattattcatttatcgaggcaagattggaaatgaaggtagtagttacttgaggttaaacttttaagtggcagccaatcagtaaagccgttgtatcaaggtttttatgagttctaaatcctggaatatttgaccagtgttcaactttgtctccgatttcagttgaagcaaacagtgtttatccttgaactgcaaatgtgtaacaaaatatggagaccacgccaatgtcgctctatggctatcaatgttaggaaacctgagctcagcgtcagctatacattattcataatgtacatggactatgtgagcagaatcagccgcctgcaaaaatgtggttagcctgaaggaaccagtagtgcagtgttttttgtattaactgttgctgtacttcaaacctgtcatgagaagtgctgctatgtttctcctgatgttaatttattctgcattgcagacgggttgtttctctgtcaacatgtgcaaaggtcagtgccattagctttgcgattggtgttgtggcagggttcacactcaagaaaaggctgcgcagatgggctgctagactgctgaagagaattaaggacgacgactattgactaatgcgatcttttcctcattgtctttggagtttgttcagaaatcagaactatggctactacgtacctcagcatcttgtgtagccaactgtttttgtgcctccacatatttgctatgaatgctggtatatgataatatgaaccatcagaagttcatcac

SEQ ID NO: 114252 - DNA, 996 bp, Zea Mays
gaaattacgtatttggccccgcgccgcacgccctcttctcgtgctccagcggattcgctaggccgcgagcctccaaaaccctaaccctaaatttgggggcgcttgggtcaaagagacggggggaggaatcgagccggcggcttgcggcggcatcagcgatggcggcgaagcgggagatctcgagcaccctcaggaacctcaagtttatgcagcgcggcgcggctgcgcagaaggccgaggagaaggccgaggtggaggtacaggaggaggaggtggtgatggcgccgagtggaggcttcgcctcgtccgcgcaggtcgttaggaagtgcatagttatcatggagggtaatcctcatccaggagctataaagggtcggatgtctttccaaaatttcaatccatctatcgataaactaaatgaagaggcaagaggtgaccagcaaacagaatcagcttcccccagtaactgtgaccaagacaatgcaaactccagcagagggaatgaagttccagcatcaagatgtagagattttggcattcccagttcagaaagcatatctctaaatgaactgaagaggaaggagcccgaccttgatatggaaacaccggcatcttacaaggaaccaaaaaccaatgttggcggtaggtcatcttcacaaagcaatggtcgcggatcacacaagtccaacaagcgtgaaaagctcgacttcaatcatctaagaccgaagaaatgaaaaatggtgttcgagttagctcttgtactctgtttgtagctgtacccaattggccatctgctgtgttttgtcgattatatctagagagctggtaaccatgtccatgtgaccatgtggcatgcattcttagtgagattatgtggtgttaatcatttttctttctattgatgtgttctactcaactactctgctgtaagatgtgaggctctactgtacagcagtgatgaatgcagttctgcttatgttttatgtcgcctactaa

SEQ ID NO: 114253 - DNA, 1642 bp, Zea Mays
tataaattcatacatttctacggtttttatttatatttaaacataaaatataaatcataaaaacatacgcattatgttgactagatggtagatgtatgtttgaagccgataactatagtttaaatttctatttgtaataacttttagtttttttaccgtttaagcgacgacatgcgttcagaaagccatcgtccttacagacgagacacgagaggcaggagccagcgaccggcaacagttttctcggaaggcagcctcttcctcgtcgccgccgacgtcacccgccgcggctgtcggggatgccggtcagggtggtcgataccgccacgccttcctcgcagccctccccagggcaagaagcaaatactggacacccatctcctcctagatgttcactcttaagtgctggaagatcttttgctggaactcagaatgtttcaagtctgcagaaggatgaagcatggaaagtgaatgtccgcatccatggttgcgatcttgaacagggttatctatgtggaacgatggaagcgcttaatgttccattagcagatacacctgtagtgacattctgggagggggagatagtggatgctaaaaattacacctttttcactggcaagtgggaggcatcaccagaggatgatataagacattggtccaagttcccatcatttatgcctcttctgagtcagattgagacagacggtggcaagtctctggactttagcaactatccttacatatttatgagatggaaagaacagtattttgtcaatgttggagttgactgtgggttaaccatcgctggtttctactacgtctgcttttcttgtagcgatggctccatcagtggattttattatgatccaaatagcagtccatttcagaagctcgaattgaagtgtaccaacgagaaaagttctggattcaccttttcatcctatgagctgcagtgacagggccagatgcatatagtgtgtactgaactcatactcgcctaatgctgctgtattgaaagaaacgagtggtggtttatgcaacacttcgttttctcgcaagagcaagaccaagcaaactgtcactttgtaatctgcagaagcatcttatcttttctaaaatgtacctttcgtattatggttgtgttcatggtatggtgcgtccaaattcagttggatagggaatgtgagggctagatgttgatccagagaaatgctatataccttttccacaattgttctctgccattggggatttctatttcaacatgtctatgatatacacattgaacgggtctgacgtagtggtgagagccgcctctccatatttacgggagaaaatgcttttgcctcggtttatccaccccacagccttcagcactaggtctattcttttacgatatacacattgtgtttggctcctagttacatgcatcgtgaatacatggtctttactgaagagaaacttcatcaagattgcctattgctttctctcactcaaatctcaggtacaaagccgtggagacctttgccttcagcttcctgacatcgttaggtaaatgaactctaccgacgtagtttcataatgtctcgatctcttgcttcaagctgctctgtcaattctctaaggaataaaacacatctgc

SEQ ID NO: 114254 - DNA, 1482 bp, Zea Mays
ggtttttttagtgcactcgggtgatcgactgatcgggtcttggactcttggcttgggcggacgaccagacgctagggctgggcaaggcgccgccgcagctctggcactggagaccggtcgactgcaccgccgcgccgccgccggcgtgtgccacttcgaccccgccaccgcgccacaactgcttccgtgcaagtctacagccagccagctagccaggcgctgttcacccgtgctcgcacgatgcagccgccccatgccagcaggtccggtcccaactcgtcgccacccgttgtcgtcgccggctcgtcgtcatcggctccagcgtctcggcaacaacaatcggaggcgcctcgcggtcgaactctcacgtcgtggccccgcaccatggatgtggataatatttgtgatattgacaacaatgtgtctaatgaagatgagatacatggtattggggggatgttaatggcaatgacagtgaccacatggaggaggaggatcatgttcttacacctactggtagtgaggtgaatgtcattagccaaaaagttgtttgtggaaaaaacaaatccatagatggagacaatcgtgtggtgaaacaactactagcaaccaagtcaactagtacccctacaagcaagtttatggcatctgcatttaaagcaacaagttgcacaagatgcaagtgcgagtgcaagtgaaaatgcaagcatagctgcaagtgtccaaataagcactgaagatgattgtgatgaagaattagatgtcaagaaaaagaagctcacttcatgggtttgggagcattttacaaggtatgatgtagaagtggagcaaaatgatggttccattgttaagcaaaagtgggcaaaatgcaaaaaatgtccacataaagctaaggccgatagttcaaatggcacaaaggcttttagtaaccatttaaagctgaggcataagattttgaagggtcaacaacacttaactcagaatggggatactatacaaacatataaatatgatgagaattttagtgtgagactgctatattaagccatcatcatgcatgagtatccttttagtattgcccaacacaagtactttggtgaaatttatcaaatcactgcgaccatcattttctttgaagtctcgtgttactgttcgtaaagagatcatggatctttatattgaggaaaagaatatgttgtatgcacaattcaaaaagttgtcctgtcgtgttagttttactatggatacatggacatctattcaaaacaagtcatacttgtgcgtcactgctcattggattgatgataattggaacatgcaaaaaaggattatcaattttatgcatgtagaaggcaaccatagtggaaaaaaatgagtgatactttttttgctaatgtgctgaattggaaccttgataagaaaatgtttgctctttctttggataatgcttcttcaaataaggttgtcattgatatagtgatt

SEQ ID NO: 114255 - DNA, 672 bp, Zea Mays
atgctaaagcagcagctcgccgtggccgcccaatttgagcattcgccgaaatctggtctcttcgttgacctgtaccttgggattggtcttgcaggattacaaggaagcagcgaagttgagggactcgctgaggtccttcgaggagaaggagcccatgttgtgcctcgcaggttgatgaagaaggccattgaggaggagaggtttgaggatgctgctaaatacagagatgaattaaagattttggctccacactccctcctcaaatgttctagcgatgcaactactttggggataagagttcaagtcaggagcgtctatattgaaagccggagccaaccattgaaagggcaattcttttttgcttatagaattagaattacgaatagttctcagcgccctgttcagcttctcaaaaggcactggattgttacagatggaaatggaaggacagaaaacatttggggagttggagtagtgggagaacaacctgtcatattcccgaagactggttttgagtactcttctgcatgcccattgagcactccaaatgggagaatggaaggtgactttgagatgaagcacatcgacaaggctggatcatcaacattcaatgttgcatttgcgccattctctctgtcaattcttggtgacgataatgatgttctgctatga

SEQ ID NO: 114256 - DNA, 276 bp, Zea Mays
atggcaaaatgtcctaagaattggctgcctgctcataggtgggagcagccatcgtcgcagatgctggaggaaggcccaagtggcggtgacatgtgggagacgaatatgaggggtggcaacagcgagggcaagagggacaaccccgacgacgaggacatgtgggagccagaaccgcctgaggaccctcttctcctcggccaagagacccacgccgcaactggaaccctcttctcctcatccgacgacagtggtggccactactccggtcaggcatag

SEQ ID NO: 114257 - DNA, 1181 bp, Zea Mays
atggagatggtggatgacgacggtggtcctgttcgtggagccggcgcaacagtccagcccgaggggcgcgtccgcggcgtcgctgctggccgagccgtcgtacgacggctcgccgctccgccgccaggcgttccagagctacctcaccaagagcggcgtcatgtcgtcgtccccgaccagcacgctggtctcgcccccgaggtcgccgccgtcggagtccccgccaatgtcgccggacgccgccgccgcggcgcgtggccgggtgtcggcggctcgcccgtcaacgaggtcctcgcctcgctgcgccagctccgcctcggcggcggctcgccgaggtcggcgccttccggcgggtcgttcttggcaggcggctacccgttcgggtccctgaagtcgccggccggtctgtacagtctcccgtccacaccaccaacccggtcgtgcccagtgatggtgaccaccgcctccggcgccaccatcatgaccgtggaacgcctcaacctcgggctcctcgtggacgaggagccggtcatggagcgggtcgagtccgggagagccctccgcgagaaggtgttcgaacggctcagcaaagaaagcgccgtgcccaacgacaccgtcgcctccgccaacgtagaggtagcggctctgaacgtcagttgggtctccgacctcatcaactgagggaatgaaactcctgaaactatcagcatcagccgtgcctcctctgaacggtgcttatccatggtaagtgcgtgagggaagcttagaggcgtcactgcacagcagcaggagaagaaagttcgtgggaaaaaccaaaaaaaaagatttttatttttctagatttgtactaagatgatccttgtacatattttcctccatgtgtgaatattctcggatggctgttgcctgttggagggaggggaggcagggaaaggttgatttgttctggggtttcagatgatggcatgccagtggaggtagaaggggtggccagtaaaacacaaaaggatcaaaggagacatggtaggcgaccagaccatgcatgaggtgtctagatgtacatagcgtctgtgcgtacctgtgtgttgtgtgtgtgtggaggtagagcgtgggagaggcgaccatgtcggcgatccaagacaggagtaaagatgacaggtttttttatatatctggcgcct

SEQ ID NO: 114258 - DNA, 1407 bp, Zea Mays
gcctccaagtccaaagttcagagccagcaagcaccgatgtcgtctcgtgtgccccacgtcctcctggtctccgctcctctgcaaggccatgtcaaccccctcctcgttctgggccggcacctcgcctcaagaggcctcctggtcacgttctccaccgccccccatggtggcctcaagttcgggcacggtgacggctcgaccgtcgacttcgggcgcggcacgattcggttcgagcacctgaagggcggcgccctgtgggcctcggacgacccccggtaccacgacgcgatggacgtgctgcgccacctcgaggaaaccgcgccgccggtccttgcagagctcatccgggggcaatccgaagccgggcgagcggtgtcgtgcgtcgtggccaacgcgttcgccccgtgggcgagccgcgtggccagcggcatgggcgtcccgcacgccatgctctggacggagtcctgcgccgtcctctcgcttttctaccactacttccactcgctcgcggacttcccgtcgcgcgaagctggaccgggcgcgatggtcgccgtccccgggctgccaccgctggccgccggcgatctgcccgcgctgatccacgctcccgaggagatcatgtggcgccaggtgctcatcgcggacctccgcagcctccgcgagacggtgacgtgggtcctcttgaacaccttcgacgagctcgagcgcccgaccatcgaggcgctccgtccgcatctgcctgtcataccggtcggccctctatgcagcgggacagagagccacggtagtggcggccacgacgacgacgactctgtggcgtggctcgacgcgcagccgccgcggtcggtggtgttcgtggcgttcgggagcctcctgcagatcagccgcgacgagatgagcgagctggcagcgggcctcgcggccacggggcggccgttcctgctggtggtgcgggacgacaaccgggagctcctgcccgacgactgcctcgccgcggcggccggtagcaacaggggcaaggtggtggcgtggtgcgagcaggcgcgcgtactggcccacggcgccgtcgggtgcttcgtgacgcactgtggctggaactccaccgtggaggcactcgcgtctggcgtgccggtcgtcacctacccggcctgggccgaccagcctaccaacgccaagttcctggcagacgtgtacggcgttggagtccggctcccgaagccgatggcgcgtgatgccctgcgccgctgcatagaggaggtgatgggcgggccggaggcagtggcggtgctggcaaggtccgcgaaatggaaggccgaggcgagcgcggcgctgtccaccggcgggtcgttggacaagggtatccaagaattcgtcgccgctatactgtgaacatgtgctcgtacggtt

SEQ ID NO: 114259 - DNA, 912 bp, Zea Mays
atgcagccaccacggtcatctgctatgaatgcacagccacaagtacgtcgtgacagccagctaatacgggaggtgttgtccttcggcggcgggatcccgcactggcagatggccacggtcagagaactagatctcgacggcggaagcgagctgcatccaactggaggctccttgttcagcgacgacctgtgtgcaacaatggatggaaatggatacttttctagcatgatgagggatgacaacagtcaaagagaatttgatactcatagcaacacatgccctgaactacagtcacaatcaatgtcagttgcacaggcatgtgctttgtacaagtctgaagatgagcataaaaaatctttccagttcatgcatcgttggaacaagctgagaacacaacctaaatggttagctaaacttgatgatttagcttctggtagaacatcaaacaagaaacagaagacacaaccaaatgttgatggtactgcaatggtaccaaatgaaaaaggagataatgaagttcaagctggagaggatcaagctttgattaggccaactcgcaagaaaaagtcaaaagcagcaattatacaagaaaagagaaaaagtgtgacaacaactttagaaaacatgtgtgcacaaaagaaagacactgatggggagaaggaagttaaaaaagaggagagattcaataaagcatttgcactagaacaggagcgagttacaaatgaaaagctccttctggaggtgaggaaagaagaggtcgaactgcggaaacaacagatagaattgcagaaacagagggatgaagagagaattatgaccctagatctttctgctatgccagaagagctaaggagatactatatgggcttacgggctaagatcatgagaaatgaagatacaccttcaacttag

SEQ ID NO: 114260 - DNA, 342 bp, Zea Mays
atgcgtggaagatgccgcagttcatgatgtcgtggagcgcgcttgtccgggcgcagcgagcgacgatggagagaggacttggtcggggaggtcgagagccacggtgtggacaccgcgggaggagagcgatgagaggacgcacccaaaggacaaggaccctgtggcgaggatgtgggggataaggagcgtgaggaggggtggcagcgaggtttcgggggagggggcaagattttcggcggagatgtggcggcacgggcgagatttctggagggcagggacgactcgcggcggggcgggggtggccgtgaaggaccctagaacggtgccttccatcgatggaga

SEQ ID NO: 114261 - DNA, 107 bp, Zea Mays
ctgcagtggctgctgcagatgaatgccaaaatgtatagtcgatactatatcaaagggaagctatagactaagcaaaaaagtcaatagacagaaaaaaacatccatta

SEQ ID NO: 114262 - DNA, 433 bp, Zea Mays
tacaaaacgataaacaccatttcgatatgcaaaatccattggcaaaatatcaccgtaacactaataaatatgcaatattattataaatatgccacacgagcacatagaaaccgccatagtacatatcgaaggggaggtaaggtccgatgactcatttactttaatttatccagaaattttgattatatactttaggttcgtcatactgcttctaaccacacattcttcaaaaaagaaattaatgggacatgattgattcaagtacatacaatagcagcaaaaactaatgtgagggaaaatgcagagctacctgtgccttcgtgttgacccacatcgacggccaaattccccatagttccaaaagagatgacatgactccaggtgaagcaacttaatggcttttgtatgatcctggaaagcatcgactggtgct

SEQ ID NO: 114263 - DNA, 989 bp, Zea Mays
catttttgaaattggtcgtgagccgctgccgcacacggcgagaggaatagggttgctccccccgttgccgactcgccgccgcatcgccgcgagcgtcatgaagaccttcccgctgtccaggggaagcaccatctccctagccctcttctccgacgtctccaacagccgggagctcctggacttgatgcagtcagggaagctggagccggcggtcgctctcctcaacgcgtcactggtgccggatgtgttccctatcctcgcggcagcgcttaaggcgctgttgtccaagactagggagtcactgaccacaaggactctgcactctgagctcgtctacaactactcggggtccaaacatataacagagtccctgaagcgctgtgggatctctgataatacaacttacatccttgctgcttgttttgatgcttccgacgaggagatgaaggcagtggagaagctcatcagtggcaccgagattgatctcacagaactggaaagaagagcaaaccagccacagatcttgaagcattacaagatacctccccaagaactatcgatatctacgttgccggacgcaattgtatgcaggattgctgctcgagatgctctctgaagtctcaataatcaccgtaagctatgtggtttcaggatgtaggtctctctctaccacatgtatggtgtgacattgacagcacaagtgcacaactagaattaggtatccgaaataccattgatgttcgcattccctgcaagcaacccagaagcacattgcgtggttaatttttcttgctaaactgtgctgcaaagcaacagttatgttaatttctcccttgaattcgatgaagcttatatgatacaatctagcaaaggaatgtatgatgtatctgatgtggcgtgtaagtttctggtgcatagtgctttgtctataggcgagatagttccctgtttttgtatggaaattggagttagattgtgattgctgtggt

SEQ ID NO: 114264 - DNA, 675 bp, Zea Mays
atgctgttgatagcgttgatcaggagaccggcccaggcccatagaacaagcgggtttatggataactgcgtcccttctttcaaaacatctccgagaagaagtttcgctagaccaccaacgaggaacgattcatggaagacggttggatctatcacaaggccaaggccatcacttggaggcaagacgaagcccagcagcagaagaacgaatcccaaggaaaacccggccaatggtccagcagccgctagcttcagtaggtcctcacggttgcggacgatattgacgattctggtaatcccgccgaaagatcctatctgccagctaggaacaaaatatggcacgccgagcttgattccactttccctggcagcaaggatatgtccaatttcgtgcacccctattataaggccagttactagagcaccggatagtccgtctttcaacaactcaaggttgtcaaatgttgatctcaagttctcctgtagaacaggtacatttcgaagtagcagagtgaagatggtaactaatccaaatgcagcagcagcaaaccattctgggaccgctgtagtttcaggctgtaatgtctgcttgggtataaccacagcaactggcttctcatcctctgggttgatgagaagaaaaagcttatattcatcaccaaatttgttctgttga

SEQ ID NO: 114265 - DNA, 2080 bp, Zea Mays
gaaattccacacttaacttgtcttttcatcatagttttacatttccttcatagttttcgttcaaaaatgaactagcggacgacaaatattcgaggacggaagtaatatatgtcaagattataaaagcacagtttaaaaccacatcatccaaataagccctaaacgactttcatactagaaaactcgcaggctgtgtacactaccgctgtgtcagtagcatttacgtaagtatatatgccaaaccatttattaataactctcctcatcacacataaaaaaaatcaagcacggacacagagacagacagcagtcgctcgccctccccaaaatccccatccgcactccgcagctcaaaactctacccaattcaatttcaaaccgcaatctcccctgccttgccttccttccccttcacagcttcatccaccgctcctccaatctccgtcgccatcgccaaccctgagctgaaagcaaggccaacaagcatcatagcagtctcgctctcgcaccacgcgagtgagacaccaggcaaccaccacgagacagggacgggcgccatcctcatccaccaccaccctcccagcttccgttggcttcactcccactgcaggccccacctcactcgctcgcgccacagatctcgcctgccggaaccctaatgccgcaggtggacgcgccgggggagtaacgccgatgcagcgccgtgtgggcatggcggacggcgaggccagggggcggacgctcggcgccgtcatcaaggagaaggatgaggagctcgcgctcttcctcgagatgcgccgacgcgagaaggagcgcggtgctgcggcggcggcagcggcggtggcggcggcggaccagctcctgctctctggcgactccgtggcgggggacgggatgctgcttctcggcccgccgccacccgccgagcccaaaccggtggcgtacaaagtggctggtggcggatttaggagggcgcctggcggagcggacgatttcctccatgcagacgctggcgacaagaacgattacgactggcttctgacaccaccaggaactccactattcccatctctagaagttgagtcgaaaaggtccccggtgagccaagctggaacaccaaagactcgtccaactgccttaaaatcaaggttgtccaaccatccagatcctccatcaagaaccaacctcccattgaggacaacatcatcgaacagcctgaactcaggtgctacaacccgccgaccatcatcgtctggaggtcttacttctaattcatcaaggccttcaacaccaactggacgccctacattgacagctagttcctccaaagcatgatgatcaaagatctagcctgaacagtgtatctggtaaaacttcaaattccccagatagctcgggctttggtaggactttgtcgaagaaatcactggacatggcacttcgacatatggacataaggcgcagcattccaaacaatttacggcctcttatgacaagtatccctccatcatctgttcatagcgcacgttcaggatccacaaggagcagaccaatgagtgtctcagactcaccgctcgcaacaagcagcaacgctagctctgagccgagcgtcaacaacaacctgatgtgcctggacggtatttatatggatgatgagttgtgcagcgatagagcaggaccctatggacggtgatttcacttccaaaaggtttaaaaggcatgattctgatggaaccatttggctacagaatgttcagagcagcagggtggaagatatcgagtacctgacgagcattattattttgttatattttaggttcttcgaatgttcaatatctatccagttccttcgtgtcgtgtcatgctctgcagctccatgtgcaattttaaccatggaccttaatacactattgaaaagtgtcctttatgtgataaatctctagagcagtttatagcatctttgacatgcgatttggtagtggaacatgttccgatggctgaacgtttgtgctccacaacgttcagtgtcgctaatgtaacgtctcctagaatgtgtagttaaacaaattaagcaggagta

SEQ ID NO: 114266 - DNA, 2875 bp, Zea Mays
gaaattccacacttaacttgtcttttcatcatagttttacatttccttcatagttttcgttcaaaaatgaactagcggacgacaaatattcgaggacggaagtaatatatgtcaagattataaaagcacagtttaaaaccacatcatccaaataagccctaaacgactttcatactagaaaactcgcaggctgtgtacactaccgctgtgtcagtagcatttacgtaagtatatatgccaaaccatttattaataactctcctcatcacacataaaaaaaatcaagcacggacacagagacagacagcagtcgctcgccctccccaaaatccccatccgcactccgcagctcaaaactctacccaattcaatttcaaaccgcaatctcccctgccttgccttccttccccttcacagcttcatccaccgctcctccaatctccgtcgccatcgccaaccctgagctgaaagcaaggccaacaagcatcatagcagtctcgctctcgcaccacgcgagtgagacaccaggcaaccaccacgagacagggacgggcgccatcctcatccaccaccaccctcccagcttccgttggcttcactcccactgcaggccccacctcactcgctcgcgccacagatctcgcctgccggaaccctaatgccgcaggtggacgcgccgggggagtaacgccgatgcagcgccgtgtgggcatggcggacggcgaggccagggggcggacgctcggcgccgtcatcaaggagaaggatgaggagctcgcgctcttcctcgagatgcgccgacgcgagaaggagcgcggtgctgcggcggcggcagcggcggtggcggcggcggaccagctcctgctctctggcgactccgtggcgggggacgggatgctgcttctcggcccgccgccacccgccggtgagaacttcatttcgagctcttcttcgggcctcctacggccgttcctttgcattttactcctgtctcgggaaaccctagcttatcttggtttggatttttggttatttgtggttgtagagcccaaaccggtggcgtacaaagtggctggtggcggatttaggagggcgcctggcggagcggacgatttcctccatgcagacgctggcgacaagaacgattacgactggcttctgacaccaccaggaactccactattcccatctctagaagttgagtcgaaaaggtccccggtgagccaagctggaacaccaaagactcgtccaactgccttaaaatcaaggttgtccaaccatccagatcctccatcaagaaccaacctcccattgaggacaacatcatcgaacagcctgaactcaggtgctacaacccgccgaccatcatcgtctggaggtcttacttctaattcatcaaggccttcaacaccaactggacgccctacattgacagctagttccaaaggttcaaggccttcgacccccacttcccggacaactgttcctgccaaaactggagcttctgtgtcaaggtcgtcaacaccgactttgagatcaacacttccatcagccaggtcaacgaccccttcaagcagggcagttggtcctgctagcaggacttcagctcctataggcagagcatctgcccctgctagtaggtcatccacacctacttcaaggtcatcaatacctgctaccaggtcaacaacaccatcatccagaccctccataccagcacaaagcaagcctacatcaagggcatcaactccaacaaggcgaccttctgccccttcggcccagcatggtaacttagctgcaccagttagatcgtcctcaatctccaaaccaggttcgacaatgcccaaaggttcttcaccagcaaaaactgcagcgccaacaccttcaagaggcagctcccctactgtcaaatcaagaccatggaaaccatctgaaatgcctggtttctctcttgatgcacctccaaacctaaggacatcgctaccagaaagaccaacctctgccactaggggcagacctggggcacctagttctagatcttgctctgttgagagtgggccagctggtcgaccaagacggcagtcttgctctccctccagaggaaggactttaagtggcagcgtgccttcagggagctccatgccagcagtgagaaggtcacatctcaatggaggtgacagtgtgaatccagttcaaatgggtaataagatggttgaaagggttgtgaacatgagaaggctagttcctccaaagcatgatgatcaaagatctagcctgaacagtgtatctggtaaaacttcaaattccccagatagctcgggctttggtaggactttgtcgaagaaatcactggacatggcacttcgacatatggacataaggcgcagcattccaaacaatttacggcctcttatgacaagtatccctccatcatctgttcatagcgcacgttcaggatccacaaggagcagaccaatgagtgtctcagactcaccgctcgcaacaagcagcaacgctagctctgagccgagcgtcaacaacaacctgatgtgcctggacggtatttatatggatgatgagttgtgcagcgatagagcaggaccctatggacggtgatttcacttccaaaaggtttaaaaggcatgattctgatggaaccatttggctacagaatgttcagagcagcagggtggaagatatcgagtacctgacgagcattattattttgttatattttaggttcttcgaatgttcaatatctatccagttccttcgtgtcgtgtcatgctctgcagctccatgtgcaattttaaccatggaccttaatacactattgaaaagtgtcctttatgtgataaatctctagagcagttta

SEQ ID NO: 114267 - DNA, 1705 bp, Zea Mays
ccacgaaccaaacatggagaaaaacgccgaactttacagtcaagtagcgcactttggcttgtgggcagctgtgcccctatcacggtatccatacactcccggcatcccttccatccgcgacccgccgcgtccgtacaccggaccatgctctccacacccgccgcaggctggcgcttccgccggggaggtctgccctggaggcttcatacgtgctcctgcctggcgtcgccgctgtcttccagcggcggcgagcctgaaaaggcgaggcctttgctcgcggagaggtaccgggacggtgtcgtcaagagatatatttcggatggcagttctaagctgcaacttcgtttggagaagcatgaatctccagtgaacggtgtggaagatgagaatgcagattctttgatcccacaggctattttggactttgtgcttccagctgggtttccaggctgtaggtgttgggtcctttacaggaacttctgcagctgcatctgctgctgctatcagatgggtatcaaaggatggcattggggcctttggacgtcttctcattggtggacgctttggagcacttttcgatgatgacccaaagaagtggaggatgtatgcagatttcattggaagtgctggaagcatatttgagcttagcactacattatatccaggttactttctcccacttgcatcattagggaaccttgcaaaggccatagcaagaggatttaaagatccttcatttcgcgttatccaaaatcactttgcagaatctggaaatcttggagaggttgctgcaaaggaggaagtatgggaagtaggagctcagcttttaggcctttcaatcggtgtactcattatggataagacaggtgtaaagtcatcatacttaactcttgttttaacttggctgagtgttcgtcttctacatctttggttgcgctatcagtccatatcagttctcaagttccgcacagtaagataaacctaaaacgtggccggattcttgtgaaatcacatgttgcacaacatactgttcctggttatgttgcttgcaatgaggaagaaaacattttaacatgggaaagatacttgcgtccacaagtttctttcggtgtgcccatggaaagaatgcttggtggtgacaaatccagtgacatggtgaatagattactgaagttatacaagaacgagaagtacatcctcttcttcgagcagtttggatcaagggagccgacatttctagttactttcaaggaatcagcaacaagtatgtcagtcctaaggagcctgtggcaagcacattggcttcacaagaatcagctaaggcaggacgaggttttcccatggttagaagaaagcatagtcgcattggagaatggattcactgacttcctcgagcaattggggagtgctggctgggaccaggacctgatcattttgaaagtcccaaaagagcccgtcttggtgttggaacatctagaagaccaagaggtgtaagatgccacggctggtctgttgctaacctagaggacaatgtagagtcttcttttctattgcgtgatcatgacctgctgaatcaattgcaactgagcatcgcgaaggagccgagttcccatgtggcagatgcttagtgatctaacaagaatagaaactgtctggcatgtgacatgatgtttatgctttaaggagtgtttggtttatagggatt

SEQ ID NO: 114268 - DNA, 1811 bp, Zea Mays
ccacgaaccaaacatggagaaaaacgccgaactttacagtcaagtagcgcactttggcttgtgggcagctgtgcccctatcacggtatccatacactcccggcatcccttccatccgcgacccgccgcgtccgtacaccggaccatgctctccacacccgccgcaggctggcgcttccgccggggaggtctgccctggaggcttcatacgtgctcctgcctggcgtcgccgctgtcttccagcggcggcgagcctgaaaaggcgaggcctttgctcgcggagaggtaccgggacggtgtcgtcaagagatatatttcggatggcagttctaagctgcaacttcgtttggagaagcatgaatctccagtgaacggtgtggaagatgagaatgcagattctttgatcccacaggctattttggactttgtgcttccagctgggtttccagggtctgtttcagcggactacctggactacatgttgttgcagttcccaacaaatgtgacaggttggatctgtcatgtattggttacatcaagtcttttgaagattggtacaggctgtaggtgttgggtcctttacaggaacttctgcagctgcatctgctgctgctatcagatgggtatcaaaggatggcattggggcctttggacgtcttctcattggtggacgctttggagcacttttcgatgatgacccaaagaagtggaggatgtatgcagatttcattggaagtgctggaagcatatttgagcttagcactacattatatccaggttactttctcccacttgcatcattagggaaccttgcaaaggccatagcaagaggatttaaagatccttcatttcgcgttatccaaaatcactttgcagaatctggaaatcttggagaggttgctgcaaaggaggaagtatgggaagtaggagctcagcttttaggcctttcaatcggtgtactcattatggataagacaggtgtaaagtcatcatacttaactcttgttttaacttggctgagtgttcgtcttctacatctttggttgcgctatcagtccatatcagttctcaagttccgcacaataaacctaaaacgtggccggattcttgtgaaatcacatgttgcacaacatactgttcctggttatgttgcttgcaatgaggaagaaaacattttaacatgggaaagatacttgcgtccacaagtttctttcggtgtgcccatggaaagaatgcttggtggtgacaaatccagtgacatggtgaatagattactgaagttatacaagaacgagaagtacatcctcttcttcgagcagtttggatcaagggagccgacatttctagttactttcaaggaatcagcaacaagtatgtcagtcctaaggagcctgtggcaagcacattggcttcacaagaatcagctaaggcaggacgaggttttcccatggttagaagaaagcatagtcgcattggagaatggattcactgacttcctcgagcaattggggagtgctggctgggaccaggacctgatcattttgaaagtcccaaaagagcccgtcttggtgttggaacatctagaagaccaagaggtgtaagatgccacggctggtctgttgctaacctagaggacaatgtagagtcttcttttctattgcgtgatcatgacctgctgaatcaattgcaactgagcatcgcgaaggagccgagttcccatgtggcagatgcttagtgatctaacaagaatagaaactgtctggcatgtgacatgatgtttatgctttaaggagtgtttggtttatagggatt

SEQ ID NO: 114269 - DNA, 1801 bp, Zea Mays
ccacgaaccaaacatggagaaaaacgccgaactttacagtcaagtagcgcactttggcttgtgggcagctgtgcccctatcacggtatccatacactcccggcatcccttccatccgcgacccgccgcgtccgtacaccggaccatgctctccacacccgccgcaggctggcgcttccgccggggaggtctgccctggaggcttcatacgtgctcctgcctggcgtcgccgctgtcttccagcggcggcgagcctgaaaaggcgaggcctttgctcgcggagaggtaccgggacggtgtcgtcaagagatatatttcggatggcagttctaagctgcaacttcgtttggagaagcatgaatctccagtgaacggtgtggaagatgagaatgcagattctttgatcccacaggctattttggactttgtgcttccagctgggtttccagggtctgtttcagcggactacctggactacatgttgttgcagttcccaacaaatgtgacaggttggatctgtcatgtattggttacatcaagtcttttgaaggctgtaggtgttgggtcctttacaggaacttctgcagctgcatctgctgctgctatcagatgggtatcaaaggatggcattggggcctttggacgtcttctcattggtggacgctttggagcacttttcgatgatgacccaaagaagtggaggatgtatgcagatttcattggaagtgctggaagcatatttgagcttagcactacattatatccaggttactttctcccacttgcatcattagggaaccttgcaaaggccatagcaagaggatttaaagatccttcatttcgcgttatccaaaatcactttgcagaatctggaaatcttggagaggttgctgcaaaggaggaagtatgggaagtaggagctcagcttttaggcctttcaatcggtgtactcattatggataagacaggtgtaaagtcatcatacttaactcttgttttaacttggctgagtgttcgtcttctacatctttggttgcgctatcagtccatatcagttctcaagttccgcacaataaacctaaaacgtggccggattcttgtgaaatcacatgttgcacaacatactgttcctggttatgttgcttgcaatgaggaagaaaacattttaacatgggaaagatacttgcgtccacaagtttctttcggtgtgcccatggaaagaatgcttggtggtgacaaatccagtgacatggtgaatagattactgaagttatacaagaacgagaagtacatcctcttcttcgagcagtttggatcaagggagccgacatttctagttactttcaaggaatcagcaacaagtatgtcagtcctaaggagcctgtggcaagcacattggcttcacaagaatcagctaaggcaggacgaggttttcccatggttagaagaaagcatagtcgcattggagaatggattcactgacttcctcgagcaattggggagtgctggctgggaccaggacctgatcattttgaaagtcccaaaagagcccgtcttggtgttggaacatctagaagaccaagaggtgtaagatgccacggctggtctgttgctaacctagaggacaatgtagagtcttcttttctattgcgtgatcatgacctgctgaatcaattgcaactgagcatcgcgaaggagccgagttcccatgtggcagatgcttagtgatctaacaagaatagaaactgtctggcatgtgacatgatgtttatgctttaaggagtgtttggtttatagggatt

SEQ ID NO: 114270 - DNA, 630 bp, Zea Mays
ggtagcggagcgcggccacgtcgtaggcgcgcgccgcggcctcctcgtcggcgaacgtgccgagccacacccgggcgtggcgctcgtagatctgcgcgccccagcggccgttgggctgcggcaccacgcccttgaagcgcgaggagccctgcggcaccgccgacggctgcgacgtgacggcctgctcgtccgccgccggcgagacggcgacggcgtctccgccgccgaccgcgccgccgcctggtggtgcggcagcgggcggcggctgcgcggcggcggcggactccgtggtggccgtggacgcggcggaagagctgtcctccggcgccgccgccgtggggctcatgctctcaatacccatgatgagctacagctacgtacagctcgcgctgctccctctggagtgctatcttcgctttggtttcttggcgtgtgtgcgtgcttgcgtactgcctgcagcagagcagcctctatctgatgatgccggactgtgatagtattcgccgctgccgctaggcgatagctagaaacagtatggaattattgacgagactttactgttctaggcttgcttgcttgctagggctgggacaagatgatatacaagaagatagatgatgcaggcctgtg

SEQ ID NO: 114271 - DNA, 962 bp, Zea Mays
aagcccaactcaaccacccattccatccaacagatcgacgccgtccgacgcgaatcgaacgtccccacagcgattacacaaaaccctagcagcacaccagctatataatccttctgccgactaccaccagccgcctccactcgctcccccacacagaaaaccctagccgccgccaccgaagcggcctcccaggtaagcaagagcgtccaccccgccgccgccatgaagcgcaatccccgcgtcacgagctctcgccggaagtgccgcaaggcgcacttcacggccccgtcctccgtccgccgcgttctcatgtccgccgggctgtcgacggagctccgccacaagtacaacgtgcgctccatcccgatccgcaaggacgacgaggtgcaggtcgtgcgcggcacctacaagggccgtgaggggaaggtggtgcaggtgtaccgccgccgctgggtcatccacgtcgagcggatcacccgcgagaaggtgaacggctccaccgtgaacgtgggcatccacccctccaaagtgatcgtcaccaagctgaagctcgacaaggaccgtaaggctctcctcgaccgcaaggcccggggccgcgccgccgacaaggctaagggcaagtttactgccgacgacgtcgctgcagccgccgctggtggcgccgccaccggcgcctctctccaggagatcgactagactcttcacggtcatctgatggttgtcgtaccgccttttcctcatctcttttgtttttgctaccaatgattatgtgatagaggttttatgttatttgaaaactgctctgtgcctggatgagagtttttggaacataatgtgaacctgtgtgtctgtgacctgagctttgaagatctcattatgtggttaatgtctccttgtagtatcttctaaatggttgctgtgatttgtcttcactctattacctgtctgatgcatgtagcgtt

SEQ ID NO: 114272 - DNA, 459 bp, Zea Mays
atgtgcttcccgatcgactgctggctctgcatgccccacaccgacgacgacgaccttgcccccgcgagcagggcacagccgccgccgccgccgcccgcgcagcgcaacggcagccactacaacggcgacggccactaccggcctgcgcactacagcgcggctgccgaggcggaccgcaaggcgtccaacgacgcgaggagaggccccgcgcatcatggcgccaccggcgcgcaggcgaaatcggcgtacccgtacgcagccgaagccgccgacggcgacggggcgctgaagcagcagcccgaggcgccgaacggcagggtcgctgccgccgatggccatggagcacgcgccgcgccgcgccacgactacgaacgcgcacagccgcctgcccgcaaggaggacgccgcggattcctactacccggctgcgaccgctgcagcctatcgcgaaaggtattag

SEQ ID NO: 114273 - DNA, 2083 bp, Zea Mays
gggagggaaaagcatgcatgtgtgatcttttccgctggatggaaacttccattttcttgacatagcaaataaaataaaaataaatactcttaacttgggagcccccacgatctaattcgtcatgacaaggctccacgcacgcatactcgagagaaagagagaaacactgctggagctggacccatcgcgccggacacaggctggcatggcaatggcatcatctgtcctcgcctttgcctttcgctcctccccagacccggcagggcccaccgcttaattaccccatctaatcattctcccgctaattaaacaccggcttgtcattactactgacaaccgtggctaacagggcacggttagccagaaggcaggcttaggctaggctaggctagcacttgttgggggtgaagccgacggcgcccctggcggtgtcgaagctgacgcgggtgccctgctgctgcacgttcccgatgatggacacggccgcgttcgtcggcgcgaacgccaggcagtaggtgccggctccgtccacggggatcaggtagttcttcgccggcagccgcagcgcgccgccgccctcgaaccgcagcgacaccgcgggcacctccacgctcgtccggtccgacaggtcgtagcacgtgtcgaacagcgacaccccggaggtccggggcagcgacggcgcgccctggacgaaggcgtcgcggagcgccgcgtaggcggcggactggagccgcgtcacggcggtgccggagtccacgatgacgccgcccgagcccgacgtggcgtccatggcgaaggcggaggccgggatggacagcggctgcccgcccaccgagatgcccgacagcgccacgtagtagaaggtgctcgtgcgcgggctgcgcacgagaggcgccgtcacggtgcccgcctcggcggcgccgtcgccgaactggagcgtggacgcggccggggagtcgcggtccacgaggcagtaggagaaggtggacgcggagatctgggacgggaaggagagcggcccgccgcccagcgccagcagccccgcggcgccgacgaagaggccctcgttgtcgtggccgcacccgatggcgacgttgccgaccggggtggagtcccccagcgtgagcgtctcggtggcgaagtcgcccacggtgtaggagccgtcgccgtaggccacctcgtagaggcaggcgcccgtggcgttgcggcacgccgcggtgtccaggtcccggcagcgctgggagtcgcaggagacggcggcgtaggaggcggagagcgacgggtcgaacaccgggtcggactgctggtagcagtcggcgcagggctggcactgcacccaggtgacgtcgctgccggtgtccagcaccatgtacagctgccgcgcggggctgccgatgcccacgcgggagaagtactcgccgctgccctgcccgacgccggacaccacggggccctggatcgccgcggacgccgcgaacaccgccgacccgttcgcggggcgcaggtccagccgggtcacgccgtccgccgccagcgtcgcgcgggccgacaccgccgcggcgcgcgccgagtcgcggcggaggcgggagagcacgagcgagcggtacgtctcgtgccgcccctgctcctcgggcaggaagtcccgggagtggagccgcagcgtgaggccgccctcccgcgctcgcggggagcgcttcgccccggcggcggcggccgcggactggtgcagcgagacggcgtcggtggagagcgcggcgcgggcgcgggagagcgaggcggctacatcgagcgtctccgtgtccgcggcggacgagtggcggtggcgggagacggcggggctcggggcggtggcgagcaggaggatggcgaccacgacggcgcctagcgggagaagggtaggcggctgcattgtgccgcgcctggcggtgagaggactggtggcagtgggagtgtcgggggcaggaatgagtggaggcctggagggcgaggaaggtggtgggatttttcaagggcggcacagccggcaggtgcagtgacgaacgacgagggtgaatggaatggggatcacgtcatttcggtgctg

SEQ ID NO: 114274 - DNA, 1154 bp, Zea Mays
gtgtcccttcgtggggtgcgcccgccacctgccgatgcgacgtgagaggagccaagcgcgcagtgggccctggacacgagagcggtgcggtgtcgtgctggcggcggcggcggcggcggcgaaggataaatagggccgtagggccatcgttttgcattgccgtcgcgtggccgtgggttttcatcgacgaacgacgacgactctgccgcgcgcgtttaggcgcgtcgccgccggccacccggccggccacttcgacgcggctgtggtggtttaaaattctccggctcgccgcccacggcctcgctgcacgtagttgcagatcaagctctctcacgagggtttaattttcatgcaaggcctgacatttctgcgctgaggttacattgctcacagttgttcagtagcagcttgtccaacagtacttgcccgttccagcagtacttccaggcaaagtagcaaatttacgcagagcgcaaaggtagaagctagcaacatccaaaggaaataacaaaacactagcagcatccaaagaaatttggtattctgcactccctattgtatttggttgtcattaaccaaacaacacagtttggagtttggactgaactgaacttgaataaggcgcaaccaatcaaggtcctgcttgtgggctttaccgttcagatttcaagaaaaaaaaatataccgtaccttcctggatctcgtatccttcaaagcatttctcagaagattttccagcttctccagctcatctacatctgattcgtcagcattgctctggggagacctgccggtttgaagaaattgtgattatttatcaaaaatgggaaaccagagtgggtggaaatcctgagttctgggtgtgtaccaggtcgcaatcttgctcagcatcaactgcaaatctgaagaagcttcatccttgttctgtaccaaaaacaccctagtaagctatatttatcgtaaatttcaatattatatatttgctctggtattctacatactgtacaaacaggacattctgttctgcatagtgtgaaaaacatagcattttggttggtgccggcaactggcacagtatgtaaaaacattctttctaaaactatgataaaaaaagcagcgaagctgtaggctgcatcatatgcgttgtaaaagct

SEQ ID NO: 114275 - DNA, 837 bp, Zea Mays
aaatggaggcggaggcctccaccgacggagcagggcaggacaggttgcatttgcatctgagttcctgattgttgtatcccagtttcttctgtgagtggaatcgcgaggaagaaggatgtcgtgctgcggaggcaactgcgggtgcggcgccggctgcaagtgcggcagcggctgcggagggtgcaagatgtacccggacatggcagagcaggtgaccaccacccagactgtcatcatgggtgttgcaccatccaagggcgggttcgaggcggccgccggagctgagaatggcgggtgcaagtgcggcgccaactgcacctgcgacccctgcacctgcaagtgagacgacggcggcggcgatgacgctgcagggtctgcaggccctgatggggtcggaaggactctttatctctctagctaattaataagctctagctagtatataatattctagcagtgtcgtttgctgtgttttgttcgagtcagttagacagtcagctgcgtgccatgggccatgcccatggcatagcatgccttgctctatctgctccatcgccttgttctagtggtggtactgatgggggaacgaataattgtaccgagatgttggcgccgtgtcgtgtcgtgccctgtcctgtcctgtcctgtccttcctggggctcatctagcagtcagactgtgttgtgttgtgttgtgctgtgtgggccgagtgtgcactacagcatcgggccatgcccctgttcgatctgtctgcgactttaatttgtttgtgctgtgtcatctatctatctaatccatctatgctatcctctatagtctatacatagcgtgtctaaa

SEQ ID NO: 114276 - DNA, 723 bp, Zea Mays
cctctgcgaagacgacgagcgcggcggcgggagatgcgatgggggacacgaactctgccgcgggcgtcgcgaatgatggcggttgcgggagatgcgaaggggaggagacctgcggcggcgagttgggacggggacgcgtcacgggcgcgattgcgaaaccctagcgaaatgaggtttggctttccgcggaagcgatctgagccccgcttctggcgtcgcgtgggcgggcgacttctcatccaagcgcggcgcggagaagcggcaggagaagctgggcgtttggtagccgcttcagcttctggcggccagaatccccccaaaagctcaaccaaacgggcactatgtatctatcgatccatcaccaccggtccactccactccctcgcacgttagaccgacgtaggtacgtgccgacccgtcccgttcccgttcccgtgacaggcgcacacgacggacggacgaggacttaccgtccaccaccgatcgtcgccagtcgcttgaagcgaacgccctcgatcggtggtcggcggccggccatcggcgtcgcgatcccgacccgtcgtagctagctgcgcgcgcgccagatatacatgttggccatggcgggctctagatgcgcgatcgtgtaataacaggtggccggccggtgggttacggatgaagcagcccgccccgggcaggcacagtgaccgcccgccgtccgggtggaaccgccagcaaccg

SEQ ID NO: 114277 - DNA, 812 bp, Zea Mays
acgtcctgcttgggaggttgtggtttccgacctccgccaccaccgtgatcggacttatcatcgtcagagaacattcggctggacgcctcagatggcgacatgccggtcatagcagggatcggcacctgctgttgagcttgtatatacatgggcagctgctgctcggagattcccatctgcgcgaagtggtcctcgacggcggtaggttgcatgatgcgggcgtccgacgggcggtcctccggccgcacgcgtataggcggaagattcgatagcgacggggccgaggaggtagacccgaacgaggagttcttatccagcatcggcgagtctggcacggactggacgtcgtgcgggtgcctcccggtaccgacggcggcagcggcggcgcccgcctggagcttcggctggctggcgcgctggtcctccgtgggagccgagttggttactccgctacgggagtgcacggaggagtcgtcctcgaggccgagaaggcagttgacggaggctgaatcggtggagattcccctcgggataccgtcgagggagccggagatggcgctgttgagggcgtcgacgaaccagttctcggactttgaagagtcgtcgagcagggagccgagcgaggacgaggactcgggcttggcggggaagaggaagaggcggatccgggaggtgcgcgaggttcctccgccggaggaggtcgcagcgatgcggtcgtactcgtcgacgaggttgtcgaggtcctcgtccgtagagacggagatgagggagtccaggtcctcgttgggtagctgatacttgagcgtgaaggg

SEQ ID NO: 114278 - DNA, 102 bp, Zea Mays
gttgtctgttgttctatcccttgtacttctagtctgtcaagtggaagtggtattaacagttaaatgtgttccaactgcactattttctcttggaatgtgagg

SEQ ID NO: 114279 - DNA, 805 bp, Zea Mays
ctgacatagactcacacacacgcggacacaccaggctcggccgtcctgcttgtctgaatgtcttagtctgatgagtccccggtgcagatttgtagccttgcccagcggtttccggagctcaagactctcaggagctgcgacctgtctccggcaagctggatctccgtggcgtggtacccgatctaccggatcccgacggggccaacgctgcgcgacctggacgcctgcttcctcacctaccactccctgtccacgcagttcgcagcaggcgccagcagcaacgggcccagaccggcgacggcagccaccgcgacggcgatgatgtggctcccgacgttcgcgatggcgtcgtacaagctgaaggcggcggcgtggacgccgggctggcgcgaccggcaggttgccgcgtccctcgcgcaggccgccgacgcctggctcaggctcctgcgcgccgaccacccggaccaccgcttcttcgccgcccggcggcctcccaggagatggtgatcatttgagtgtatagagtactctctctctctctctctctctctctctctctctctctggcaagtctgaaggtagttgtcctgaaaaaggaaacggctgaggtagttagggttcactagcggaaccggagtgacaaagtatgttcatcctgtagtttcaatgttgttttcctttttttttgtatccgccatgttctcaggaaaaaaatgtatcagaaaacgtataataggtgtagagcaatactggtgtcattgtccattcgtacagtgttcacaatttcacatggaaaaaaaaaaca

SEQ ID NO: 114280 - DNA, 1430 bp, Zea Mays
aaagattagctgtgtcagctcgtcattgaactgctctgggaccgccctgtaacatccaccaactcgaggaggaggaggaggagaagagatccccccacctagcctcggtttccaagcgccagcagaagaagaagagacaggacacatggcggcaggtttcggcccgaggttcgccgccggcgatgctccggcgagacggtgtaacctggagcggttcctcgaggccaccacgcccgtcgttgcgtcctccagctgctcgtccaaggagaccgcgaacggttgggggcagcggcagtcagacgacgcagacggctcgtcgccgttcttcgctctgggcgacctctgggactcgttcaaggagtgcagcgcgtacggcaccgctgtgccccttgctctgaacggctgcagcgacggcgtcgttcagtactacgtcccctacctgtctgcaatccagctttacggagccctcagaaggcacatcggcccttcgaggacgggtgcagaggagagcgacagcgacgcggagcgcgagacgagctccagcacgaacacgttgtcggcccgggaggaggcgagcgagagcagcaccagcggcagcgaagcctccggcgacgagggcgagccgggaccggggagctggtgccaggagcggctcctcttcgagttcctcgagtccgagcctccctaccagcgcgagcctctggctgacaagatttgtagccttgcccagcggtttccggagctcaagactctcaggagctgcgacctgtctccggcaagctggatctccgtggcgtggtacccgatctaccggatcccgacggggccaacgctgcgcgacctggacgcctgcttcctcacctaccactccctgtccacgcagttcgcagcaggcgccagcagcaacgggcccagaccggcgacggcagccaccgcgacggcgatgatgtggctcccgacgttcgcgatggcgtcgtacaagctgaaggcggcggcgtggacgccgggctggcgcgaccggcaggttgccgcgtccctcgcgcaggccgccgacgcctggctcaggctcctgcgcgccgaccacccggaccaccgcttcttcgccgcccggcggcctcccaggagatggtgatcatttgagtgtatagagtactctctctctctctctctctctctctctctctctctctggcaagtctgaaggtagttgtcctgaaaaaggaaacggctgaggtagttagggttcactagcggaaccggagtgacaaagtatgttcatcctgtagtttcaatgttgttttcctttttttttgtatccgccatgttctcaggaaaaaaatgtatcagaaaacgtataataggtgtagagcaatactggtgtcattgtccattcgtacagtgttcacaatttcacatggaaaaaaaaaaca

SEQ ID NO: 114281 - DNA, 1454 bp, Zea Mays
aaagattagctgtgtcagctcgtcattgaactgctctgggaccgccctgtaacatccaccaactcgaggaggaggaggaggagaagagatccccccacctagcctcggtttccaagcgccagcagaagaagaagagacaggacacatggcggcaggtttcggcccgaggttcgccgccggcgatgctccggcgagacggtgtaacctggagcggttcctcgaggccaccacgcccgtcgttgcgtcctccagctgctcgtccaaggagaccgcgaacggttgggggcagcggcagtcagacgacgcagacggctcgtcgccgttcttcgctctgggcgacctctgggactcgttcaaggagtgcagcgcgtacggcaccgctgtgccccttgctctgaacggctgcagcgacggcgtcgttcagtactacgtcccctacctgtctgcaatccagctttacggagccctcagaaggcacatcggcccttcgaggacgggtgcagaggagagcgacagcgacgcggagcgcgagacgagctccagcacgaacacgttgtcggcccgggaggaggcgagcgagagcagcaccagcggcagcgaagcctccggcgacgagggcgagccgggaccggggagctggtgccaggagcggctcctcttcgagttcctcgagtccgagcctccctaccagcgcgagcctctggctgacaagatttgtagccttgcccagcggtttccggagctcaagactctcaggagctgcgacctgtctccggcaagctggatctccgtggcgtggtacggtggacgaactagatagatgtacccgatctaccggatcccgacggggccaacgctgcgcgacctggacgcctgcttcctcacctaccactccctgtccacgcagttcgcagcaggcgccagcagcaacgggcccagaccggcgacggcagccaccgcgacggcgatgatgtggctcccgacgttcgcgatggcgtcgtacaagctgaaggcggcggcgtggacgccgggctggcgcgaccggcaggttgccgcgtccctcgcgcaggccgccgacgcctggctcaggctcctgcgcgccgaccacccggaccaccgcttcttcgccgcccggcggcctcccaggagatggtgatcatttgagtgtatagagtactctctctctctctctctctctctctctctctctctctggcaagtctgaaggtagttgtcctgaaaaaggaaacggctgaggtagttagggttcactagcggaaccggagtgacaaagtatgttcatcctgtagtttcaatgttgttttcctttttttttgtatccgccatgttctcaggaaaaaaatgtatcagaaaacgtataataggtgtagagcaatactggtgtcattgtccattcgtacagtgttcacaatttcacatggaaaaaaaaaaca

SEQ ID NO: 114282 - DNA, 144 bp, Zea Mays
aacacactctccttctttctctgtcccgtctcttccactggctcctgccccaggcggcgctgcagcccagcgcggcgaccagcgcccgcgcgaggtgagccgcggccaagcccctggcgcctggcggccctgtcccctggccag

SEQ ID NO: 114283 - DNA, 2010 bp, Zea Mays
atggccgccgtgcatggccgggtgctgctgctgctgctctccaccctaacgttcctcgcagttcacgcggtgacagcagcggctgccaccgcgacaagctgcgcgccgaggacctgcggcaacctgaccatcgcctacccgttctggctcccggtcccggaccagcaggcttcctcctcgtcgttgccgccgtgcggcccgagcgcgttccaggtggactgccgcggcgggcgcgcgtcgctggcgcgctcgttccgcggcgcctacaagatcctccgcgtgtcctacgcggaccgcaccgtggtggtggccaacgacaacgtgcagaccgacgccagcggctgccccgtgccgcgcatcgacgtgtccgccagcctcagcctcgcgccgttcacggccagcggcgccaacgcgcagctcgtcttcctcttcaactgcagcaagccgccgccggccgggttcgtcaacgtgacgtgcccgggggcgcaggccgtggtgcggctcgacccgaggtacaacaccaccgacgcgagggcggtggccggggcctgcgactactcggtcgtgccggtgctggtgtcccccggcggcggcgcgagcgccggggactacccgcggctgctgaggggcgggtacctgctggagtggcgggcgtcgcctgggaactgcacggcgtgcaatgccagcggcggccagtgcgggtacgactccgacacggatgcgttcgcctgcctctgcgacgacgggtcttcacatccggcaagatgcggcgcaaagaagtccgaccggaaggtgatcctgatagtgtctgtgtcgatcgcattcggcctgctgctggcgcttctcgtcctaatcctcaagttccatcgacaaataacacgcagtttcagcttcctgctggacagaagcagcagcggagacaccgcggacgtggaaaaactgctgcagaagtacgggtcactcgctcccaagcgctacaggtacgccgagctgaagaggataaccaagtccttccagcgcaagctcggggaaggcggctacggggcggtgtacagcggcgtcctggccgccggcgccggcggcacccgcgcgcgcgaggtcgccgtcaaggtcctgcaccacgcccgccccaacggcgaggagttcctgaacgaggtggtcagcatcggccggacgtcgcacgtgaacatcgtcacgctcctgggcttctgcctcgagggctccaagcgcgcgctggtgtacgagtacatgcccaacggctcgctggacaggtacatccgctccgagtccgacccggccggcacggcggcgctggggtgggaggcgctgcaggagatcgcggcgggcatcgcgcgggggctcgagtacctgcacgaggggtgcaacacgcggatcatccacttcgacatcaagccccagaacgtgctcctggacgccgacttccgccccaagatcgccgacttcgggatggccaagctgtgcaacccaaaggagagcatcctgtcgatggcggacgcgcggggcaccatcggcttcatcgcgcctgaggtcttctcccgcggcttcggggtcatctccaccaagtccgacgtgtacagctacgggatgctgctgctggagatggtcggcgggaggagcaacgccaaggcctgcgccgccgacaagtccagcggcggcgagctcttcttcccgctctgggtgtacgaccacctgctgcttgaggacggcgtcggcgtgcttcggggcggtggcggtggcggcgcgggaggctccggagaagcagcggcaggcgaggagatcgcgaggaagatggcgctcatcgggctctggtgcatccagaccgtgcccgccagcaggccgtccatgagcagggtgctggagatgctggagaggagcgtccacgacctggccataccgccccgcccgtaccacacttctccgtccaactccccgtcgccgtcgcacccgtcgagctatccgtcttccacctcggatttcacccaacggtga

SEQ ID NO: 114284 - DNA, 126 bp, Zea Mays
atttcttttatccctgttgattaaatgtttgtataccattaaggtgtttgataatcattaggccaaatgtgcttatggccacatacatcatggaagtacatagccatgacaatgttattatctccc

SEQ ID NO: 114285 - DNA, 445 bp, Zea Mays
gaattgaggacgttctccaattctatcacccaacccggctgattctatgatttacaattctacaattggtctaaatactgtgcggttcgtgtcttcttcctttccggcggccggcgggtgcagaaagtggcatacggctgtggtcacaaagtggcatacaattagcgctttgattttatttctggtcaaagtagaatgcacctttcctacggacaagagtcccacaagtcacaaagtaggtttactcattacaattacaagtttacaactaggcggttgattatatcaaacacagtttccaggttgtattgctcaaagcagttcttagactgaatctaggaaagactctagcaaacattttttttaccgagaaattaaagtattttatgctagttctatggagtgattttcggaaataatagaagctggaagctgacaaaggtaa

SEQ ID NO: 114286 - DNA, 729 bp, Zea Mays
atggctctggtcccattctcgttgctgctcttcctagtctcgctgtcggtgtgggtggccttacccttaccgttgccggtggcagcagcacatggcgggccaggagagcactgctcgccgtttctatgcggtaacgtgagcatctcctttccatttgggattatccagaaggacgccgagcagaccaactgcggcgccgggattggcttccaggttcgttgccataacaccatcccgcacctgggatactatcagaacgagatcaccttgcggatcctcagcatcttttaccacaaccgctccttgctcatcgccgatcgaccaaggtggcctacatatttcaatacgactaccagcaccgaagggtgccgcatcccgacggccaacacctcgtcccggcttgtccctccgctctcggtcagctccgacaaccagaacctcatcttctacagctgcaccaagccaccgtcgccaggcgagggactcgtggccacggtatgccacaacaacacgtttgttcgtgccgccgatgggcggcgttccgacgagtcaggcggctacgttttgcaaggttgcaccgctaccagggtgcctgtgcttggagtgtctggcaaggtgaacgctagcaactacgaccaactcgtctgggatggcttcctcgcgacatggcagttgccgccgacgccgtcaggttaacttcacccactcttggaactcaaagtctcactc

SEQ ID NO: 114287 - DNA, 78 bp, Zea Mays
ttttttcagtcagcgagagggattttatgtaaaagaaatgtgactttaatttgtagatatcagattgtcaaacagaag

SEQ ID NO: 114288 - DNA, 417 bp, Zea Mays
atgtcgctcgtgaggcgcagcaacgtgttcgaccccttctcgatggacctctgggaccccttcgacaccatgttccgctccatcgtcccgtcggcgacctccaccaactccgagactgccgccttcgccagcgcccgcatcgactggaaggagacgcccggggcgcacgtgttcaaggccgaccccccggcgtcaagaaggaggagcggccagcgcagcagggagaaggaggacaaggacgacaagtggcaccgcgtcgagcgcagcagtggccagttcgtcaggcgcttccgcctgccggagaacgccaaggtggatcaggtgaaggctggccttgagaatggcgtgctcacggtcaccgtgcccaaggcggaggagaagaagcctgaggtgaaggctattgagatatctggttga

SEQ ID NO: 114289 - DNA, 465 bp, Zea Mays
atggactcgacggcggcggacggatgcgcacccataggcggtcggacccgcggctggcggcagagcgcacgcccgcggctggcggcagagcgtccgtggctggggacgggccccgcgacgacggccacacctgagccgccagacgactatggctgctgctgttccaaaactatgggcgcacacagatttgaggtcgggtgctttcacggcagcatcacaaatggtttccgaaaggtaccaaggaatggtccagacgagaaactattaagcaggatcgggatcacgtcaggtcacctgaagctggagggtgtgaaggaggaagttgcggacgatctctgtctcgccgtgcatgaggaaggcgagcacggagggcacgaagtccctgatgaagacctggtcgtagttgagcatctccgtgcactcgggtcctccgccgccaccgtccccacgggctcgccgcagtag

SEQ ID NO: 114290 - DNA, 119 bp, Zea Mays
ctttccgattccctcctccccgcgcacagtccattcctatgttgtgcattcccctccctgtaaagcccattctcattcccccgtacagccgacgcctagctaaaattaaaaaaacatac

SEQ ID NO: 114291 - DNA, 844 bp, Zea Mays
ccacgcgcagggctgcaagccaccaaggaaattcacaaagcgatactagctagtccctaccaaagcatacttcctgaaacactcttgcaatccactgagttctgtttgttgagacgcatagagctagagtcgacaatgtcgctcgtgaggcgcagcaacgtgttcgaccccttctcgatggatctctgggaccccttcgacaccatgttccgctccatcgtcccgtcggcgacctccaccaactccgagactgccgccttcgccagcgcccgcatcgactggaaggagacgcccgaggcgcacgtgttcaaggccgacctccccggcgtcaagaaggaagaggtcaaggtcgaggtcgaggacggcaacatgctggtcatcagcggccagcgcagcagggagaaggaggacaaggacgacaagtggcaccgcgtcgagcgcagcagcggccagttcgtcaggcgcttccgcctgccggagaacaccaaggtggatcaggtcaaggctggcctcgagaacggcgtgctcacggtcaccgtgcccaaggcggaggagaagaagcctgaggtgaaggctattgagatctctggttgagcatccaatccaatatggacgattggacgtggaaggtttcctgtgtcttctacgatataataattggtcgctgtcctgtgtggatgtttcctgtgtcttctacgatatattaatgtacttctgtctgtttcgtttcgtatgtacaatcttccgggtatcgttcatgtatccctttgaataataacaaataaaatcgggtttgtcacggtaatctgaataaccttttattagccaaagtttaaccaaaatt

SEQ ID NO: 114292 - DNA, 340 bp, Zea Mays
cacaagggcgctgccgccgctcgccctctggatcgggggccgccaccgccggtctggaaaccgccgccaccgcataagggcgttgccgccgccgctcgctttctggatcgggggccgccaccgtcggcctgggaaccgccgccaccgccgacctggcaaccgtcgataatgaatcgagatggggcgtaaaaactgatccctagcactacggattttcttttatagacgtctggacctggtccggctcgaccggattgcactgtctggcctgggctttgtctggcctgggcttctaataactaaaggaagcccagggctcctaatatacaatctatatata

SEQ ID NO: 114293 - DNA, 1030 bp, Zea Mays
cgagcagcagcagcagctccaacaagacacaccaaaacacctagctagcttaccgcacctgctgcttggggctgccaagtaagtagtaagctagagaagcaaagcaaagcaaagctccgatccaatccaatccatcgcaaggattatgtctctggtaaggctcctggacacgctggccctggactcgtgggtgcggaaccccttcaccatcttcggcacggcggtggccgccgacgcgtggctggccagcgacacgtcggcgttcgccaacacgcacatcgagagccgggacacggcggccgcctacgtgttcagcgccgcgctcccgccgggcgtcaagaaggaggaggtcacggtggagctggacgagggcaacgtgctggtcatcgccggcgagcgcagcgtgtgccgccaggagcgcagcgacggctgccaccacatcgagcgcagccgcgccaccttcctcgccaggttccacctgcccgaggacgccgccgtcgacggcgtcagggccgccttggacgccggcaggctcaccgtcaccgtgcccaaggtcggggccgccgccgccgccatcgtgcccgagaagcccgccgccgacgcgccggcgctggcgcccgtgcccgtcgaggccggcccctgctgagcttctgacgatgccgacgccgacgccgaccgagacggccggccggctccctgttcctccacgtacacgcccccccgccggtgaacggatagtagcgtcccacgtcgtcgtgcgactgtgaggttgtcgctcgctcgcccgtgctgtctcaaagtttgtttccgtggtttggtcctggctttgcgtactacgtgatggattcagctgcctgtactgtactgcgtgcatgcatgtaaccatgaaaacaaaagggtggtattcctgcattgcacggctgcaacgtgtaattccgtctttaatcaatgttttttctgtgcttagtaaatgaaaaggcaacctaagctggaatcctatatacttttactactacttccgtcgtcgtca

SEQ ID NO: 114294 - DNA, 944 bp, Zea Mays
acgcgcccagcagatcgtcgatctgctcttataaaacgcggcggcaatcgagcaatcactttccaagttcaagcacctggctacacatatctcctagaaatcaagcagcgtcgagtttctccaggtccgaatcagtgatccgatcgcaagaagcaagcaacaatgtcgccggcgagcagcagcaacccgctgtcgctggacttctgggcgtcgtccgccgacccgttcggcgtcgtccggccgctggcggagcagtgccccgtcctcaccaacgtgcgcgtcgactggaaggagacccccgaggcgcacgtgttcagggccgaccttccgggcgtcaggaaggaggctgccaaggtcgaggtggaggacggcaacgtgctcgtcatcagcggcgagcgcgccagggaggaggaggaggccggcaaggacgaggcgtggcgctggcgcctcgtcgagcgcagcagcggcaggttccagaggcggttccgcctgccgcgcggcgccaggctggaccaggttcacgcgtccatggagaacggcgtgctcaccgtcaccgtgcccaaggaggaggccaagaagccgcaggtcagggctgtcgagatctctggttgatcgatccgttcactgcatgcattacgagtgcccgagctgtactacaggtagtataacttttcgaaattcgctggtaggacatctgccaagcaaatacaaactgtctatctgtccatcgttcgtgtatggaagtgttgtgcttttggtgtcaagtacgtctggccagtgttttgtgtctatgtgatgtgtaatgcatctgtgcttttctttttgctgttgactgttgtgtgtatcaattattcgtgcagtcgaacaaacgattgtgttcccccaacttggaagctcaggcgaccagcttgtgatgagctgagcctgcagctacctctacatta

SEQ ID NO: 114295 - DNA, 1610 bp, Zea Mays
atcgcgggctcagatagcaccgcacagctgaggtgcagtttctactagcagcaatatcatggattctgaggtagtgcatgtggtagagtcgtcgtttgtagtgccgagcgagccgacaccgtcggaggggctctcgctctctccgctggacctcgttctgcccagcagaggccacaccccaacagtctacctgtacagccccagcgatgttgccgccgccgatggtttcttcgacgtggccaggctcaaggaggctatggccaagaccttggtggccttctaccccctcgctggccgcctcggcgtcaacaacgatggcagggtagagatcacctgcaccggcgagggcgcactctttgtggtcgctcatgctgacctcagtgttggtgacatcgaggacgacttcaggccgtcgccggagctgaggaggctgtttgttccatgcgttgagccagcatccatcatattggccatacaggtgactttcctcaagttcggaggtgtggtgctagggacggctctccaccacaccgccagcgatgcctcaagcgcgttccacttcttccagacgtggtcagccttgtgcaagtatggtgaccgcgcaaccgtggagctcccgtgccacgaccgcacactcctccgtgcacggtccccgcctaccgtccacccggacgccctctcgaggttctacccaaagctcaccttctccgacgacccgttaggatcaggaccccttgccattgaagtctttgccatttccaaggaccaggtcgcctccttaaagcgcctctgtggcggcacaagcaccttctgcgccatcggcgccctcgtgtggcagtgcgcgctcgttgtgcgccggcttccgcccgacgccgaagcacgcctcaccttcccagccaacgtccggcgcagggtgaggccacctctcccgagccactacttcggcaacgcgttggtcaggctgggcgccactggcgcagttcgggatgttgcttcggaggctctggcgtccgtggccggccgcatcaaagacgctgtcgatcgggtggacgacgagctcgtgcggtctgcggtcgactactatgagatgaccgagatggacagcccggcctgtgaaggggcaccttgccagagacggacctacagattattagctggctgggcatgccaatgtacgacgtggatttcggatgggggaagccagcggtgatgtcgcggggcggactccgtcccgtggaggcttagtgtacctaacgagcgacgggccaacaggcggcggcggcgtccgcgttctcatgtgcatggaagctgcaaatatgaaggagctggagcggctgctttacgcaaaactctagcccctagagcctagacctgctaggtgcttgatgtgtggaacacaaaacacaataataataggccggagaggatacgactggctgtttttttaatttatctaaaaaactttgtgtttatgaaactccactaccaaccgatctacatcatacatgtatgacggagaagatcgatcaatatccgcctgttggtgaagtataaagagtgagtagtgattttgaatgggaccaataatatattgttgttgacttttatat

SEQ ID NO: 114296 - DNA, 1648 bp, Zea Mays
ataaattatactacatctttataagtgattaaaatattttattaacacacatgcctactcatattctactcggtacactaatttaactacttgatcggaatagcgagataactcgctataactgaacctggctcgataatcgcaagaactgcgaagtcgacgggagtttcgtgacttacgcaatttatcgagcacctaataagtatcgcactagcaatttatttattcatcgattgaactattctgaataattcatcagcttaccgcttcagcagctgacacgaatctgcgagatcggtagcgattttccgatccaggcaatttgtcgagcgcttggggaatatcgcgctgctagcttcgtcttcatctgattcttgagatttcttgctgacgcgcggaacgacgacgactttcagctgaagtcgggagcgagctggtgaggtggggtttgagcagaggatgacgtgtttgacgactcgacggcaaacgacgcgacgacgagctgatcaaacaaaaactccacgacgccgactggcacacgggttagagaacgtcgactagcgaaattcgagttggcaagcgcacggcagggagcttcgcaatttgacggaaccgtggccgagcgatttttatggcgtggactggggacagactgcggtcgggtgaactcttatggtgcggactgccctacggccacgacagctgtcgcgacaaaaggagcacagggagatgctcacgagctccacgcgggaaccaggggcacgacagaaaactcagcgcgcagcaaggaactcgacggcgacgcgtgagcaaggagacacgcgcgcgcaggacaatccacggcgcggcggtcagggagctcgacacgcgcaaagcttcgatctgcgacacgagcaaggaaataggtgcgcgacgcaggaggctgaagcatcaccggccatgggagaggaagctccgcgagctggggcagaggacacggatcggcgaggtcgcggtatgggcgagcagtagcacgacggcgcgagcacaggagttgggcgccgagcagccgaacgccatgggagagggaaatccaagctgggaaggtccagggcgcagggaaagaagagcgccatgggagaaccgagcgagctggagagagccgcggcttgcgacggcgagcagagcgtgcgccatggcgaacagaaaccggggcgccgcagttgccagggagactcacaacagggagatagacaccgctgcagcagccagcgaaggaccccgagccctggccacgcgcgtaggagaggcagggcgcgacgccgacgggagcaagcagggagcgacgattgagggaaagagagagggagaaatcaagaacagggagatggagccaagctggggcttcgacggctggacgcgcaggactccacgcttggggaaaatggaacctgggcgtagggaacaaggggatgaaagggagatgggaaaccacggcgccatggaagctccaaaaccgggagcaggaagctgacgctccataggagagctcggccagcgcaggctactgggcatgggaggacgcgctggcgagttgaagagggcgcggtctgagcgccgggcgccgggcggagtacgtgaggcaggaggagctcgagcgcgagacatg

SEQ ID NO: 114297 - DNA, 1648 bp, Zea Mays
ataaattatactacatctttataagtgattaaaatattttattaacacacatgcctactcatattctactcggtacactaatttaactatttgatcggaatagcgagataactcgctataactgaacctggctcgataatcgcaagaactgcgaagtcgacgggagtttcgtgacttacgcaatttatcgagcacctaataagtatcgcactagcaatttatttattcatcgattgaactattctgaataattcatcagcttaccgcttcagcagctgacacgaatctgcgagatcggtagcgatttttcgatccaggcaatttgtcgagcgcctggggaatatcgcgttgctagcttcgtcttcacctgattcttgagatttcttgctgacgcgcggaacgacgacaactttcagctgaagtcgggagcgagctggtgaggtggggtttgagcagaggatgacgtgtttgacgactcgacggcaaacgacgcgacgacgagctgatcaaacaaaaactccacgacgccgactggcacacgggttagagaacggcggctagcgaaattcgagttggcaagcgcacggcagggagcttcgcaatttgacggaaccgtggccgagcgatttttatggcgtggactggggacagactgcggtcgggtgaactcttatggtgcggactgccctacggccacgacagctgtcgcgacaaaaggagcacagggagatgctcacgagctccacgcgggaaccaggggcacgacagaaaactcagcgcgcaacaaggaactcgacggcgacgcgtgagcaaggagacacgcgcgcgcaggacaatccacggcgcggcggtcagggagctcgacacgcgcaaagcttcgatctgcgacacgagcaaggaaataggtgcgcgacgcaggaggctgaagcatcaccggccatgggagaggaagctccgcgagctggggcagaggacacggatcggcgaggtcgcggtatgggcgagcagcagcacgacggcgcgagcacaggagttgggcgccgagcagccgaacgccatgggagagggaaatccaagctgggaaggtccagggcgcagggaaagaagagcgccatgggagaaccgagcgagctggagagagccgcggcttgcgacggcgagcagagcgtgcgccatggcgaacagaaaccggggcgccgcagttgccagggagactcacaacagggagatggacaccgctgcagcagccagcgaaggaccccgagccctggccacgcgcgtaggagaggcagggcgcgacgccgacgggagcaagcagggagcgacgattgagggaaagagagagggagaaatcaagaacagggagatggagccaagctggggcttcgacggctggacgcgcaggactccacgcttggggaaaatggaacctgggcgtagggaacaaggggatgaaagggagatgggaaaccacggcgccatggaagctccaaaaccgggagcaggaagatgacgctccataggagagctcggccagcgcaggctactgggcatgggaggacgcgctggcgagttgaagagggtgcggtctgagcgccgggcgccgggcggagtacgtgaggcaggaggagctcgagcgcgagacatg

SEQ ID NO: 114298 - DNA, 430 bp, Zea Mays
gcggcggcagcggcctgggagagcacctcttttgctccacgcggcgaagtcctcggcgtcctcgagatcggacgtggacgtggacggatccgcctggagcgcgcgcagctgcgcctcgaagcagctctactggacgtgggtcccggaggcggagggggtaagggccttcttgccctgcacgacgatggaatgatggagagcgcctccttgccttatgagacgatgtcggcgagtctgtctagcgcatgcgcggaggacgataggtcccgcgtggcccgggcgacggcctcacggagcacctcggtctcgcggcgcaggcggtgccaaactcggcgaggtcgaggcggtaggcctccaggacggtctcggactgcgaggtgggcgtcttgagcaggccatcgatggaaggtatgccgtgcgcgccatccgg

SEQ ID NO: 114299 - DNA, 1492 bp, Zea Mays
atcgcgggctcagatagcaccgcacagctgaggtgcagtttatactagcagcaatatcatggattctgaggtagtgcatgtggtagagtcgtcgcttgtagtgccgagcgagccgacaccgtcggaggggctctcgctctctccgctggacctcgttctgcccagcagaggccacaccccaacagtctacctgtacagccccagcgatgttgccgccgccgatggtttcttcgacgtggccaggctcaaggaggctatggccaagaccttggtggccttctaccccctcgctggccgcctcggcgtcaacaacgatggcagggtagagatcacctgcaccggcgagggcgcactctttgtggtcgctcatgctgacctcagtgttggtgacatcgaggacgacttcaggccgtcgccggagctgaggaggctgtttgttccatgcattgagccagcatccatcatattggccatacaggtgactttcctcaagttcggaggtgtggtgctagggacggctctccaccacaccgccagcgatgcctcaagcgcgttccacttcttccagacgtggtcagccttgtgcaagtatggcgaccgcgcgaccgtggagctcccgtgccacgaccgcacactcctccgtgcacggtccccacctaccgtccacccggacgccctctcgaggttctacccaaagctcaccttctccgacgacccgttaggatcaggaccccttgccgttgaagtatttgccatttccaaggatcaggtcgcctccttaaagcgcctctgtggcggcacaagcacgttttgcgccatgagcgccctcgtatggcagtgcactctcattgcacgtcggcttccacccgattccgaaacacgcctcatcttcccagccaacgtccgcggcagaatgagaccgcctctcccgaaccgctacttcggcaacgcgttgatcaggctgggcgtcactggtgcggttcaggacattgcttcggaggctttggtatctgtcgccggccgcatcaaagacaccatcgatcggatggacgacgagctcgtgcgttctgcggtcgactactgtgagatggccgagatggacagccggcctgtaaagggcaccttgctagagacggagctgatgcttattagctggctgggcatgccaatgtacgacacggatttcggatgggggaagccagcggtgatgtcgcgggcggagtccatccgtggcggctttgtgtacataattgacgacgggccaacaaacggcgtcggcagcggcagcggcggcgtccgcgtgctcatgtgtatggaagccgcaaatatgaaggagctggagcggctgctttacgcaaaactctagactagagcctggacctgctaggtgcttgtgatgtggaacgaaacgctttggtaacaataaagggcccgagacgttacaaagcctgtatctggacggccggcctgctttttgtttgctcgcaggaaa

SEQ ID NO: 114300 - DNA, 623 bp, Zea Mays
atcgcgggctcagatagcaccgcacagctgaggtgcagtttatactagcagcaatatcatggattctgaggtagtgcatgtggtagagtcgtcgcttgtagtgccgagcgagccgacaccgtcggaggggctctcgctctctccgctggacctcgttctgcccagcagaggccacaccccaacagtctacctgtacagccccagcgatgttgccgccgccgatggtttcttcgacgtggccaggctcaaggaggctatggccaagaccttggtggccttctaccccctcgctggccgcctcggcgtcaacaacgatggcagggtagagatcacctgcaccggcgagggcgcactctttgtggtcgctcatgctgacctcagtgttggtgacatcgaggacgacttcaggccgtcgccggagctgaggaggctgtttgttccatgcattgagccagcatccatcatattggccatacaggtctccagtctccgcctcttgcttattcgatatttccatgctttgtttcatatcgagcaccactactagctacatactaggtattgttaaatgttagatcccttgcaggatcttgctcttaaccattaatcgcaacttctggatc

SEQ ID NO: 114301 - DNA, 1684 bp, Zea Mays
agggtatttgttccctcaaggcctcaacgcgagccaccccctccgtcctcaatccatttccattcttccctttcctgtctcctgttgccaccgcataggtgaggtaaggattctggcagaccaacgcatgctgagttgcaggtgcagtagaaagtttgaactctgtgcgtgatcgagtagaaattagaatggcgaatgtcatggattctgaggtagtgcaggtggtagagtcgtcgtttgtagtgccgagcgagccgacaccgtcggaggggctctggctctctccgctggacctcattctggccaacagaggccacaccccaacagtctacctgtacagctccagcagcaatgctgttgccgccgccgatggtttcttcgacgtggccaggctcaaggaggctatggccaagaccttggtggccttctaccccctcgctggccgcctcggcgtcaacaacgatggaagggcagagatcacctgcaccggcgagggcgcgctctttgtggtcgctcatgccgacctcactgtcggtgacatcgaggacgacttcaggccgtcgccggagctgaggaggctctttgttccacggattgagccagcatccgtcgtgttggccatacaggtgactttcctcaagtcgggaggtgtggtgcttgggacggctctccaccacgccgccatcgacgcctcaagcgcgttccacttcttccagacgtggtcagccttgtgcaagcacggcgaccgcgcgacagtggagctcccgtgccacgaccgcacgctcctccgtgcacggtccccgcctaccgtccacccggacgccctgtcgaggttccacccaaagctcactttctccgacccgtcaggacctctcgcctttcaagtcttcgccatttccaaggaccaggtcacctccctgaagcgcctctgtggcggcacgagcaccttctgcgccatcggcgccctcgtgtggcagtgcgcgctcgttgcgcgccggcttccgcccgactccgaagcacgcctcaccttcccggccaacgtccggcgcagggtgaggccgtctctcccgatccgctacttcggcaacgcgttggtcaggctgggcgccactgctgcggttcgggatattgcttcggaggttctggcgtccgtggccggccgcatcaaagatgccgtcgatcgggtggacgacgagctcgtgcggtctgcggtcgactactatgagatgaccgagatggacagccggccagtgaagggcaccttggcagagacggacctgcagattattagctggctgggcatgccaatgtacgacgcggatttcggatgggggaagccagcggtgatgtcgcgggcggagtccgtccgtggaggctttgtgtacctaatgagcgacgggccaacagacggcggcggcggtgtccgcgtgctcatgtgcatggaagctgcaaatatgaaggagctggagcggctgctttacgcaaaactctagaccctagagcctagacctgctaggtgcttgatgtgtggaacacaaaagacaataataaagagccaaagaggatacgactggctgttatttttttaatttgtctaaaaaactttgtgtttatgaaattccaccaccaactgatctacatcatacatgtatgacggagaagatccatcaatatggctagggat

SEQ ID NO: 114302 - DNA, 774 bp, Zea Mays
ccaaaatgaccaaaatttccctcctaccttatcctctcggctgctcaccaccccagacaagtccagtcctctccctcccctcaacctagcgccgccactcgtgcccaccacgccgccacaccgccgctggtgaatggtcggcgccaccatggcggcgtccagggtctcggcatgtcggaggtggaggccaacaccggcggcgggggcaaggagcaggaccgattcctgcctgtcgccaacatcgggctcatcatgcgccgcgcggtgccggagaacggaaagatcgctagggacgccagggagtccatccaggagtgcgtctccgagttcatcagcttcatcaccagcgaggcgagtgacaagtgcgtcaaggagaggcgaaagaccatcaacgacaacgacatcatctggtccttgggtacgcttggcttcgaggaatacgttgagcccctcaagatctacctcaacaattaccgggaggaacagaaagaaaagcccttgcgaagtggaatggacgctagactgctgcaccaaggaaacagagcgtctgttgaggaatcagggctccgacgattgatgatggccggctccaatgacgacacgattgaggtcgacggcaacgaggagaggtggttgtgtgggttggccaaagatgacgatgaggatgacctatgggaggacgctacaaagctctttggccttaacactgaggctcccatccatgtcggcggtgatcaagaaggcggtggcgaggaaggtgtagaggatgagtaa

SEQ ID NO: 114303 - DNA, 2162 bp, Zea Mays
atccatctcactagctaagccagcagccacagcgccacaggcagagcaaccacacgctcttcgatccgtcattagccagcgcctcgatctccttcgattcaatcgtttgacattgatatggcgttcgctgaggaggagacgacgaggtacctcggcacgaacctcatcgagagctgcggcgactcggaggacgggctcgccggctgggctccgtccggctcgtgcacgctctccgcgcacgccgacgaggacgcgtctcttccttcgctggcagccgcattgtccgccgccgccggcggcgacgacgaaggcgacgactctgacgaggacgaattccagcagcgcgcgccgaggcccagcggccggtacgtcctggccgcgcgccgcgcgagcgacaaggacgggctctgccgcgcggtctcgcgcgccccgatcaggcccaacgtaacgtaccgggtggccgggtgggtcggcctgggcgccgccgtggacggctcccacgccgttcacgtcgaggtccgcgtcgacggtggtggccgcccggtcggtggcggcgtggctgtggtcgagtcggggaagtggggccagatcaagggctcgttccgtgtcgactgcgatgagccaccgcgccacgccaaggtctacgtccacgggccgccggccggggtggacctcaaggtcacgacggatctgcaggtgtgcgcggtgaacaagattccgaggctcaggcacctcaggaagaaggccgacaaggtgcgcaagcgtgacgtggtcctcaaggtgagccggcggacggacgtcgacgacgacgacacgacggcgagcgtcgccggggcgcacatccaggtggtccaggtccagaacagcgtccccatcggcagctgcatcaccaaggcgggcatgcagaacccggagtacgtggacttcttcaccaagcacttcgactgggccgtgctcgagaacgagctcaagtggtactacacggaggccgtgcgggggcaggtgagctacgccgacgccgacgagctcatcgacttctgcgaccgccacggcaagcccgtgcgcgggcactgcatcttctgggccgtggagaactcggtgcagccgtgggtccgcgcgctcagcgccgaccagctccgggcggccgtggaggcccggctgcggggcctcgtgtcgcgctacgcaggccggttcccgcactacgaggtcaacaacgagatgctccacggggcattctaccagcagcgcctcggcgacgacatcaacgcgcacatgttccgggagacggcgcagatcgacccggcgccggcgctgttcgtcaacgactacaacgtggagagcgccaacgaccccaacgccacgccggagaagtacgtggcgctggtcacggacctgcagaggcggggcgcgcccgtgggcgggatcggcgtccagggccacgtcacgcaccccgtcggggacatcatctgcgacgcgctggacaagctcgccgtcacggggctgcccatctggatcacggagctggacgtgtcggccgccgacgagtccgtgcgcgccgacgacctggagatcgtgctgcgggaggcgttcgcgcacccggccgtcgagggcatcatgctctggggcttcatgcagggccacatgtggcgctcccacggccagctcgtcaacgccgacggcaagtacacccaggcaggcaacatgttcgcgggcctccgccgggagtggacgtcgcacgcgcgggggaaggtggacagcatcggcaacttcaagttcagagggttccacggcacgtaccaggtgctgcttacgacgcccgccggagaggtgaagaagcggacgttcgacgtacacaagggggatgcgccgctcgtgctggacatggatttctagctttccattacatcgtacacattggtcacccaccggttattacagttacgacaaggattagtacgatctagaacttatatatttgtgtacaaattatgtgtggtatattgggattggtgtgatgcttagacattatagtagtgaagaaaaaataagaatctttagtcccggattgtgtagatgattggtactattgtactcagtatttattatgacagactgcagtaaataaacaaaaggattaccttttttccaccttggtttgttta

SEQ ID NO: 114304 - DNA, 432 bp, Zea Mays
cttggcttgtccaatcttcgttacagtgctactggaagctccagaaatagtattatagttggactggctttattcttgtccctatcagttccttcttactttcagcagtacggtgtacatcctagcgcaaactcatcattgccaacttactttcaaccatacgttgtcgcatctcatggacctgttcacactggatcgggcggggtgaactatgtcctcaacacgatactttcactcaacatggccattgcatttctggttgctctggtacttgacaacacagtccctggtggtcgtcaagagcggggattgtatgtatggtcagaagcagaggcagcgatgagagaaccgactttcatgaaagactatgaacttcctttcaagatcggacgcccgttcaggtgggtgaagtgtgttggcctataacacaat

SEQ ID NO: 114305 - DNA, 2062 bp, Zea Mays
gcccaaaccacaccaactcacccaaatcatcctactcctactactattcgagcagctagcccagccaatcactctgctgaaaatacttcgagaccttggcgcacaagaaaccgtgaacgattgatcatccctgcgatagcaagcgcagcaatggcggcgaagcgtctgtacaacgggtacgagcaggacggggaccagcccaatgacaagcgcatgcgccgcctgccgtccttctcgacggtgatccgggaggccatgatgcagaagcacatgcagagcctgttcaggtgtctggagcctctcctccgccgagtggtgaaagaggagctccatgcagggctgacgctgatgcagagcccgcgctacatcgagaggctgccggcggagcgggcggcgtggaggctggcgttccggaccccgccgcagctgcccatcttcacgggcagcaagatcgaggacgaggccgggaacccgctggaggtgatcctggtggacgcggacacgggctcgccggccgcgctcccgcaggcgctgcgcgtcgagctggtcccggtgtacggcgacttcccgcaggacgggcgcgaggactggtccgacgacgagttccagaggaacgtcgtgaaggagcgcgcggggaagcgcccgctcctgaccggcgacgtgagcctggccctgagggacgggcgcgccacggtgggcgagctccagttcacggacaactcgtcctgggtccgctgccgcaagttccgcatcgccgcccgcgtggtgcccggcgcctgggacggcgcccgcgtccaggaggccatgaccgaggccttcatcgtccgggaccaccgcggcgagctgtaccgcaagcactacccgcccgtcctcgccgacgacgtctggaggctggagaagatcggcaaggaaggcgcgttccacaggaagctcaggcgcagcaacgtcggcaccgtgcaggagttcgtcaggatgctgatggtgaagcccgacgagttgcgcgcgattctgggcgacggcatgaccgaccgcatgtgggaggcgacgacgaaccacgccaggacctgcgccaccgacgacaaggtgtacgcgcacagcacgccccacggcaccatctacgtggactccgtcttcaacgtcgtgagggtcgacatcggcggcgcggagtggccgctgcaccagctgaacagaggccagacgatggtggtgcagcagatgctgcaggacgcgtacgagcaccgccacagcctccaggaggccgaacccttcatggtccatggccacgccgccagcgacgtcccactgctgcagaacgcggtgccggcgctggtggacacaccgccgctctggttcccgaacgccgcggagatggacttccccgtcgacgacgtggtccccgttccccaagccaacagcagcttcggctaccagtggactggccaagcgttccacatgccaggttaacccagtggtcccgaacaagataaacaagtgacccaggtgaagatcacttgcaaggttccagttccagcaataggatgtacattaacaaaatactgctacgcggttatatgtccacgatcagcgtcggtcggtctgtctgtctatctgtctgtctgtccaagtaacagcagggtttaagggtaggtgaaacttgagcggcccttccctgcattcgccggacgcgccgagcgtccgcgggcagcgagaagcggcgaccaagtgcaagattcttttgtttgattcgtatcctttgtttttgttgtaacttctcaagtttttccgttctgcctggccaagtactagcgtcctgctcttctcccaagattgggttgcattgcatgtaaaaaaaatgtaacgccggagcagcgacgctttgtgggctggcgaacaggtgtggtatgcctacaatacaaaggctagcaagcagaactggctgggtaaacacacagctctgctttcttcttcttcgacattttcgcaagttttttttgtgtgtgtgtcctgtaaacatcaaggtctcaataaagaaagggaaccgctttttttgtgtacataaaca

SEQ ID NO: 114306 - DNA, 411 bp, Zea Mays
atggtcctcgcctcagttgtcgccaccttgttcgtcatcctacttgttttctgtctcccctcatgcctccacctccgcgccaccccattctcgacagaggacgtgagagcaggcgcctcctccccgtattcatccgacaccaaccccgacaccgacccgcgcagtggctattgcgcgtccacgaggacgtttcacagcatgcgcacaccatcattttcgccgtcgtcggacgtcccgttcgtcttctcggccttcgctctgttcttactccccaacctgctgcccccgcccacggtcacagccacgagccgaccgacgctcgtcgacgcgggtacgggcgagtcggtcttgctcctagactttctccgtgcgtgccaccgaggaggacacggtggcgcctgccccgcttag

SEQ ID NO: 114307 - DNA, 1276 bp, Zea Mays
actagtgcattttaaatcccaagacgtctctcactcttcagccgctttacaactccccaccccatcccatccacacacacttcacccagcgcggcggccgccggccgccggcaatggaggccgtggcgcgcagcggcgactacctttggcggttcgtggcggagacagagtggtacaacgaggttgtcctcagcgccgtggcgccaggcgactggtggcgcggcctgccgcacccggtgcagtcatggatgcgcaactgcgtcggcggttacctcctctatttcatctctggtttcctctggtgcttcgtcatctactactggaagcgccacgcctacatccccaaagatgccatccccacaaatgaagctatgaagaagcaaatagttgtagcatcgaaggctatgcctttttactgcgctcttccaactttatctgaatatatgattgagagcggatggactcggagctacttcgatatcagcgaaattggtttttctatgtacctctgttatatggctatgtatctcatctttgtggagtttggaatttactggatgcacagagagttgcatgacataaaaccattatacaaatatctgcatgcaacccaccatatttacaacaaggagaataccttgtctccatttgctggacttgcatttcatccactggatggtgttctgcaagcaataccacatgtgttcgcgctcttcctctttccaacgcacttcaggacacatattgcactcttgttcctagaggctgtgtggacaacaaacatccacgactgcattcatggcaagatatggccagtcatgggtgctggatatcacaccattcaccatacgacataccgccacaactatggccactacaccatctggatggactggatgtttggtacgctcaatgagccagaagatatcctcaagaaggcttgagtttctcggagctgtggtattcctatggtgctggtgctggaactgctcgatctgttcccagtgtttctaatccgttgagcctgttcagcactgtctgtttatgtaggcatcagtgtgttaattagtttgctaggttcatatggctttgtgcttattctgtaatttagcgatgtttgtctcatgacgcaacggagttcaggacgaataaaactttgctagacacattctggattccagctgcttgtacaatgttgcaactcaactgtcaatataggatgtaaaacggattccttctagtcttgtacctgatgagttatttgtggtttctgtgc

SEQ ID NO: 114308 - DNA, 2532 bp, Zea Mays
gccgctgtccatttcctacttgcaccggagcgagcagcgcgaccagcgcgcgggcgcgagccaaccgcgagcccccaagaaaaccacaaaaagaagcgagcatgcctcccaacggcagcactgctctgctgctcctcctgccaccgctgctgctgctgctgctgctgcgttccttcgccaatgccggctctctggatgccgacgtcgcggctctgtcggatttcaggctcgtcgcggacccgtccggcgccgcgctggcgacctggaacgtgtccgcgaacccggcgccgtgcgccggggcgtggcgcggtgtcacctgcgccggcggccgcgtcacgaggctggtgctcgagggcctcggcctctccggcgccgccgcgctgccggcgctcgcgaggctggacggcctccgcgtgctcagcctcaagggcaacggtttctcgggcgaaatccccgacctctcgccgctcgcggggctcaagctgctgttcctcgcggggaacgagctgtccggcgcgattccgccgtcgctgggggcgctgtaccgcctgtaccggctcgacctgtcgtccaacaagctgtccggcgccgtgccgcccgagctcagccggctcgacaggctgctcaccctgaggctggactccaaccggctcagcggcggggttgacgccattgcgctgccgaggctgcaggagctgaacgtctccaacaatctcatgtccgggaggattccggcggcgatggcgtcgttcccggccgcggccttcggcgggaacgtcggcctgtgcagcgcgccgctcccgccctgcaaggacgaggcgcctcagccgaacgcgtcggcggcggtgaacgcgtctgcggcaggggactgccctccggcttctgccatggtggcgtcctcgccttcgggtaagccagcgggcgccgaggcggcgagcggcgtcaaggggaagatgagccgcgccgccgtggtggcaattgtggcgggggacttcgccgtggtggggctcgtggccgggctcctgttctgctacttctggccgcgcctctccggccggcgaagcgcccggcgactccagcagggggagaagatagtgtactcctcgagcccctacggcgccgccggggtggtcgcggcggcggccggtggctcgacgttcgagcgagggaagatggtgttcctcgaggacctgagctgcagcgacggccgcacgaggcggtttgagctggaggagctgctgcgcgcgtccgcggagatgctggggaagggcggatgcggcacggcgtacaaggccgtgctggacgacggcaccgtcgtgaccgtgaagcggctgcgcgacgccgcgacgccggcggccgcgtccaagaaggacttcgagcaccacatggccgtgctcggccgcctccggcaccccaacatcgtgcccctcaacgcctactactacgcccgcgacgagaagctgctggtgtacgagtacatgcccaacggcagcctcttctccgtcctccacggtaaccggggccccgggcgcacgccgctggagtgggcggcgcggcttcgcatcgcagccggcgccgcgcgcgggctggcctacatccaccactctgggcggcggggcagcggcacgccgaagctggcgcacggcaacatcaagagcaccaacatcctgctggacagattcggcgtggcgcgtctcgcggactgcgggctggcgcagctggggtcgtccccggccgcggcggcggctcggtcggcggggtaccgcgcgcccgaggcgcccccgccgcccaggccctgggcgtcgcacaggggcgacgtgtacgcgttcggcgtggtgctgctggagctcctgacggggcggttcccgggcagcgagctgccgaacggcggcgtcgtggtggagctgccccggtgggtgcagtccgtggtgcgggaggagtggacgtcggaggtgttcgacctggagctgatgaaggacaagggcatcgaggaggagatggtggcgatgctgcagctggcgctgagctgcacggccgcggcgcccgagcagcggcccaaggtcgggtacgtggtgaagatggtcgacgaggtccgcgcgtgcggggagacggcgtcgccgtcgcacgagtccatggacgagtcctccggcgtctcggactcgcccgccgtgtcggagggcggcgcgctcagccagtgagggcgcggcctggcgctgctggtccttcttcggaattgccttgtgatgcgtgcctatttgtttggtttaatctgctcttgttttttttgggggtgggctggattagcgagggccgttggatctggtgatcggcgtgtgcgtgtgtgtacattgttcacgttggctgcttggctctggattcttgttcctgtttttaactgactctagatccctagagtagctgcggctgcggcggcggcgggggttggtttggttgcgataaaagttgtgctaatttgcgtgagtggatcaagacgctgtgttctggtgcatcttttacggctacagttgtgtt

SEQ ID NO: 114309 - DNA, 1426 bp, Zea Mays
atgaaggacacaaagaagcccacgcgggcgtcgtctcgcttaggcgggagggtcgtcggcgtggcatccatgcttctcttcgtctcgttggggttcgttctcggcgtgacctcctccaacgccatgttcatccgatactacctccctttcatgccaccgttacgctctagtgctgcgccgtcgtcttcgcctccgccgctgacgacaccactgacaccgtcgcaaacgccgccgccgccaccgccgctgccgcaaaacccgcagctgcggtcggcgggcttcctttccccgagcggcgtcatgcacaacatgaccgacgaggagctgtactggcgagcgtccatggcgccgatggtccgccgcacgccagacagccgcgtgcccaaggtggctttcttgttcctggtcaggggggagctgccgctccggcccctgtgggagaagttcttcgcgggccacgaaggccggtactccatttacgtgcacgcccacccgtcctacaccggctcgccgccgacggactccccgttctacggccgctacatcccgagccagataacgaaatggggcgacgcgagcctggtggaggcggagcggcggctcctggcaaacgcgctcctggacctgggcaacgagcggttcgcgctcttctccgaggcgtgcatcccggtgtacgacttccccaccgtgcacgccttcctgaccggctccgacaccagcttcgtggactgctacgagaacggcggcagccggtcgcgctaccggcccttcttcgccacccgcaacatcacgctggcgcggtggcgcaagggcgcgcagtggttcgagatggaccgcgcgctggcgctggagtccgtcgcggacggctcctgcttcccggcgttccgcgacttttgcgtggggcggagggagtgcctcatcgacgagcactacctgccgacgctggtgagcctgctggggtggggccgccgcaacgccaaccgcacgctcacgtacgcggactggaagcggcccgtcaaccggcacccgcacacccacggcccggacgaggtgacggaggagcggatcagggagatcagggaggaaggcggcaggcggtgcttctacaacggcgccaggagaggcatctgcaacctgttcgcgcgcaagttctcgccggacacgctcgagccgctgctccggctggcgcccaaggtcatggggttcgggtgacctgaccagacgatcgaccgaccggagcaggaggcagtgtaccatagcattctactattctttgcgccgtggatgatcgacccaggttgagctgggaatcacaggcagagagtcgactcgagtccaccatcaggctatcaggactcaggaggagaataagctctttcttttgcgaaccatatacacagtgtatcatgaacatcccgtttgtcaa

SEQ ID NO: 114310 - DNA, 1215 bp, Zea Mays
agcatgaaggacacaagcaagcccacacgggcgtcgcgctcagtcgggaaactcctgtatgtggttcatatgtttctcttcgtctccttgggatttgtcctaggcatggcgtccatatccaagtttccaaacatgatctacacccctttcgttgcatcattgccctttccaacgccgccgccgccgccgcctacgccgtctccgccgcgtccaccgcctctaccagcaacgccattgctgccagcaccacggaacctaggaagaatggggctgatggacttgcttgcaccaagcggcgttatccacaacatgaccgacgaggagctattctggagggcgtctatggcgccgaagggacatcgcacgccttaccaccgtgtgcccaagatcgctttcttgttcctggtgagaggggagctgccactgcggcctctgtgggagaagttcttcgcggggaacgaccaagagctctactccatctacgtgcaccctgatccatcctacaccggctcgccgcccagggactccgtgttctacggccgcatgatcccaagcaaggaaacgaagtgggggcacgtgagcctggtggaggcagagagccggctgctggcgagcgcgctcctggaccacagcaacgagcgcttcgtgctgctgtccgaggcgtgcatccccgtctacaacttctccaccgtctacgccttcctcgccggctccgccaccagcttcgtggacagctacgggaacggcgactgccgcgcgcgctacgacaggttcttcgccgagcgcaccaacatcacgatcgagcactggcgcaagggcgcgcagtggttcgagatggaccgggccctggcgctcgaggtcgtcggcgacgagccctacatccagatgttccgcgacttctgcgtcgggcggtggcgctgcctcaccgacgagcactacctgccgacgctgctcaacctgctggggtgggcgcgcaacgccaaccggagcctcacgtacgcggactggaagcggccgcaggggatgcacccgcacacccacgacggggcggaggtgacggaggagctgctcaacaggatcagggaggacggcggcaaccgctgcttctacaacggcgcccgcgccgggatctgcagcctgtttgcgcgcaagttctcgccggacacgctccagccgctgctgcgcttggctcccaaggtcatgggctttgggtga

SEQ ID NO: 114311 - DNA, 109 bp, Zea Mays
ttgatgtgcatagtcctttaccttgagtcatgtcttctacttggccaccgccatgtgcttgttcctcttgaccttgaacacccatttcaccttgatcgagttgcgacta

SEQ ID NO: 114312 - DNA, 1871 bp, Zea Mays
gtcgctgtctgctgccatagcttgccccgtctgcctgcgcggatgaagctaggcgtaggcagtaggcacctcgcctagtctcctgtaaacacccgcccgctagtgccaaccgccaaccacctccaattacttcacagcagcgcggcgccgagaagatggcttccccctcgtacaggcttgcggcggcgatcacggccccctcgaccggcgagttcctcgtcgtccggcagccgcgcccgccatccccacccgaggaggaagaggattaccggcgcttcgtcgacagcgatctctacgacctcccgtccgcgcccctcgggccactcgagggggcaccccggtcggaggtggccatcggcggcgcggactctgtcgccagccgcctcgacctctcgcgcctcgacgtgtccgccgcccttgatcagatttttcaccaatttggcttgccggctgggatgagtggggagtggaggctcctgaagtatgtggaggaagcagaatttggcccggatgctggcattaacacggtgtacattgtcggatctcttgagttgagattggatgatctgccagagtcatgtaaatggatgtccaaggagtgtgcattgaggttgctttcggaagcgaaaccaggtaatgatcgcataggacagtatgcatatattggacttctgaattcggagctgtcatcaaactgcacagcttctcctgcattgcccttccaggaatacccacctggaataacacttgtacctatgaagagtaggacactagcgccattccgtacaactaatcttgtggtagtaagatcaaccaatggtgctggtggatctacatgttctgatttttttgcttcgggggaagctctgcttatagatcccggatgcagctctcaggttcatgcagagcttgcagatctcattgattcccttccaaaaaggttattagttcttgttacacatcatcatcaggatcacattgagggtctttcagtcgttcagagatgcaatcctaatgctgttcttctgacacaccaaagtacaatggatcgcattgggaaaggaacttggcagattgactacacttcagtaactggtggtgaaaagatatgcataggtgaccaagaactacaagttgtttttgcacctggtcatacagatggtcatatggggcttctccatgtaaataccaatacattggttgttggagatcattgtgtagggcatggaagtgcaaccttggacagtagaaatggtggcaacatgaaggattactttgaaactacatacaaattcttggagttgtcaccacatgtattaattccaatgcatggaaggattaatctatggcccaagtatatgctttgtggatacctcaggaatcgaagggctagagaagcgtccattctgcactctatagagaatggggcccaaactctttttgatatagtttcgaagacttacagtgatgttgacaggaagttgtggattcctgcttctttcaatgttcgccttcatgttgatcatctgaactccctacataaattgcccaaggacttctcattggagaactttaaggaaagctgtggagtgcatttcatgttgcgttgggcggtggcatatgtgcattcaaggagctccccagctatccttgcggcaagtgcccttgctggtggtcttgcaattgcttgtgctctcagaaggaactactgcaagcaatcataggttctctcggtcgataattttccagctagatgcacattatattattcacaagattctgctaccagtatgttgagtcgaacggtgaattgccagaactcttattctactattattgtccgtgattgccacatctatatacaagagaag

SEQ ID NO: 114313 - DNA, 2168 bp, Zea Mays
cacggactgggaccgcgccagccaagcgtgtgcaggtcgctgtctgctgccatagcttgccccgtctgcctgcgcggatgaagctaggcgtaggcagtaggcacctcgcctagtctcctgtaaacacccgcccgctagtgccaaccgccaaccacctccaattacttcacagcagcgcggcgccgagaagatggcttccccctcgtacaggcttgcggcggcgatcacggccccctcgaccggcgagttcctcgtcgtccggcagccgcgcccgccatccccacccgaggaggaagaggattaccggcgcttcgtcgacagcgatctctacgacctcccgtccgcgcccctcgggccactcgagggggcaccccggtcggaggtggccatcggcggcgcggactctgtcgccagccgcctcgacctctcgcgcctcgacgtgtccgccgcccttgatcagatttttcaccaatttggcttgccggctgggatgagtggggagtggaggctcctgaagtatgtggaggaagcagaatttggcccggatgctggcattaacacggtgtacattgtcggatctcttgagttgagattggatgatctgccagagtcatgtaaatggatgtccaaggagtgtgcattgaggttgctttcggaagcgaaaccaggtaatgatcgcataggacagtatgcatatattggacttctgaattcggagctgtcatcaaactgcacagcttctcctgcattgcccttccaggaatacccacctggaataacacttgtacctatgaagagtaggacactagcgccattccgtacaactaatcttgtggtagtaagatcaaccaatggtgctggtggatctacatgttctgatttttttgcttcgggggaagctctgcttatagatcccggatgcagctctcaggttcatgcagagcttgcagatctcattgattcccttccaaaaaggttattagttcttgttacacatcatcatcaggatcacattgagggtctttcagtcgttcagagatgcaatcctaatgctgttcttctgacacaccaaagtacaatggatcgcattgggaaaggaacttggcagattgactacacttcagtaactggtggtgaaaagatatgcataggtgaccaagaactacaagttgtttttgcacctggtcatacagatggtcatatggggcttctccatgtaaataccaatacattggttgttggagatcattgtgtagggcatggaagtgcaaccttggacagtagaaatggtggcaacatgaaggattactttgaaactacatacaaattcttggagttgtcaccacatgtattaattccaatgcatggaaggattaatctatggcccaagtatatgctttgtggatacctcaggaatcgaagggctagagaagcgtccattctgcactctatagagaatggggcccaaactctttttgatatagtttcgaagacttacagtgatgttgacaggaagttgtggattcctgcttctttcaatgttcgccttcatgttgatcatctgaactccctacataaattgcccaaggatttctctttggaaatgttcagtcgaagttgtgatgattttatctctagagtttgatggcaagtacgagaaaaggatcttctaattcactgcgttgtgatttcatttaagctggcccgttcaccatttgttgttttattatgtgcatgacactgaacaattcaatgatggggaacgaagtcttgtaataaccgataaatatgtagactggacaccaaggctaccattcacacttccgaaaatttgtaagatttaacaactcgaatatatgcaggacttctcattggagaactttaaggaaagctgtggagtgcatttcatgttgcgttgggcggtggcatatgtgcattcaaggagctccccagctatccttgcggcaagtgcccttgctggtggtcttgcaattgcttgtgctctcagaaggaactactgcaagcaatcataggttctctcggtcgataattttccagctagatgcacattatattattcacaagattctgctaccagtatgttgagtcgaacggtgaattgccagaactcttattctactattattgtccgtgattgccacatctat

SEQ ID NO: 114314 - DNA, 1985 bp, Zea Mays
cacggactgggaccgcgccagccaagcgtgtgcaggtcgctgtctgctgccatagcttgccccgtctgcctgcgcggatgaagctaggcgtaggcagtaggcacctcgcctagtctcctgtaaacacccgcccgctagtgccaaccgccaaccacctccaattacttcacagcagcgcggcgccgagaagatggcttccccctcgtacaggcttgcggcggcgatcacggccccctcgaccggcgagttcctcgtcgtccggcagccgcgcccgccatccccacccgaggaggaagaggattaccggcgcttcgtcgacagcgatctctacgacctcccgtccgcgcccctcgggccactcgagggggcaccccggtcggaggtggccatcggcggcgcggactctgtcgccagccgcctcgacctctcgcgcctcgacgtgtccgccgcccttgatcagatttttcaccaatttggcttgccggctgggatgagtggggagtggaggctcctgaagtatgtggaggaagcagaatttggcccggatgctggcattaacacggtgtacattgtcggatctcttgagttgagattggatgatctgccagagtcatgtaaatggatgtccaaggagtgtgcattgaggttgctttcggaagcgaaaccaggtaatgatcgcataggacagtatgcatatattggacttctgaattcggagctgtcatcaaactgcacagcttctcctgcattgcccttccagcttgcagatctcattgattcccttccaaaaaggttattagttcttgttacacatcatcatcaggatcacattgagggtctttcagtcgttcagagatgcaatcctaatgctgttcttctgacacaccaaagtacaatggatcgcattgggaaaggaacttggcagattgactacacttcagtaactggtggtgaaaagatatgcataggtgaccaagaactacaagttgtttttgcacctggtcatacagatggtcatatggggcttctccatgtaaataccaatacattggttgttggagatcattgtgtagggcatggaagtgcaaccttggacagtagaaatggtggcaacatgaaggattactttgaaactacatacaaattcttggagttgtcaccacatgtattaattccaatgcatggaaggattaatctatggcccaagtatatgctttgtggatacctcaggaatcgaagggctagagaagcgtccattctgcactctatagagaatggggcccaaactctttttgatatagtttcgaagacttacagtgatgttgacaggaagttgtggattcctgcttctttcaatgttcgccttcatgttgatcatctgaactccctacataaattgcccaaggatttctctttggaaatgttcagtcgaagttgtgatgattttatctctagagtttgatggcaagtacgagaaaaggatcttctaattcactgcgttgtgatttcatttaagctggcccgttcaccatttgttgttttattatgtgcatgacactgaacaattcaatgatggggaacgaagtcttgtaataaccgataaatatgtagactggacaccaaggctaccattcacacttccgaaaatttgtaagatttaacaactcgaatatatgcaggacttctcattggagaactttaaggaaagctgtggagtgcatttcatgttgcgttgggcggtggcatatgtgcattcaaggagctccccagctatccttgcggcaagtgcccttgctggtggtcttgcaattgcttgtgctctcagaaggaactactgcaagcaatcataggttctctcggtcgataattttccagctagatgcacattatattattcacaagattctgctaccagtatgttgagtcgaacggtgaattgccagaactcttattctactattattgtccgtgattgccacatctat

SEQ ID NO: 114315 - DNA, 1051 bp, Zea Mays
gtcgctgtctgctgccatagcttgccccgtctgcctgcgcggatgaagctaggcgtaggcagtaggcacctcgcctagtctcctgtaaacacccgcccgctagtgccaaccgccaaccacctccaattacttcacagcagcgcggcgccgagaagatggcttccccctcgtacaggcttgcggcggcgatcacggccccctcgaccggcgagttcctcgtcgtccggcagccgcgcccgccatccccacccgaggaggaagaggattaccggcgcttcgtcgacagcgatctctacgacctcccgtccgcgcccctcgggccactcgagggggcaccccggtcggaggtggccatcggcggcgcggactctgtcgccagccgcctcgacctctcgcgcctcgacgtgtccgccgcccttgatcagatttttcaccaatttggcttgccggctgggatgagtggggagtggaggctcctgaagtatgtggaggaagcagaatttggcccggatgctggcattaacacggtgtacattgtcggatctcttgagttgagattggatgatctgccaggtcagatgcttaatgtttgaatgtttctcaaccgggaattgcttgaccatcatgcgttgcccatggcagagtcatgtaaatggatgtccaaggagtgtgcattgaggttgctttcggaagcgaaaccaggtaatgatcgcataggacagtatgcatatattggacttctgaattcggagctgtcatcaaactgcacagcttctcctgcattgcccttccaggtatcacctcccctccccccctcttcagttcatgccatatagtgatagtttcccagtcctgaaatgcattgctcaataggaatacccacctggaataacacttgtacctatgaagagtaggacactagcgccattccgtacaactaatcttgtggtagtaagatcaaccaatggtgctggtggatctacatgttctgatttttttgcttcgggggaagctctgcttatagatcccggatgcagctctcaggttcatg

SEQ ID NO: 114316 - DNA, 166 bp, Zea Mays
ccgccgcggtgcagaagcagaagtcgctgatgtagaaggcgggcccagccgtctccagcctcgtcgacaatttctcctccctcatcaacatcgctcgagtcaacgatccgccagtgcacaactcacaggaggcctttcagatggagatgcgcgctgtccgcatggt

SEQ ID NO: 114317 - DNA, 1225 bp, Zea Mays
agccactaccactgcttaatacctctctcccgctgcagctgcaagtactcccagcagggagtagtacaaagcagttatgaacatggctagccccaggctaaagctcttcggcttccacgtctccaaggaggagcacgagctgtgtccggagacgacgacggaggcggaaacaaccgagccagaggaggcgccggcgtgcggtaacaacggcggagggtccgactcgtcgtcctcgtccaccaccaccaccaccacggccacggcggccggcggcgacgggcggaggtacgaatgccagtactgctgccgcgagttcgccaactcgcaggcgctgggcggccaccagaacgcgcacaagaaggagcggcagcagctcaagcgcgcgcagctgcaggccgcggccgcggccgctggccgggtcgccggcggggccgccgccgcgctctaccctcgggccaacccgatggtgtccgccttcgtgccaccgccgcacctcctcggcggcggcggagacgcatcgcccacgagctgggtctacttctccccgcgcgccgcagccgtggccgggggcccgcagggccagcagttccacgtctcccacaactgcgtgttcccgtcgcgcgccaccccggccgccgccgtgacggcggcctcgccggcagtcttctcctacaccccggcgccctccgccgcctcggcgccgtacgtcaccgacgaccaccacagcgggcggagggtcgtccacgtcagcccggcggccgccctggggagataccccggcatggcagctggccctgggatggcggagccggtggtcaccgggcccgaggacgccctggggctggacctgcagctcagccttgcgcccgccggcttgtgacttggctggtcccgtcgtcgatggagatcgcgcgcgcgagctgtgccctgccacgcaccgtcgccttggtaaaagagaattgatcacctactagcttgctactactaaaaagtttgtactaagatcgatctttgctggctagataattagcactagtaattatgtttagttgctggaaatgggatttggagagctgcatgcatgtaagccacctgtaagattccggttctagctaattgatgtgcatgatgatcgcaaggatggctatgctggacgaggacgacagaccctgtaaatttttggttgatccgtccatccatcaatcaatctctgccattttcttca

SEQ ID NO: 114318 - DNA, 511 bp, Zea Mays
tcctctgccgacctccgcggctccgcgtttgggttcggcgccggcgcgccgccaccgcctcctctcgaccgctcgcccgcccgttcgccatgtcgttgcacgccatggccaccacttccccgcaccccctccctcctttcacatgccacgcaggatcctcaccaccccatccgccgttcgcggttgttcgtcatcgcttccgtccccgaccccgccccagcggcggggccggtggaatacacgcactgtctcatcgccggccttggcaacccaggcaacaagtactacggcacgcggcacaatgttagaaccgttgtcacacttgttcgttcgtattcccatttcccgcaacttcgaggtggtggttctcacttctcgctctccgtcccattgtgcgcgtgctcgtgtcatcgattatgtggggtttgagatggttgatcgcatcgcgttagaggaggggatcgcgatgaacacaatccagtccatgtcgctactgggaattggtaactaa

SEQ ID NO: 114319 - DNA, 693 bp, Zea Mays
ctgcccgccgccgccaagggctgctcccgtatccgagcgcgtcccaccacgtcgcccactgccatggtgatctcggctgagccgcgcccgccgcctcccccggatcccgttgccgacgccgcggcggtggaagcggcggctgcggtcacgtcgaacgcccgccaggccgccgcggtcacgtcgttcccgtcgctcaagacgtgggggagccaccgggccctgcgctgcgcccacgtcaaccgcgccggcgacgccaccgccaggcgctcaccagggaagctcgccgtggtcaaggagaaggcgctgagccatctccacgaggtggaagctgggagcagcgacgacgccgacgcggaccgcgtggcggcggcggaggccgcccccgctctgccaccgtggaagctgcgcacccggcggcgcccaaaggaggcggcgccgtccgggagcatggcagcgccgcccgagcggaggccgtcgcgggcctgcgcggaggctcttgaccgggcgcggttctccgtgacgctcacgagcgaggagatcgaggaggacatctactccgtgacgggcgcgcggcctcgccgccgccctaggcggcggcctcgccccgtgcagaaacagctcgatatgctgttccccggcttgtggctgtcggagatcaccgccgagacctaccgggtgcctgaccaccggtga

SEQ ID NO: 114320 - DNA, 291 bp, Zea Mays
atgcggacgtttagtcttcgtttttttcccaacccctccctccccccgtcgagcctgccgccgccggccgtgcgtaccacccctaccgtttctgttttgaggctttccgcaaagcgctctccgccggacaaaatgatgcgtctacgacgctttgcactgcatacttgcgtttgcctgagggctgcggccggcgtgtctaagactgcactgctgactgggctggaccgggggccacgcgaggacgccaagggggagctggtgggactgaactcgctgtcgctgggaaagtga

SEQ ID NO: 114321 - DNA, 1846 bp, Zea Mays
ggaaggggattaaatatcgtcggacgaggcgtggccaacccctttcgctcctctcgccgctttgggttggggtttaagcgcgtgtaagggaggccggaggcgacgacgacggcgccggcgtcggagaagaagaagcagacaactctcgtatatgtcttcttgccccttttccgatctggtggtcgtagcgctcatcatcgccgtcttcgccgtcatcctccgcgccctcgcttgctctggccgatctatgcgcaaggggctcaacggctggaacaaatcctcgtcgatgctcagggacgggttcggggtgaagtattccggattcctccacataaggccgtgcggcttctgtagaggagattgacggattcggccgatttgcgctcgtctccgtcattttttttgcacccagagtttcttgtttttctttagaagttttcccccatagtttttggcaattttggcgacaagttttggagttctccccgtcggaagagatagaagagagatgtctccgttgaaccagcaacaggttctcctcaagaaggccctggcgaagaagcccaacgctaagaagatgtctgagtttggccttaaaccctctgctgccctcttgaagtcccggacgcagcagctgccggcgccggtccagccgaggcgccgcgtccgtgtcctatttgaggaccccgacgccacggactcggactccgactcggacgacgaggaggccggcggcaccccatcaaggaccaagcgcttctcttttgaggccttcatcggcaaggccccagccaagccggttctcccggcggcggccgctgtcgccgcgtgcaccagcggcggggcgccggagcgctaccgcggagtgaggctccgcaagtggggcaagtgggcggcggagatccgcaacccgttcaccggcaagaggcagtggcttggcaccttcgacaccgctggcgcggcctccgcggcctacctgtccgcctcccggagcttcgccgacgagaagcggcgccgccgcgggctgcccgtggccgcgtcctcagcagacactccggcaagcggcagcaccccgacggcttcctcctcgtcgtccgcctcgaccgctccattcgcgcacccgtcgccgtcgtccgtgcttgaaccgagcaaggaagcgcggaacacgcagtccccagaggcgacgcccgcccggccgtcgaccgactcagcgcagctgccggaggacccagagttctaccaggaccttctgcgcggcctgcagctgcccgacatcgacccgctggacttccgcgccgggctggacgctctggatctctccgatgcggacttcggcctggacgacgaacatgacctcctgctcggggacttcggggacgaggagatggagatcgacctcgacctcgacgacatcaacgacgtcttcccggagatgcccggctgcgacctcggccgcggcatggacgacttcctgcaaaccgttgatttctgcgtgtgaattaaaagggagtgtgcccttgatatgttagggttgtttggtttcataaacgagcccctgagagtgtgcttggaaaggggagatgagatatcttgggttttttccccgggcaagttggatctgctcgtgcccaggagatttcctctttgccgaacacaccaccattagcggccggagagaagaggtaattttggtaggttatattatgtttaaggtttaaggtatagtgcctaagtgtttgctttgttatttggtaattggtaatgcttgtcaaagacattgtagtggacaagttcattgagctgttactattaagcaatgaaagggaaaaaaataagtttcgtggta

SEQ ID NO: 114322 - DNA, 586 bp, Zea Mays
agacggtggagagtaacaccagctcaaaaccctagcctccaactcatatacctgctgctcgccccgacgcgcatcaacttccgccgccgccccttcctcttcgtcgctcgcctcacgcctacgccaccacctctgccatggccccgaagaaggataaggccccgccgccgtcgtccaagccagccaagtccggaggcgggaagcagcaaaagaagaagtggagcaagggtaagcaaaaggagaaggtcaacaacgttgtgctcttcgaccaggccacctatgacaagttgctctccgatgtgcccaagtacaagcagatcaccccatccgtcctctccgagcgtctcagggtccctagtactgaaaatggcaagaggaggtctataatcacttctaaagtaggctacatcactgagacattgcagcccataatagaagaggtgtatgaggttcagctgctaatggtcctgtgattttgcatttctgccatcatcattatcatcatccttggtcaatacaaataccgttccaagggagtcacatatgttcactgtaattaattaaaaaccctatttttaagggcagt

SEQ ID NO: 114323 - DNA, 1098 bp, Zea Mays
gcgcacaacacctcgctttttgtactcttccgtctttgccctcgcgttaacgcgctcgtctcgcctggcctagctagctgcctgccttggcttgcttgctacgtcgtgtactatacacagcgagaggaaggaggagcaagaaaagaaagaaaagagagagagtcgcttcctttcctccaacttattccatggagacctcttctcacaagcgggcgcgggaggcggtcgacctcgccgccgccgccggagaggccgtgtggccggaggccgacgccaagaggctgcggccgcaggacctgctcgacatgctcgacgacgacaccgaagcggcggccgccggcgacctggcgtccgtcatgcggagcctggaggaggagatagccagcttcgacgaggccgcggaggcggcgccgtcgcagcagccggagctggggttcctgctcgaggcctcggacgacgagctggggctgccgccggcgggatccgccgccgccgcctcttcggaggaggccggcctcgccggcccgccggagcccgccgccgcgctctacggccagatctggggcttcgacgacgagatcgacggaggcttcggtggctactcgcccgaggctgccgccgcggccgccgccgccgccgcgtgggacgacgacgtcttcggcgccggcctgttcgcgttcggcgacgacgcgtgcgcgccgtcggatctcgcggcgctgcgccacgagtccatgcccgccgtctgatgacgcgtcccccgtgcgtgcggccgcacccaggggattagcccctatctttttttctcgtttttatttttaccttttggctaacctgaatgtaaagtttcttaggagggttaaaacagagccgtgcaaaacttgggaagataagatttcagataggcggaaggttctggaaatggcctcccttttttttgtttgccctcggaatctacctctcgcttaatagaaaaagaaaataagaggaagcgagtacatacataaagctattaaaataaaaataataaacagtgaagcaaaagacagatgccgacaagttttcaaaaaacagatggaggtgggcgattatactgagagg

SEQ ID NO: 114324 - DNA, 1151 bp, Zea Mays
tataaaaaacaataatattttgaaacggagggggatgtacgacctttctaggaatgagtaagcagctaaaatatccaaactgttcgggattgagtcgcagagcgcagttccaatatgtgtgggcagttgcattatacacccaagtaaccggcgaagaaacatggacgacatttcggcctcgcaacgttttgcccacatgcccaagctctagtgaacttgaaatcgcaatcccgtagtagcacacaccgcctgcacaattctacatagctatcaaatcctgcatacagtacttcgctaaacaagtttttgggtgctgatgcgcttgattgaaattgctgccgttgttcttatgtatgaatcgagaacgtcttccgggcagacactgcgcgatcgatggagcaacgaagagcgcgcttggaattgcgccattgcagacacgcggcattatctagtcgactagcaaacctcgcctacacatcctccgcccgcattcccccgtcactgtaccaagacactacctccaacccctggggcagggcagagcaagaccagcgaaagaagcatcgccaccggctcggttgtctgtctctcaaaggttcgttcaccagatgctccaaatgtcgtggtcgaaggcggccacctcggcggcgccgccgccggcgcaccggaagtcctcctccacgaaggggaaccagccgagcagcttctcctcgtccacgccccacgtccaccacgccgccgcgctcagcccggcgtcgaggtcccagtccacggcgctcgcgtccgcgtccgcgtccccgtccttgtccccgccgacgcacacgtccggcacggtcggagccgtttccggcccgggcgacgacgcggccgaggcggcatttgctgctgctgctgctgcggcggcggcggcggcgagggtcgtggccgccgcgacgcgcgggcccgccgcgggcttcgctttggcgcctgacttgggctgcctcggctgtttgtcccggcgctgcggctttaggttggcggcgaggtcctgcggctcctcgaccttgggctgctgcgctctggttctcttcatgtctggctggcggttctccgcttcggggcagagttgagtgtgtttcgtgggacggtgggagactgggactgggagtggt

SEQ ID NO: 114325 - DNA, 894 bp, Zea Mays
atgctcactaaccttgaaccgcatgacgtgctgtttattgatgagatccaccgtctatcgccagttgttgaagaagtgctgtacccggcaatggaagactaccaactggatatcatgattggtgaaggtccggcggcacgctccattaaaattgatttgccgccgtttaccctgattggtgcaaccacgcgcgcaggttcgctgacatcaccgttgcgcgaccgttttggtattgtgcaacgtctggagttttatcaggtgccggatctgcaatatatcgtcagtcgcagcgcacgctttatggggcttgagatgagtgatgacggcgcgctggaagttgctcgtcgcgctcgcggtacgccgcgcattgccaaccgtctgctgcgtcgagtgcgtgatttcgccgaagtgaagcacgatggcaccatctcggcagatatcgctgctcaggcgctggatatgttgaatgtcgatgctgaaggtttcgattatatggaccgcaaattgttgctggcggtaatcgataagttctttggtggacctgtaggtctggataacctggcggcagccattggcgaagaacgtgaaaccattgaggatgtgctggaaccttatttgattcagcaaggctttttgcagcgtacaccgcgtgggcgtatggcgacgacgcgggcgtggaatcactttggcataacgccgccagaaatgccccaccacgatgaccacgccaatcgcaatagagatgagatcttctggcgtcactgccagcaaatcaccgaacagctgtggacgcttctccagccataccagaccgcccgccagcagcagcgtaacggcaatcaccgcatagaatggattcacgtccagcaacaaaccaaacgcgacgccaagtaa

SEQ ID NO: 114326 - DNA, 1197 bp, Zea Mays
ccggtgactcgaccggtgaggccaggatccttggctcgaagaagcgattgagcaccaccacacggggttatagacgaaggatccaggatgcggatgagctgcaacgggtgccgcgtgcttcgcaaggggtgcagcgacaactgcgccatccggccgtgcttgcagtggatccgcagccccgacgcgcagggcaacgccaccgtcttcctcgccaagttctacggccgcgcaggcctcatcaacctcatcaccgccggccccgaacacgtccgacccgcaatattccggtctctgttgtacgaggcttgcggccgcatgctcaacccggtgtacggctcggtcggcttgctctggtccgggaactggcagctttgccaggcggccgtcgagtcggtcctccgcggcatacccatcgcgcagccgccgcccaccgccacggctgtcccgcctctccggtcgtgcgacatccgccacgtcgccaggagggaggcaggccgcggcgccgtggatgccggcctccaccgaatggccaacagctcgcgggggcagttcaagcgatccggcgcccagcacagatccgcagactccggcagcatcgagctcgtcttctcccagccgtcggcggcttcgtccatgctggtcgacatccgacaggcgcagccactgaactgggcgccacgccatccaagcccccaccagtactactccgcaagccacgacgacgacgccgtgcgtgagagcgacgacagcaaagcctcggtggacaccgtggatgtctctcatgtcagtcagtccgaacccgcggagccaccgagagaaagcaatgagcgggcggatggtctagacctcacactaggtctgccaccgactgcgcacaaggtcgagagactcgagacgtcgtcagacgttgacgacgaccagacttctcacagaggcgagccgacgaagctcggcttcgccatggcggattctcgagctagataatgaaatcgttggatatactactcatccgatcgatcgacagggagttttgattgcctggaactcgtttatgtcttaatttgtagttctgtaggggtggctatatatggtgttttctagttttggaaactgtaacaacagtgtgtgccctcttttttttgcattttttatgtatgatacaccgtttcttgatgtgttcttcccactatattttaa

SEQ ID NO: 114327 - DNA, 324 bp, Zea Mays
atgtcctcgtcgtacttgcggaagagcgtgtacggctcccaccgcgcggagctccggcgcgacgagcacgagaaggggtactccgtctccgagtccttggtcaccgtcgagctctgccactccaccgagctcttggacgtcgacgacccgctcgtcagcgtcgacgcgtcgagccggcagctgtccccgttcttattgtccttgtcgtcctgcagctgcagctgcagctgcgcctgcgctccgttcaccgcgccctccagcaggagcttcctggcgtcggcgagcgcacggttgttgacgaacagcttgacattatggtggcct

SEQ ID NO: 114328 - DNA, 1471 bp, Zea Mays
cttctgagccactattgtcgtctgcctctctctctctgtgtgtgtgcgcttcctgtttatgtgtgcatatctgttgtgttctcttctttttcctgttcatcagccatttctcttgggtgtttttttgtttgctagtacatgcatagtgctgagcgcctgagctcttaatcagcttgtgctatcaaaaggcaggaatctggatcttcgtgaacagcttgtttgtctacatgacaagatcgttcttgtactacgcacaattttgctactccattttttcctcgctgcttctactgtagtagttgcacacatcttgttcatcatatctgagatcctatatgctcatgcttgtgtatatataggatctgcattaacattgtgattcgttctatatatatacataaaaagaactgtcgctcctcggccggccaagaagccaagaacttaatttgttttgtctgttcgtccccatggcgtgtggactccaggaggcaagtagggagcccattggacctgaacaacttgccggaggagtacggcaagcaagcggtagagagctccacgaccaccgccacatcaagctcccatgcagttaggacagggataaagaagaagggcgatggagggaaagacgatgctgcaaaggtgtatgagtgccggttttgctccctcaagttcggcaagtctcaagcgcttggcggccatatgaaccgccatcgacaagagagggagactgaaaccctcaaccgtgcccggcaactcgtcttcggcaacgagagcctcgccgccatcggggcgcaagcgcagatgacgatgactttcagggatgtaaatatggctggcgctgccccaccgaccgtattgggaggaaacttccggggaggcgccagcgccaccggtggcagcagcgtcggcgacccgtgtctcccgttccggccggtgcatccggggctatcgtcgcagccttcgtaccattacctctacacggcgccatccacactgcacccgatgagctacccgccggcgacgtacccgggccctcctcgtcagcctgcggtcggcgactatgtcatcggtcacgcagtctccgccggtggcggtgacgcactgatgcagtcgacgcaccgcagcagcttctcttgcttcggagctccactcaccgctccgccggcagcagcggcggcgggggctgctgctgctgctatgaacgtgcaggccgacaagcttaactgcaactgcagcttcggctgcggtggccacagcagaaataataacgtgaatgcgtccacttgagcagatgcggaccgcacgctgtggttaatgcatgcaattaagtcagtgtaaagagccaagaaattaaattagatgatgcgtgttttcgacattaaagacagaagtgttctgaggatctacttctatatgaatgcctgcaatggatccctgaatctaaactaaaaatcttcagttttgcatg

SEQ ID NO: 114329 - DNA, 2795 bp, Zea Mays
agatacaagggaggagccatggtgaagaagaagctgaagaaactgtatggccgggatgctcgggagttctttaaccaggtcatggtggagcaacctttgctgcccttcctgatcccgcttggcctctttgcgtggttcatcgaacggtgggttgtgccattctcgaactgggttcccctcgctgctgccgtttgggcaaccattcagtatgggaggattaagaggaggacaactgtagaagatttgaacaaaagatggaagcatcttatactgaatacaacacccaccacaccaatcgagccttgcgaatggttgaacaaacttttgttagaagtttggcctaattacatggagccaaaactatcgaagaggtttcagtctaccgtcgagagacgtttaaagaatcgaaaaccaaaattaatagataaaatagaattacaggaattctcacttggttcttgtccacctaccttgggagatcagggcatgcgttggattacttctggtgaccagcaagtcatgtgcttgggatttgattggaatagccacgagatgagtgtaatgtttttggcgaaattagcgaagccactgattgggacttgtcgaattgttataaacagcattcacatcaagggagatcttctactatcacccatacttgatggggaagctatactctattcttttgaatcaaccccagaagtcaggattggggtagcatttggaagtggtggaagtcaagcaattcctggtatggagttaccaggtgtctcgacatggctggtgaagcttttgactgaaaccttagggaaaacaatggttgaacctcgccggctatgtttttctttgccatcagtagatctaaggaaacgagcagttggaggtgttctctcagttactgttgtatcagctagtaacctctgtaagagcacagctaatgatatagggaactgccaaagctcaaatggaggggccacgtatggaattgctgataacaaggtatcacagacatttgttgaggtagaagttggcaatttgatgagaaaaacaagtaccagtaagggtctaaatcctacatggaacagtacatttaacatggtacttcatggagagacaggcattgtcaagtttcttctgtatgaattggattctggcggtgtcaaattcaattacttgacaagctgtgagataaaggtaaagtatgttcatgatggttcaacaatattttgggctataggacataactctggtgttgttgcaaagcatactgagcattgtggacaagaagttggaatggttgttccatttgaggatataaatggcgagttaactgtaagccttgtgctaaaagaatggcagttctctgatggatcggttacattgagtaattctctgggcaatggacttcaaagctcatttgatggatcgacaaagcttcagtccacaacaggaaggaaagttagggtcagagttgttgagggcagggcacttacagctaatagtaaatctggaaaatgtgacccttatgtgaaactccagtatggaaaggctctataccgaacaaaaacactgacacatacggtccgaccagtttggaatcacaagtttgagtttgatgagatctctggtggtgaatatctgaagatcaaatgctataatgcagatatgtttggtgatgaaagcattggtagtgcgagagttaatttggagggacttttagagggtgctacccgtgatgtttgggtcccacttgaaaaagtagattcaggagagataaggcttgaaatagaggcaataaagaatgatcacaacaatagcttgcagagctcaagcagtaaagctggatctggttggattgagctagtcataatcgaagccagagatcttgttgctgcggatctgagaggcactagtgatccttatgtcagggtgcactatgggagcaagaagaaacgaaccaaggtcatttacaaaacactgtctccacagtggaaccagacattcgagttcctggaaaccggagaacccctgattttgcatgtgaaggaccacaacgccgtccttccaaccgccagtatcggccattgcaccgtcgagtacagcatgctgtctccaaaccaatccgctgagaaatggataccgctccaaggcgtaaaaagcggagagatccatgtaagggtggcactgaaggtatcagtaccaggttcggagaagaagaacatgctcggggcaggtccgttcggcaaggggcacaagatgtcgacacagatgagagacagcctgaagagattcacgggcttgatcgacgacggcggtgacccggaggcactggcactagccgtggcggagatggaaggcatccagggcgagcaggaagagtacgtcgaaaccctggagcgggagaaggcgatgctgttgcacaagataaatgagcttggttccgaaatcattaggacagcatctggtcctccaaggacgccgtactagttagatctgcaaatgcacacccccccactactgaatgaacacgcatttatttatcggcaggcgaagacctggttgtacgtagaactctatagtgtgcatgtacaagtgagcagtacagctcgtgtaagtaggccaggcgtgtaggaagcacaggtgtatcttgtagtgattgataaaaactgctcaagcatcaaccggctggaagcttacagaagttggtcgactttgtacacagttagggcatgtttgggaacaatgtttttttaaaaccacattttataataccacagtttactgaatgttagaac

SEQ ID NO: 114330 - DNA, 75 bp, Zea Mays
agaatcggtgcgttaaaccagttttattcatatccagatcatataaaaccggctcgttcggttattcctattaca

SEQ ID NO: 114331 - DNA, 257 bp, Zea Mays
cgtcgtcggtggcgttcgtggcatcctccacggcgtcgtgggccagtggctccacggtgatggactgggccagccccgaggtggtcgagatgcagcgtggtgatggcttctcgctgctgatctacgcctggaagagctaacaccggcgacgacagcggcagcatagttctgatcaactagcggtgatggtaattttttctggactattgtagtttgcagtgttcttgtgcagttaaagcctggagagattgaattga

SEQ ID NO: 114332 - DNA, 411 bp, Zea Mays
atggcgctcgcatccacctccgccaccgcgcccgctgtcgtgctcaagacccgttcctcggcgccaggcgcgcgctcgccaatgccatcgcgcccaagcccgcgccacacgctcctcgccatcgccgtagccgccgccaagaagttgtggacccgccgagttcatcaacccgccctggctcgacagatcgtaagtctttgcagagacgaggaggggggatggagctcgaagctggccgtgacgccgccgccgcgactttgcaggctccctggcgacttcgggttcgatccgctagggctgggcaaggacccggcgttcctcaagtggtaccgggaggcggagctgatccacgggcggtgggcgatggccgccgtgctgggcatcttcatgggccagccgcgagcggagtag

SEQ ID NO: 114333 - DNA, 562 bp, Zea Mays
gttatttgctacaagaaaaccttttttcagcagagtagcttttggacaccttgtatatgccttcaattaaagcgtttgaaactctttgcagcctgctcacgagaaaatcggtgtcgttgattcccaatggattgtacaccaagtgattccttctctcgggaaccaggggcagtcggagaatgggagggcgccatggtacaagtttcaacccacattttttcctttgtgtccagcagtggctcttcgaatagagttagatattgatgaatgtttagagcttatattctctgaacatgaacattcagaatcgacagcattgtgcgcacacgaaaattctgcagaaaacatttcagacggacaaggatggccaagttcgcttccacaagttaatcggaaatcttcatgggtgatagctatgtcagattcttccgcgcatagggcaagtaatgcaagtgatagctgtgtcagtttacccccattttttgggcatcacttgtctcaaatgaagtccattggaggttcgcaatttatgttccgtggcatcgcacgggcacctacctag

SEQ ID NO: 114334 - DNA, 1707 bp, Zea Mays
gcgagtcgtcttcccccttgtgccgccgcccacccgcggcctcctcttccctcccctttaaaatccaaacgctccccgcttccctcgaaccgtcctcaatcccagttcaagtcccgcccaatggaggacccaccagcgcttcctctgcctgagccggagtccgagcccgatcccgatcccgaggcctcccctgcgcctccgcaaaggctgctgcgattgcgctgcgcggtgcagcactacgagtggggccagcgcggagccgcctccctcgtcgcgcgcctcgccgaccagaaccccgacccggcccgcccctatgccgagctctggatgggcactcacccgtctgccccctccacgctcctcgacgacggtacgctcctcagtgactggctcgcgcggaaccccgacgcgctcggccccgccgtcgctgcgcgctggggagtcgacctcccattcctcttcaaggtcctgtcggtggccaaggcgctctcgatccaggcgcacccggacaagaaactcgccgaggtgctgcacgcgctgcggccttccacttacaaggacgataatcacaagccggagatggccatcgccatcacggagttccgggcgctttgcggctttgccggtatcgaggagctcaaggatgtcctgagggcatttcctgaaattgaaggactagttgggcatgaagatactggcaagctgatgaacatgaaggaagatgatggggttagtgaagtaaaatccagtttgcaatcagcttttgctaagctaatgacagcaagtaaagacatggtttctgaagcagttgcaaaactgatcagtcgcctgaatactaagagcaagattaggaccttaacagacaaagaacagctggttttgtccctggagagacaatatcaagatgatgttggtgttatagcagcacttttctttaactatgtgaagctcagtcctggtgaagccctttacattggtgcaaatgaaccgcatgcatacctctctggggaatgcattgaatgtatggccacttcagataatgttgtacgtgctggtttgacacctaaatacagagatgtgcaaactctctgctcaatgctaacatacaagcagggtttccctgaaattttgcgaggagttcctgtgcagccacacgtaaggcgctacacacctccatttaatgagtttgaggtggattggtgcttggtgcctccaggtggactggtcgtcatatccccggtaccaggtccatccatctttctcgtaatcaccggggaaggcgagattcaattggattttatgtcagatggggagaaagcagaggaaggtgatgttttcttcgtccccgcgtacaccgaggttaagatctctgcgtgtggccccgagtctgtgcagctgtacagggctggggtaaacagcagattcttcagctaacactgtaattgtagggaatgaggatttttgcagttgtcgtaaagtggactacactgtaattgtagggaagttttcccagctaagaaatatacgtgaaatgaaatgattagttagcaaaaggtctcatatactaatgtatagggagggctacgtgctgataaaagaataaactggttactttcatatcttgatgatttactgtaaagatgccttgcagtgcaatccacgttggatgcgctagaaagaaataaaaatgatgaccatttggttgca

SEQ ID NO: 114335 - DNA, 1676 bp, Zea Mays
caccaccgcacatgtgttgtgtgttttgcgcaagaccgccggaccagagaccgtccgccccgcccgccggtcacgcacgccgtctcgcgccacccagccgtccgtcggctggtccgctgactcttcgccccccgcgtgtcctgtctgtggtggcgcggcgcgggacggaagcacgcagcagcagcaggtcaggtggtggtggggatgccggccgcggcgcggtcgtggacgtggacctgcgggtgctgcgcgggcaggaggcggaccagcggcggcgctgcgggcgacacggccggcgcgtcggggcgcgccgccgaggagggggacgagtggagcctcttcatcgacctgcccgtcctcgaggccgccaccggcggcttctccgacgacaacctcctcggccgcggcggcttcggccccgtctacaagggggtgatggagaatgggcagcagatcgctgtgaagaggctgtctctggggtcacggcaaggcgtgcgcgagttcctgaacgaggtccggctcctgctcaaggtgcagcaccggaacctggtgtccctgcttggctgctgtgcttcctccggccacaagatgctcgtctatccctacttccccaatagcagcctcgaccacactctcttcgacaggaataagtgtgcggcgctagattggccaaaacggtaccatataatcgtgggactggcaagagggctcctctacctgcacgaagagtctccggtaaagatcatccaccgagacatcaaggcgagcaacgtgctcctggacgaccagctgaacccgaagatctcggacttcggcatggcgaggctcttcctggaggacgccacgcacgtgaacacgttcaggatctccggcacatatggttacatggctccagagtacgcgatgaacggctacctgtccgccaagaccgacgtcttcagcttcgggatcctggtgctggagatcgtgagcgggcggaagaacatcgtccggcatctggacgacgagaaggtcgacctgttgagctatacatggaagctattcggagaaggacggtccctggagatcgtggacccgtcgctgtccagccccgacagcgatcaggcgctgctgtgcatccagctcggcctgctgtgctgccaggccgcggtgtcggaccggcccgacatgcacagcgtgcacctgatgctgtcgagcgactcgttcacgctgcccaggcccgggaagccggccgtacacggcaggaccggccggtggacggcagcgacgacgacggcctcagggtccgcgtcggcgtcgagcgccaccaacaccaccagcacgttcgggttcggcaccgacacgaacacgaccagggcctctgcgctgctggccagtgtcgccgaggacgagtcccggaactccatctccatatccttcaccactgatggccggtaggcgcagtgcagagtgtataagggaacgatacatgagtgagtgaaccagagtgatttgtgaggagggtattgtttggtactcctagctagctaggtagattaggttgattttgtagaatcccagccatatggcgtacagttgggttgggccgttggggcttggtagaatgctgaactgttgatcactctgttttactagtaacagcgaaacctatggtttgtcaaccgcgaaaagcgaaa

SEQ ID NO: 114336 - DNA, 1575 bp, Zea Mays
ggtaggtgtgtgttgtgtacatgtgttcggctgcccccgccttctgcttgtttgcttctccgccctccggctggcttcacgcggctctgcttgttaggtggtggtggggatgccggccgcggcgcggtcgtggacgtggacctgcgggtgctgcgcgggcaggaggcggaccagcggcggcgctgcgggcgacacggccggcgcgtcggggcgcgccgccgaggagggggacgagtggagcctcttcatcgacctgcccgtcctcgaggccgccaccggcggcttctccgacgacaacctcctcggccgcggcggcttcggccccgtctacaagggggtgatggagaatgggcagcagatcgctgtgaagaggctgtctctggggtcacggcaaggcgtgcgcgagttcctgaacgaggtccggctcctgctcaaggtgcagcaccggaacctggtgtccctgcttggctgctgtgcttcctccggccacaagatgctcgtctatccctacttccccaatagcagcctcgaccacactctcttcgacaggaataagtgtgcggcgctagattggccaaaacggtaccatataatcgtgggactggcaagagggctcctctacctgcacgaagagtctccggtaaagatcatccaccgagacatcaaggcgagcaacgtgctcctggacgaccagctgaacccgaagatctcggacttcggcatggcgaggctcttcctggaggacgccacgcacgtgaacacgttcaggatctccggcacatatggttacatggctccagagtacgcgatgaacggctacctgtccgccaagaccgacgtcttcagcttcgggatcctggtgctggagatcgtgagcgggcggaagaacatcgtccggcatctggacgacgagaaggtcgacctgttgagctatacatggaagctattcggagaaggacggtccctggagatcgtggacccgtcgctgtccagccccgacagcgatcaggcgctgctgtgcatccagctcggcctgctgtgctgccaggccgcggtgtcggaccggcccgacatgcacagcgtgcacctgatgctgtcgagcgactcgttcacgctgcccaggcccgggaagccggccgtacacggcaggaccggccggtggacggcagcgacgacgacggcctcagggtccgcgtcggcgtcgagcgccaccaacaccaccagcacgttcgggttcggcaccgacacgaacacgaccagggcctctgcgctgctggccagtgtcgccgaggacgagtcccggaactccatctccatatccttcaccactgatggccggtaggcgcagtgcagagtgtataagggaacgatacatgagtgagtgaaccagagtgatttgtgaggagggtattgtttggtactcctagctagctaggtagattaggttgattttgtagaatcccagccatatggcgtacagttgggttgggccgttggggcttggtagaatgctgaactgttgatcactctgttttactagtaacagcgaaacctatggtttgtcaaccgcgaaaa

SEQ ID NO: 114337 - DNA, 1653 bp, Zea Mays
caccaccgcacatgtgttgtgtgttttgcgcaagaccgccggaccagagaccgtccgccccgcccgccggtcacgcacgccgtctcgcgccacccagccgtccgtcggctggtccgctgactcttcgccccccgcgtgtcctgtctgtggtggcgcggcgcgggacggaagcacgcagcagcagcaggtcaggtggtggtggggatgccggccgcggcgcggtcgtggacgtggacctgcgggtgctgcgcgggcaggaggcggaccagcggcggcgctgcgggcgacacggccggcgcgtcggggcgcgccgccgaggagggggacgagtggagcctcttcatcgacctgcccgtcctcgaggccgccaccggcggcttctccgacgacaacctcctcggccgcggcggcttcggccccgtctacaagggggtgatggagaatgggcagcagatcgctgtgaagaggctgtctctggggtcacggcaaggcgtgcgcgagttcctgaacgaggtccggctcctgctcaaggtgcagcaccggaacctggtgtccctgcttggctgctgtgcttcctccggccacaagatgctcgtctatccctacttccccaatagcagcctcgaccacactctcttcgacaggaataagtgtgcggcgctagattggccaaaacggtaccatataatcgtgggactggcaagagggctcctctacctgcacgaagagtctccggtaaagatcatccaccgagacatcaaggcgagcaacgtgctcctggacgaccagctgaacccgaagatctcggacttcggcatggcgaggctcttcctggaggacgccacgcacgtgaacacgttcaggatctccggcacataagtacgcgatgaacggctacctgtccgccaagaccgacgtcttcagcttcgggatcctggtgctggagatcgtgagcgggcggaagaacatcgtccggcatctggacgacgagaaggtcgacctgttgagctatacatggaagctattcggagaaggacggtccctggagatcgtggacccgtcgctgtccagccccgacagcgatcaggcgctgctgtgcatccagctcggcctgctgtgctgccaggccgcggtgtcggaccggcccgacatgcacagcgtgcacctgatgctgtcgagcgactcgttcacgctgcccaggcccgggaagccggccgtacacggcaggaccggccggtggacggcagcgacgacgacggcctcagggtccgcgtcggcgtcgagcgccaccaacaccaccagcacgttcgggttcggcaccgacacgaacacgaccagggcctctgcgctgctggccagtgtcgccgaggacgagtcccggaactccatctccatatccttcaccactgatggccggtaggcgcagtgcagagtgtataagggaacgatacatgagtgagtgaaccagagtgatttgtgaggagggtattgtttggtactcctagctagctaggtagattaggttgattttgtagaatcccagccatatggcgtacagttgggttgggccgttggggcttggtagaatgctgaactgttgatcactctgttttactagtaacagcgaaacctatggtttgtcaaccgcgaaaa

SEQ ID NO: 114338 - DNA, 1676 bp, Zea Mays
cgggcacaccaccgcacatgtgttgtgtgttttgcgcaagaccgccggaccagagaccgtccgccccgcccgccggtcacgcacgccgtctcgcgccacccagccgtccgtcggctggtccgctgactcttcgccccccgcgtgtcctgtctgtggtggcgcggcgcgggacggaagcacgcagcagcagcaggtcaggtaggtggtggtggggatgccggccgcggcgcggtcgtggacgtggacctgcgggtgctgcgcgggcaggaggcggaccagcggcggcgctgcgggcgacacggccggcgcgtcggggcgcgccgccgaggagggggacgagtggagcctcttcatcgacctgcccgtcctcgaggccgccaccggcggcttctccgacgacaacctcctcggccgcggcggcttcggccccgtctacaagggggtgatggagaatgggcagcagatcgctgtgaagaggctgtctctggggtcacggcaaggcgtgcgcgagttcctgaacgaggtccggctcctgctcaaggtgcagcaccggaacctggtgtccctgcttggctgctgtgcttcctccggccacaagatgctcgtctatccctacttccccaatagcagcctcgaccacactctcttcgacaggaataagtgtgcggcgctagattggccaaaacggtaccatataatcgtgggactggcaagagggctcctctacctgcacgaagagtctccggtaaagatcatccaccgagacatcaaggcgagcaacgtgctcctggacgaccagctgaacccgaagatctcggacttcggcatggcgaggctcttcctggaggacgccacgcacgtgaacacgttcaggatctccggcacatatggttacatggctccagagtacgcgatgaacggctacctgtccgccaagaccgacgtcttcagcttcgggatcctggtgctggagatcgtgagcgggcggaagaacatcgtccggcatctggacgacgagaaggtcgacctgttgagctatacatggaagctattcggagaaggacggtccctggagatcgtggacccgtcgctgtccagccccgacagcgatcaggcgctgctgtgcatccagctcggcctgctgtgctgccaggccgcggtgtcggaccggcccgacatgcacagcgtgcacctgatgctgtcgagcgactcgttcacgctgcccaggcccgggaagccggccgtacacggcaggaccggccggtggacggcagcgacgacgacggcctcagggtccgcgtcggcgtcgagcgccaccaacaccaccagcacgttcgggttcggcaccgacacgaacacgaccagggcctctgcgctgctggccagtgtcgccgaggacgagtcccggaactccatctccatatccttcaccactgatggccggtaggcgcagtgcagagtgtataagggaacgatacatgagtgagtgaaccagagtgatttgtgaggagggtattgtttggtactcctagctagctaggtagattaggttgattttgtagaatcccagccatatggcgtacagttgggttgggccgttggggcttggtagaatgctgaactgttgatcactctgttttactagtaacagcgaaacctatggtttgtcaaccgcg

SEQ ID NO: 114339 - DNA, 189 bp, Zea Mays
attggtgacctagttgaagcacggtacgaggagtcgactgaaaggggttcctctgtagatcaactggtctactgcatcaacagtttcagggaggctgctttgtccaatgaccaaaagtttggccatatcgacatatttgagaaacagaagctaaggcaaaattgtaaactaccgctgaaatggcattga

SEQ ID NO: 114340 - DNA, 1414 bp, Zea Mays
aagactccaagggccaaggcagggcactgcactgcacgcatgcactgacctgacgacgacgcgcgccacagtccacagctcctcactcagacatggcgatgggcgccgcttccatcctactgatgatggtttcgctggagaccctgcttctcgccgccggcgccggcgccggcgggaccatccgtctgtccagcgatgtcggagtttatatattgcgggcaggcgttgctgcagaccttgtcacggcgatggcgagggcgagggcaagggcaaagcatcagcttcgcgacgaggagaggccgtggggggaatgctgcgacttggccgtatgcgtcaagacgtacccgctaacttgctcgtgcttcgatcgggttgagcgctgctccgacgcctgtaaggagtgcgtggaaacggaggactcgcgccacgtctgcgtcgacaggtaccgtggcgaccccgggcccaggtgccacgacgaggacgggaggagcggcggacccgctgacgacgacgctggtgggcaagcgacgccgacggcagtgatggcagatgacaagaaagcaggcggcggcgacgacgacaagaagaagaggccgtggaaatgctgcgacgtgcccatctgcaccaggtcctggcctccggtgtgccgctgcgcggacacggtggagcggtgcgccagcacctgccagcactgcgagcaggtggaggagggcggcccccgccgctaccgctgcctcgacacgcaccgcggcgacccggggccaaggtgcggcgacggcgaggacgatggtggggagtggtcgccgacgccgaggctcgcgaggggccaccgtttctagctagctatgctatgctagccatagccagcggggactggtttctagcgcgcagcagggagctacgtacgtgtcttttattttgtgacgctgatccatcggtcagcctgtgctgattgacgcgaccgctacctagctagcttcgttcgtggtgtgtcctctcgtgacccacgagagtggagtagaataatcatgcattgttgtatgcaacgtgcttagcagcttcgtggttcgtgcgtgtgccctctcgtgacacacgcgttgagtaaaaataacgtggatggatcagcctactgctcctagccaggctgctagctagctagcagctgggagtagctgcgtgcccttgctgatctcgtgtctctgtcagacctgttgtaaaatctagttgtactgtgttataaattgtaatctagttgtactgtgtgctatcctgatcggatcaggctcctctgaataaataataaagtgggtatggcactatggcctggggctggccggctgggccccggggcagcgatgcatgcatgcatgcattaattgctgcatgggcgtgcctgtcccctgccccgcatcgt

SEQ ID NO: 114341 - DNA, 1414 bp, Zea Mays
aagactccaagggccaaggcagggcactgcactgcacgcatgcactgacctgacgacgacgcgcgccacagtccacagctcctcactcagacatggcgatgggcgccgcttccatcctactgatgatggtttcgctggagaccctgcttctcgccgccggcgccggcgccggcgggaccatccgtctgtccagcgatgtcggaggtgagcgtgcatagctaggcgttgctgcagaccttgtcacggcgatggcgagggcgagggcaagggcaaagcatcagcttcgcgacgaggagaggccgtggggggaatgctgcgacttggccgtatgcgtcaagacgtacccgctaacttgctcgtgcttcgatcgggttgagcgctgctccgacgcctgtaaggagtgcgtggaaacggaggactcgcgccacgtctgcgtcgacaggtaccgtggcgaccccgggcccaggtgccacgacgaggacgggaggagcggcggacccgctgacgacgacgctggtgggcaagcgacgccgacggcagtgatggcagatgacaagaaagcaggcggcggcgacgacgacaagaagaagaggccgtggaaatgctgcgacgtgcccatctgcaccaggtcctggcctccggtgtgccgctgcgcggacacggtggagcggtgcgccagcacctgccagcactgcgagcaggtggaggagggcggcccccgccgctaccgctgcctcgacacgcaccgcggcgacccggggccaaggtgcggcgacggcgaggacgatggtggggagtggtcgccgacgccgaggctcgcgaggggccaccgtttctagctagctatgctatgctagccatagccagcggggactggtttctagcgcgcagcagggagctacgtacgtgtcttttattttgtgacgctgatccatcggtcagcctgtgctgattgacgcgaccgctacctagctagcttcgttcgtggtgtgtcctctcgtgacccacgagagtggagtagaataatcatgcattgttgtatgcaacgtgcttagcagcttcgtggttcgtgcgtgtgccctctcgtgacacacgcgttgagtaaaaataacgtggatggatcagcctactgctcctagccaggctgctagctagctagcagctgggagtagctgcgtgcccttgctgatctcgtgtctctgtcagacctgttgtaaaatctagttgtactgtgttataaattgtaatctagttgtactgtgtgctatcctgatcggatcaggctcctctgaataaataataaagtgggtatggcactatggcctggggctggccggctgggccccggggcagcgatgcatgcatgcatgcattaattgctgcatgggcgtgcctgtcccctgccccgcatcgt

SEQ ID NO: 114342 - DNA, 1396 bp, Zea Mays
aagactccaagggccaaggcagggcactgcactgcacgcatgcactgacctgacgacgacgcgcgccacagtccacagctcctcactcagacatggcgatgggcgccgcttccatcctactgatgatggtttcgctggagaccctgcttctcgccgccggcgccggcgccggcgggaccatccgtctgtccagcgatgtcggaggcgttgctgcagaccttgtcacggcgatggcgagggcgagggcaagggcaaagcatcagcttcgcgacgaggagaggccgtggggggaatgctgcgacttggccgtatgcgtcaagacgtacccgctaacttgctcgtgcttcgatcgggttgagcgctgctccgacgcctgtaaggagtgcgtggaaacggaggactcgcgccacgtctgcgtcgacaggtaccgtggcgaccccgggcccaggtgccacgacgaggacgggaggagcggcggacccgctgacgacgacgctggtgggcaagcgacgccgacggcagtgatggcagatgacaagaaagcaggcggcggcgacgacgacaagaagaagaggccgtggaaatgctgcgacgtgcccatctgcaccaggtcctggcctccggtgtgccgctgcgcggacacggtggagcggtgcgccagcacctgccagcactgcgagcaggtggaggagggcggcccccgccgctaccgctgcctcgacacgcaccgcggcgacccggggccaaggtgcggcgacggcgaggacgatggtggggagtggtcgccgacgccgaggctcgcgaggggccaccgtttctagctagctatgctatgctagccatagccagcggggactggtttctagcgcgcagcagggagctacgtacgtgtcttttattttgtgacgctgatccatcggtcagcctgtgctgattgacgcgaccgctacctagctagcttcgttcgtggtgtgtcctctcgtgacccacgagagtggagtagaataatcatgcattgttgtatgcaacgtgcttagcagcttcgtggttcgtgcgtgtgccctctcgtgacacacgcgttgagtaaaaataacgtggatggatcagcctactgctcctagccaggctgctagctagctagcagctgggagtagctgcgtgcccttgctgatctcgtgtctctgtcagacctgttgtaaaatctagttgtactgtgttataaattgtaatctagttgtactgtgtgctatcctgatcggatcaggctcctctgaataaataataaagtgggtatggcactatggcctggggctggccggctgggccccggggcagcgatgcatgcatgcatgcattaattgctgcatgggcgtgcctgtcccctgccccgcatcgt

SEQ ID NO: 114343 - DNA, 1384 bp, Zea Mays
aagactccaagggccaaggcagggcactgcactgcacgcatgcactgacctgacgacgacgcgcgccacagtccacagctcctcactcagacatggcgatgggcgccgcttccatcctactgatgatggtttcgctggagaccctgcttctcgccgccggcgccggcgccggcgggaccatccgtctgtccagcgatgtcggagaccttgtcacggcgatggcgagggcgagggcaagggcaaagcatcagcttcgcgacgaggagaggccgtggggggaatgctgcgacttggccgtatgcgtcaagacgtacccgctaacttgctcgtgcttcgatcgggttgagcgctgctccgacgcctgtaaggagtgcgtggaaacggaggactcgcgccacgtctgcgtcgacaggtaccgtggcgaccccgggcccaggtgccacgacgaggacgggaggagcggcggacccgctgacgacgacgctggtgggcaagcgacgccgacggcagtgatggcagatgacaagaaagcaggcggcggcgacgacgacaagaagaagaggccgtggaaatgctgcgacgtgcccatctgcaccaggtcctggcctccggtgtgccgctgcgcggacacggtggagcggtgcgccagcacctgccagcactgcgagcaggtggaggagggcggcccccgccgctaccgctgcctcgacacgcaccgcggcgacccggggccaaggtgcggcgacggcgaggacgatggtggggagtggtcgccgacgccgaggctcgcgaggggccaccgtttctagctagctatgctatgctagccatagccagcggggactggtttctagcgcgcagcagggagctacgtacgtgtcttttattttgtgacgctgatccatcggtcagcctgtgctgattgacgcgaccgctacctagctagcttcgttcgtggtgtgtcctctcgtgacccacgagagtggagtagaataatcatgcattgttgtatgcaacgtgcttagcagcttcgtggttcgtgcgtgtgccctctcgtgacacacgcgttgagtaaaaataacgtggatggatcagcctactgctcctagccaggctgctagctagctagcagctgggagtagctgcgtgcccttgctgatctcgtgtctctgtcagacctgttgtaaaatctagttgtactgtgttataaattgtaatctagttgtactgtgtgctatcctgatcggatcaggctcctctgaataaataataaagtgggtatggcactatggcctggggctggccggctgggccccggggcagcgatgcatgcatgcatgcattaattgctgcatgggcgtgcctgtcccctgccccgcatcgt

SEQ ID NO: 114344 - DNA, 1498 bp, Zea Mays
aagactccaagggccaaggcagggcactgcactgcacgcatgcactgacctgacgacgacgcgcgccacagtccacagctcctcactcagacatggcgatgggcgccgcttccatcctactgatgatggtttcgctggagaccctgcttctcgccgccggcgccggcgccggcgggaccatccgtctgtccagcgatgtcggaggtgagcgtgcatagctaggtatacttatgtcagtgattctggctacattattatatatatagtgccggcattatattagttagtttatatattgcgggcaggcgttgctgcagaccttgtcacggcgatggcgagggcgagggcaagggcaaagcatcagcttcgcgacgaggagaggccgtggggggaatgctgcgacttggccgtatgcgtcaagacgtacccgctaacttgctcgtgcttcgatcgggttgagcgctgctccgacgcctgtaaggagtgcgtggaaacggaggactcgcgccacgtctgcgtcgacaggtaccgtggcgaccccgggcccaggtgccacgacgaggacgggaggagcggcggtaagagctacatatatattacgtgcgttcgtgtgcatgcatgcatgttaattaatactgtacgagtactatatgcatacctgcctggtacatgactgcgtactcctatgcttgcatgtgagactgctaagaaaaatgctttttttccttctcaggacccgctgacgacgacgctggtgggcaagcgacgccgacggcagtgatggcagatgacaagaaagcaggcggcggcgacgacgacaagaagaagaggccgtggaaatgctgcgacgtgcccatctgcaccaggtcctggcctccggtgtgccgctgcgcggacacggtggagcggtgcgccagcacctgccagcactgcgagcaggtggaggagggcggcccccgccgctaccgctgcctcgacacgcaccgcggcgacccggggccaaggtgcggcgacggcgaggacgatggtggggagtggtcgccgacgccgaggctcgcgaggggccaccgtttctagctagctatgctatgctagccatagccagcggggactggtttctagcgcgcagcagggagctacgtacgtgtcttttattttgtgacgctgatccatcggtcagcctgtgctgattgacgcgaccgctacctagctagcttcgttcgtggtgtgtcctctcgtgacccacgagagtggagtagaataatcatgcattgttgtatgcaacgtgcttagcagcttcgtggttcgtgcgtgtgccctctcgtgacacacgcgttgagtaaaaataacgtggatggatcagcctactgctcctagccaggctgctagctagctagcagctgggagtagctgcgtgcccttgctgatctcgtgtctctgtcagacctgttgtaaaatctagttgtactgtgttataaattgtaatctagttgtactg

SEQ ID NO: 114345 - DNA, 606 bp, Zea Mays
agcacatgtgcatctcagcagcactagcagtgacaaactcgaagcttgccttcttgtttacaccctaaaactaaaactagagtcgtcggcggcaacaagcggtacgtacgtagaggatgaagagcaggagcagcactctgttggtgatcctagttctccaggcccttctgctctctgcggctgtggccaaaggacctgcagggccgaagaagcagtgctggtgcggcgagtgcaccagctggtcgggcgtgtggacctgcgacgacctcctcaccaagtgcgccgccacctgcaagaactgcgtccccgtgtccacgggcaagggcgccaccaagtacaggtgccgcgacttcctccccgaaaactgcgggtgcaagatccactaaactcatccaattccaccatggccacagcagccgatggatccttcttccatatgcatgttctcctccgtccgtccgcctagctttgctacaagcaggcgctaataagcaagctgctgttgttgttttgcatgtttgattaggtgaccctttccactcgagatggaataaaataaacgtcaggcgcacgtactgacgtgttattacgatatttctcccctaa

SEQ ID NO: 114346 - DNA, 734 bp, Zea Mays
atgcatgcactcagctccacgactcgatcgatctactggcagtgactcgcgtaacacgtgttttttcaaataaaaaaagatagatgccagtcccggtgcacatggcatgtgtcccggcccgatcgatcaggacacacccggcctatatattgagtacctagttacgtgtgcttctcagcagtgacgaactcgaagcttgcgttcttgtagtagaggtcggcagcaagcggtagagcgagaggtcgagaagatgaagagcagcactctgttggcgatcctagttctccaggcccttctggtctctgcggccgtggccaaaggacctgcagggccgaagaagcagtgctggtgcggcgagtgcaccagctggtcgggcgtgtggacctgcgacgacctcctcaccaagtgcgccgccacctgcaagaactgcgtccccgtgtccacgggcaagggcgccaccaagtacaggtgccgcgacttcctccccgaaaactgcgggtgcaagatccactaaactcatccaattccaccatggccacagcagccgatggatccttcttccatatgcatgttctcctccgtccgtccgcctagctttgctacaagcaggcgctaataagcaagctgctgttgttgttttgcatgtttgattaggtgaccctttccactcgagatggaataaaataaacgtcaggcgcacgtactgacgtgttattacgatatttctcccctaa

SEQ ID NO: 114347 - DNA, 679 bp, Zea Mays
agcacatgtgcatctcagcagcactagcagtgacaaactcgaagcttgccttcttgtttacaccctaaaactaaaactagagtcgtcggcggcaacaagcggtacgtacgtagaggatgaagagcaggagcagcactctgttggtgatcctagttctccaggcccttctgctctctgcggctgtggccaaaggacctgcaggtacgtcgtgcttgccgagatttcatctagttggctactagcttgattggacgaaataaagcgagtacgcatcatgctgctgccgcgcagggccgaagaagcagtgctggtgcggcgagtgcaccagctggtcgggcgtgtggacctgcgacgacctcctcaccaagtgcgccgccacctgcaagaactgcgtccccgtgtccacgggcaagggcgccaccaagtacaggtgccgcgacttcctccccgaaaactgcgggtgcaagatccactaaactcatccaattccaccatggccacagcagccgatggatccttcttccatatgcatgttctcctccgtccgtccgcctagctttgctacaagcaggcgctaataagcaagctgctgttgttgttttgcatgtttgattaggtgaccctttccactcgagatggaataaaataaacgtcaggcgcacgtactgacgtgttatta

SEQ ID NO: 114348 - DNA, 807 bp, Zea Mays
atgcatgcactcagctccacgactcgatcgatctactggcagtgactcgcgtaacacgtgttttttcaaataaaaaaagatagatgccagtcccggtgcacatggcatgtgtcccggcccgatcgatcaggacacacccggcctatatattgagtacctagttacgtgtgcttctcagcagtgacgaactcgaagcttgcgttcttgtagtagaggtcggcagcaagcggtagagcgagaggtcgagaagatgaagagcagcactctgttggcgatcctagttctccaggcccttctggtctctgcggccgtggccaaaggacctgcagggccgacgacgaagaagcagtgctggtgcggcgagtgcaccagctggtcgggcgtgtggacctgcgacgacctcctcaccaagtgcgccgccacctgcaagaactgcgtccccgtgtccacggacaagggcaccaccaagtacaggtgccgcgacttcctccccgaaaactgcggctgcaagatccactagactcatccacagcggcacagccgatggatccttccatgctcctccgtccgtccgccttgctataagcaggcaggcagccaccaataagctagctcttgctgttgttttgcatgtttgattgggtgtcccttcccagtcgagatggaataaaataaatgtcaggcgcacgtacagatgtgttattacgatatttctcccctacaaataaaaactcgatttgtggggttaacactgtcccctagtattacaattaaaaaaaagatgttatcacgcatgttaagaaaaca

SEQ ID NO: 114349 - DNA, 953 bp, Zea Mays
atgcatgcactcagctccacgactcgatcgatctactggcagtgactcgcgtaacacgtgttttttcaaataaaaaaagatagatgccagtcccggtgcacatggcatgtgtcccggcccgatcgatcaggacacacccggcctatatattgagtacctagttacgtgtgcttctcagcagtgacgaactcgaagcttgcgttcttgtagtagaggtcggcagcaagcggtagagcgagaggtcgagaagatgaagagcagcactctgttggcgatcctagttctccaggcccttctggtctctgcggccgtggccaaaggacctgcaggtacgtgtgcttgccgagatttcatctagctggctgctagcttgattggacgctgctagctcgtgtgtatacagttaatctgcgcgtatatatgtgcggggtgcatgtgacgaaataaagcgagtacgcatgatgctgccgcgcagggccgacgacgaagaagcagtgctggtgcggcgagtgcaccagctggtcgggcgtgtggacctgcgacgacctcctcaccaagtgcgccgccacctgcaagaactgcgtccccgtgtccacggacaagggcaccaccaagtacaggtgccgcgacttcctccccgaaaactgcggctgcaagatccactagactcatccacagcggcacagccgatggatccttccatgctcctccgtccgtccgccttgctataagcaggcaggcagccaccaataagctagctcttgctgttgttttgcatgtttgattgggtgtcccttcccagtcgagatggaataaaataaatgtcaggcgcacgtacagatgtgttattacgatatttctcccctacaaataaaaactcgatttgtggggttaacactgtcccctagtattacaattaaaaaaaagatgttatcacgcatgttaagaaaaca

SEQ ID NO: 114350 - DNA, 639 bp, Zea Mays
atctcagcagtgacgaactcgaagcttgcgttcttgtagtagaggtcggcagcaagcggtggtagagcgagaggtcgagaagatgaagagcagcactctgttggcgatcctagttctccaggcccttctggtctctgcggccgtggccaaaggacctgcagggccgacgacgaagaagcagtgctggtgcggcgagtgcaccagctggtcgggcgtgtggacctgcgacgacctcctcaccaagtgcgccgccacctgcaagaactgcgtccccgtgtccacggacaagggcaccaccaagtacaggtgccgcgacttcctccccgaaaactgcggctgcaagatccactagactcatccacagcggcacagccgatggatccttccatgctcctccgtccgtccgccttgctataagcaggcaggcagccaccaataagctagctcttgctgttgttttgcatgtttgattgggtgtcccttcccagtcgagatggaataaaataaatgtcaggcgcacgtacagatgtgttattacgatatttctcccctacaaataaaaactcgatttgtggggttaacactgtcccctagtattacaattaaaaaaaagatgttatcacgcatgttaagaaaaca

SEQ ID NO: 114351 - DNA, 2317 bp, Zea Mays
ctccctcgtctacatcctgtctctcctcgcactctccgttctcccgccgcttctggtctcggaggtcgcagcgttcctccacttgtccgttcgcctactcgcctgcggctccgtccacagtacgctacgcaaaagcgaggtggcgaccgctgttcgccggagcatctgatgcttatggagccccaaaatcttggaaacacagacgatcagtttgtctggccttggatgggtgttctagttaatgtgcctactgagtggaagaatgggcgccaagttggagagagtggaaatcggcttaaagagcaactttcacgcttctgccctcagaaggttattcctttatggagttatagaggtcacaccggcaatgctattgttgagtttgcaaaagactggactggcttcaaaaatgcgcttgcctttgaaaatcattttgaggccgagggatatggcaaaagggattggaagctgaagtacagtgggtcagagatgtttggatgggttgcaagagctgatgatcatagatgccaagggcctataggagactatttgcgaaaaaatggtgatctgaaaactgttggtgatcttgaaactgaagggacccgtaaaactgacaagcttgtggcaaatttagctagtcagattgaagtaaagaacaagcatgtgcaagaactggaatccaagtgcaatgagacgaccgcatcacttgacaggatgatggagcaaagggagcagatactccagaagtataatgaagaaattcgcaagatgcagcaaattgctcgtaggcattcgcagatgatcattgatgataataaaaaactccacaaagagttggagtccaagatgcaggaacttgacttaagatccaaggagcttgatgacatagctctgcaaagggattgtgacagaagaaatcttcagcaagagaaggaaaagaacaaaattaaaactaagcatctcatgatggcaacaatggagcaacagaaggccgacgagaatgtgcttaagcttgtcgaagaacataagagagagaaacaagctgctctagggaagattctcaggttacaacaacaattggacgccaaacagaagcttgaactggaagtacaaacgctggaaagcaagatgaaagttatgatgcatatgccaggtgatcaggattctgagtcaaagaagaagatggatgaacttgctgaggagctgaaggaaaaggtcgatgaattggaagcaatggagtctctgaaccaaactctgattatcaaggaaaggaagagcaacgatgagttgcaacacgctcggaaggagctgatagatggctttatggagcttgctgttgttggccgagctaacataggtataaagagaatgggtgagcttgatctcaaagcattcggaattgcttgcaagaaaaggttaccaaaggaggatgcagaagtcatttctgctaccctttgttcaaagtggcaagaagaaattagaaacccaagctggtacccttttaaggttaaggtggtggatgggaaagaaatggaaattctcaaagaggacgatgagatgctccaggagctgaaagaagagcacggtgaagaaatttatgggttggtaacaaaggccctgcttgagatcaatgagtacaaccctagtggccgctatcctgtaccagagctgtggaactacaaggagggccgtaaagcaacactgaaggaagccgtccagcacgtcatgaggcagtggaagtctcacaagagaaagcgctgagcaaattggttgctgggttcttctgcctgccccctattaactcgatagtcgatactgggtagcattaggtcgtagcttttaattaactcctaatgatgagtgggtaacagtggctggctaatattaacgttaagttgccggaggttcggtctggattcttttgttggtagtgtatacgaatgctgttagtcggtctggattctcctgtcgttgcatgggcatttgtatgtccaggatattgaccgcttcatggatcagccgtcaaactttggcaaaggagaggcatgaacgaccttccagttcctccatgatacgtagacgtgatgggcaattcttggttgatatttggccgtgcagcaccattgagcggctataacttgtacctgatgactctgggtatggattactactaaacttccatgtgcctaaaatgtgttgcagttataaattatgattttgtcaagtagaatctaatattttacaataccgatcattatgatcttgcagtctgatataagcgctattttttaaaagtgtctaactcaaggctccgatg

SEQ ID NO: 114352 - DNA, 2361 bp, Zea Mays
cacagtgctgaatggtccatcgttgccccttgccagcagcaccgaagtccgagctctccaccgaggaaacctccccccgctctctctctctctctcctcaggtcatcagtcccctatcctcctcctcctcttcttccccacatcgtcagtgaggtcctcggggttgctgcggcaataataatgggggagaggaggaggtttcctgctagcgctcgcttgctcgccctcgccgtggcgatggtgttgcaggcggcagcggtggtgctcgtcctgggcgaggcgagtgacggcggggccatgcttgtgggcccgcggcagctggagaagttcgtggacgagctgccggacatgccgaggctgcgcggctacggcgtcacggagggcggcgcgctcgtcgccggcaacctcaccatcggcatgtacgacaccagctggaaattccaccgcgaccttccggcgacgcgtgtcttcgcctacggaaccagcaaggagaccgccacggtgccgggccccaccatcgaggccatgcggggcgtccccacgcacgtgacgtgggcgaaccacctcccggcgcgccacttcctcccgtgggaccccacgctgacgaccgccgtggcgcccggcggccgcggcgtccccaccgtggtccacctgcacggcggcgtgcagcagtcctcctccgacggccactcgctggcctggttcaccagcgggttcgccgctacgggcccgcgcttctcgccgccgccctacacgtacccgaaccggcagccgcccgggaacctgtggtaccacgaccacgccatgggcctcacgcgcgtcaacatcctcgcggggctcatgggcgcgtaccgcgtcgccagccccgccgaggaaggcccgatgaacctgccccgcggggaggcgttcgaccggaacctcgtgctgttcgaccgcgacttccgcgccgccgacggggcgctcttcatgaaccgcacgggcaacaaccccggcgtgcacccgcagtggaacccggagtacttcggcgcagtcgtcgtcgtcaacggcaaggcgtggccgtacctccgcgtgcgccgccgccgctaccgcttccgcatcctcaacgccagcaacgcgcgcttcttccggctgtcgctctccgcggggctccgcttcgtgcacgtcgcgtccgactcggtgtacctcgccaggccggtagcgaccgagaggttcgtcgtggcgccgtccgagatcgccgacgtcgtcgtcgacttcgcggagtcggccgccggcgcggcggtcgtcctcagcgacgacgccccggccccgtaccccggcgaccccggcgagaaggcggagaccatcgccgtgatgaagttcgtggtcgagggcgccgcggaggacccggacacgtcgaccgtgccggcgacgctgatgccgcactaccccaggccggacgcgcgcgaggcggccacggcgcgacacatcaccatgtacgagtacaccagggccggcacggacgagccgacgcacctgtacctgaacgcgcgctcgtacatggacccggtgacggagacgcccaaggaaggcacgtcggaggtctgggaggtgatcaacctcacggacgacaaccatccgctgcacgtgcacctggcggtgttcgcggtgctggagcagcggtcgctgcgccgcgtggacgagttcagggactgcatgaagcgccggaacgacgcgcgcgcgtgcggggtcgaccgccacctggccggcgggcggaggcacgtcgtgccgcggcaggagcgcggctggaagaacgtcttcaaggtgcggcccagcgcggtaaccaggatcctcgtgcgcttcaagccgctcacagacgccgcgtcgccggaggagagccgcttccccttcgacgtcaccactggtccgggttacgtgtaccattgccacattttggaccacgaggacaacgagatgatgaggccgatgaagattgtgcgttgaacggtttccaggaagaaaaacatatattctatgaatgattccgtatcgcaaaagaaacgacatgtttactgtgtctttcccattaatgatttaagcaggaagaacttttagatgattgaacttttcagttaagatagcatttgccgagtaacaacatatatcctaaatgtttgttaagatagcatttgtcgaagcataatttactcataggttgtttatagataatatttacacgtttgtcccccctactattcctatttgctaccacattttcatgacatggggaggacaatgctatatttaaggcacatcatttttcattttatagtcaactgtaatctcgactctcgatagataagactatttgcagtggttccttct

SEQ ID NO: 114353 - DNA, 327 bp, Zea Mays
accatgaggaacttgacgaccaccgtggtcatgaaccccggcgcgatcttgacgacgttcttccacgtcctctcgtgctccggcacggccacctcctcccccacggcgtgccggcccacgtcgcagcggaccgcgtcgttgagcctctccatgcagtgcttgaactcctccaggccgtcgagctcccgcgcgcgcacggcttggaacgtggccaggtggaggtgcagcgggtggttgtcctgcgtgaggttgatcacctcccacacctccgtggagcccggccgaggcgtctccgtcgccgggtcctccagccgcttcccgttgatg

SEQ ID NO: 114354 - DNA, 2231 bp, Zea Mays
aactccaccattcccttccctctcgcgagctcagatcacgcgaagcaaggaaaaaagaaaaatggcgcagctggtggagacgtacgcgtgctcgccggccacggaacgcggccgtggaatcctcctggccggggaccccaagacagacacgatcgcctactgcaccggccgcagcgttatcatccgccgcctcgatgcgcctctcgacgcttgggcctaccccgaccacgcctaccccacgaccgtcgcccgcttctcccccaacggcgagtgggtcgcctccgccgacgcctccggctgcgtccgcgtctggggccgctacggtgaccgcgctctcaaggccgagtttcggcccctctcgggacgcgtcgacgacctccgctggtcccccgacggcctacgcatcgtcgtctctggggacggcaagggcaagtccttcgtccgcgcatttgtgtgggactctggcagcactgttggtgaatttgatgggcactcaaagagggttctgagctgtgacttcaaaccaacacgtccatttcgcattgtgacatgtggtgaagattttctggctaacttctatgaaggaccaccattcaaatttaagcattccataagggatcactcaaattttgttaactgtatccggtatgctcctgatggtagtaagtttatcactgtgagttctgataagaagggtttgatatatgatggcaaaactggagaaaaaataggagaactttccactgaaggcaatcatacagggagcatatatgctgttagctggagtcctgacagtaaacaggttctaacagtttctgctgataaatctgcaaaagtatgggatatcatggaagatgcaagtgggaaattgaatcgaactttgtcttgccctggtataggaggtgtggatgatatgcttgttggttgtctctggcagaatgaccacctcgtgacagtctctcttggtgggacatttaatgtgttctctgcaagcaacccagaccaagaaccagttacatttgcaggacatttgaagactgttagttctttggtcttctttcctcaaagtagcccaagaactatactatctactagctatgatggtgtcatcatgaggtggatacagggtgttggatttggtggcagattggtgcgcagaaacaacactcaaataaaatgttttgctgcagtagaagaagagcttgttacctcaggttatgataataaggtcttcagaattcctcttaatggaaaccagtgtggagatgctgagtcagttgatataggcggtcagccaaatgctttgaaccttgcaattcagaaacctgaatttgcactgatcactactgattccgggattgtgttgctgcacaattcaaaagtcatttctacaacaaaagttaactatgccatcacgtcatcttcagtgtctcctgatggcacttatgctgtcgtgggtgctcaagatgggaaactgcgaatctattccatcagtggagatacactcacagaagaagctctgcttgagaagcaccggggtgctatcacttccttacattattcgccagatgtttctatgtttgcttctgctgataccaacagggaagctgttgtgtgggatcgagcaagtagagaggtcaagctgaagaacatgttgtaccacacagccaggataaactccctggcttggtcacctgacagtcgattggttgccactggctcactggacacctgtgcaattgtctacgagatagacaagccggtagccagtcgcgtcaccatcaagggagcccatcttggtggggttcatgggttaaccttcctcgacaatgatattctggtgactgccggtgaagatgcttgcattcgtgtttggaaggtggtgcagcaataggccgctcttcattctggtgtgcaatgagaatgtctgtgctgttgattggaataaactttttttttgttggtttggtggctgttactcacggggtcatagcatggtttgttgctttatctgcgatttgtgctctaaatttcctttacaattctttttgagctgtattatttttgcttgttttttttcaggaagactcctttgtaagtggatccggtatccctgcatctgattttgttaggagttgtgagaatatagggatactgttgttgctttttctaccccaggtccctaaaatagtcgttaataactgacttcgctgtggttaagtttttacgaa

SEQ ID NO: 114355 - DNA, 1851 bp, Zea Mays
ttctccccatcagccagcagtctctctctctcacacacacacaagcagcgacttgctcacagtagtgctccccggacagaatgaccaaagacgaggagttcaagctggtcaagatccagaaccatgcgctgaaggtgaacatacactgcgacgggtgcaagcacaaggtcaagaagcttcttcagaagatcgaaggcgtgtactcggtggccattgatgtggacaaccacaaggtctcggtgacgggcgatgtggactcggagaccctgatcaggaagctcaccaggggcggcaagcacgcggagctgtggtcgcagcccaagggcggcggcaaccagggccacaagggcaataatggccagcagcagaaacagcagcagccgcagaaccagaaccagaaccaccagcagaagcagaagcaaggtgccaatctcagcaaggatgggcacaacaagaacagcaacggcggccagaaggaccaggggaagcaaggaggaggaggaggggctgggggcctcatgcagggcctcaaggcgttcaagaaccagcacggcaacaagcaccagctccctgagctcagctcggacgacgatgacctgtatgacgacgacgacgaggaggagtttgacgacgactacgaggaggagctccgcttcctcggggacaagatgagccagctcgggttccacggcaacaaccagaacaagaacgggaacaacgctgctgtcaacagtaaccacagcaacggaaatggcaagaagggtaacggaggtggtggagccaacaatcatcaccagaacaacaaccaccaccaccaccagaaccagaagaacgtaaacgtgatcaacatggcagcagcaaatgccaagatgggcggcggcggcggaggaggagtccagaaccaccagaagaacgctgctgcgatcaacatggccgcggcggcggcggcaaacgccaagatggctaacggcgcccagaggaacgctggtgccatgggcggcatgctgggcctgagccatggcctgggagccgccgccggtgctgctcctcctgggttccaaggctacgctgcaggcttcaaccacccgtcctcctacgctgctgccggctacggaggaggtctccagcaacagcatctccagcatcagcagcagcagcagcagagcaacaacctcatggcgagcatgcaggggtaccatcatcaccaccctgcggcgacggcagcgatgatgagcaatctgaggggtctgaacggcaacgtgatgatgatgcaccagcagccccagcagcatcagcagccgcagatgatgtaccactcctccccgcagatcagcccttacactggctactacaacccttacaactactactaccacccccaccctggcagcgctggctacccgcccagcaatggggatgtggagaccatgttcagtgacgagaacaccaagggctgtgttgtcatgtaaggggatgcagctacaatcctatgatctagaggttgtaatggtggcgtggtgatgcaatcctgctggtaccttattttccttttctttctttctttctttctttttttttcctttcattattttactgctattttatggttttttttcgcatgtatcaagaagagtgaatcatggtgttgactttagatgtgttgttgaaagtagggggggcaacttgagagaaggtgatcagacagttgtaatgtaataccttttaggcttttactgcctagtgcttttcctgactagactgggctcatgcctaaggttcccaaagcaagaagtcttgccctgacttgctttctataatttgtatattatataatctgggtgtttgtggctt

SEQ ID NO: 114356 - DNA, 786 bp, Zea Mays
atggatatgatagtactagccattaccaactcggtcgtttcgtcttctctccgatatcttcgccaggctcagagcggagttgtttcagttcagccaccgtctacggcgctgcagacacgtatggagaacgcgaacgagtccgaggaggaggcacagcgacgacgagtgcaggaggaagaagacagtagcagcagggcggcgacaaggtgggtggcggccaccgctgtcgagatcgaactggaggttttggagtgccccgtctgctaccggcctctcaagcctccggtgttccagagactagaaacacagacaaacacctcggtttcgcacggagcgttagcattatcattcgtcccgtggacatacgcagtgtgcagttgggcatgcggtatgctcgtgttgctgcgccaagctcgccggcagaaactgccacacgtgcgggcgtgcggcggcgccaccggcttcagccgctgcttcgcgctggagcacgtcgtggagtccgtccgggtcccgtgcgccaacgcccggcgcgggtgccccgccaagacggcgtaccacggcaaggaagagcacgagaaggcatgcccgcacgccgagggcgaggccgacgccggccctgccattccacagcgcccagctgagcaaggtggaaacaggggcagtagagcccgaaacttggtcgtcgtagtactagtgcttgccagtattccagttgcgatccccgctgtccgtggcatcgtcgagcattttggcctaccagatccttgctcgtgcgtggcaacatga

SEQ ID NO: 114357 - DNA, 884 bp, Zea Mays
acgacggttctatttcggctttcttccacctcgggatagaacagagagaatggaggacgggtaggagaggatggccatggccatggccctgctcgaccgagccaagggagtcgtgcgaaggtggggctgcgcgcgttgaggaagctcgctggcgggcgagatctgcaggggctcaccggggaagagcagaggaggccggacgagcgagcgtggctggaaagctgagggcggacgtgcaaggagcagctctacagcgcggccccgagcgcagcggctgctcccaacctccatgtcggaccgaggcgcgggggtctgcacgccgaggcgctcagcggctccaggccacgctgccgcgccggccaggagcttggccacggactcgcctgcgcgggcgctggccaccggtgtcggctcagccggagacgggactagggacgcgtgggagaggcccagccaccgtgcctgccgtgggcagcaccggccaacgagcctgcgagctgtgtaaacacgcaagcagggcctgcacgtggaggattgtacctgagcaatcgtcgatcgcgcgcgtcgcttcaggaacgggcaccggggggcttcggaggacgtcactgtgtgcttcagggacggtgattgccgacagcggttttggtcgatctggttgccgggtatagcggagggagagagggaagggagattggctgcgattgagaaagggggaggctggtaactgaaggggatccccgctcgcttgatcggatatagggagttacatatctgcgtagagggcgaggaaattttgtgagggaataggaaaactgcaaagtgacactggggtggacgaggtaattgtgttaagcgaataagatgttttgcggagcttagggaaa

SEQ ID NO: 114358 - DNA, 1400 bp, Zea Mays
actcagtggtagcattaaattgcagtgtttaaattttttgtcgtctcctggcttcgcgtatcttcgtcttcactcccactataaattaactcctacgtcgtctgctggcttcgtctctcttcaccatttggcttcgtctctcttcaccgttggtgccaagttcacaagtatcagatctggtgataaatgaccgggaaaaagaccacggcctcctctgccggccgcactcgaaagaaggccaaggtggtgttggaggatgaggaagaggcagggttggaagatgaggaagaggcgactgtgacactatccgtggagaaggacgcactggagtgtgacatctgctgcctacccttccagtccgaagtttttatgtgcaagaacggacattctgtatgtgcaaaatgctgcatccgcacgaacggtaagtgctggacctgctccgagcgcattggcgacatacgttgccgtccgctcgagaagctcctggcggcggcgaccacctcctgcatgttcaagagcaacggctgctacgacgtcatcagctacctggagaaggtgacccacgaggagacatgccagcgcgcgccgtacaagtgccccgtccacggctgcgcctatagcggcctgcggctcggctaccacgtcgcacaggaccacggccacgacgacgacggcctcgcctccgtcgtctttatctacggcaaggcggtggcgaccgtgcgcaaggacgagccgttccgcgtcctgctgcagcgcaacacggagcgcgtgttcctgctgctcaacggccacgatttgctacaggggcgctcgctgtccctgctctgccttggcccgcgcttccaggatggcgtggaggtggagctgaagtataagatggaggtgagcggcggtgcgccgggagcgctcacgctgtcggcgtctggcaccataccgttcgcccggcggctcgatgggttccaggccaaagggtttctcttcgtgccggatgcatactggggctccgccggctcgatttccgtcaccgtcagaatttacgtctgacgtcgcctcgtgctagctggtgtggtgtggataggttgattcctactggtcaaccgttcgttcgtctcgttggtacttaccctggttcagtggttgtttatgcactctacgtgctgatgctagtacttttgttaatcgcaacaacgtatgctagtacttttgttaatcgcaacaacgtatttcctgtcgttttacattctatgttattccctgggacctactaatgctaaaacgtacagttgcctgaattttagatttctttcaagtgctttagtttgttgtggtttatacaagtactggtcagatgcatgaattgtcacggtttctaaacattaataattagactttgatttagt

SEQ ID NO: 114359 - DNA, 1206 bp, Zea Mays
catttggcttcgtctctcttcaccgttggtgccaagttcacaagtatcagatctgtcgaatagtcctctctgtttttatttaccttgcgttctaggtgataaatgaccgggaaaaagaccacggcctcctctgccggccgcactcgaaagaaggccaaggtggtgttggaggatgaggaagaggcagggttggaagatgaggaagaggcgactgtgacactatccgtggagaaggacgcactggagtgtgacatctgctgcctacccttccagtccgaagtttttatgtgcaagaacggacattctgtatgtgcaaaatgctgcatccgcacgaacggtaagtgctggacctgctccgagcgcattggcgacatacgttgccgtccgctcgagaagctcctggcggcggcgaccacctcctgcatgttcaagagcaacggctgctacgacgtcatcagctacctggagaaggtgacccacgaggagacatgccagcgcgcgccgtacaagtgccccgtccacggctgcgcctatagcggcctgcggctcggctaccacgtcgcacaggaccacggccacgacgacgacggcctcgcctccgtcgtctttatctacggcaaggcggtggcgaccgtgcgcaaggacgagccgttccgcgtcctgctgcagcgcaacacggagcgcgtgttcctgctgctcaacggccacgatttgctacaggggcgctcgctgtccctgctctgccttggcccgcgcttccaggatggcgtggaggtggagctgaagtataagatggaggtgagcggcggtgcgccgggagcgctcacgctgtcggcgtctggcaccataccgttcgcccggcggctcgatgggttccaggccaaagggtttctcttcgtgccggatgcatactggggctccgccggctcgatttccgtcaccgtcagaatttacgtctgacgtcgcctcgtgctagctggtgtggtgtggataggttgattcctactggtcaaccgttcgttcgtctcgttggtacttaccctggttcagtggttgtttatgcactctacgtgctgatgctagtacttttgttaatcgcaacaacgtatgctagtacttttgttaatcgcaacaacgtatttcctgtcgttttacattctatgttattccctgggacctactaatgctaaaacgtacagttgcctg

SEQ ID NO: 114360 - DNA, 1210 bp, Zea Mays
gtctctcttcaccatttggcttcgtctctcttcaccgttggtgccaagttcacaagtatcagatctgtcctctctgtttttatttaccttgcgttctaggtgataaatgaccgggaaaaagaccacggcctcctctgccggccgcactcgaaagaaggccaaggtggtgttggaggatgaggaagaggcagggttggaagatgaggaagaggcgactgtgacactatccgtggagaaggacgcactggagtgtgacatctgctgcctacccttccagtccgaagtttttatgtgcaagaacggacattctgtatgtgcaaaatgctgcatccgcacgaacggtaagtgctggacctgctccgagcgcattggcgacatacgttgccgtccgctcgagaagctcctggcggcggcgaccacctcctgcatgttcaagagcaacggctgctacgacgtcatcagctacctggagaaggtgacccacgaggagacatgccagcgcgcgccgtacaagtgccccgtccacggctgcgcctatagcggcctgcggctcggctaccacgtcgcacaggaccacggccacgacgacgacggcctcgcctccgtcgtctttatctacggcaaggcggtggcgaccgtgcgcaaggacgagccgttccgcgtcctgctgcagcgcaacacggagcgcgtgttcctgctgctcaacggccacgatttgctacaggggcgctcgctgtccctgctctgccttggcccgcgcttccaggatggcgtggaggtggagctgaagtataagatggaggtgagcggcggtgcgccgggagcgctcacgctgtcggcgtctggcaccataccgttcgcccggcggctcgatgggttccaggccaaagggtttctcttcgtgccggatgcatactggggctccgccggctcgatttccgtcaccgtcagaatttacgtctgacgtcgcctcgtgctagctggtgtggtgtggataggttgattcctactggtcaaccgttcgttcgtctcgttggtacttaccctggttcagtggttgtttatgcactctacgtgctgatgctagtacttttgttaatcgcaacaacgtatgctagtacttttgttaatcgcaacaacgtatttcctgtcgttttacattctatgttattccctgggacctactaatgctaaaacgtacagttgcctg

SEQ ID NO: 114361 - DNA, 1442 bp, Zea Mays
actcagtggtagcattaaattgcagtgtttaaattttttgtcgtctcctggcttcgcgtatcttcgtcttcactcccactataaattaactcctacgtcgtctgctggcttcgtctctcttcaccatttggcttcgtctctcttcaccgttggtgccaagttcacaagtatcagatctggtaaacacctttccaagttctttctcaagtatatgtacattacacaccatgttctttaaaacacaccatgttctttaaagatgctagtttcttactgcttgatatatattagtcgaatagtcctctctgtttttatttaccttgcgttctaggtgataaatgaccgggaaaaagaccacggcctcctctgccggccgcactcgaaagaaggccaaggtggtgttggaggatgaggaagaggcagggttggaagatgaggaagaggcgactgtgacactatccgtggagaaggacgcactggagtgtgacatctgctgcctacccttccagtccgaagtttttatgtgcaagaacggacattctgtatgtgcaaaatgctgcatccgcacgaacggtaagtgctggacctgctccgagcgcattggcgacatacgttgccgtccgctcgagaagctcctggcggcggcgaccacctcctgcatgttcaagagcaacggctgctacgacgtcatcagctacctggagaaggtgacccacgaggagacatgccagcgcgcgccgtacaagtgccccgtccacggctgcgcctatagcggcctgcggctcggctaccacgtcgcacaggaccacggccacgacgacgacggcctcgcctccgtcgtctttatctacggcaaggcggtggcgaccgtgcgcaaggacgagccgttccgcgtcctgctgcagcgcaacacggagcgcgtgttcctgctgctcaacggccacgatttgctacaggggcgctcgctgtccctgctctgccttggcccgcgcttccaggatggcgtggaggtggagctgaagtataagatggaggtgagcggcggtgcgccgggagcgctcacgctgtcggcgtctggcaccataccgttcgcccggcggctcgatgggttccaggccaaagggtttctcttcgtgccggatgcatactggggctccgccggctcgatttccgtcaccgtcagaatttacgtctgacgtcgcctcgtgctagctggtgtggtgtggataggttgattcctactggtcaaccgttcgttcgtctcgttggtacttaccctggttcagtggttgtttatgcactctacgtgctgatgctagtacttttgttaatcgcaacaacgtatgctagtacttttgttaatcgcaacaacgtatttcctgtcgttttacattctatgttattccctgggacctactaatgctaaaacgtacagttgcctg

SEQ ID NO: 114362 - DNA, 1331 bp, Zea Mays
catttggcttcgtctctcttcaccgttggtgccaagttcacaagtatcagatctggtaaacacctttccaagttctttctcaagtatatgtacattacacaccatgttctttaaaacacaccatgttctttaaagatgctagtttcttactgcttgatatatattagtcgaatagtcctctctgtttttatttaccttgcgttctaggtgataaatgaccgggaaaaagaccacggcctcctctgccggccgcactcgaaagaaggccaaggtggtgttggaggatgaggaagaggcagggttggaagatgaggaagaggcgactgtgacactatccgtggagaaggacgcactggagtgtgacatctgctgcctacccttccagtccgaagtttttatggtaagtcagattacaatacatgtatatatacagtacatattgatcggtaggctcgctccaacatgatgctctgctctgtgtaaaatcagtgcaagaacggacattctgtatgtgcaaaatgctgcatccgcacgaacggtaagtgctggacctgctccgagcgcattggcgacatacgttgccgtccgctcgagaagctcctggcggcggcgaccacctcctgcatgttcaagagcaacggctgctacgacgtcatcagctacctggagaaggtgacccacgaggagacatgccagcgcgcgccgtacaagtgccccgtccacggctgcgcctatagcggcctgcggctcggctaccacgtcgcacaggaccacggccacgacgacgacggcctcgcctccgtcgtctttatctacggcaaggcggtggcgaccgtgcgcaaggacgagccgttccgcgtcctgctgcagcgcaacacggagcgcgtgttcctgctgctcaacggccacgatttgctacaggggcgctcgctgtccctgctctgccttggcccgcgcttccaggatggcgtggaggtggagctgaagtataagatggaggtgagcggcggtgcgccgggagcgctcacgctgtcggcgtctggcaccataccgttcgcccggcggctcgatgggttccaggccaaagggtttctcttcgtgccggatgcatactggggctccgccggctcgatttccgtcaccgtcagaatttacgtctgacgtcgcctcgtgctagctggtgtggtgtggataggttgattcctactggtcaaccgttcgttcgtctcgttggtacttaccctggttcagtggttgtttatgcactctacgtgctgatgctagtacttttgttaatcgcaacaacgtatgctagtacttttgttaatcgc

SEQ ID NO: 114363 - DNA, 1080 bp, Zea Mays
gtctctcttcaccatttggcttcgtctctcttcaccgttggtgccaagttcacaagtatcagatctgaccacggcctcctctgccggccgcactcgaaagaaggccaaggtggtgttggaggatgaggaagaggcagggttggaagatgaggaagaggcgactgtgacactatccgtggagaaggacgcactggagtgtgacatctgctgcctacccttccagtccgaagtttttatgtgcaagaacggacattctgtatgtgcaaaatgctgcatccgcacgaacggtaagtgctggacctgctccgagcgcattggcgacatacgttgccgtccgctcgagaagctcctggcggcggcgaccacctcctgcatgttcaagagcaacggctgctacgacgtcatcagctacctggagaaggtgacccacgaggagacatgccagcgcgcgccgtacaagtgccccgtccacggctgcgcctatagcggcctgcggctcggctaccacgtcgcacaggaccacggccacgacgacgacggcctcgcctccgtcgtctttatctacggcaaggcggtggcgaccgtgcgcaaggacgagccgttccgcgtcctgctgcagcgcaacacggagcgcgtgttcctgctgctcaacggccacgatttgctacaggggcgctcgctgtccctgctctgccttggcccgcgcttccaggatggcgtggaggtggagctgaagtataagatggaggtgagcggcggtgcgccgggagcgctcacgctgtcggcgtctggcaccataccgttcgcccggcggctcgatgggttccaggccaaagggtttctcttcgtgccggatgcatactggggctccgccggctcgatttccgtcaccgtcagaatttacgtctgacgtcgcctcgtgctagctggtgtggtgtggataggttgattcctactggtcaaccgttcgttcgtctcgttggtacttaccctggttcagtggttgtttatgcactctacgtgctgatgctagtacttttgttaatcgcaacaacgtatgctagtacttttgttaatcgc

SEQ ID NO: 114364 - DNA, 431 bp, Zea Mays
ataaaagtctcatgaccaaaggtgatggagcctcttctatgcttgcaaaaaaagaaacagtaccagtatacaaatgagagtagtatgttagcatagacaacaccaaagagcacaatgtaatatcaggatcataaaacaaataacattttttgaaaagagagaaacaataacatacaatatgtttattttatctttccctctgatcacgacaagcaggtactaatagcgtgtttggtctgatggtttggctcatccatcgtggtctggctccggatggagcggtcctgcactttattgcggagtgagctgatctcacatgttagtttgttattagaacaacgcagtgacgaacgacatcgttccgcgattcaaaccaaatgatgatgtaggctcggacgcaggtctgaatgacttcggaagccgcccaacct

SEQ ID NO: 114365 - DNA, 1957 bp, Zea Mays
aagaaacgcacgcgagccgcgagcagaatacagcagcacgggcgccagcgccatcctgatctcgctatctcccttctcccccgatgcgatctcgccaaaccctaatcccgccgcccgccgcgcggccgtcgcaggagccctagccccgaatgtggcggtgacgcgcgcggcgtgtcaccaccaccaccaactcagcgagcgtgcgcgcccgccacgccacgccacgccaccgcccgtcgtgccggccgacaccgagcagccatgggcgccgccgacaagtggctgctcccgctcgtctccgtctccgtcgtctcgctcctgctcttcctctccgcgctctcgggcttctccgcctcctccgcgctcttcgcgcgcctcccgccgccctcctacgtgcgccggggcgccgccgcgccgccctccttcgcctacctgctcgcgggcggccgaggggacggcaggaagctcctgcggctgctcctcgccgtctaccaccccaggaaccgctacctgctccacctctccgccgacgcgccggattccgagcgcgccgagctcgccgcggccgccgcgcgcgccgctcccgccgcgcgcgccttcgggaacgttgatgtcgtgggcaggcccaccgcgggcaccccaatgggctcctccggccttgccgccacgctccgcgccgccgccgcgatgctccggctcgatgcggagtgggactggttcatcacgcttagcgccgccgactacccgcttctcacccaggacgacttgattcatgttttctcctctgttccaaggcacctcaactttatagatcacaccagtgacattggatggaaagaatctcagagagtgcaaccggttatagtagatgctggaatatacttggcagggaggaaccagttcttccaagccacagagaaacgtgacactcctgatggtttcaaatttttcacaggttctccatgggtcattttaaacagacactttgttgagtattgtgtttttggttgggagaatctccctaggacactcctcatgtacttcacaaatgtgatgctacctctagagggttatttccattcggttgcatgcaactcggacttccacaatttcacagtgaacaacgacttgcggtatgtggtgtgggacgatccacctcagatggagccccatttcctaaatgttacacattatgatgagctagtagggactggggttccttttgcccggaagtttaaggaggatgaacccctgttggacatgattgatgataaagtgcttcgacgctggcgtcacaggcctgttcctggcgcatggtgcacaggcaaaaggaggtggttcagtgatccttgctcccagtggagcaacgtcaacattgtaagacccggtcctcaagctgagaagttccgaacatatataaaccagattatggaagaatcaaagtcaagcaacaactcttgcaagcaatagcggtagaatccgagcacgaggcttcacttcccgcagttgaagcgttgagcttgtctcattttgcgccgaggagctctccatgtctcgagcacttcctggcatctgcttcaggagcaagcatttttgcacctgttgtatgaactgaacacacggccaaggtgatagatggatttattctttccagaatttttttgggtgacatggcttcaagggcttagtgcacactagtgttgttggaagccaagaaagcctactgtgggaatacagaagctaatagtcattgtaattagtagcagcgagttgaatggcctgtgcctttgttcatagatctgatggaattgttggtgcttccatacaaaattgcgaaaatgaagagcgggggaatgttatcgattggttggtcacggtggtggttgttatggacatatggtcaatacaatgcatactgatcctcccccctggacacgcagttattctcataatctca

SEQ ID NO: 114366 - DNA, 802 bp, Zea Mays
gcgtcgtatcgtattccatcctttgcttctattccacttcaaatcacaggcggccgcgcatccatccactccccccctctttcctgtcgcatcgcattgcatgctttgctccccacgcaatcaatcggagatcgatctcgtttccctctcttccttctcctatacaataccctgctcacttcttgaattgctccgcgccgaaacgcgcgcatgcaccccatgaacatgacgagctgcgaattcgccgccgtccgcctccctggccacccggcgctccggccgagccgcagtcgaccatctccgacgcccccgccgccacccgccgtagccaataagaaaccagctgcctcctccgtgcgttgcacgtcgtcccgccgcgacgatgcggagtttggctgcaacggcggcggcgggcgtatagtggacgaggggatggtcgtcctgcgccgacggatccacgagatggaagccgcggagcgcggctgggatcctcccgaggagtgggcggcgtgggagaaggaatggtacgccacgtacgacgccgacgtctgccagcagctcgtcggcgtcctccaggcgttcctcgtcaactcccggccaggcgtcggcgtgggcctcgtcgccgtgctcatgctcgcagttccggcctccgcctttgtcctcgtctcactcctcctcgacgcttcacgggcggtcgtctccaatctgcaccaccactgatcaaaacgacaacgtgtgcatgacattctttcgttccttaacgcgccatatacatacctaatgattctgaatttctgatgcg

SEQ ID NO: 114367 - DNA, 387 bp, Zea Mays
taatagaagactgtagattgcaggctcttgatagtgctgctcagtcttgcaaactctatggttcaaaagaagatgacgatcaagctctgaaatcactctcgaacattgacatgaatgaacatcagtcaaaagaaacatcagtgtctcttatacttgatagcttggaagatctgtcagagtcagaattgtctactattagaaaacagctgattgaggaattttcagcagatgacatttgtctgggatctcattttactgaaacaccttcgaaatctgcagcacaaaatggaaaactgcaccacaaatctatggaggttattccattcggatttgtttttgaagatgatactctcgttgaagcatctgacagcttagtagaacctcact

SEQ ID NO: 114368 - DNA, 2191 bp, Zea Mays
gggtttggtacaagtggagtggcccatatgttgtgcggaggagcactggtgaagcctaagaacccttatgtcgatgggcgtggtctcaagggaggtgttgtcagcatgcgagaggctctgcttcatttgcccgtcactgcggacgaggtcccgccatccggtcaagcgctacaagaaattgcttgcagaaatcttccctcggacacaggatgaagaaccaaatgatcgcaagatagggaaactgtgcgaatatatttcaaggaatcctatgcgtgttccaaagattacattttacttagagcaaaagtgctacaaggaattaagggctgagcgctatggttcagtgaaagttgttattgcaatctatcgaaaggtgatatgttcttgtcaggagcaattgccactttttgccaacagcttgctaacaattgtagagacattattggagcaaaatagacaggatgacttgcggaaattggcatgtcaaacactttttgactttataaataatcaggttgacagtacttacatgttcaatttagaaaaccagattcctaaactatgtcatctggcccaagagatgggtgaaaaggagaagatatgcattcttcatgcagctgggctacaagctctttcatctatgatttggtttatgggtgagcattcccatatgtctgcagagcttgataatgttgtttctgcagttctggaaaattatgagagcccatatgcaaatgctgataatgatgccgctattgaggatagacgaattcagtgggtggatgaagtgctcaaagctgaaggtcatgaacctcctgctgttaccattttgacaagggttccttcatggaaagttattagaactgttcacggtgaattaagtttgacaatagaagaatcaacaagtccaaatttttggtcagggatttgtctacataaccttgctagaatatccagggaagcaacaacagtgcgacgagttctggaagttatatttcgttattttgataataacaatctgtggtcaccttctaaaggatttgcactgtgtgtcctactggatatgcagattgtcatggagaaatctggacagaatgctcatatattgttgtctatgttagtcaagcatcttgaacacaagaatgtattgaaacaaccagatatgaatctagatatcattgaagttacttcacgccttgctgggcactccaaagctcagtcttctacagcactaatggcttcaataagtgatatggtcaggcatatgggtaaaagcatgcaatccttggccagcgatgcaggtcctggagacaacatggtcaaatggaatagcagatatgggaaagctgtagatgaatgtcttgttcaattgtctagaaaggtcggtgatgctggacctatccttgatacattagctgtagtgctggaaaacatttcaagttctatgattgttgcacggtctactatctttgcagcatatcgtactgctcaaatagttgcatcattgccaaacttgtcacatcagagcaaagcatttcctgaggcattgtttcaccaactgcttttagcaatggtctatccggactgtgggacacatttaggagcacatcggattttctctgttgttcttgttccctctgctgtcgctccgtgctcattttcagacacttcacggacaaggaagattgatctccgaaggacattatctagaacaacatcagtgttttcatcttctgctgctttgtttgggaaacttaaaagagacatgctttcatttcgtgaaagtccgctccatgataatacaaagctactacccatcagtgaggatgcagatgagatcagcgcaaatgatgcaaaactattcaagtcacagactattcaaaggatggctagtacaaaagatatttctcttccctcttccacagatgcaagtactttgagtgaacaaactccaaatcaggaaaaggatgctgtcacccttatgctcagtgttcgtcaggcaaatcttcttctttcctcgttatggactcaggcactgtcacctgaaaatgttccacggaattatgaagcaatttctcatacttacagcttgatgctattgttttctagagccaagggctcaggtgccgacgttttggttggtagctttcagcttgctttttcattaagaagtgtttcgttacaagcaggt

SEQ ID NO: 114369 - DNA, 1448 bp, Zea Mays
gcaagggcgaatagtctagtccagttccctccccagattcccctttccataaagctccccatctcgtcgtcttcctattctacatctgctgtgttttttatattattattattatatcatttctgctacgtatttttccctttttttttgctcctctagtcgtccctgcgatagtttacggtgttctgcacatagatctcatgtccggttttgcttctttctcgcgtttctcggccgtggtctggtctggtctgttcttgtctctggccacaaacatgcagatgctttggatttgaagcggagctcctctcattccaatgaagggtccttccgaagggtggttccgctgctcgttcatggttcccactatcctatctcatccatgtttgcgtgtcttcgagaggaagcggaagagattcctgtggtcgccttttgagataggcttgtggtttgcatgaccgaggagctgcaccgaccccgtgctggccgctctttggattgaagggagctctgcatcctgatccacccccccaccccatgcttgccttgctgcatccgtcgtcctcggtccatgagatctgaggctcatgtagccgatgcgtctttttttttcctttctcttcctgctgtttctccaagattcaagttggctggccgtgcttatccgtgcaggagctgaagcaggtttctgcccctgttggtggtgatggtatctatcggtacccgtactttgcgtcgctttattcccatctttgctggtgaggtgctatgtcagtgttgtcacactcgtttattttgttctcatatttttcggtttccttgttcgtaccggcggcgcgtgcattttgcggtggggctcctggatctcgctctggacggaggcacggagagcttcccttgcttcctcaacctgctggtagattcacgccaaccggctaccgtgctctctatcgcttgctggctgagcgctcatcgtcacacatcgcgcgcggcagcttctatcttatgattcatctgtacttttgactgacatgtgatgtgccatgaagctctgacccagatctttgcatgcgttcgcgcagtgctcctgtgccgttcgaagacgttcagagcagtgctctcgcgacggttcagggtgtcttgctagccatctgtaaggtctgggatgcaggttgtcgttctagcagaaacatcattcgccgtagatatgatgcgccaagtttattattcttgtttgggctagggatcttgcgtttttttagctagagaagtcttgtaaccaaatgcagcgtaatggaaaacgaggtatctatgcggcagtgccacttggatactgtgtcgttggatgtttgtaattgtaatatactcagcgtttcttgcttcaataatggtgtttattatatgtaatcccttgttcgaataacagtggagagagtcgtccaatgtct

SEQ ID NO: 114370 - DNA, 411 bp, Zea Mays
atgcaaataaaactagaagtacgctgtggcaatatgaaaaggtgtattgtgatggatcctccgtcggaaccaacagacattgaatcaggagttggtgatgttacggcacctgaacgaggcaaaccaaccatggtacgtggttccatgacggcaggtcgtcgtggcgcaggatttacactggcagggcgtagtgccggtcgtggcactagttgtgtgatacgcggtagtaggagtgccggaaggagcattcgtggtggccgaagtgttggtattgacatcgatttaaatgctcaaggtcgggaagataatgaaccaattgaagttgaagctgaaattactgcaaataattcgtggcagcaagtcaactcagtcgaagagaggcgtctcaacttagtcaaagaaaagagctag

SEQ ID NO: 114371 - DNA, 1015 bp, Zea Mays
tctctccctggccccaaggcatcgcccgaccgccgtctcgtcccctcctccgacctctcgacccctccccacccccaccccctctgcccctggctgcgcgcgttccagttggtgtgcgtgcgtgcgtgtccatggggaacacgccgtcgtgcataccgctggcgcccgcggggggcggcgcctcggcggcggcgaccagcgcagccaccgaggtgatccacgcggacggcaccgtcacccggctggcgcgcccggtgcgcgcgtcggagctcatgctccaccacccgggccggttcgtctgcgactccagccgcctcgcggtcggctgccgcgtccccggcgtggccgccgccgagctcctccgcccgcgccacgcctacttcctcctgcccatggacatgctctactccgtgctcaccgacgacgagatggccgcgctctccgagtcccactcccacgccgcctcctcctggaagaggatcaccacgtccacccgccgcggcagccggagcgcgaccgggggccggggccggggccacgcgaaggacgaggcctgcagcagcgatggcgccagggtgtacccgatgctcgggctgctcgagaccgccggtctgcagggcgcggatagtactaagaaacatgaagtacgcgcaggccccgcaggcaagtcgagcggcggcgggttgaggcgccaccggtcgtggcagccggtgctggacaccatcgaggaggttccgtgacgcggcggacggccggttcaccagcggggcgccgcaggagtgagcagctttggtttctctggtgctaggcgaacggcagctagcttgagctggctaccgactacccagtgtacagtagctagcttccagctattctttttctcttgcgttttccatttttttttggtaaagccattattttttgcgtctagacacgcacgactggcaaattgattgtcaagcttttgtgctcgggaaacaaaataagaagattgagaacctttttcaaaaatgaa

SEQ ID NO: 114372 - DNA, 828 bp, Zea Mays
atgggggctctagatgcagtcggtgttcgatccgggttgcgcggatttcctgctggattagttggcagccggatcagacatcgtgtttcatctgttgtgtggttgcagccgtggagaattgttgtgattggtacatgtgtgatgtgcctaactgaggggagtgaggatctgcgtaaggaactggtttcgaatttaccgatttggcgctgctggctttccaaattccgctcagtgagatctttttgtgcctccatgattcgcgtctctgcctcgctctccaagcttagacgaacgccattccaggttgcccccgcagctggccccgcccctgctatcctcgcccccacccccgtgatcccttccatcagtgccccctacatcaccatctcgggcgaccgcatggacgcgtcggctttggcgatcggcacccagagtgagtgtttcgttgcatgtgtgtcagggtacctatccttttcaacctgcattggcttaatgaatgctcaagatcacaaaggcttaacagaattagctaaaaagttgaagagcacaactgaatttgtttcagttggctttctggggccaggtattgctttgctatgtctgaatgaagcaaagagtccaatcattgcttcagcctggcttacagttgctgttggattgaaatccttcggccactcaggtttcttagtaaatctacaggaaggcttgtacttcggacattcttttctttcttataaatacaaagatttacgactctattgcaagttagagtttttgataaactatggtattagcaactatagttctaaacctaaaaccatggtttag

SEQ ID NO: 114373 - DNA, 2098 bp, Zea Mays
cgagagttggcccagcagcgagtgatcacttgaggagctcaacaagtgagtacatcgaggaagaatgatccgcctctagttcttgggatccacctctctctcttgtcttaggctcggagaccttccgaagacgagaagctagatatggctgcgctggcccgcggcgcggccatgaaaggcggcggcgacaagaataagaaggtggcggcaggtggcaggttgctgtccgtcgtcgccgtcggctgcttcctcctcttcgtcgtcgtcgtcttcacgctctcctcccgacgctacgccaccctcgtcctcgacgctcgtgatcgccgaggtgacttccacccgtcgcagctgcaggggggcagccacggcggcggcggcggcgagggtgacctcaagcatctgcttgttgctcagcggagcaacgacgacgacgacaaggcggtcacggaagcggagctggaggaatcagggatcagaggaaagatcagcatcaacgtcgtcggggccggggggcaagcggagatggaggaggcggcgccagagagcagcgccgccgccgccgccgccgccgacgcgacatctaactccgacgacgaccgagcaaggccaggtagtagtagtacgcctttccaaaagctgcgtaacgaagctagtccataaatgcacggcttgcgctctaaaagcttgacctgcaagtctgcaactccttaaagccgccgaggatgcggacccggaccgagacaaattaaccgcggaccgcagccgccggaacaaccgtgcaagcgacgtctcctcagcaccaacacccaggagacatcatgacacgtgcagctgcagcagcctccgtgaagcagcagcggcaaccgctgtgcgacctttcgggctcacgagctgacgtgtgtgacctcaccggcgacatccgcttgaatgccactgcctccgaattcatcgtggtggacccagcggccgcggacgacgggccaacaacggcgtacgagatcaggccgtacgcacggaagggcgacgccacgagcatgggccgcgtcaccgcggtcaccgtgcgcgtgcgggcgacggccgacgcggcgccgcgctgcacggtgacgcacgccgagccggcggtcgcgttctccgtcggcgggtacacgggcaacctcttccacgacttcaccgacgtgatcgtgccgctgtacggcacggcgcagcgctaccgcggcgacgtccgcctcgtggtcaccgacgcgggctcgtcgtcgtcgtggtggctggccaagtacgacgcggtgctgcgcgggctgtcgcgccacccgccgctccacctgcacctcgccaaggccgcgggcgaggtgcactgcttcggccacgtcgtgctcggcctgcgcgcgcgccgggagctcatggtcgagccggacccggacccggaccgcggccgcccggacggggtcgggatggccgacttcgcgcggttcctccggcgcgcgctctcgctgccccgggacgcgcccacacgccccgccgccgccagcagcgacgacaggaggaagccccgcctgctggtcgtctcccgccgcggcacccggcggctgctgaacgcggacgccgtcgcgcgcgtggcggaggaggtgggcttcgaggccgtcgtgagcgagctggaggtgagccgcgacgccgcgggcgtgggccggctcatcaactcgttcgacgcgctggtgggcgtgcacggcgcgggcctcaccaacatggtgttcctgccgccgggggccacggtggtgcagatcgtgccgtggggtggcctgcagtggatcgcccggatggacttcggcgatccggcggatgccatggggctcaggtacatccagtacgagatcgccgtgcacgagagctcgctcgcagacaagtacccgagagatcacgagatcttcaccaacccgaccgcgttgcacaagaagggcttcaagttcttgaggcacaccttcttgatcggacaggatatcacactcgacgtcgatcgcttcagggtggtgctactccaggcgctccggaacctcaccgagtaatagctatcgcggctgaaggacgccaccggccatggcaggac

SEQ ID NO: 114374 - DNA, 2099 bp, Zea Mays
ctacctctgtctatgagagagaaagagagcgtttaaaaaaattaaaagaaaaaacagaggggagagtgaaccatcatcaatgctccaatgatcccccttcaagactccgattcctttctcccccctctctctatctcgagccttttctttgaccgcctctctctctaacctcttatataagatgagaagattcgctcttcaccgcctcgcagggctacactccattctatccctctctatatccccccgcaccctctcctggtcctggccatctccatctcccgtctctctctctctctacgaactccacctcgcgaacagccgctgcttgcctgccgcgttggagagaacggaagaaaagcgagcgagggagagggacagcaactccctcggtcgctttcgacggcctggatctccccgcacgcgggatcgtacgaccggcacgctgttgtcgctttccaccgcatagtaaattgccaaggctgttgtaatgggggtcaacggtcatcacgaacctcgcagaggatgtaatggcaccgtctgcaatggtagtgtaagatcactagatcattttggtgatgtagatccatggacggcatgggcatacaagcctcgaacgatctcgctcttgctgatgggaacatgctttttaatttgggcaagtggtgctctcgatccagaacggagctcatctgctgatcgtgtttcgtcagtcaagaggggtgtatttgcgatgattgctgtttttttggcttactcttttcttcaggcgccttcaactgtactcattagaccacatcctgccatttggaggctagttcatgggatggcagttgtttaccttgtcgccctcactttcttgcttttccagactcgtgatgatgctaggcaattcatgaagtatcttcatcctgatcttggtgtcgaattacctgaaagatcatatggaactgattgccgcatatatgtacctgaccatccgaaaagcaggtttaacaatgtttatgagataatttttgatgagtttgttatcgctcatatcctcggatggtggggtaaggctataatgatacgaaaccaaccacttttgtgggtgttatcaattgggtttgaattaatggagctcacttttcgccatatgttgccaaatttcaacgagtgctggtgggacagcattgtcctagacatattgatctgcaattggtttggtatttggactggaatgagaactgtgcggtacttcgatgggaggacatacgaatgggttggtttgagccgccaacccaacattatcagtaaggtaaaaaggatgctgggacagttcacaccagcgcagtgggacaaggatgagtggcaccctacgcggggtccttggagattcatccaggtgctgagcctctgcgttgttttcatggctgtcgagctgaacacattcttcctcaagttctgcctgtggatccctccgcggaaccccttgattgtctatcggctggtcctttggtggttaatcgcgataccaaccatccgcgagtacaatacctacttgcaagacagcaaaccatttaaaaaggtgggatccttctgctggctttccctggctatatgcattgtggagctcctaatctgcatcaagtttggacacggtctgtttccaaagtcaatgccttcgtggctgatcacattctggtcagcagtcgccttgcttctcgtgctctttgtgtggacgtggaaataccgaacaatgaaaaggaaaatgatataattgtgaccaaaaaaatgatttgtttgcctccattctttacccgatttagtgttatcgtgtacataaaaatttattcaaattgtgtacatgtgctagcagtcaagtcttggtgatctgaagaggattatccatgagaaatttctatgccttctttgtctttgtattttccgtcagcgaagtaggatactggttcccctttggccctttaattcgtctgtattgccgcgtactacttcgttggccgtctcttaaatgtggagaacccttgatgcaacaacctatgaaataatgggattcgaatcccaaactgttgaataatgtttctcgatggcccagg

SEQ ID NO: 114375 - DNA, 139 bp, Zea Mays
tgtgcgatttgaaaaaatgggcccgattcgagttccgaggcgaaagttacgactgttttaagtttggactccgaatcagggtttcttgcgaggtgttggaagggtgggggttcggttttgtggatagagtcggttttag

SEQ ID NO: 114376 - DNA, 4554 bp, Zea Mays
atggctctaaccatggtcacgttcgtcctcaggttcacacacccgtgcgcgtgtgcgggcccgcgttgcagttgcagatgtgtgcgacgcgacacgaccccgcaaaccccacttgtcagcgacctgccctcccactaccagggactgctcacccctttcctcaccgccatccgccatcccatcctatccttcgaaacccgggtagccgccgcaaggaggcactcccccgaccacgccgcgcaatcgccgtcgcgtttctacgccggcgtcagcgttttctctcgctccgcagatccccagagcctcacgttacagcgacgaaccctccgacgagccggcttcccccgccgcgcgcagagcagcggaaccggaggcggattgcacgagacatgtgagcctgctgtcgcggcgacggcgctggtggtgatgctcctgacctccgtcctccggggtcgcgtccgccttctccaccggcaccgctccctgaccatgccctcccctctcttcctctccagaaaccctaatactagcctcggcaccactaacccccacctctcatcgccccccgtgtcggctgcaatgagcaccaccggagtctacgtgccgccgatgcggcggctccgctccgttatcgcgtccaccaacgggagccttgcgccaccaccgtccgccgcggcgcaggcacagcagacgcggacgccagagtggctggtggacgggcgttcgctcagcccccagtcgccgcctcagctgcggcggcgcgatatacctcccttgccgaggccacccctgccagagcattaccggcagcagagcgctgggtttgcccgctatgcatacgatgatttctctgaggatgactcagataaggacattgaccgcacgtcagtttcgagcaagggtgcatctactttagataatgttgatgaatggaaatggaaactgcatatgcttcttcgtaatgatgatgaacaagagattatctcaagggaaagaaaggataggcgagattttgaacaactcgcccaattggctgacagaatgcgcttgcacagccgtcagtattctagagttgttgtgttcagtaaggttccattgcctaattatagatcagatcttgatgataaaagaccccaaagagaggtatctatacctgctggcttgcaaagagaggttgatgctctgcttgcaggctatgttgcacggaagggaacatacattggcaactttcctagttcagctttctcacgatcaagcagcacagacagttttgcaactgatgaaggcttctttgagcagcaagataatcaaacttccactagtgctgtaatggacagaatccaaagaaggaaaagcctgcagttgcggaatcagcaggctgcttggcaggaatcaaatgatggccaaagcatgatggagtttcgtcgcagtcttcctgcttataaagagaagcaaactttattggaagctatatcacagaatcaggtcattgtagtttcaggcgagactggctgtggtaagacgacacaactaccacagtacattttagaatctgaaatcgatgctgctcgtggtgctacgtgcagtattatttgcactcaaccaaggcgaatatcagcaattgctgtgtctgaaagagtcgctgctgaaagaggcgagaaaattggtgaatcggttggctacaaagttcggctggaaggcatgagaggaagagatacgcgccttcttttctgcaccactggagtcctgttgcggagattgttggtggacaggaatttgaaaggtgttacccatgttattgttgatgaaatccatgaaagaggcatgaatgaagattttcttcttattgtcttaaaggatcttcttccacgtcgccctgagctgaggcttatattgatgagtgcaacccttaatgctgagctattctcttcatactttggtggagcacccatgatacatatacctggttttacatatcctgtccggagtcattttctggaagatattcttgaaattactgggcactggttaactccatacaatcaaattgatgactatggtcaagaaaaaagttggaagatgcaaaagcaagctctacaaaagcggaagagccaaatcgcttctgttgtggaagatgctgttgaagctgctgatttgagggactatagttcgcgaactcgtgattccttatcctgttggaatcctgattcaattggttttaatttaatagaaaatgtcttatgccatatttgtcaaaaggaacgatctggtgcaattcttgtatttatgactgggtgggatgacattaatgcattaaaagagcagctccaagcaaatccattgcttggaaatccaagcgcagttttgttgctcgcttgtcatggctctatggccagttcagagcagaaattaatatttgataagcctgagcctggagtaaggaaaatagttcttgccacgaatttggctgaaactagtattactatcaacgatgtagtttttgttgttgattgtggcaaagcaaaagagacatcttacgatgcactgaataatactccctgtctgcttccaacctggatctccaaggcttctgccagacaaagacgaggacgagctggccgagtccaaccaggggagtgctaccatctttatccacgatgtgtatatgatgcatttgctgactaccagttaccagaacttcttagaactcctctccagtccctctgtttgcaaataaaaagcttgaggctgggaagtatatcagaatttttatccagagctttacaatcacctgaatctctatcagtacaaaatgccattgaatatcttaaagtcattggagcatttgatcagaatgaagaattgacggttcttggaaagcacttgtctatgcttccagttgaacctaagttaggaaagatgcttatttttggggctatttttaattgtctggatcccatattaaccatagtttctggacttagtgttagagatccctttttaacccccttcgataagaaagatcttgcagagtcagctaagttgcagttttcatgccgggactacagtgatcatcttgcacttgttcgtgcatatgatggatggagggaggctgaaagagaccgtgctggttatgactactgctggaaaaattttctttcggtgcaaacattgaaagcaatagattctcttcggcggcagtttctctttcttctgaaggatactggtttggttgacgaaaacatgactatgtgcaataaatggagtcgtgatgaaaatctagttcgggcggtaatttgtgcaggactgtatccaggtgtttcctctgttttgaacaaggagaaatccatctccctcaagacaatggaagatggacaggttatgctttattcgagttcagttaatggtaaagaaaccaagattccattcccctggctagttttcaatgagaaggtgaaagtgaattctgttttcctccgggattcaactgctatatctgattctatactgttgttattcggaggctgcataaaacaagggggcttggatggacacttaaaaatgcttggaggttatcttgagttcttcatgaatcgcgatcttgcttcaacttatgtgagtttgaagagagaacttgagaatttaatccattgcaagctccaaaacccaaggatggatatccaaacgagtgaagagctgctatcagccatccgtttgctggtgactgaggatccatgcagtgggcggttcgtgtacggccgacaggagccaagatcaaagaaagcaaagacgatgctttcgccatcctctctgagtgaggctggtggcaacggaggggataatgccaagaaccagctccagacttacctgacccgggccgggcacagcaaccccacctacaagacgaagcagatcaagagctatctcttcagatcgacggttgagttcaacggcatgcagttcgtggggcaaccgtgtgcaaacaagaaacttgcggagaaagatgccgcgagcgaggcactgaactggctcacaggagatggtggagcgattactgactctaggggggctcaggatgcagaccccatgtccttgctgatgcaaccaccgcgtaggcgtcgacatagccatcgtcggaggaactgattagcacgacatgcttttcttcctttttgatcgttttcttatttatgtagcattcgagaagcatagttaagcatagaaggtagcgaggaaaaaatgttatagactcttgaaatgtactacaatagttttgacgtgcagtgcctgtgaattttagagcatggttcgtcagtggtgacggtgagtgatgggctgatggcgtgcgagaatcgcagagaacactagctgtaacggtcgaagggtgatccaattttttttttgctgtgggtactgaattcattatttgttggcgccatattaactgaagagttatgcgtagtgggcaagggcagccacgatgtatgtatttagactaaggtagtctaaatgagggggctcgtgtcaggtatcattgtatgttgtcagatgcgg

SEQ ID NO: 114377 - DNA, 3408 bp, Zea Mays
atggctctaaccatggtcacgttcgtcctcaggttcacacacccgtgcgcgtgtgcgggcccgcgttgcagttgcagatgtgtgcgacgcgacacgaccccgcaaaccccacttgtcagcgacctgccctcccactaccagggactgctcacccctttcctcaccgccatccgccatcccatcctatccttcgaaacccgggtagccgccgcaaggaggcactcccccgaccacgccgcgcaatcgccgtcgcgtttctacgccggcgtcagcgttttctctcgctccgcagatccccagagcctcacgttacagcgacgaaccctccgacgagccggcttcccccgccgcgcgcagagcagcggaaccggaggcggattgcacgagacatgtgagcctgctgtcgcggcgacggcgctggtggtgatgctcctgacctccgtcctccggggtcgcgtccgccttctccaccggcaccgctccctgaccatgccctcccctctcttcctctccagaaaccctaatactagcctcggcaccactaacccccacctctcatcgccccccgtgtcggctgcaatgagcaccaccggagtctacgtgccgccgatgcggcggctccgctccgttatcgcgtccaccaacgggagccttgcgccaccaccgtccgccgcggcgcaggcacagcagacgcggacgccagagtggctggtggacgggcgttcgctcagcccccagtcgccgcctcagctgcggcggcgcgatatacctcccttgccgaggccacccctgccagagcattaccggcagcagagcgctgggtttgcccgctatgcatacgatgatttctctgaggatgactcagataaggacattgaccgcacgtcagtttcgagcaagggtgcatctactttagataatgttgatgaatggaaatggaaactgcatatgcttcttcgtaatgatgatgaacaagagattatctcaagggaaagaaaggataggcgagattttgaacaactcgcccaattggctgacagaatgcgcttgcacagccgtcagtattctagagttgttgtgttcagtaaggttccattgcctaattatagatcagatcttgatgataaaagaccccaaagagaggtatctatacctgctggcttgcaaagagaggttgatgctctgcttgcaggctatgttgcacggaagggaacatacattggcaactttcctagttcagctttctcacgatcaagcagcacagacagttttgcaactgatgaaggcttctttgagcagcaagataatcaaacttccactagtgctgtaatggacagaatccaaagaaggaaaagcctgcagttgcggaatcagcaggctgcttggcaggaatcaaatgatggccaaagcatgatggagtttcgtcgcagtcttcctgcttataaagagaagcaaactttattggaagctatatcacagaatcaggtcattgtagtttcaggcgagactggctgtggtaagacgacacaactaccacagtacattttagaatctgaaatcgatgctgctcgtggtgctacgtgcagtattatttgcactcaaccaaggcgaatatcagcaattgctgtgtctgaaagagtcgctgctgaaagaggcgagaaaattggtgaatcggttggctacaaagttcggctggaaggcatgagaggaagagatacgcgccttcttttctgcaccactggagtcctgttgcggagattgttggtggacaggaatttgaaaggtgttacccatgttattgttgatgaaatccatgaaagaggcatgaatgaagattttcttcttattgtcttaaaggatcttcttccacgtcgccctgagctgaggcttatattgatgagtgcaacccttaatgctgagctattctcttcatactttggtggagcacccatgatacatatacctggttttacatatcctgtccggagtcattttctggaagatattcttgaaattactgggcactggttaactccatacaatcaaattgatgactatggtcaagaaaaaagttggaagatgcaaaagcaagctctacaaaagcggaagagccaaatcgcttctgttgtggaagatgctgttgaagctgctgatttgagggactatagttcgcgaactcgtgattccttatcctgttggaatcctgattcaattggttttaatttaatagaaaatgtcttatgccatatttgtcaaaaggaacgatctggtgcaattcttgtatttatgactgggtgggatgacattaatgcattaaaagagcagctccaagcaaatccattgcttggaaatccaagcgcagttttgttgctcgcttgtcatggctctatggccagttcagagcagaaattaatatttgataagcctgagcctggagtaaggaaaatagttcttgccacgaatttggctgaaactagtattactatcaacgatgtagtttttgttgttgattgtggcaaagcaaaagagacatcttacgatgcactgaataatactccctgtctgcttccaacctggatctccaaggcttctgccagacaaagacgaggacgagctggccgagtccaaccaggggagtgctaccatctttatccacgatgtgtatatgatgcatttgctgactaccagttaccagaacttcttagaactcctctccagtccctctgtttgcaaataaaaagcttgaggctgggaagtatatcagaatttttatccagagctttacaatcacctgaatctctatcagtacaaaatgccattgaatatcttaaagtcattggagcatttgatcagaatgaagaattgacggttcttggaaagcacttgtctatgcttccagttgaacctaagttaggaaagatgcttatttttggggctatttttaattgtctggatcccatattaaccatagtttctggacttagtgttagagatccctttttaacccccttcgataagaaagatcttgcagagtcagctaagttgcagttttcatgccgggactacagtgatcatcttgcacttgttcgtgcatatgatggatggagggaggctgaaagagaccgtgctggttatgactactgctggaaaaattttctttcggtgcaaacattgaaagcaatagattctcttcggcggcagtttctctttcttctgaaggatactggtttggttgacgaaaacatgactatgtgcaataaatggagtcgtgatgaaaatctagttcgggcggtaatttgtgcaggactgtatccaggtgtttcctctgttttggtgagtttcttttatttaagattattttacataccctgcttttaacaattgcatattttcacacttttatgcttt

SEQ ID NO: 114378 - DNA, 397 bp, Zea Mays
ttgtgggagaaaggatgcctggttcattacgtaaaatgccggtctggttaccaatagtcatattgctcgttgccatggcgtctattcagggtggagcctcgttagctaagtcactttttcctctggtgggcgcaccgggtgtcactgcgctgcgtctggcattaggaacgctgatcctcatcgcgttctttaagccatggcgactgcgctttgccaaagagcaacggttaccgctgttgttttacggcgtttcgctgggtgggatgaattatctttttttatctttctatttcaacagtaccgctgggtattgcggtggcgctggagtttccccggaccactggcggtgggtgcgtgtctcttcccgtctccccggtagatttccgtctgggttgtg

SEQ ID NO: 114379 - DNA, 426 bp, Zea Mays
atgagttctaaagaccaatttgctgctagatgtcgttggcaccaacaatttggttattattcaccagagcgtaccaaaataataataataataacaccaaaacgctacaattattattatgtcatggaaacatctcgctggcacattagtaggtgtagcccttctggaacatgcctttcttggcatcatcgctctcgccctcaccagtgtagcgaccgagctgggccagcgagttggcctttgcgcgcaccagcagggccttctgcgctgcctccacgttctcagggcgcccttgccatgtcttcagcaccgagttctgcagagcccgggcataggagaacgacacatgccatgggttcagagactggttcattgcattcaggttcagagttgcctccacctcggactgtccaccagaaaggaact

SEQ ID NO: 114380 - DNA, 100 bp, Zea Mays
ggataagaaatggctggctatcccgatctactacctgcttcagaagctggaagcacctttgaatcaccggctagtatcgtctcacctgcagaaaagaaaa

SEQ ID NO: 114381 - DNA, 421 bp, Zea Mays
tttggatgtgtatacaaagctgagctatccaatggagagcctgtggcagtcaaaatgttggagaactcaacgggacaagaagaatttcagtaaagttgcaactattgggaaaattcatcatgcgaatttatgcctaatgcatcactagagaaatacatattctcagaagaatctggcactagtggccgagaacatttctaataagatgctaacaggaattgccaaaggaatcaagtacctgcaccaaggttgtaatcagcgcattctccatttcaacaccaagcctgcgtacattttactagactacaattttaagccaaagatttcatatatatttggacttgcgcagctgtgtacaagggatcaaagcattgttacgctgactgtaacaagaggcacaatgggctacattgcactggaa

SEQ ID NO: 114382 - DNA, 309 bp, Zea Mays
atgaccacagcaagcagtgataaaagcttcttccagaagtgcccagcatccagttgcagcgaaggaggaccagagatccgatttccattccaccttgtaaccagccctctatcatgtgggacacctggttcacccaaatattggctactgaaaggaggcaagagccttgtgcagtgcgccgacgccagtgatcaaaacccaagagccaggaggacagagaacgacaacaggagaagagaagaaattagagatagagaaccagaactgcagaaggaaggagatgaagacgccaagaatcgaggagattag

SEQ ID NO: 114383 - DNA, 585 bp, Zea Mays
aaaaaggagagaagaatcggtccgccgcagagctcttcagatgaagcatcagaaccagaaccagaggtgctggtgctcgttcctcagccgtaagctgctcgcggtcctcatctctgtcgccctccttgccgcgatgctcacgggctccgtcacaggagtaccggtgtacatgggcgggagagtggacggcgtgtcgcctccggcgccgacctccagcgggagtcctcattcagcttctgttcttccagacaatggctagtcccaagtccgaacacgccatgggcaggcgagggcacggcgagccgcctccgccgccggtctccgacgctagccatcaccagtcttccaggtctccacgtcacggcgtgcagcccctgccaccagacacaagctagacgagaaccggtgggacatctcgacatcgtttgctgtgctgtgttgttcaaagagaagctatatcttccccacaaaaaaaaaaatgaaaagccagtgaagaaacttcccagatcccgttccatattgcaaaagtttctagcgtttgttcctcttacagatggatcactcagtggataccctttctttgca

SEQ ID NO: 114384 - DNA, 462 bp, Zea Mays
cccacgctcgcgtcgctcccacgcggggcgacacgggcggctcccaagcccgccgccgctttccctctcttcctctctcctgccacgccgccgccggagctggccgccggcatggccgtccggccagcagggagggtggcggcgaggctctcttcttcgcgttggtggcgcgctccgcagcaggccggcaagccatccctcgcgcggctgcgtagagttgtctggatggcttctgcggctgtggcggcgccggctggtgcccgcgcaggcggcgactccgcgaccatggcctcttgtgggttcggcgaggccttgtttggagctacggtcgtcagatctggctccccggtggtgggaggccgcagccgtattcacctccgtctccaacttcaaatcaaggtccaggtgtcatacacgggaggtaggacgattagagtagacatatttggccagtgggcctga

SEQ ID NO: 114385 - DNA, 518 bp, Zea Mays
aacctctctgtaagaatcaatacctaccccatggagaagctctcttctcgtcgctattcccggccggcgatgtccctgctgatcatcgtggccatcactatctcctgctccgtcgtccacagttcggaggctccagcccaagaagcagcagtacctcgtctggacggagaccatcagggccaagcgccgccgccaccggatgccggcaaacctcgacagccacagccgccgtgctgtcttcggcacggcgcttaacgtcctaaaatggacagggaggacggaggatacttaagatcaaccaggccgcgacgacaataagtttttaaattttattaggactagtttaggaaccctatttttttaatggatttttattttatcaaaaaaaattgggttcccaaactagttcttaacaatacaaacataagagaatccgtacaccattcgtgtcaaattataagtaatataggtcggggtgcataactgagataatttggttcatttatcatttgtggtcc

SEQ ID NO: 114386 - DNA, 692 bp, Zea Mays
aaatgattggacagagtcgtcgtcagaggacgccggcgaggccaccggattgcaggatttggtcatcgaaggacgcaggagccacccacgcctcgtgtggccgccatcactggagacaaccgcccctcacgcaaccaccggagccacccacgtctcccgtggccgccgctgccactgccgaagccacccacgtctcccgtggccgccaccgccgctgccgaagcctaccgcgccgtgcgcaaccgtcgtcgccaccgggcctgggatgcgccgccgcagctcgtttgcctcgggagcgtcgttgctcggttttggggaacaccgtcgctggttgcctgcctcgggacaccaccgtcgctcgcccccggtatcgccgccgcttgcacgtctgatggaaccgccatcgccgctaaaacctaatcacagacaacctgggggtgtttttatagccgcccgaatctggtgcggctgaaccggatggcaccgttgagccatgtcatcctctagttattggaagcacaaggcttcatatatatatattagattagttacaaactagacaattgaaccaaacacttaaatataaccaatgatgggcgtagcggtgggcatgcgaggcctatgctccctagcgctctcgagccatggagtctgtagtctcccctcaaatttaaaacatacattgtctgtaa

SEQ ID NO: 114387 - DNA, 675 bp, Zea Mays
atgccgcacaagttctaccatggccgcaccagtcgcgtcaggaacaccaaatgtgccatcggcgtcgagataaacaagcagatgcttaattgtgttgattctaggtccatatatgattgggttcttgttactacattggcgtatggaaggttatataggtacaagtgtaagtataatgatttaaagaaaccgaatacttattatgtggatagcttaggaatagtggagattcttttcaagattttggtgctgaatatttttggtgaatggatcaagttactgttgcgggagtcttcagcaggtcacttgtgcctttcagcagtgctcttgcgtgtactggttataaacaataaatgctatgatggtgctaagggtgatatgtggtcatgtggagtgattttctttgtcctcatggcggggtacctcccatttgaagattcaaacctgatgtcgctttacaagaagatcttcaaagaggatttcagttgcccgtcctggctctccacaggtgcaaagaagctcatcaaaaagatacttgatcctaatgctaacactataagttctgttgtctgtagccatcattttaactcattttgttcaacatctgcagggttaataactatgtaccatcgttctgtggcctatgtagataatagctattgcggagcacattaa

SEQ ID NO: 114388 - DNA, 1153 bp, Zea Mays
ctctgcagcgccaccgaccaccgtcaccttcagctgctgaggagagctgatcagccgagctagtcgacgagtcctcacttatatttcacacgcacacgcacccacgccatctcatcaccagatcaccagcagcctacagctctgccatccctctccgcgcggccggtccctcggctctcgccatggccacggcgcacggcggcaggctcttcctcttcgaggccatgctcttctcggcgctgctgctgctgctcctactcctccaggcacacactgcttccgccgcagacggcagcacgtacccagccgactgcccttacccgtgcctgcctccgcccgcggcgcccgccgtcgtcaccgccaactgcccgccgccgccgccatcgtcctcctacaacactccgccttcgtcctcctggagctacccgccgccgccgccgccgtcggggggctacattccctacttgaatcctccagcgggaggcggggcggggtacggctacccggcgccgccgccgcccaaccccatcctgccgtggtacccctggtactacaagacgccgccgccgccgccgtctgcggcggcgagggggaccggttctagtgttcttggcttggccgccgtgctagccgctggccagctgatcgtggcttaggcgcttagccgcagcacctgttcgttttgcttcttcgttcgatattctctccgccctgatgcagcagagctgcagaggttatttctccctccccctcttttgttataatttattcagcaggattatattcatgaatatatatatatatatatatatatatatatatatatatatatatatatatatatatatatatatatcatctacatactactatagctagtttcttgattaccactgagcttttgagtagtggagcaactaccatcgcagcatcgctagttcttcatgagagagagacagagagcatcatgtatatgtgcatggacgtggctagtgactacaagaatatttgccttttgtctcggtgcgacggtgcccccctgtccgttttttgttttgtgttacatctgaagtactagttcttcctgtcaacttttaatttgtgtataaacaacattaacgctttatttcttgtttaaaatgctcgataccct

SEQ ID NO: 114389 - DNA, 1514 bp, Zea Mays
gaaacagaagaggcacagcttatacccatccactgaccgcgaagtgcacagaggggggaaggaaggagagaccacgtaccgtctgcgaggaggacgacgaagaaggagaagaggctgattcgatcgagcagcatggcgcggcggccacggccgtgtgcccacctgacggccacgctccttctgctcgccgtcgccgcggcggtcgccagagccgccgacggcgacgagaagtgcggcagcccgtgcgggaacccctgcggcgagccgtgcgtgtacgcgagcccgccgccgccgccggtctactacccgccgccgccgccgcccgtgtactcgccaccaccggcgccggagtactacccgccggcgaccccgaccccgaccacgccctactgcccgccgccgccgtcgggcggcggctacgagccgtcgcccggatacacgccctacacgcccgggtacaacccgacgccgccgtccggctccggctggtacacgccctcgtacaactcgccgcctggcacgctctacccgcaggaccccgggttccggcccaacgccgcgccggcccgcgtcgccgcgccgtggcgcgcggcgctcttcctcgccgccgcggcgtcggcggcgctggcccgcgcctgcctggacttgtgacgcggtcggaggccaccggggatcacgacctgcgccgatcggtgtcgcgtctacatggcgccgcgcacgcgccgtgctgggagatcgtcaagggcgtgcatggcgcgcgggtttagttccgcctccgtgttatgttaataataagattatcagaggaagggttacgttgggtgagatatctctctttctttctttctttttttttttttttgcacctcagttcatccgtgtgtcgttcgttgtgttagtgaattcgtcgtatacttatgtcgttggaacatctgttctcgtggtaggaacacaagttcatccacctatcatcagactctgtgaaacattcaaacatatatatgttcgtcttatctgatcaaactcaaaataacatgtactgtgttttattctccaatccccttttgattttcaatccccctaacgccgcaatacactgagtaaccgtgttcaaacttgttttttctcgaaaaagaaaaactttgtgtaacctttttgctcgaaaaagaaccttgcaccacctctctttttcattttcccatcggattctatcctctctctctgtcttttgagtggaaaactgaggcttgataaactttacgtcctggagagagctcttataaaaggtagcagaagttagttattgcgaggataggcgggttaaaaaaaagatcgataggtgaatgtgcttcaagagacgagtaatgctgaccgttggattgtaaaagcggtgcatcattagttttattttctttgtttaattctgtaactgacggctacagttacaggcacaaaacgctgccttgatgccgatgttgctgtctattttgggtttagtcggttttcccgttact

SEQ ID NO: 114390 - DNA, 108 bp, Zea Mays
ttttttacttttgcaatcaagaataaaactggagtctgaattatcagaagagcagcagctcgccggatcccatcaccatcgtcacaaggtaaaacaaagatcgaaagg

SEQ ID NO: 114391 - DNA, 1067 bp, Zea Mays
ggcactggcacacacagtacagcctcatcgccacttaccaccgtctaacgaaaaagcatcgacgagcgaagcgaaaaagatgccgccagctctgcggcgaacgatcctgctggccgcggcggcggcgacgacggcggtgctgctgctgtggccggccgcctgcgtcgcggacgacgacggcacgacgttcccgccgtcggcgttccccttctgcccgacgcggccggccggggtctccacggggccgttcccctggtcgccgccgccgccgtcgtcggtggcggtgttcccgcaggatccggggttcttgacgtcggacgcttgcgcggtgccacggctgccgctgctcgctgtgttctctgttctcttggtgtttttgcagtgactcgctcgcggttgctgccctggactggatgcatatctatccgtagctgcccagttcagaaaattaaggtttgctccaacgacaggcctttgtttcatacagctctgtggaaaagaaaagaaaaaaaatctactagctttcccctgcagcagctctgtttttgagaacgtagctctgctttgtttcttcacaggcgaaggaatatcttcgtgtataacccgtagctagcttcattcacgtaattcaggctttagcttggataatagtaaaactagtgtcactggcgttgaaggttctgaaatcccagtagctttccttcagacttaacaccatgctctgaaattccattgacaccatcaatgttggttgtgtggtaatcactgagcaatggacatgcaaaacagatctgattgttatgtggtaaccaaggacgtcatcttcgtctcctcagaagtttatttatctccctagttatgccgttggggcgtggagtacagtctcaaactggaatgaggatgaacaggactaacataaatacaggcacttcttgtcatttatctacggtttttatgtttttagccagcagatgtcatcccatgtccccgcttggtaagggcttcttcgtttcaccgtgtggattgagtggtattgagtcagtttaaatccacagcaagtcaaaaaa

SEQ ID NO: 114392 - DNA, 390 bp, Zea Mays
atggcagtgcgttcgctgctggaggcaagaaagccggcaatgcgaagcaaaacaagacggcgcacgggagaagctgctggggctgagcgtggtgccgcgaacggggctgcaagcgcggcgactccgtgcaacgcacgaaaaaaagggctgcgcttcaacacggtgagcaggatgaactctcagccaggaaacgcaagaagctcaacggcggtgttagacaaaggaaaaacagagaacgcactccatctagcctatccggatgaagatatttcccaactcacgacacgtcacaagccatcgcaagaggcaagcagctgcgtggccatgcatgggcatagggcgaattcaggtggcgacggtcttattaggacagaacagacagacgcataa

SEQ ID NO: 114393 - DNA, 678 bp, Zea Mays
ggttcaaacttgcaactgtccactgttacaaaaactacaaatttcattgtaaaaagaagctactcgggtattgagagtctagcagcaaaaaacaaagagacgatgttaaaaagataaaaatggatcatcactaaggaataatttatgtgtactactttcttgaagataaacggtaaatgaattgtgttgatgaaagactcaaacagtaaccaagctacatgactgtaacacccctggtgttactataactaaaacttgagcatggcatcatgagcattgacattgcatatgtttgacacacctagagtgcattcactaggcaaaaatttcaaacaagttgtgttgttttaatgtttttgcaaatgaaaccctggataatggacttaaccctaaatagtggttaaaggggtaaaacttaacccaagttaagaaaacctaaaagctttagggtaaaagtcataaaatgaccctaagaataaacttgaatcacttttatacccctgggataccagaaactctaattggaaccctgaaagctctaagtccaaaccctaggggcttatgtgcaaaagtgatgaacctttggactaaagtataaaaactactatgtttggatatataaagtcatttggttcacaaatatgtgaatttacaagccaaaccctgagatttggactt

SEQ ID NO: 114394 - DNA, 1654 bp, Zea Mays
cgcacgtagtacatacaggtcacccgtttcgatctcaattcgtgtactagtataatagtagtagctaggattaagttagcaagacaggagctgtgaggggacctgccggtatactactatctaaccttggctgcagctgcaaccctcctcctaccttggtttctctatcccctctcctctgatcggctggtccccgttgcattggccttggcccttgccatgccaacctcatcaacgcctctcaactctagctagccagccacacctcctctgctctggtcctccccgccattagccggtagctgcctaagctgctaaccttgctatcttagctacttctactagtctagtgcgtattttgtgtcctgtacatgcttagttcgtcccccgccccgacctaacgtgcgagtgccggactgctgcggaaggaaggaagggagggaggaggccgggcatcagggacaaggaagactagctcgacattaatttcgttccggtaaggggaatccggaatcgttcggcatggataatcagcgagccacctcaacctcaaagggaatcggctgctagctaggagctagcgaggaggagggttatcggctcctccggcaatcctgaggccggctagctgagggcgaggcagcgtcacgcccgtccgtatgcatggagagccagagggtggtggtggtggtggaggacgcgggcgccgcgcggtcggcgctgcagtgggccgtcggcaacttcatccgcggcagcgactccatcacgctgctccacgtctgcccgccggcgcggtcgcgcaggaagcgccgccgcctccgcctcggcggcttccagctcgcgctcgccttcaaggacctctgcaacggcatcgccgaggccaaggtggagatcgtggtgacggagggggagctcggggagacggtggtggcgacggtgaaccagctcggcgcctccacgctcgtcgtcggcctccacgacaagagcttcctctacagcagggcgccgagccagtacagccgagtcatcaggagcctgggctgcagggtcctcgccgtccggcagcacgccacggcgcgggacggcttcctgaacgccgagctcacccagatcgagaccgtgaacctgcacataccaccgccaaagatcccgttcccgatgttcacgctcccccttggcgtgatatggagaagatcgaagcggagaaagtgatactcaaactgcggggaagacggaggaacagcagaacaggaacagcacggcaggcatagctgagcctgtcctgatggctagtagatatatacacgtacacgcacgcgtgcacatcaacggaggcgcagcaaatctgcggattgacgtaactgtaatgacgacagcggcaggcacagaatgttagagaggaagggtatactccagctccgggaaagacggccccgtacttgtattattagatgattaatcgacaggttggtttactggaaactagaggagccattctgttttctgaagaaaaagaagaatggagcaaggttagaggactgccggttctgatgttaagtctgtaacctctcacgacctgatgctctgttatccttaaaattgatctaagttagaaaacttcaaaactaaagaggttttggtttctaaagactaa

SEQ ID NO: 114395 - DNA, 1896 bp, Zea Mays
cccgtttcgatctcaattcgtgtactagtataatagtagtagctaggattaagttagcaagacaggagctgtgaggggacctgccggtatactactatctaaccttggctgcagctgcaaccctcctcctaccttggtttctctatcccctctcctctgatcggctggtccccgttgcattggccttggcccttgccatgccaacctcatcaacgcctctcaactctagctagccagccacacctcctctgctctggtcctccccgccattagccggtagctgcctaagctgctaaccttgctatcttagctacttctactagtctagtgcgtattttgtgtcctgtacatgcttagttcgtcccccgccccgacctaacgtgcgagtgccggactgctgcggaaggaaggaagggagggaggaggccgggcatcagggacaaggaagactagctcgacattaatttcgttccggtaaggggaatccggaatcgttcggcatggataatcagcgagccacctcaacctcaaagggaatcggctgctagctaggagctagcgaggaggagggttatcggctcctccggcaatcctgaggccggctagctgagggcgaggcagcgtcacgcccgtccgtatgcatggagagccagagggtggtggtggtggtggaggacgcgggcgccgcgcggtcggcgctgcagtgggccgtcggcaacttcatccgcggcagcgactccatcacgctgctccacgtctgcccgccggcgcggtcgcgcaggaagcgccgccgcctccgcctcggcggcttccagctcgcgctcgccttcaaggacctctgcaacggcatcgccgaggtacgcacgcacgtgggctcagtgagtctcacccactcacgggcaaattaattaggaacaaaggcagcagcactgcagctggtcgctgcccggttggattttgcaagctggtggtaggttaagttagccgctcgattgcaatcaatcggccggcgtggcgtcgctgtcgcgccgtcaattggccgccgctgttgttgatcagcgtcgtcggtctcgtagtcggtcgacgtccgggtccggctgacgatccggaggatgcgctgcaggccaaggtggagatcgtggtgacggagggggagctcggggagacggtggtggcgacggtgaaccagctcggcgcctccacgctcgtcgtcggcctccacgacaagagcttcctctacagcagggcgccgagccagtacagccgagtcatcaggagcctgggctgcagggtcctcgccgtccggcagcacgccacggcgcgggacggcttcctgaacgccgagctcacccagatcgagaccgtgaacctgcacataccaccgccaaagatcccgttcccgatgttcacgctcccccttggcgtgatatggagaagatcgaagcggagaaagtgatactcaaactgcggggaagacggaggaacagcagaacaggaacagcacggcaggcatagctgagcctgtcctgatggctagtagatatatacacgtacacgcacgcgtgcacatcaacggaggcgcagcaaatctgcggattgacgtaactgtaatgacgacagcggcaggcacagaatgttagagaggaagggtatactccagctccgggaaagacggccccgtacttgtattattagatgattaatcgacaggttggtttactggaaactagaggagccattctgttttctgaagaaaaagaagaatggagcaaggttagaggactgccggttctgatgttaagtctgtaacctctcacgacctgatgctctgttatccttaaaattgatctaagttagaaaacttcaaaactaaagaggttttggtttctaaagact

SEQ ID NO: 114396 - DNA, 1649 bp, Zea Mays
cgcacgtagtacatacaggtcacccgtttcgatctcaattcgtgtactagtataatagtagtagctaggattaagttagcaagacaggagctgtgaggggacctgccggtatactactatctaaccttggctgcagctgcaaccctcctcctaccttggtttctctatcccctctcctctgatcggctggtccccgttgcattggccttggcccttgccatgccaacctcatcaacgcctctcaactctagctagccagccacacctcctctgctctggtcctccccgccattagccggtagctgcctaagctgctaaccttgctatcttagctacttctactagtctagtgcgtattttgtgtcctgtacatgcttagttcgtcccccgccccgacctaacgtgcgagtgccggactgctgcggaaggaaggaagggagggaggaggccgggcatcagggacaaggaagactagctcgacattaatttcgttccggtaaggggaatccggaatcgttcggcatggataatcagcgagccacctcaacctcaaagggaatcggctgctagctaggagctagcgaggaggagggttatcggctcctccggcaatcctgaggccggctagctgagggcgaggcagcgtcacgcccgtccgtatgcatggagagccagagggtggtggtggtggtggaggacgcgggcgccgcgcggtcggcgctgcagtgggccgtcggcaacttcatccgcggcagcgactccatcacgctgctccacgtctgcccgccggcgcggtcgcgcaggaagcgccgccgcctccgcctcggcggcttccagctcgcgctcgccttcaaggacctctgcaacggcatcgccgaggccaaggtggagatcgtggtgacggagggggagctcggggagacggtggtggcgacggtgaaccagctcggcgcctccacgctcgtcgtcggcctccacgacaagagcttcctctacagggcgccgagccagtacagccgagtcatcaggagcctgggctgcagggtcctcgccgtccggcagcacgccacggcgcgggacggcttcctgaacgccgagctcacccagatcgagaccgtgaacctgcacataccaccgccaaagatcccgttcccgatgttcacgctcccccttggcgtgatatggagaagatcgaagcggagaaagtgatactcaaactgcggggaagacggaggaacagcagaacaggaacagcacggcaggcatagctgagcctgtcctgatggctagtagatatatacacgtacacgcacgcgtgcacatcaacggaggcgcagcaaatctgcggattgacgtaactgtaatgacgacagcggcaggcacagaatgttagagaggaagggtatactccagctccgggaaagacggccccgtacttgtattattagatgattaatcgacaggttggtttactggaaactagaggagccattctgttttctgaagaaaaagaagaatggagcaaggttagaggactgccggttctgatgttaagtctgtaacctctcacgacctgatgctctgttatccttaaaattgatctaagttagaaaacttcaaaactaaagaggttttggtttctaaagact

SEQ ID NO: 114397 - DNA, 2058 bp, Zea Mays
gtgaggggacctgccggtatactactatctaaccttggctgcagctgcaaccctcctcctaccttggtttctctatcccctctcctctgatcggctggtccccgttgcattggccttggcccttgccatgccaacctcatcaacgcctctcaactctagctagccagccacacctcctctgctctggtcctccccgccattagccggtagctgcctaagctgctaaccttgctatcttagctacttctactagtctagtgcgtattttgtgtcctgtacatgcttagttcgtcccccgccccgacctaacgtgcgagtgccggactgctgcggaaggaaggaagggagggaggaggccgggcatcagggacaaggaagactagctcgacattaatttcgttccggtaaggggaatccggaatcgttcggcatggataatcagcgagccacctcaacctcaaagggaatcggctgctagctaggagctagcgaggaggagggttatcggctcctccggcaatcctgaggccggctagctgagggcgaggcagcgtcacgcccgtccgtatgcatggagagccagagggtggtggtggtggtggaggacgcgggcgccgcgcggtcggcgctgcagtgggccgtcggcaacttcatccgcggcagcgactccatcacgctgctccacgtctgcccgccggcgcggtcgcgcaggaagcgccgccgcctccgcctcggcggcttccagctcgcgctcgccttcaaggacctctgcaacggcatcgccgaggccaaggtggagatcgtggtgacggagggggagctcggggagacggtggtggcgacggtgaaccagctcggcgcctccacgctcgtcgtcggcctccacgacaagagcttcctctacaggtgaaccatgaattcgtattccgtttgtctcttgtgaactctgagcatgcaagctcgatccagaacccgttgttggactgaatctttcgcttgtttattacggcgggtgcgcgcagcagggcgccgagccagtacagccgagtcatcaggagcctgggctgcagggtcctcgccgtccggcagcacgccacggcgcgggacggcttcctgaacgccgagctcacccagatcgagaccgtgaacctgcagtaagcaagcaccacctgtctgttggcttggttcgttggctagctagctagcaagcaagtaaagcatgcgccgggtttttttttttcttcttcttcttcgtcagaatagaaaacaacgggcgggcaatgggttggttcagctgctgagcatggcactgacacccttggattcctgggctccgatcgagattaggtaactcggacatcgtgaatttcatgataaaactatgcctagcctaggcgcttccaaaatgcaaatggagttggccccgccccggctctgacgatttttttgaaaccgatgttcgtgagagggggcggcgttcagggttgccgccgggcgccggcgagtcgagcccttttcgcgcctgtcgatgtgttagctcactgactaaaattccaaaatgccgcagctttcgtactaaagaaaaaaaagtttaaaagctaagcagttagcagtacgctgataatggtacagctttcagtttgagtatcgtctggctctctggctgccaacaacgccactgacctacacctttttttttttttttgcagcataccaccgccaaagatcccgttcccgatgttcacgctcccccttggcgtgatatggagaagatcgaagcggagaaagtgatactcaaactgcggggaagacggaggaacagcagaacaggaacagcacggcaggcatagctgagcctgtcctgatggctagtagatatatacacgtacacgcacgcgtgcacatcaacggaggcgcagcaaatctgcggattgacgtaactgtaatgacgacagcggcaggcacagaatgttagagaggaagggtatactccagctccgggaaagacggccccgtacttgtattattagatgattaatcgacaggttggtttactgg

SEQ ID NO: 114398 - DNA, 2252 bp, Zea Mays
tcgtttcgcgtcctagcccaggacaagttccctttttcttctcccaagtctgcgactaggaggcgacgggccgacgggccaagtttcctttctcttctcagtctgcgactggcggcggcgaccatcacgcacaagccttcgttgctacctgcgctccgccaattcggtgaattgcagtctaagcaaagggaaaaggaaggatcttttctccagacttggtaattttggacgacaaggtaacaaagtgtataatcgtgcatagtctgtgttcgtttcttggtagcggctgtcttagcttctcctattgttaaccttctcagtgtggtacggtgattttataaacatgtaactacagctagttccgagctcttattactgtcacttggagatataaagataacataaaaagggcagacctcccgaggagtggtgtttgggaaagggataaaccaaggcatgcctccccgcagatgcggattagctgctttgaacccgcgacccagttacctattgagacaactctcatacaccaggcccaccctttttatataagataagatgttgggagttaaattaatttggaagtctgtgtctcttttgctgcgcccagattcataaccataatcatgtttaaacaagtgctgtgtgaagagccatatttctcacataagttttttaggatattgtgtatagttgtgatataattgtgatatctgtgagatcccttttgttaacatagttttatgagcttggaagcttagaagccatctagctttgaacatgattgattgatcactctccatagaaagttgacttgaacattaagtgaactgcgtgagtattatctgagaatactttgattacatttgatgcttaaactagctcaaagtgtctccaagtaatttgtcgttaggaattaattcactgcattttgttatgtctatacatggaagtttgttgtataaatcttttaatctatctgattagatgtacatctctactgatgtgctatataactttagatgttcaaaaaactaacagtgtttttctctcttctatgagatgcacttccttgcatcatttcatgtccctacaggttttgtattatctgatttttcgggatggatgccaaaaggttcctgcatctggtcgaggagaagaaaagaagggtcctcgagaagaaagaagccccactaaagtgggagcagaagctagaaacagcagctaaggccaaggttgatgcagaagcaaaggtgaagaagctaaattcaagaaagcacaggaggagaggagatttgtcctcagactctgatagtgactatggcagcgatgttgatcgaaaacacttgaagaggaagaaccgcagaaggaacaagaagcatgagcattctgactctgatgatgccaggagacgcaatcgtagatctagaaggagcaccgactcaagtgatgagagcaacagtgaatacgagaccaggtctgaagaagaacgtccaaggaagaagcgctcgcacagaagaaggcatcaccggcactcttcaaagtcagactctgaaaactacagcagtgatgaggaacaacggagacctgccaaggaccattctcagagccgcaggcggcaccatcggtcatctgatgatgactcagacaaggacaaggtcaagtcaagacatgggaagggtctgagatctcgtgacgaggatgcaagagcagatttcaacagcaataagcatctcaggagccaatccttggaggagtcatcagatgatagagatgctgatgaatctgagaagatgaggaatggcaaaaggtctcacaagaatggcggccaccgtcaccatcaccatcgacaccaccatgaatgacatagtaactctgcagaacctaatgacaggaggcaagtactgaaagatggccagagggcccttgaaggtgacagcgcatactgaagatatcccagcaaggtcgagttaattgtccttattaaggacatgaagatcatttttttttcgttcctgatgttctcagataattattgtattgctgacaacatttctttgatttgtgaatatactaaacatgttgcctatgcatttgcttagatgtccgatctccgaaggctgaagtcgataaaagggctagaacggagacatttgtgtcactgtagtggtgcaatttaagtattagatcattaagacaccatagtgcaacagactctttgaacacgtctcaattaaacaccatgcatcgat

SEQ ID NO: 114399 - DNA, 1263 bp, Zea Mays
tcgtttcgcgtcctagcccaggacaagttccctttttcttctcccaagtctgcgactaggaggcgacgggccgacgggccaagtttcctttctcttctcagtctgcgactggcggcggcgaccatcacgcacaagccttcgttgctacctgcgctccgccaattcggtgaattgcagtctaagcaaagggaaaaggaaggatcttttctccagacttggtaattttggacgacaagatgcacttccttgcatcatttcatgtccctacaggttttgtattatctgatttttcgggatggatgccaaaaggttcctgcatctggtcgaggagaagaaaagaagggtcctcgagaagaaagaagccccactaaagtgggagcagaagctagaaacagcagctaaggccaaggttgatgcagaagcaaaggtgaagaagctaaattcaagaaagcacaggaggagaggagatttgtcctcagactctgatagtgactatggcagcgatgttgatcgaaaacacttgaagaggaagaaccgcagaaggaacaagaagcatgagcattctgactctgatgatgccaggagacgcaatcgtagatctagaaggagcaccgactcaagtgatgagagcaacagtgaatacgagaccaggtctgaagaagaacgtccaaggaagaagcgctcgcacagaagaaggcatcaccggcactcttcaaagtcagactctgaaaactacagcagtgatgaggaacaacggagacctgccaaggaccattctcagagccgcaggcggcaccatcggtcatctgatgatgactcagacaaggacaaggtcaagtcaagacatgggaagggtctgagatctcgtgacgaggatgcaagagcagatttcaacagcaataagcatctcaggagccaatccttggaggagtcatcagatgatagagatgctgatgaatctgagaagatgaggaatggcaaaaggtctcacaagaatggcggccaccgtcaccatcaccatcgacaccaccatgaatgacatagtaactctgcagaacctaatgacaggaggcaagtactgaaagatggccagagggcccttgaaggtgacagcgcatactgaagatatcccagcaaggtcgagttaattgtccttattaaggacatgaagatcatttttttttcgttcctgatgttctcagataattattgtattgctgacaacatttctttgatttgtgaatatactaaacatgttgccta

SEQ ID NO: 114400 - DNA, 1185 bp, Zea Mays
tcgtttcgcgtcctagcccaggacaagttccctttttcttctcccaagtctgcgactaggaggcgacgggccgacgggccaagtttcctttctcttctcagtctgcgactggcggcggcgaccatcacgcacaagccttcgttgctacctgcgctccgccaattcggtgaattgcagtctaagcaaagggaaaaggaaggatcttttctccagacttggtaattttggacgacaaggttttgtattatctgatttttcgggatggatgccaaaaggttcctgcatctggtcgaggagaagaaaagaagggtcctcgagaagaaagaagccccactaaagtgggagcagaagctagaaacagcagctaaggccaaggttgatgcagaagcaaaggtgaagaagctaaattcaagaaagcacaggaggagaggagatttgtcctcagactctgatagtgactatggcagcgatgttgatcgaaaacacttgaagaggaagaaccgcagaaggaacaagaagcatgagcattctgactctgatgatgccaggagacgcaatcgtagatctagaaggagcaccgactcaagtgatgagagcaacagtgaatacgagaccaggtctgaagaagaacgtccaaggaagaagcgctcgcacagaagaaggcatcaccggcactcttcaaagtcagactctgaaaactacagcagtgatgaggaacaacggagacctgccaaggaccattctcagagccgcaggcggcaccatcggtcatctgatgatgactcagacaaggacaaggtcaagtcaagacatgggaagggtctgagatctcgtgacgaggatgcaagagcagatttcaacagcaataagcatctcaggagccaatccttggaggagtcatcagatgatagagatgctgatgaatctgagaagatgaggaatggcaaaaggtctcacaagaatggcggccaccgtcaccatcaccatcgacaccaccatgaatgacatagtaactctgcagaacctaatgacaggaggcaagtactgaaagatggccagagggcccttgaaggtgacagcgcatactgaagatatcccagcaaggtcgagttaattgtccttattaaggacatgaagatcatttttttttcgttcctgatgttctcagataattattgtattgct

SEQ ID NO: 114401 - DNA, 873 bp, Zea Mays
tcgtttcgcgtcctagcccaggacaagttccctttttcttctcccaagtctgcgactaggaggcgacgggccgacgggccaagtttcctttctcttctcagtctgcgactggcggcggcgaccatcacgcacaagccttcgttgctacctgcgctccgccaattcggtgaattgcagtctaagcaaagggaaaaggaaggatcttttctccagacttggtaattttggacgacaaggtaacaaagtgtataatcgtgcatagtctgtgttcgtttcttggtagcggctgtcttagcttctcctattgttaaccttctcagtgtggtacggtgattttataaacatgtaactacagctagttccgagctcttattactgtcacttggagatataaagataacataaaaagggcagacctcccgaggagtggtgtttgggaaagggataaaccaaggcatgcctccccgcagatgcggattagctgctttgaacccgcgacccagttacctattgagacaactctcatacaccaggcccaccctttttatataagataagatgttgggagttaaattaatttggaagtctgtgtctcttttgctgcgcccagattcataaccataatcatgtttaaacaagtgctgtgtgaagagccatatttctcacataagttttttaggatattgtgtatagttgtgatataattgtgatatctgtgagatcccttttgttaacatagttttatgagcttggaagcttagaagccatctagctttgaacatgattgattgatcactctccatagaaagttgacttgaacattaagtgaactgcgtgagtattatctgagaatactttgattacatttgatgc

SEQ ID NO: 114402 - DNA, 472 bp, Zea Mays
tcgtttcgcgtcctagcccaggacaagttccctttttcttctcccaagtctgcgactaggaggcgacgggccgacgggccaagtttcctttctcttctcagtctgcgactggcggcggcgaccatcacgcacaagccttcgttgctacctgcgctccgccaattcggtgagtcgcgctcttgctcgcttgttttgcatttcctttcaacctgtcttaaaaaccgacgaattttgtactgcgttttctcccgatttcctccctgaaaaaatcatcgaattttgaactatgttggtagcgcgcttgggctcagatcgcgtcttgggctccagaagcggtgattggagtcagatctgtgagctgcaaggtctagaggttttaaagcgcagttggtttgggggcggtgattctcgggtgttggttctgtcgcggtttgttgtgttttccagaatctcgggtgcgtcgaattctgcg

SEQ ID NO: 114403 - DNA, 4953 bp, Zea Mays
atgaagcgcggcaccagggacgacgccctcatggggtcccagctcaaacgctcgaacgttgtccgatccgatccgtcggctcagccacagcatatgtctgtgcctggttcagcgtctgcggccgcaccgccgcctcaggctggcgctgctccgccggcgcagccgcagcagccgtccggtgcggcctttaccaaccagaagctgacgacaaatgatgcgctcgtctaccttaaggcagttaaggataagtttcaggacaaacgggagaagtacgaggagttcctcgaggtcatgcgcgacttcaagagcgagaggattgacaccaatggagtgattgtccgtgtcaaaacgctgttcaacgggtaccctgaactgatccttgggttcaacgccttcttgcctaagggctatgcgatcaagctacaagaagagaagaaacctgtcgattttgtggaagctatcaatttcgtgaacaagataaagaatcggtttcagcatgatgaacaagtttacaaggcattcttggacatcctcaacatgtaccgcaaggataataagtctatccaagatgtttaccatgaggttgctatgctgttcaaagaccataaagatttgcttgaagagttccagcacttcctgcctgatacttcagtggctccacaagcagtggcctcaaagggtggtttggttaagcgggaggacaggagctctttagtgcctcctgcaaataagatccttcacaatgataagagggacagagtttacctgtcacatgctgaccgtgattttagtgttgaccgtcctgatgtggagcatgatcgccagagaagacgtcttgataaagacaaagaacggaaggtggaaagggacagaagggattatgagagagaagacaaggatggtgaacatgacagcagagacctggagctaggacagcgtaagcgaaagcctttttcaaggaatatcgaggataatgtaggtgctgagacacaccaaggaggccccagtgagaatcatggaatccacagtgtatctgcttcatcatatgacgataaggatgcgctgaagagtgtatacacacatgagttccatttctgcgagaaggtgaaggaaaagctggagcatgaagcttaccaagagtttttgaaatgtctacacatctatagccaagagattatcacaagaagtgaactgaagaacttggtgaatgatatactccaacattatccagatcttatggaagggtttaacgaattcttggagcattgtgaaaatatagatggatttcttgccggtgtcttcaacaaaaggccaagcacgagggctgttaaaactgaggataaagaaaaggatagagatcgggacagggaggacaaggatagagatcgggaaaaggaaagagaaaaggaacgagaaaggctcgataaaggatcaacattcaattcaaaggaaggttctagtcacaaaccttctatgttctctggcaaagagaagtacaacctatccaaaccaatatcagagcttgatctctcaaactgtcaacgctgcactccgagttaccggcttctacctaaaaattatcccatgcccccagccagcaacaggactgatcttggagcttctgttctgaatgatcactgggtatcagtgacatcaggaagtgaagattattcatttaaacacatgcggaagaatcagtacgaggaaagcttatttagatgcgaggatgacaggtttgagttggatatgctgttggaatcagttaatgcagcgactaagcgtgttgaagagctgatagagaagatgcaggacaactcagtcaaacctgagagcccaatacgcatcgatgaacatttgactccgttgaacctgaggtgcattgagcgactgtacggtgatcatggtctggatgtgatggatgttctacgcaaaaatgctagtgttgcattgccagttattctaactaggctcaaacagaagcaggaggagtggtcaaggtgtcgatcagatttcaacaaagtttgggccgaaatatatgccaaaaattatcacaagtcacttgaccatcgtagtttctatttcaagcagcaagatacgaagaacctgagcacaaagtctctcctgacagagataaaagaaattaatgagaagaaaaggaaggaagatgatgtgctccttgccattgctgctggaaataggcggcctatagttcccaatatgtcattcgagtatatagactcggaaatccatgaagatctacataaaatcattaagtactcctgtgctgaagtctgcaactcttcagatcaattagataaagtgatgagagtatggacaacttttctggagccagttttgggtgttcagcaaaaacatgggtctgaggatcctgatctagttaagaccaagagccgaacaacaaaattgggtcttgcaaatgtgagagaaagcaataccatagctgggattgtctccaagcaaagcaatggcgatgaaagtgaacaaggtccgtcatctcgggctagattagcaaatggagttgcagcgggcactcaaaatggtttccatgatgcagatcgaattgcccgtaaaggtgaagaaccatcaaacgctatactaaatggaagagtgcatggtgctgtctctgcagatgaaacactttccctgatcacacaaaacattgcttctaccgagcgaccagcagaaaatgctgctgctgttaggactgagcaacataaggcgaacttggtacttacgccaggcatgaatgcttctagaagttctcatgatgcagttgaggtggctggtgaaggcaagactggcaatgaaacattgctttctgccgagggaggggagaggttgggaccatctttaaatggcaccagcgagggaattaaagggcgcctaaataatgatggttctgtgccccacacttcaaaagttgaaagagaagagggtgaattgtcgcctaacggagattttgaagaggaccattttgttcctttcgaagatggaacatctaaaggaaaggaagattctacaagcagaccattccatggtaggcctggggaagtggtaccctcttctgccgaggcagctggtgagaatgatgctgatgctgatgacgagggtgaggaaagtgctcagaggtctactgaggacagtgaaaatgcttcagaggcgggtgaagatgcatcgggtagtgaatctggtgatggtgaggaatgctctcgtgaagatcatgatgaggaagaagaggatatggatcacgatgatcaggatgcaaaagctgaaagtgagggtgaggcagaaggaacaactgaaacacatgatgtggaagggggaatatcactaccactttcagaacgctttctgtactcagttaaaccacttgccaagcatgtacctacagctttacatgatcgagagttctcacgtgtattttatggaaacgattcattttatgtgttgttcagactacatcagattttatatgagagactactttcagcaaaaactaattctttcactgctgaaaagaaatggaggaattctaaggatacaaaccctcctgatttatatgcaaagtttatgagcgcgctgtacaacttgcttgatggttcctctgacaacaccaaatttgaggatgactgccgagctattattgggactcaatcatatgtcctctttactttagataaactgatttataaagttgtgaagcagcttcaagctatagcaacagatgaaatggacaataagcttctgcaactatatttatatgaaaaatcaagatctcctgggaggttctttgacctagtttatcatgaaaatgcccgtgttctactccatgatgagagcatataccgatttgaatgttgctcgagtccgacaaggttgtctattcagctgatggaatatggtcacgaaaagccagaagtgactgcagtatcaattgaaccaaatttttcttcgtatctttttagcgagtacttgtgtagtacgccagacaagaaattatctgaaggcgtctaccttggaaggaataagcggaaatattcaaataatgatgaaccttcagattctttgaaggcaatggatggtatcaatgttgtgaatggtcttgaatgcaagatatcctgcaagacctcgaaagtttcatatgtccttgatactgaagatttcttgttccggcttcggaagagaaggaaaattttgcggggcgggaatgtgcccgaccgtttgcagatttcatcaatatctgctgcaaaagtgcagcgcttcaataggttcctatccaaaccataggatcatttggcatacaaatgtatcgaaacctgttgctggggtcccagctgcttggcttgaacaatgattccatcgacgtcgcggagtcccctttcggaataacagatgggaagacatagggtaaatacagcaaagcgaagcgagcatgtaggccacagtagtcagtctgttgttccgaaagatgtgtatatatgtattagcagcatgattgttctgattatctttttactgattttcgatggtaggtctattccatcaagtatttaactaatcatttgttgctgttggtataggtcttttgttcttttagccgtcgttttgcattgaagatatgtagccaaaattaaaaacctgtgtcgaacagttatgtagtcttggctccattaatcaaacggacaccgtaatttcttggagccttttggtgaggttgccagcaacctctcttgtgtatccaattcaattgaagtataggatgtgtgttacttcttgatgttgtgtaaggtggccgaaattagtggacgtgccatccactatttttactattagattagaacatatctataaaatctagagaatgtgtaaaccgtttagtcttgttcgccatattgattatcattttaatgtattggcatggatggatggaaa

SEQ ID NO: 114404 - DNA, 1059 bp, Zea Mays
cgaaggatgccggccgcaacgcttcgtcctccgcgtccgctttcgcctttcccctcctcctcctcctctcgacaccaccaacacaacaccactccaccgccgttcgaatattccaagcttgagattggaggaggaggggaggggaggggagccgagcgcagaaccctaattacctccatcgattgctaacagctcagatctcagaggcaggggaggtaaaatgccaagagcaaatgagatgttcagggcagattctagaatgatggtggtttttggtgccttgacatcgaaaccagagcagctgacattcgaagaaaccctcagatttgtcaagaaagtgaaggcccgcgattacatgctatacctgtcattgttcgacattcttggcagaatggaactatcccagctcgatgcctaccgagagttacagctgctgtttggaaaccacccggatctgtgcgaagagctcgagaagttcaggccaccggtgcctacaaagcaggcagcaaacaacatctggccctgggtcattgtttgcgccgtcccgttggttgcggtcagcctgatcccggcgctcggaaacccagtgctgtggttcgttcagcaaactgtcggcgagaaaatggccgcctgattgaagaaaccactgcagtacatatgcgtgcagcggatgagcgtgcgggcctcctgtcatttgcgccatggcaactggcaatcgaatcagcattgtctttatatatgtgtgtatatatgttagagtagcattctggaaggatactcgtcttcttggtcatcaagtgccgctgagcaagaaatttatgccggtacatgctgtccgggcgcaaccgtgcaagtgcaagcccaccaaacacatatagcccgtttggacatttgagctgggttctaagtgctaaagatcaaaactacgcccaggaatgttattatgctaatgcggttgccccctcctgcttttttgtctatcaatgagctgatcaacgttacgttagattttattctgcactctggaaaagatacgctaatgattagttgagactatca

SEQ ID NO: 114405 - DNA, 1054 bp, Zea Mays
cgaaggatgccggccgcaacgcttcgtcctccgcgtccgctttcgcctttcccctcctcctcctcctctcgacaccaccaacacaacaccactccaccgccgttcgaatattccaagcttgagattggaggaggaggggaggggaggggagccgagcgcagaaccctaattacctccatcgattgctaacagatctcagaggcaggggaggtaaaatgccaagagcaaatgagatgttcagggcagattctagaatgatggtggtttttggtgccttgacatcgaaaccagagcagctgacattcgaagaaaccctcagatttgtcaagaaagtgaaggcccgcgattacatgctatacctgtcattgttcgacattcttggcagaatggaactatcccagctcgatgcctaccgagagttacagctgctgtttggaaaccacccggatctgtgcgaagagctcgagaagttcaggccaccggtgcctacaaagcaggcagcaaacaacatctggccctgggtcattgtttgcgccgtcccgttggttgcggtcagcctgatcccggcgctcggaaacccagtgctgtggttcgttcagcaaactgtcggcgagaaaatggccgcctgattgaagaaaccactgcagtacatatgcgtgcagcggatgagcgtgcgggcctcctgtcatttgcgccatggcaactggcaatcgaatcagcattgtctttatatatgtgtgtatatatgttagagtagcattctggaaggatactcgtcttcttggtcatcaagtgccgctgagcaagaaatttatgccggtacatgctgtccgggcgcaaccgtgcaagtgcaagcccaccaaacacatatagcccgtttggacatttgagctgggttctaagtgctaaagatcaaaactacgcccaggaatgttattatgctaatgcggttgccccctcctgcttttttgtctatcaatgagctgatcaacgttacgttagattttattctgcactctggaaaagatacgctaatgattagttgagactatca

SEQ ID NO: 114406 - DNA, 1053 bp, Zea Mays
cgaaggatgccggccgcaacgcttcgtcctccgcgtccgctttcgcctttcccctcctcctcctcctctcgacaccaccaacacaacaccactccaccgccgttcgaatattccaagcttgagattggaggaggaggggaggggaggggagccgagcgcagaaccctaattacctccatcgattgctaacagctcagatctcagaggcaggggaggtaaaatgccaagagcaaatgagatgttcagggcagattctagaatgatggtggtttttggtgccttgacatcgaaaccagagcagctgacattcgaagaaaccctcagatttgtcaagaaagtgaaggcccgcgattacatgctatacctgtcattgttcgacattcttggcagaatggaactatcccagctcgatgcctaccgagagctgctgtttggaaaccacccggatctgtgcgaagagctcgagaagttcaggccaccggtgcctacaaagcaggcagcaaacaacatctggccctgggtcattgtttgcgccgtcccgttggttgcggtcagcctgatcccggcgctcggaaacccagtgctgtggttcgttcagcaaactgtcggcgagaaaatggccgcctgattgaagaaaccactgcagtacatatgcgtgcagcggatgagcgtgcgggcctcctgtcatttgcgccatggcaactggcaatcgaatcagcattgtctttatatatgtgtgtatatatgttagagtagcattctggaaggatactcgtcttcttggtcatcaagtgccgctgagcaagaaatttatgccggtacatgctgtccgggcgcaaccgtgcaagtgcaagcccaccaaacacatatagcccgtttggacatttgagctgggttctaagtgctaaagatcaaaactacgcccaggaatgttattatgctaatgcggttgccccctcctgcttttttgtctatcaatgagctgatcaacgttacgttagattttattctgcactctggaaaagatacgctaatgattagttgagactatca

SEQ ID NO: 114407 - DNA, 1977 bp, Zea Mays
cgaaggatgccggccgcaacgcttcgtcctccgcgtccgctttcgcctttcccctcctcctcctcctctcgacaccaccaacacaacaccactccaccgccgttcgaatattccaagcttgagattggaggaggaggggaggggaggggagccgagcgcagaaccctaattacctccatcgattgctaacagatctcagaggcaggggaggtaaaatgccaagagcaaatgagatgttcagggcagattctagaatgatggtggtttttggtgccttgacatcgaaaccagagcagctgacattcgaagaaaccctcagatttgtcaagaaagtgaaggtgagttgaatgttttaataatatattatgtcatcgcatggttttcatctctgtgtaatccaaacgcctattctgagtcattgccttgtctagtaagttgcgatgattttgctggtaccattcacttacagtctagtactgaatctcatctcatgttttgatgcatagagttaccaactatctgaaatctatgtgattggaggcacaattgtgggtttgtaaccttgggattgcgcaatgtggtggtgtgtgtgctcgtgtgcagtccttgtaatcgaaaaacaaaaacatccaaaatgtggggtttacatgtattcctacttgtaagatcctgctgatacctgagtctaggattttgagtgaacaattttgttgaacttttttttaaacctacactccctctagtctaaactattatagttcactttagctttgtcctaagtcaaacttatctaactttgaccaaatttttagaaaagtgtgacaacatcgacaagttgaaatacatgccctatcaagacatgtttcaaggtgaatgtttttttttaaaaaaaaagtgctggcaggagttatgactagcttttaacggaactagttccttattataattataaatgttgatgcattgttcaaagagaagtttggcttaggacaaagcaaaggtgaactataatctgaaacagagggagtagcacatagagtaatcagcatgataacttgcttgccctgcaggtagcagctttctaatgagtgattgctcatcatgttgtatgttagctcatcacctgggaattgcaaccatagttcataaaaatatatatatatatactctggagctcccccccaaaatgtgctagctgtttaaaacaatcagtggaaaagaaatgaatgagttaattaagaatgcaaaggtacatagggaagagagactgtacaaagagaacttttgaccgtgaaactcaattcaaaacttctgctggtctcagttactcgtgctctcatgacctttgcttcacaggcccgcgattacatgctatacctgtcattgttcgacattcttggcagaatggaactatcccagctcgatgcctaccgagagttacagctgctgtttggaaaccacccggatctgtgcgaagagctcgagaagttcaggccaccggtgcctacaaagcaggcagcaaacaacatctggccctgggtcattgtttgcgccgtcccgttggttgcggtcagcctgatcccggcgctcggaaacccagtgctgtggttcgttcagcaaactgtcggcgagaaaatggccgcctgattgaagaaaccactgcagtacatatgcgtgcagcggatgagcgtgcgggcctcctgtcatttgcgccatggcaactggcaatcgaatcagcattgtctttatatatgtgtgtatatatgttagagtagcattctggaaggatactcgtcttcttggtcatcaagtgccgctgagcaagaaatttatgccggtacatgctgtccgggcgcaaccgtgcaagtgcaagcccaccaaacacatatagcccgtttggacatttgagctgggttctaagtgctaaagatcaaaactacgcccaggaatgttattatgctaatgcggttgccccct

SEQ ID NO: 114408 - DNA, 835 bp, Zea Mays
gcaaattgtaatgtagttgtttgttggtcttagttgagactgcttattttctgagaaagatgtggtaacatgcctttaatgatggtaatttcttcgtcttttgcagctcagatctcagaggcaggggaggtaaaatgccaagagcaaatgagatgttcagggcagattctagaatgatggtggtttttggtgccttgacatcgaaaccagagcagctgacattcgaagaaaccctcagatttgtcaagaaagtgaaggcccgcgattacatgctatacctgtcattgttcgacattcttggcagaatggaactatcccagctcgatgcctaccgagagttacagctgctgtttggaaaccacccggatctgtgcgaagagctcgagaagttcaggccaccggtgcctacaaagcaggcagcaaacaacatctggccctgggtcattgtttgcgccgtcccgttggttgcggtcagcctgatcccggcgctcggaaacccagtgctgtggttcgttcagcaaactgtcggcgagaaaatggccgcctgattgaagaaaccactgcagtacatatgcgtgcagcggatgagcgtgcgggcctcctgtcatttgcgccatggcaactggcaatcgaatcagcattgtctttatatatgtgtgtatatatgttagagtagcattctggaaggatactcgtcttcttggtcatcaagtgccgctgagcaagaaatttatgccggtacatgctgtccgggcgcaaccgtgcaagtgcaagcccaccaaacacatatagcccgtttggacatttgagctgggttctaagtgctaaagatcaa

SEQ ID NO: 114409 - DNA, 1190 bp, Zea Mays
catcactcgcattctcaccggcgagctcagggctcagcatccgcgcgcctcctctccaagcagaccaccaccgccggaagcatggccgcgccgctgcttcggcaatggcgcagcctcgccgtgctcggcgccctcctcgggctccacctcatcgccgccgtggcgcagtcgccgccaactacacccacgacccctgccgcaccaacgactccggccgcacccacgacccctgccgcacccacgactccggctacacccacgacccctgccgcaccaacgactccggccgcacccacgaccccggccgcacccacgactccggctgcaccgacgacacctatcgcacccacgactccggctgcaccgacgacccctgccgccaccccggtcgcgccagcaaacccgccgccggctccgacaacgccagcgcccaccgccaccccagtcgcgccagcgaagccgccgccggtcgcgcccgcggtcgcgccggccaaacccccgccggtgacgccgccaccagtgacacctcctcccgcgacgcctccacccgcgacgccgcccgcggtgctcccacccgccgtgctgccgcccgccgcggcgcctccgccgacggcgacgcctccggccgaggcgcccgcgtcgctgcctcccgcgacgacgcccccgcccgtggccgaggcccccgcggagctgccgcccgccgaggcgccgtccaagggcaagaacaagcacaagaggaggaggaagcagcacggcaagaaggaggcgcccgcggaagcgccgcagccgctgagcccgccagctcccgccgcgccgtcgccggctgatctggaggacgtgtccggccctgcaccgtcagccgatgtgaatgcgagttgccggcagcaccagaactgggcctccgtcgtcgtgcagaccgccatggcggcgcttttgttatcgctagcgtggtaaactaataaatcccagagagaaacgaaagatccatatatcagcgtaccagctcagctcatggtttaattatttccgcccttcctgttcatgccgcaccatcatacataggccggtgagattatctgcgggatttgttataggaaccgttggattgtggcttgtggtatttgtttttgacacattctgtatccattttttcgttaatttttggaataaagacgcacacttgctcacac

SEQ ID NO: 114410 - DNA, 130 bp, Zea Mays
cgcctccccccccccccccccccccccccccccgggtgtttactgttgtgtggcggcggcgcccatcacccaccagcgagcccgtcggagcaaacccccacggtgccacggtacccatcctccgagccac

SEQ ID NO: 114411 - DNA, 2947 bp, Zea Mays
ggaggcgaagacaggaaaaaaagaagggagagacatgagagcgaggtccttcttgccttcttgttcgtttgctgctctccccgctgttcctgtggttatctcctccttttgccttcaatgctgccgcgttactactggatctgactgacagacacactgcgtccgccgccttgaagctaatcttggtgacttggtcccgggctcccggccggcctccccaagattctcttgttctttcggaattccgtcattcctttgcagcctctccttcgcagcagaatccgcgtggaacaagtgctgcgcgtgttgctggaggtgagttttcacctcctccgcgttcttcttcaccgccaaaggcccaagaggaatttcgattggttgaagcgcgaatccgcggggttggcaggtcgatcctcccttggattgcagcgtgtgccatggttctctcctccaatcccaccaacaaggcagcagctcagctgtcacagccggcactgtagtgctttctagcctgctgctgggctccaatggcgtcctcaccttcgccttccccgggcaccatcagggcccccttgccgccttccagcgcaaccccgtcaccggcaaccaccacgcccacgccggcctccccggccccggtgacgcagcccaatgctaccccggccgaccctccctcgtcgccggtcgcgcctccccccgtcccctccgcatccacgccaccgccacagctcacttctccaccgccctccttgcctccgcctcctccagacgccgtgccaccaccgccacttgttgcctctccgccacccgccccagcagccgtagtgcccccaccctcgccgccggcgccggttgcagtgcccccaccacctacacctgctgccccgccaaaggcgtcgcctatacatataaggccccctgcggccgcgtcgccacccccaaccattctgccaacgcccaacccgccggctgacccaacgccgccgacattagcgcagccacctccaccacggcgccggccaccaagaacgcctcagacagaacctccacccctggcaccaccaccttctggaattcctgtcaaaccctctacgagcagtccctcaccgacatccgcagatcctttgatccccactccctctagcccctcacctccagggacgacaacgccaggctctggtagcactccatcggtgccagccccagcaatggcagccgatccagttcgcccggtaacgactgggggttcaaacaagtcgtctagtccagcctcacagagcagcggctccccagtagacagtggcggaatgtcttcaggtgcaaaggcaggcattggtgcagtcgttgccattcttgtgcttattagcttcgttggagctgcattttggtacaggaagaaacggaggagagttcatggataccatgctggcttcttaatgccttcgcctgcctcgactactacacaagtgctagctaaaacgaatttcagtgctgggagtcctgaatcaaaagattcaatgccagagttcagcatgggcaattgtcggttcttcacttatgaagaattgtatcaggtcacaaatggtttctctgcacagaacctgcttggggaaggtgggttcgggtcagtgtataagggttgcttggctgatggagagtttgcggttaagaaactgaaagatggtggtgggcagggggaacgcgagttccatgctgaggtggatattatcagtcgtgtgcatcatcgccatctagtatctcttgtagggtattgcatttcagatgagcagagattgcttgtctatgattttgtgcccaacaacacgcttcactaccatcttcatggacttggagtaccagtcttggaatggccatctagggttaaaattgcggctggttcagcacgcggaatagcctatcttcatgaagattgtcaccccagaataatccacagagatataaagtcctctaatattttgctggataataacttcgaagcactggttgctgattttggtcttgcaaggatagctatggatgcttgcactcatgtaactacacgagtgatgggaacttttgggtaccttgctccggagtatgcctcaagtggcaagctgaccgagagatctgatgtattctcatttggtgttgttctcttggagcttattactggtagaaagcctgtcgacgcgtcgaagccattgggcgatgagagccttgttgagtgggctaggccattgctcacgcaagcgctcgagaccggcaatgctggggagctggtggatgcccggcttaataggaactacaatgaagtcgaaatgttccgtatgatcgaagctgctgcagcctgtattcgacattcagcatccaggaggcctcggatgagccaggttgtgcgggtgcttgatagtctcgccgacgtcgatctgactaacggcgttcagccgggcaagagcgagatgttcaatgtcgcgaacacggccgagatcaggatgtttcagcggatggcgttcggcagccaggatttcaggaccgatttcagccagtccagctggagcagccagagcagaggccttgacgcatctggttccaggccattgtaaccctcgtcgtcgtagattcctacatctaactagctagggtgtttcgtgatgggttttgtacgtcatgtaattctttttgattggatcaatcgtgtgattattcttttgccatccctgtcttgtacgactgacatagatcatgtgctgcgctgaggccctgcttgcctgtgcgaagacctgctaactgatgaagagagactgctgcgtttagtcccaattagtgaattgctgtatcgaatttcctgtaattagcagtgcttttgaaatcagcggtttttttacaaggaacgctcagttcgagctgaacttttggggaaagattactcagatgtgtgccttttaga

SEQ ID NO: 114412 - DNA, 2677 bp, Zea Mays
ggaggcgaagacaggaaaaaaagaagggagagacatgagagcgaggtccttcttgccttcttgttcgtttgctgctctccccgctgttcctgtggttatctcctccttttgccttcaatgctgccgcgttactactggatctgactgacagacacactgcgtccgccgccttgaagctaatcttggtgacttggtcccgggctcccggccggcctccccaagattctcttgttctttcggaattccgtcattcctttgcagcctctccttcgcagcagaatccgcgtggaacaagtgctgcgcgtgttgctggaggtgagttttcacctcctccgcgttcttcttcaccgccaaaggcccaagaggaatttcgattggttgaagcgcgaatccgcggggttggcaggtcgatcctcccttggattgcagcgtgtgccatggttctctcctccaatcccaccaacaaggcagcagctcagctgtcacagccggcactgtagtgctttctagcctgctgctgggctccaatggcgtcctcaccttcgccttccccgggcaccatcagggcccccttgccgccttccagcgcaaccccgtcaccggcaaccaccacgcccacgccggcctccccggccccggtgacgcagcccaatgctaccccggccgaccctccctcgtcgccggtcgcgcctccccccgtcccctccgcatccacgccaccgccacagctcacttctccaccgccctccttgcctccgcctcctccagacgccgtgccaccaccgccacttgttgcctctccgccacccgccccagcagccgtagtgcccccaccctcgccgccggcgccggttgcagtgcccccaccacctacacctgctgccccgccaaaggcgtcgcctatacatataaggccccctgcggccgcgtcgccacccccaaccattctgccaacgcccaacccgccggctgacccaacgccgccgacattagcgcagccacctccaccacggcgccggccaccaagaacgcctcagacagaacctccacccctggcaccaccaccttctggaattcctgtcaaaccctctacgagcagtccctcaccgacatccgcagatcctttgatccccactccctctagcccctcacctccagggacgacaacgccaggctctggtagcactccatcggtgccagccccagcaatggcagccgatccagttcgcccggtaacgactgggggttcaaacaagtcgtctagtccagcctcacagagcagcggctccccagtagacagtggcggaatgtcttcaggtgcaaaggcaggcattggtgcagtcgttgccattcttgtgcttattagcttcgttggagctgcattttggtacaggaagaaacggaggagagttcatggataccatgctggcttcttaatgccttcgcctgcctcgactactacacaagtgctagctaaaacgaatttcagtgctgggagtcctgaatcaaaagattcaatgccagagttcagcatgggcaattgtcggttcttcacttatgaagaattgtatcaggtcacaaatggtttctctgcacagaacctgcttggggaaggtgggttcgggtcagtgtataagggttgcttggctgatggagagtttgcggttaagaaactgaaagatggtggtgggcagggggaacgcgagttccatgctgaggtggatattatcagtcgtgtgcatcatcgccatctagtatctcttgtagggtattgcatttcagatgagcagagattgcttgtctatgattttgtgcccaacaacacgcttcactaccatcttcatggacttggagtaccagtcttggaatggccatctagggttaaaattgcggctggttcagcacgcggaatagcctatcttcatgaagattgtcaccccagaataatccacagagatataaagtcctctaatattttgctggataataacttcgaagcactggtaagaatgctttctacataatttcagtaacatcttataatggagtcatcagtcattgcattggtgcccatttgctaggttgctgattttggtcttgcaaggatagctatggatgcttgcactcatgtaactacacgagtgatgggaacttttgggttagtaaagcagcgacaagtccaagagagcagttaaaacatgcttgtaatctgacgcatgtttcttaattaggtaccttgctccggagtatgcctcaagtggcaagctgaccgagagatctgatgtattctcatttggtgttgttctcttggagcttattactggtagaaagcctgtcgacgcgtcgaagccattgggcgatgagagccttgttgagtgggtaagctatatcagtaatttgatccatgaaaaggtttccagttttctcacccttcagtagcaaatgaaaactagccatatctttaagttatttgcacatttcaaaatcttaagtagacttattcactgattacgtccaattcagtatgggatttaacagtgtatccagtccagccctacttcacgctatcgatatcttcaaatcccatctcgaagtgtggtttttctggaaaaaataatgctggggaacaatgtgggccagcaattttttttgtgacagcgtagtcatttgcaggcta

SEQ ID NO: 114413 - DNA, 3114 bp, Zea Mays
atgttggacacgacggacgacatcgcggaggggatatcattccaggcgttcgaggacgactgccgcctccttgccagcctcctccacgacgtccttctccgcgagctcggcccccgcttcatcaaaatcctcgagcgcaaccgcatcctcgcgcagagcgccgtctccatgcgcgcggcggggatggaggacacggcggccgtcgtagagcggcagctggagaccgacctggccgcaatgcccctggaggacgcgctctgcctggcccgggccttctcccactacctcaacctcatgggcatcgcggagacccaccacagggttcgtaaagcacgcaacatggaacagctctcaaaatcatgtgatgatatattcaacaagctgattcaaagtggtgtcccttcagaacaactatatgacactgtctgcaagcaagaggtcgaaattgttctgacagctcatcccacccaaataaatcggcgaactctgcaatacaagcacctaagagtagcacatctcttggagttcaacggtcgccctgatctaagccacgaggataaagaaatgctaattgaagatctggtaagggaaatcacagcaatatggcagacggatgaattgaggcgccataaacctacaccagttgacgaagctagggctggtcttcatattgtggagcaatccctttggaaagcggtaccgcactatcttcgccgtgttagcagtgctctaaagaagcacaccggaagcccactaccgctaacctgcacaccaatcaagtttggttcttggatgggtggtgaccgagatgggaatcctaacgttacagcaaaagtgactagggatgtttcgttgttgtcacggtggatggcaatcgacttatacatccaggaattagacaatctcagctttgagttgtctgtcaatggatgcagtgataaggttgcaagcttggctaatgacattttgctcaaagactctgcagcagccgaggacctaaaggccaatacctggaacaaaacagtaccgcagaacaatgcaaagcttcataacttggctctgcctgcacaacttccttcgggtgctgatcttccttcatgtacagaatgcagtgatggagaatctcaatttaggatgataaatcttccaaggaactcaaatcgtccgggggctcttaatttaacagaaaagtttgaagacagtccattatcatctcctactggtcgtcaatcacacatagctagaactccaagtggccgtcaaccaaggaaattgttcaaagaatctaatataggtcgatcaagtagcttccagaagctacttgagccaagcctatctgacagaccgggaattactccttacagggttgtccttggtaatttgaaagaaaagctggtgaagacacgcagaaggcttgagcttctgcttgaggatctaccatgtgactatgacactgaagaatactgtgaaacatcagatcaacttctggaaccgttgctcttgtgccatcaatctctgcaatcatgtggatctagcgtgctagctgatggccggttagcagatttgatacgaagggttgcaacctttggtatggttcttatgaagctcgatgtacggcaggaatctggtcgtcacacagaagcacttgattccgtcacatcctacttggatcttggtgtttatagtgagtgggatgaagaaaagaagctggatttcttgactagagagctgaaagggaagcgccctctagtgccccaaaacatagaggttgctgctgatgtgaaagaagttctggacaccttcaaagttgctgcagaactagggagtgactcacttggagcatatgtcatttcaatggcctcaaatgcaagtgatgtccttgccgtggagctgttgcagaaggatgcaagacttgcagttagcggggacctaggaaggccatgccctggtggcacgttaagagttgttcccttgttcgagaccgtgaaagatttgcaggcagccgggtcagcaatcaggaagctactgtccatcgactggtacagggagcatatcatcaagaaccacaacggacaccaggaggtaatggtgggctactcggactccggcaaggacgccggccgcttcacggcggcatgggagctgtacaaggctcaggaagacgtcgttgccgcgtgcaacgagttcgggatcaaggtgacgctgttccatggccgtggcggcagcatcggccgaggcggcgggccgacgtacctggccatccagtcacagcctcccggctcagtgatgggcactctccgttcgacggagcaaggcgagatggtgcaggccaagttcggccttccgcagacggccgtgcgtcagctggagatctacacgacggcggtgctgctagcgacgctgcgcccgccgcatccgccgcgcgacgccaactggcggaacgtgatggaggagatctcccgcgtgagctgcgcgcactaccgttccacggtgtacgaggacccggagttcatcacctacttccatgaggcgacgccccaggcggagctggggcacctgaacatcgggagccggcccgcgaagcggaagcccgcgggcggcatctcgagcctgcgcgccatcccctgggtgttcgcctggacgcagacgcggctggtgctccccgcgtggctgggcgtcggcacagggctgcaggacgcgctggaccggggccacggcgaggagctccgcgccatgtacgcggagtggcccttcttccagagcacgttggacctgatcgagatggtgacggcgaaggcggacgcgcccatggcggcgcactacgaggagatgctcgtggcgcgggagcggcgcggcgtgggcgccgggctgcggcgtgagcttgcgcgcacggagcggtgcgtgctggcggtgagcggccacagcaagctgacggcgcacaaccggagcctgcggcggctgatcgagagccggctcgcgtacctcaaccccatcaacatgcttcaggtggaggtgctccgcaggctccgccgcgacgacgacaaccgcaggctccgcgacgcgctgctcatcaccatcaacggcatcgccgccggcatgcgcaacaccggctga

SEQ ID NO: 114414 - DNA, 2280 bp, Zea Mays
actacaaaaccaatcccccgtcttgcgaggtcgcgagtctctccaactccgtccctctggcctcagcacaacgccagaccgcctgcctgtgcttgcagccaggccggccagctgcctgcctgcctgttgtcgtctgcggcgcgacggcggccgcccggtcgaccgcccgcattgggatccccagagcagcgcttggcataggggaatgtcccgggtcagccaccgtcgcctctgcgctgcgaaagccccgcatttacttgccacctagaagggggcacccctcgcgagacccagcgccagacagagccagcaatggctgctgctgctgctcctcctcctcctatatagcggggcccgtgccgagcgctcgatccagttcttctgatctctgacttctgagcgaggagtggacgagtggtgtgccgtcgtccggttcccgttggtttggcgatgaggcgcgctcgcggtcgccgcgggctgctgcttctcctcggcgtggcgctctcggcggctgcgctgctccgtggctgcgcggggcagcaaggggaggacggctcggacgcccctgcggcggcggcggcggagacggcccccatggaggagaaggagcgcagggcgctgtacgccgccatcgagagcttcgtcggcaaggggtggaacggctccgggctctacccagacccctgcggctggtctcccatccagggggtgtcatgtgatctcttcaatggcctgtggtacccaacagtgatgagcattggcccagtccttgacaactcgctgcagtgcggccccgacgccaagttcagcgcccagctgttcgacctgaggcgcctccggacgctgtctttctacagctgcttcccggcgagcaaccccacggccatcccgaccggcagctgggagaagctggcggggacgctggagacgctggagttccgcaccaacccgggcctgaacggcgccatcccggcgtccctcggccgcctggccagcctgcagtcgctggtgctcgtggagaacaacctgacggggcccgtgcccgcggagctgggcgcgctgtcgaggctgagacggctggtgctgtccgggaacgggctgtcggggccgatcccggtgacactcggtggcctcacggggctcctgaagatggacctgagcagcaacctgctgcagggcagcatcccgccggagctcgcggggctcaggagcctcacgctgctggacctcaggaacaacagcctcaccggcgggctgccccagttcgtgcagggcatggcgtcgctgcaggacctgctgctctcgaacaacccgctgggcggcggcctgccgcagtccggctggggggcgctggcgggcctggccacgctggacctgtccaacgtcggcctcgtgggcgccataccggggtccatggcggccctgacggggctccggttcctggcgctggaccacaaccgcctgacgggggccgtgccgcccgagctcgcccggctgcccagcatcggcgcgctgtacctgaacggcaacaacctgacggggacgctggagttctcggccgggttctaccagcgcatggggcggcggttcgcgtcgtgggacaaccccgggctgtgctacaacgtcgcggccgtggacgcggcccacgcgccgtcgggcgtggtggtgtgcaaggacctgcaggagcccagcgtgggcggcggcgcgcgggacggggacggggacggggacgcggaggaggacgggacgaagcccgaggcgggctccagcctcgtggcctcctcgtcgtccggcatgccggttggcagtgtcggtgggctccggtacctggtggtggttcggggaatggcggctgcggttcttgggttggtgtccctcctacaatagcaagcaagcaggttcagaagaagaacacggagaaacttgaagtaatgctaggtaggttagcacgaagtagtttctgcgcgttctctgtgatcttttggcatttgtttttggctgctggtggcttaccatcgtcagatggtgacggaggaaggagggaacatggatctggatggtgtgagccacagattacattacagtagtagagtaaactatgagagttcttgtggactgaaggtgtgtagtggtggatagggtagcttctccggggttcttttgtgtgtaattagcctgtgtcgccctgtggtgtcatgttacaacagcaagtggaaatctaagctggttcgtccgttgttggagaatcagaaaaaaaaaaattgtcgtgcttcattcaca

SEQ ID NO: 114415 - DNA, 2361 bp, Zea Mays
actacaaaaccaatcccccgtcttgcgaggtcgcgagtctctccaactccgtccctctggcctcagcacaacgccagaccgcctgcctgtgcttgcagccaggccggccagctgcctgcctgcctgttgtcgtctgcggcgcgacggcggccgcccggtcgaccgcccgcattgggatccccagagcagcgcttggcataggggaatgtcccgggtcagccaccgtcgcctctgcgctgcgaaagccccgcatttacttgccacctagaagggggcacccctcgcgagacccagcgccagacagagccagcaatggctgctgctgctgctcctcctcctcctatatagcggggcccgtgccgagcgctcgatccagttcttctgatctctgacttctgagcgaggagtggacgagtggtgtgccgtcgtccggttcccgttggtttggcgatgaggcgcgctcgcggtcgccgcgggctgctgcttctcctcggcgtggcgctctcggcggctgcgctgctccgtggctgcgcggggcagcaaggggaggacggctcggacgcccctgcggcggcggcggcggagacggcccccatggaggagaaggagcgcagggcgctgtacgccgccatcgagagcttcgtcggcaaggggtggaacggctccgggctctacccagacccctgcggctggtctcccatccagggggtgtcatgtgatctcttcaatggcctgtggtacccaacagtgatgagcattggcccagtccttgacaactcgctgcagtgcggccccgacgccaagttcagcgcccagctgttcgacctgaggcgcctccggacgctgtctttctacagctgcttcccggcgagcaaccccacggccatcccgaccggcagctgggagaagctggcggggacgctggagacgctggagttccgcaccaacccgggcctgaacggcgccatcccggcgtccctcggccgcctggccagcctgcagtcgctggtgctcgtggagaacaacctgacggggcccgtgcccgcggagctgggcgcgctgtcgaggctgagacggctggtgctgtccgggaacgggctgtcggggccgatcccggtgacactcggtaacgaccgccgcgccgacgagctgctgctgatcgtggacctgagcaggaactatctaaccggctctctgccttcgtcgctaggtggcctcacggggctcctgaagatggacctgagcagcaacctgctgcagggcagcatcccgccggagctcgcggggctcaggagcctcacgctgctggacctcaggaacaacagcctcaccggcgggctgccccagttcgtgcagggcatggcgtcgctgcaggacctgctgctctcgaacaacccgctgggcggcggcctgccgcagtccggctggggggcgctggcgggcctggccacgctggacctgtccaacgtcggcctcgtgggcgccataccggggtccatggcggccctgacggggctccggttcctggcgctggaccacaaccgcctgacgggggccgtgccgcccgagctcgcccggctgcccagcatcggcgcgctgtacctgaacggcaacaacctgacggggacgctggagttctcggccgggttctaccagcgcatggggcggcggttcgcgtcgtgggacaaccccgggctgtgctacaacgtcgcggccgtggacgcggcccacgcgccgtcgggcgtggtggtgtgcaaggacctgcaggagcccagcgtgggcggcggcgcgcgggacggggacggggacggggacgcggaggaggacgggacgaagcccgaggcgggctccagcctcgtggcctcctcgtcgtccggcatgccggttggcagtgtcggtgggctccggtacctggtggtggttcggggaatggcggctgcggttcttgggttggtgtccctcctacaatagcaagcaagcaggttcagaagaagaacacggagaaacttgaagtaatgctaggtaggttagcacgaagtagtttctgcgcgttctctgtgatcttttggcatttgtttttggctgctggtggcttaccatcgtcagatggtgacggaggaaggagggaacatggatctggatggtgtgagccacagattacattacagtagtagagtaaactatgagagttcttgtggactgaaggtgtgtagtggtggatagggtagcttctccggggttcttttgtgtgtaattagcctgtgtcgccctgtggtgtcatgttacaacagcaagtggaaatctaagctggttcgtccgttgttggagaatcagaaaaaaaaaaattgtcgtgcttcattc

SEQ ID NO: 114416 - DNA, 1606 bp, Zea Mays
actacaaaaccaatcccccgtcttgcgaggtcgcgagtctctccaactccgtccctctggcctcagcacaacgccagaccgcctgcctgtgcttgcagccaggccggccagctgcctgcctgcctgttgtcgtctgcggcgcgacggcggccgcccggtcgaccgcccgcattgggatccccagagcagcgcttggcataggggaatgtcccgggtcagccaccgtcgcctctgcgctgcgaaagccccgcatttacttgccacctagaagggggcacccctcgcgagacccagcgccagacagagccagcaatggctgctgctgctgctcctcctcctcctatatagcggggcccgtgccgagcgctcgatccagttcttctgatctctgacttctgagcgaggagtggacgagtggtgtgccgtcgtccggttcccgttggtttggcgatgaggcgcgctcgcggtcgccgcgggctgctgcttctcctcggcgtggcgctctcggcggctgcgctgctccgtggctgcgcggggcagcaaggggaggacggctcggacgcccctgcggcggcggcggcggagacggcccccatggaggagaaggagcgcagggcgctgtacgccgccatcgagagcttcgtcggcaaggggtggaacggctccgggctctacccagacccctgcggctggtctcccatccaggcgcgtccctgcccttcctgcgctttccctttcgcatcgatctatgttaccgtgctgttcgattttctggcccgcgtatgttcgttcatcatgttcgttcttcagacgcgcgaagctttcctctttggttttttcggctttgcccgtcctcgtcacacgccctttctcggtgctcccctgctgcctgctttgagctccaatccaaaaaccgtttgcgagcgaaaggaggagcaagtcggtagcctccgaaatgaaattggtgccctgtttggggatgcaggacgcacgccaagtcgccaccaaatctcctgctgtaatttcccgtgttaaaaccttcctcgtctcgcttccagaatttctggccttccggtagcctctgctgtttttgtcttgtgttcgtccttcgtcgcactcgtgccctgctcctcaactgttgcttcgagattgtggcactgttttgctgtgcgccgctgcacattcagttcactgttggacgagacctctgcttgatccccttgtgtcttcgcatctcagccttttgctcgatatggtaggaggatctgatctcttgggcaggaactttccactcacatgaaaagaacctcccatgatttgaaatggcatgctccgcccaagatttttctcatacagtactactactctctagtatagattttagtagtaccttgacatcttcttccttttgctcgcgcccgagaaggaatcagtcctactactccataggagtttttgctctaacaattactggaatttaccgcatatttatcttccttcacacggtacactggaatttcattctggttgttacagtaccagtaaagttaagaaggggccaaatttgtactaggtgcacctttaagaaatgtcgccatcttggatc

SEQ ID NO: 114417 - DNA, 282 bp, Zea Mays
ttgaattcaagtctccacactttttcggccaccaaatttgaattctattctatgttttcctgtacaacaaataggagaaaactagacatagcaaaaagctccaagcagcacgtggatggtctcgaagctgcccttgtgcttctccatgttcttgatcactcctacacgcacggtgttcctcccgccggtcaccatgaccgcgttgccgacgtcaaacttgatgaagtccatgatcttgttagtctctagatcgatcttgatggtgccatttctgcaaacttt

SEQ ID NO: 114418 - DNA, 92 bp, Zea Mays
attgatgtggccatttacttgaccaatgtcgtattgacaggccacatatgcatgtttgctttaccaccgcaattggcaatagtcatctaaac

SEQ ID NO: 114419 - DNA, 734 bp, Zea Mays
atggcggcagcggggcggactccgaatttctgcggcggccaagtcgaagacacaggcggcgcccggagaggcgctagcggaggcagccgggtcccgcggctagctgcgcgagtacgtggatcgcctcgcgtcctcggcctcctccctctccgagcggtggagcgcgcggtggagccagagacaccacagccgcaaccagagcaacctcgcgagattggggccagaacaatagctctatttgctatggaactacctgtaagtcccggatccaagatgcacccctacctcaggaaccttatggtgctcgggctcagctttcggcaggatcataatatcatcaccaatcaagcgctgaagcggcatagtgtcgatcctgaatggtggatgtgccctgccatacctgtgaaagacattaccccggcaccaccgccttcagtggcaatggcgaaggtgacagacaagaagaagactaagaagaagtcactggggacaatatacgaggaggggagtcctgagcctgccaatggcgacgacgatggagctttggcactgccagagacaggattggggcttagcttgaatactgacggggtgctcaaggcgtggtgtggcagaggctctgcgtttgctgatggcaatgggcctgacttgccattgtcccctgctcatgtgatagtaacacatgaacaaaagtgcccttttaccagttttttatcagggtgcaattctggaag

SEQ ID NO: 114420 - DNA, 1189 bp, Zea Mays
actcgaacgcgccggtgggagaggagaaccgcaccgcggcgcagacatgggcgagtactgcccctccccgcagggggactccgcgctggcggcgccgcccttgacgctcccctcctcgtccccagcgacggcggttaggccaagctacgggagctgcgaccgcagctacgtgaagcaggtcttcgacaacctccacggcagcatctccgtagacccgttggccctgcaatttgttgatacagaggagtttcagaggttgcgggatttgaaacagcttggtcttacatacctcgtctatcctggagcggttcacacacgctttgaacactcattaggtgtctattcgttggctggaaaggcaataaataatcttaaaacatatcagggagtagagcttggaattgatcctgtcgacatgcagactgtaaaacttgcaggtctcttgcatgatattggacatggacccttcagtcatttgtttgagcatgagtttcttcctcgagttgatcctggctcatcctggtcccatgaaaagatgtcagtgctccttttggacagtattgttgacaaacatgcaatagatattgaaaatgattacctcaaaatggtcaaggacatgataactgccagctctgatcctgccagcacaacaagtgcaaaggagaaacattttctttatgacattgtcgctaatggtcgcaatggtatagatgttgacaagtttgactacattggccgtgactgcagagcatgtggtcttggatgtaattttcagtattggaggttgatggaaggcatgcgagtgatgggtgatgaaatttgctaccctgccaaagattacttgagcatccataaattgttttcaacacgtgctgatctgcaccgaacagtctacacccatgccaaagtgaaggctgttgaactcatgctcgtggatgcccttgttgaggctaatgattacttggggatatcattgcatgcacatgatccagaagatttttggaagttggatgacacaatcattaaaacaattgagactgctcctaacaatgaactgaagaaagcaaaagaaatcattcaacgtattcgccgaagagaactctacaagttttgcaaccagtattctgttccaaaggacaagctggagcatttcaaaaatattactgcacaggacatagtttgttcacag

SEQ ID NO: 114421 - DNA, 2273 bp, Zea Mays
ctcttctttcttctcgcctcgcgctcctcccttcctcgtaggttaccgttggtgcgagtgcaacgcaaccccaccccagctgctaaacccgagaccgaacctcgtatcgtccagcttaaccgcacccacctttcgcgactgggatttttctcgagatcgatcgatcgctttccatcagagagcagcatcaccttcttgccttgcccacgccccagttgtgactgcctgccggttgcgaatcgaagcgtaaacatgacgacgctgtcgtccggcgtcctcctgaagctcctggacggcatgaagagcggcgccgccaagcccgtgggcgagcaccggacggcggtcctgcaggtgacggacatcgtgccagcggagctggacgagaaggacctcttccccaagcacggcaagttctacgtcaaggtctccgatgcgtcgcactccatctacgccacgctcccgctggcgcaggcagacctcgtgctctccaacaagctccacctcggccagttcgtccacgtggaccgccttgacccggcctcccccgtccccgtcatcgttggcgccaggccgctccctggccgccacccgctcgtcgtcggcacgcccgacccggcagctagggccaagcccgccgcgccgcgcagggggtcctggggccccgagcagaatgccgccatcaagcctaccacgctcaacttcgacgccgagaggatgacgccagtcaaggagcggccggccttgtcgactccggtcaaggaccgcgctggtggcgcgacgcctgccagggagcgcggggctgcggcgacgcctggtagggagcggaccgccgtggcgtcgccggcgctgagctctgcgtcgttgaggaagagcagcagcgtgctgcccaggctgaccaggagcaagagctttgtcgcggacagggatcagcagcatcctaggatccccaagagcccattccccactgagaagagctcggtgagctgcacagcctcgagggcgacgaggagggtggccaaggaggaagagccctcctcgcctccttctgatgatgagctcggaagctcggccacatccaccaagaagcgatcggcgacagctgctcgcgtgccggtgccggggaagctcagtctactcgggaaggacgcaatggagcagagagagcaggcgcagaaggttgccctggaggcactgcgcaacgcatcagccacggacaacgtggctaggatctacaagttgttctcggaagtgagcaagacggcgaggccggaagcgccggccacctgttttgacagcttcctcagctttcaccaagaggccgtgcaggccgtcaccgacattgaggcgatccaggcggccacctcgatggccgcggccgtggcgagtgacgagcagcagctcgaagatgcgccgccggtcctgcaggagatagcacagaacaggacggtggtgcgtcggagaggcatcggcttggggagcgtgtccaagtcagtgtcgttcgcgcccggcacgttggacccgaagcaggacgatggaggcggcaaggccatccggagctcgagtgccagcaggaagtgcctcgccacggacaagatcggcgaagacggtggcgacgagaagagatcatcttcttctggtccttcctctgccaccaccaccactgcgcactctgctctgggctcctcgctgaagctggctaagaagatacaggccgaagcagggagctggttcatggacttcttggaggccgcgctggagaccgggctgaagaagagcaaggcgtcttccatgggggacgggcggaagcaaagcagctgctgttgcccgcagtcgttgatgctgcgggtgatcaactgggtggagatggagcagagcagcggcgacagcagcggcaggaagactgcccacccaagagctgcggccgttgcgcggaagctcagaatcaaggccaaaaacccctcctgatgcgctgctgccctctgattcttgtgagaagctagtttgtctctgattcttgtgagaatgtacccagatagaatccgtagaataagaaagtgattgcctccattgttcttgtcacggcatagcagattgtttcaagtgttcttgaagtaggatgacctgttcccttatcactaatcttaaacagcactacagcagcagaacaatggaggtgttgtaccgtagttactgttgaataattagacaaattccagtttaaattccgaatataaataatcatgacaaaatcagaagaactgaaataacaagcc

SEQ ID NO: 114422 - DNA, 1288 bp, Zea Mays
gcacagcagtgccacggagccatctcccccggcctctatctctatctctctcgtcttgtcttggcctccttgccttctcccccctccgtgccgtggccagtgggtgctgttgcaagttgcaacttgtccctcccaacccaaggcagcaagcaaagcacagcagtgctgttgcttcacgcccggcaggagcagcgacgagccgacgagaacagccaaggagagatctgcagaccggtcggtcgatcgagatgaagagccggaggcagagcagcgggggcagctcgggcgcctgcgccgcgggggagaggaacgcgcacagcagcggcggggggtgcaagctggagaggaaggacgtggagaagaaccggaggctgcacatgaagggcctctgcctcaagctctcctccctcatccctcccgccgccgccaccacgcacgcctccctcctctccgacgccgcgtcggcggcggtgtcctccaatcccggcaacaagcaggacgcggtgacgcagctggaccagctggacagcgcggcggcgtacatcaagcagctcaaggagcggatcgaggcgctgaagcagcggaaggcgggctgctgcaacggcggcggcgcggccacggaggctgcaacggcggcggccgggtccaccggcggcggcggaggcgtgcgcatgccggtcatcgaggtgcggtgccaggacgggacgctggacgtggtgctcatcagcgaggccgccaggcccttcaagctgcacgaggtcatcaccgtgctggagcaggagggcgccgaggtggtcagcgccagcttctccgtcatcggggacaagatattctacaccgtccactcgcaggcgctcagccccaggatcggcgtcgacgccgccagggtctcccagaggctgcacgcgctgctgcttgctccgacgatcctcgtctgagctgagagagacctccagaccacggcctatgcaaccaccgtgctaatggcgtagtagtactctagtatagtactagtactgtatgagttggtagtcaaagctgcagcctgcagcagagagcggtgcagtagcggggaactataaaccgccggcgcattcttgctggtttctttgcagttgtgcatatttaggagcgagcaaagtaaacacaggctgcctttttgtttttgtttttgtctctcccacctcttcgaaccagtagactactactgctactacttgtgtctatcagtctatgctcggatccagtgttaattgttttaccagaaataactacagttttgcttaca

SEQ ID NO: 114423 - DNA, 618 bp, Zea Mays
agatcgatggagatgagagcgaagaagagcagcagaagcagcacgagcaacaccagcggcagcacgacgaccacggcggtggagaggaaggagatcgagaggaggaggaggcagcagatgaagagcctctgcgccaagctcgcctccctcatcccgaaagaacactactcctccaaggatgctatgacccagctgggtagcctagacgaggcagccacgtacataaagagactcaaggagagggtggaggagctgcggcacaagagcgcctctgcacggctcttggccgctggcagtggcacgagacgaggcggaggaggaggaggcgcctccacatcgtcggcagcgacgaccacggcgagcggtggcgcaggatcatctgaagaagccggccggcgggaggacgacatgccgccggcggtggtagaggttcggcagcacaatgacgggtcaagcctggacgtggtgctcatcagcagcgcggcgcgacccttcaagctgcacgaggtggtcaccgtgctggaggaagaaggcgccgagaccgtcaacgccaacctctccgtcgccggcaccaaaatcttctacaccatccactgcaaggtacgtacgtacgtacgt

SEQ ID NO: 114424 - DNA, 2822 bp, Zea Mays
cgtcatcatctccgccgcgcctgcgccttccaacccacaccactcttcccctccccgtccctttcaccaccaaggttcctccatcctccgcggtggctgaccaattccaccattcggctccacgtttattttctaaataactgctactccggattccatacttcgaattgatcccgtcctcacgcggcagcacctatcccccgcgggtcgcatcgagtccaccaccgctggcgtcggttccttccgcgcaattccaccggcaaaagcagagtatactaccgactagagaagagtttggagtttggacccgctgcaccccgaagtcccgaaccctacgctgggggaagctctcacgtcgcgcccgcccatggaccgcctcgccgacggccttgccgcggcatccctttccgacccagcggaccagagcgccgccaccgctggtttgcctagcgccgattacctcctcagcgtcatgcgcgccgtagagggcgccgacgccaccatccgcacccagttggaagagaatagccgtctcaaggaagaattgatgaggaaaacacaacagctacagaggatgagggaagatgctacatcccaaagttctttcagtggactaggtcaagagcgcaattctgtttctaataaaatggatggctctagctcttcagtaaatcctcaaagtaccttgatccatcctcagaatggatgttgtgagagtagagagcatctgattgatgaaagctcaaaacaaaaataccttgacagtccccaggcaaatggagcatttaaaagatcattaggcgaacaaactgctgttgatagtggtggcccatcacaattctctactccctcatctcggtcccattctccaaatagacatagaaaagatggagattatgattctagattattaccagtttcagagatgaactcgaacatatcctggaagcaggaccttactgttaaggtcaaagaaggggaagaagagattgcacaattaagaaaacatcttgctgattactctgtgaaggaagctcaaatactcgatgataaatacaagttagaaaaacggattgcttatatgcgtatggcatttgaccagcagcagcatgatttaattgatgcagcttcaaaagctttgtcatacaggcaagatattattgaggaaaacattcgtctcacgtatgcgttgcaggcagcccaacaagaaagatcaattttcttatcttctttgcttcctcttctgtccgaatatgatgatctccagccttcagttcttgatgctcagtcaattgttagtaatttaaaggttttgtttaaacatttgcaggaacgacttattgttactgaggacagattaagggagtctcgataccagattactccatggcatactgaattgtcgaataataccagcaatcctgtgtctactaatcctcctgctggaaaagcattggtgactacaagcaaaagcagccttgatattgtctcccagatggtgtatcctcacgtacaatccccaatgtcttcccctgttcaagctagaggtgattggggtgcatttggtaacaaaaaccatcaagatatttcaaatgaggttcctataagaaatgctggacatgatgacaagggagggacctctctttcaagcagaagccaatataggactgatgttcctcctcaagtatctcaaggtgattccagtgctgtccattttgactttgagactcagagtcaaaacccaccattcaagggtcttagcagaaatgatgtactggatggttcagatagtgctgaagcccaaaacacacaagaaccttctactcgatggggtctaggggactcatctaatttggcatctggccttgaggatgcaaacccttcatatccttatcttcctacagttcttgaggaacctggttcttctttctccgaagctgcagaggatgatccattgccaggcatagaagggcttcgaatcacaggtgaaccttttcctggacaagaacttcaagcaggtggatactccatcaatggtaccacaacttgtaattttgagtgggtgcgccatttagaagacggctcagtaaatttcatagaaggagcaaagcagcctagctatgttgttactgccgatgatgtggacactttactcgccattgaagtccagcccctagatgataggaaaaggaagggagactttatcaaggtttatgctaacgggcagaggaaaatttcatgtgatcctgaaacaaaggagcttattaagagaacccttgacattgggcatgtgacctatgaagtccaagtccaactgcctcaggtcagatttttagacatatgggaaccagctgttctagcaataaagagggaaggttacagcattaaatgtaatgggcagcgtggtgttctaatcacagagaagtttcagcaaggaactgctattcatattccatatgggcgtccaacagagttctcgattacatctgctgcgtctgctgatggtgtcagttataatctgaagccagtagaaaatacactattgcgggataccattgttctagtactaaggttgttcaaaaatatggctcttgagagaagaggaagaagaaagaagggtcttttcttcaagtagtttcagctatattacacttgtttctacgctgcttctaatgtatgtatgtagcattttggttgatcggcgtggtgcacaagtgttctgtttctgtaaaatactagacgattgtgttgtaaaactaaccaaaatgccaagtacacatgttaatattttctgccccactcagaagagctagagttttgcc

SEQ ID NO: 114425 - DNA, 87 bp, Zea Mays
gtcatagtgtcaccattctttttgcaccgcatcgtgcatgatcggcatggcgcatatacagctgctggtcagggtaatatcattttc

SEQ ID NO: 114426 - DNA, 2241 bp, Zea Mays
acggcaaaccctgaccccggccacaattctccgagtcaccccgtacctgacaaatccccaaatccgaccgcaaattcggcatgtgcgactacggaaacccttcaccctgaacctgccggagatgatcgcgtcgcagccgcgccgggttcggcccctcgccgccgtctccctggtgttattcctcctcctcctgtacagccgctccgatgggggctcaccgcgcgccgcgcggctcttaggctccggattctaccctgtgcaccgcaggttcctctccgatgccgaccctgccggccccgcatccagcgccgcgaacccttcggcttcggggaccgttccgttaaatggcgagcagccggaggacccttccgtggcgtgcgcgggcatcgcgctgcacgaggggttcgggacgcagtgcgagttcctccgggcccacccgcagtgcagctccgatgggttcgtcgactacctaggcttcttctactgcagatgcgagaggttcagggtgctgggctacgcggtgctcggggtatgcctggccgcgctgttctatatgctgggcaatactgctgccgactacttctgctgcagccttgagaagatgtcggcactgttgcggctcccgccgaccttggctggcgtgacgctgctcccctttggtaatggagcccctgacgtgtttgctagcattgcggcgtttatggggagcggtgctggtgatgttgggctgaacagcgttctgggtggagctgtatttgtgacttgtgttgtggtcggggcggtgtcgttgtgtgttgccgagaagaatgtgcagattgacaggaggtgtttcgtgagggatgttgggttctttctggtgactcttttggctttgtctatagtgttgaccattgggaaggtgactgtttggggagctatgatgtttgtgtcgatttatgtggtctatgcatttgttgttgctgcaaatgaggtattgaggaagcatgccaggaggctgaagtttgatgtgttcacaccgttgttgcctgtgagggcaagtatatttgaacaaggagcagagcaggatgagtcagcatacagttcacttcttgaggaggatgcagatggtgaggtaacccaaatgaatacatccgtgcctcagtggatgtgggcttctcatgtagccatctactcaaatcatggaaatagagatggttcgcctgacagctcaaggccattatggggttggagtgagggagaagtggataactccacattcaatatttacaagctgttctcgtttatggagcttcccttgacgataccaagaaagttgacaattcctatagtggaggaggaccgctggtccaaagaatatgctgttgcaagttcttgcttggcgcctgttcttttggcatttttatggagcagtcaggatacagtatccacaaaggttagcatagcagcatatgttatggctgtcatgttggggattgcactagctgctctggttttcctgttcaccagtaatgaacgtcctccacggaggtttttgtttccatgggtttttggaggctttgtgatgagcatcatctggttctacatcatcgctaatgaactggttgcacttttggttgctttgggtgtgatactgggaattaatccttcaatacttgggctaacagtgttagcatggggaaattcaatgggtgacttgatgtcaaatgttgctttagcgatgaatggaggtgacggcgtgcagattgccatgtctggatgttatgcaggacctatgtttaatacacttgctggtttgggtatatcaatgttgcttggagcttggtcaacggcacccaattcgtatgttcttccacaggaccactctcttatttacacaatgagctttcttgttgctggattgatctgggctcttgttatgctgccgagaggtgacatgcggcctaacaagatacttggagttggcctcattgctctttactcaatttttctttttattagggtaggcagtgctgtcggcatattgccactgcctggatcgagttagataattacttgcctgtaaagttgggattaatgtcaaagtacttgctcatggctgccattttatataaatgaaatgaagttatacagtgttggtctgttctgtacttgtggtcctgcatgtcaagttgtctgcacattttttgggtttgatatttttgggagaaaacacgcttgcagttgtggcaattatttgtatgt

SEQ ID NO: 114427 - DNA, 1421 bp, Zea Mays
atcggtcgaccagatcaaccgagcagttggggtgaacgaaccgtggatcgacgtcgtactcgtacgtacgtacgtactgtacgtgacgatggatagctcctcggacgctcacgggcgtcacaggtgcgcggcgtgcttccggcagttcaacaagatggagcacctggtggagcacatgcgggcggcgcggcactcggggcacgagccccgctgcgacatctgccgcaagcactgccgctccttcgaggcgctcagggaccacctcggcgtcggcggctccacgctgcccaaggccgccagctgcgccgacgccttcgccgcgcggggctgcgccatctgcctccgcgtcctcgccggcgccggcgccgcgtcgctcggagcccaccgcgcggcgtgccggctctcgcgcaccccgccgccgagggcgctgcagcagcatcaccggacgcagccgcaaggaggcgcgctcgcgctgggctgcaagatggtcggcgccggcagcgacggatccctggacgtgtgcgcgcgggtgtgcgtcatcgacgagcaggagaacgtcctgttcgaggccttcgtgaggccgctccttcccgtgacgcactaccggtacgagacgacggggatccggccggagcacctccgcgacggcgcgagcgtgacggtgaagagcgcgcagcgccgggtggaggagctgctgctcgacggcgagcagccgtggagggcgcgcaccagccggggcagggcgcgcctgctggtcggccacggcctcgaccacgacctccacgcgctgcacatggactacccggcctacctcaagcgcgacacggccacgtacccgccgctcatgaagaccagcaagctcagcaactcgctccgcttcctcacgctcaactacctcggctacgagatccagacggggcaccagcaccccttcgaggactgcgtcgccgccatgcgcctctaccgcaggatgcgcgggcagcagcaccaccccagggccgacgcacacgcaccggcgccggccgcggacgaccagcagccgttcccgtcgtggaggcagcgggagctggagcgcatgacgcccgaggacctcctccggctctccacgccggactaccactgctggtgcctcgatgcgtagcgtgtggcttgagcatctatctccgtcagaggctcagagccagcccgagcgcatcctgatcgcgttcccgccccatgaccaatgacgtggtcgtgtataagattctgcaccgttcagccgttcgtcagctcctccggctcacacgaacttctgtaccaagtatctaatctatccatagctactccaaaagtacaatccgatccacccgtatgattgagggagagggacagagaatgtacctgtggatccgttcgatataaaacgcctgttagagtatata

SEQ ID NO: 114428 - DNA, 402 bp, Zea Mays
atggataggttacttctgcttaatcttttcgtctgtgttggacaggttcagctgcgcaaggatgcccttcccggtgatggcctctccgagcagcgatgcctgccagccgtgcatgcccaataccaccagtacccggttcagactactgcaaagtggaaggttgcgctaaagaggactaatgtccttgggatgaggcagcctccaccacgctggtataatccctaccatggctacccttatagatcatatggagcaccgtacttccccccatatggttatgagagggctcctagattccgtcgtcttatgcgctacatagcttatcatgtacaaggttaatggacggtatttctcaccgtgaccactcggttagccggtaagaactgagccactgataaggac

SEQ ID NO: 114429 - DNA, 738 bp, Zea Mays
tccagccagaggatccaactccccttgctatttgggatttctcccccacggccttctagagaaattgtacacatattccctgcctctcgctagcgccttccctccgcaaacggaaggctctcgtgaccaccgggatgtccgccatggagaccgacatcaacgcgccgccgccgcccgccccagctggcgagggatcctctgcggccggtccgtcctcctcccgcaagcccaacaagcgcttcgagatcaagaagtggaacgccgtcgcgctctgggcatgggatatcgtcgtcgacaactgcgctatctgccgcaaccacatcatggatctatgcatcgagtgccaggcgaaccaagccagcgcgaccagcgaggagtgcactgttgcttggggagtctgtaatcatgcttttcacttccactgcatcagcaggtggcttaagactcgtcaagtgtgcccattagataacagtgagtgggagttccagaaatatggccactagttcctgggcaccctcatgtgatgttggggcttacttctagtgactgctaccactcgagtgtatttttttctgccaaacagctccatcttttactgctttggatgcttgcatgtatcacaggtcaattatcactagtagtacgtccacctgggactgtatttggattgttcgttgagaggatagtagttccattttataaatgttatgtggattttcataaacataaaaaatagga

SEQ ID NO: 114430 - DNA, 851 bp, Zea Mays
ccagccagaggatccaactccccttgctatttgggatttctcccccacggccttctagagaaattgtacacatattccctgcctctcgctagcgccttccctccgcaaacggaaggctctcgtgaccaccgggatgtccgccatggagaccgacatcaacgcgccgccgccgcccgccccagctggcgagggatcctctgcggccggtccgtcctcctcccgcaagcccaacaagcgcttcgagatcaagaagtggaacgccgtcgcgctctgggcatgggatatcgtcgtcgacaactgcgctatctgccgcaaccacatcatggatctatgcatcgagtgccaggcgaaccaagccagcgcgaccagcgaggagtgcactgttgcttggggagtctgtaatcatgcttttcacttccactgcatcagcaggtggcttaagactcgtcaagtgtgcccattagataacagtgagtgggagttccagaaatatggccactagttcctgggcaccctcatgtgatgttggggcttacttctagtgactgctaccactcgagtgtatttttttctgccaaacagctccatcttttactgctttggatgcttgcatgtatcacaggtcaattatcactagtagtacgtccacctgggactgtatttggattgttcgttgagaggatagtagttccattttataaatgttatgtggattttcataagtgagcttgaattgtgatgtggtaccatgtctaaaggctggtgtggtcttgtcttgatcttgacttaaggagagcctgttcgttttaatctcaatccatgtggattagccagtattgggcgagtttaaa

SEQ ID NO: 114431 - DNA, 1581 bp, Zea Mays
atgagggggtgggggaagggggtggtgtggcggcctccagtggcggtggctaggaagggccaacgactagggtccaaacctacaagttcataccactggtttatcaaattgcttcgagacttgggagcaccaaagatgctcaggggtcatttaactttcagattgaaagaacagtacatgtcagggaggcactgtccacccggtgaacagtgcctccgtgacagactgacagtacagctctggtatcatgggcagattgcgttagcttctcttttgaagaaaatggctgttgatcacccatatcatacaatattccagcttttggctctagcaaatggtgatcgtgtcaaagacaagcaaagaagtagaagttcttttgttgtagatatggagaagaagcttgctgctgaaaatttgttaaaggagctatcttcctgtcatggacctctgatttgtcagatgaaacaaatggttgagatctacattaagttagcagaactggagaccaagaaggaggacactaacaaaaaaattccgctgcccagggaggcccgcagcattggtcagcttgaactagttccagttgtgactgctaccgttcctattgatcctagctgtcgttatgaggaaggctcctttccacatttcactgggttggctgactccattatgatcatgaatggaattaatgctcccaaagttatagaatgttttggctcggatggtaacaaataccgtcaacttgcaaaatctggaaatgatgacctgcgacaggatgctgtgatggagcaattttttagtttggtaaatacattcttgcaaaatcaccgagatacttctaaaaggagattgaaaatccgtacatataaggttgttcctttcaccccaagtgctggtgttgttgaatgggtaaacggtactgttccactaggcgattatctaattgggagtactagaagtggtggagcacatggacgatatggaattggggactggacatatcttcaatgcagagagtacctgatgagtgtaggatatatagtcggtcttggggatcgccattccatgaatattctcatcgaccaagacacagctgaggttgtacacattgatcttggtgttgcatttgaacagggtctcatgcttaaaacacctgaacgggttccatttcggttgacaagggatattatagatggcatgggtgttactggtgttgaaggtgtgttcagaagatgttgtgagaaaactctctgtgtcatgagggcgaataaagaagcattgctcactattattgaagtcttcgttcatgatcctctatataaatgggcactctcaccactgaaagccttacagcgtcaaaaggaaacagttgatactgattcatgtttggatgactcccaagaaccttacgatggcaacaaggatgcagctcgagctatacttcgtgttaaacagaagttggatggatatgaagatggcgagatgagaagtgtgcagggccaggtccaacaactcatacaggacgcggtggatgttgatcggttgtgccaaatgtttccaggttggggaccttggttgtaa

SEQ ID NO: 114432 - DNA, 1053 bp, Zea Mays
atggagggggcggcggcggttggcggcgcgacggtgttggggcctgcaggggcacgactgagcagtcggttggagttgttggataaagagtggaacttaattatgttccaagcagaacggaatcttgatctatttgaaccttttctggcatttaggcgtgccctccttaagattttaggttgtgaagaacatcttgtaaaacatttatttcaatctgcttctgcgctccggaagggattaaggttttctttggcagcggcagctttatatgaactcaaagaactttgttttcacagagatgagagcactatgacaaatacctatttgcttgcacggcttgaagacgctaaattgctcagagctcaagggcagcatgatatggctattagtcttggaaaatacatactacagaagctttctgacaagaaaaacctgtcagatgtctatcgattagttggcaagtggctggctgaaacaagatcaagcaactcaagaactatcattgaggactatttaagaccttctatagatctctctgaatttgagaagagtacagataaaaggtacatgtccaggcagtgtcgaacacatttccatctagcacattatacatatagtttgttcagaagctatgaggaaagactctcatctaacgaatggcaagcagctctgcgattaaggaaatacaagactagggagttggagatactgattaaaagactgagaagttcatctaagggtgtgaagactgattactcagtaaaaatccaagagttacagaaacaacttgcacttgacagagaagaagcagagaaaatacaggatgatcacgataatttcttaaatctagcacttcaaggctaccaacgttccattgttgttggtggcaaatatgacctacaagtggtttttcggttggtctcgttgtggtttagtcttttctcaagggatcaagttgtgaaagcaatgttgaaaaccacaaaagaggttttcctttttactttcatttctggattgcattggtacttctatcatgttaaagtagttagttga

SEQ ID NO: 114433 - DNA, 1287 bp, Zea Mays
atgttcttggctccagcagaaagccacaatctcatcttgtctttaaatccgtcctctaagggtattctgtcaacagcacgggggctcaatgctctgcagtttcttgattctcccgataggtctttactcatggttcattcgagaggggtaaacattcagatagttgaacagactatatcacaaatggaacagtgtgctggtgtttcacttgatgatgcagatgtgtgggacactgatggtcgaacttgcaagcaatggctgtgcacccttgtcagctcacttatttgccactgtgaagataccatcttgagactctgtaggagtattgtttttgtcaaagttaaggctgctgagcttttgctttctagtactctagtgaacattgctggcaatgttgattctaatactgccatctgcaaattaatttcaacaaaggttgagaaaataattttttccgactccaatcattcattgaagtcaatccatctgtttctggatgcactgaatgtcattagatctttttatgttgctgaaaaagccagaactttcccttctaatactctcaaggatggtagatctgctagatcaaaaagtcgatcaccagtgacaaccccatcatcatcatggaagaaggtatactggctttctgttgattatcttgttgctgccagagctgctagtcgatgttcatgtgactttgccatactaatgtatgttgagctttggtgtgaggaacaattcaataggctggtattaggacctccagagttttccaatgaagagttgttgccacctcatgttgatctgttggttgctgcatttactcgtataaatgaaccagacagcatttatgggctcacactatctaatgagatagcgtctcagcttattaggtatgagcatgaaggtgattggagtagcgcacttgaatactatgatttacttgtaaggtcaatgccaaaggaacaccttggcactttaactgggtcggtgttgactggaccatctaccgtgtcttctagagcagaagatacaatgttgaactggaaaatgcacaaaggtcttatgagatccttgcagaaaactggatgtagtcatgtgcttgatgtctactgtgaaggtttatctcaccaaaaggggtgtcttcaacaagacgcggagtttattgatatccaatatgaagctgcttggagggcaggaaattgggatttctcctttttcgttccatattcttcttggtcttcaacccgctctcgaagtagctgtcttttcaatgaaaatttacat

SEQ ID NO: 114434 - DNA, 524 bp, Zea Mays
aatttatgttcattatgagctgactcatcacttttgacttcctgtagtttgttaataaggctccttatttaccaccagaactatttttgttgagtcttcgtgcgtatcacaaaaagttatttttgggagaaatcattcgtagaagtgacctatctgcggctgatacaaacatggttagctgctggcatagtgacccagatgtcatttctgctgtatgggctcttgttgacatttgtagctcatcatctgtagcaaatgaagcttcttgggtgcttgctgattttatctctagggctggtatatctgatgcacatcaagtaatattccgtctgccaactaccaccgaaaattattctttacaactacatactggttctgcttccaaggaggataaattatccacaaactatggtatttctgatgatgttctggttgggcttttgaaactcttgaagacttatttatctgatgaatctgttgaaataatagatgctgcttcacaaacactgagggtatgccattaa

SEQ ID NO: 114435 - DNA, 275 bp, Zea Mays
gatctgctgagccaaacaactttgttgaacattgtagttcatggcttctccctttcctcattctcaggggtgatggtgctgatatgaattggatatcgaagattttatctcaacctttgtcaatcattatcaagagatacttcgttccaatctttggaatgtgcattgctgtcagatgtggcacagggccagagaaggacttagctgaaactgtcttatgtgaatcagttttgcagcttggtgaaatttctgaacttgagcgtgatgatctcatt

SEQ ID NO: 114436 - DNA, 1590 bp, Zea Mays
atgtgggtcaatgtagtgctaaagaatgttcccttgtatgtatttagttttctgattattggcattcctggattggaattctctcttttgaatgaacaaaatgttgttatcattcctgaagctattttctcgctgtgtgctggcttttcatcaccagtaattaattcatcggatatattgcaactgtttggtcattgtaaaattcattccaagatgtctcttgaggatgataactgggttcttaaagatgaactaccctactctgtggaagctttgtcagaaatcactctggatacttgtaccaaggttatgtctcataaatgccaccttatacatcttccggggactatccagcaaccaatgctcctagagctcatggaattcatgaaaggatttgtggcttcaaatgagcagtttgagaaagtggacttgaataatcttgttcttgtttgttctcttctctgcaatctgattcattgtgcattgttgtcaaggaccatggaagaaaaatcttcacttttgcaagaaacagtagattatgtcaccaatattttaaaacatattgtgtcatttgttgtgaagaagaatgatgaactttctcatggtcttactaacataagttcagcattggatacaatgggctctgctttctcctcaatcaagagcttactgtcttctccaatatttaatctgtcaagagttgataatggagtttgttctgttgttatcaaaagcattactgaattacttgatgaactcttggtggcaatttctcagctgttttgtcagatctctagtttagtgagcaattttgatgcagagagtactggtaaaatgctaccaacatctagtatcaatttagaggacctaaatcctgttttggactgtaaaagtagtgttgctgatatggatcttgatgtgatggactctagtgaagtagattctgtcacagctagtgcgagtggaagtatgggtagcttcttacgacctttggaatggaagctagatctagtttgcattatttcaacttttttctcagtttcatcacttcatacatgggaaattttgtacagcttggtggataaagaaggtgacgtgaaggttcgccaggccatcttgcttaacctttgcagaaacatctccgcgtcatctaaaactgtatctttagtggtccattttatagttgatatgagggacagaggtgcaagttcattacttggacctgcagagtgcttaactcacatacatgctttattaaaagcgttgatagctatccatggtggacagaatgctgatggaaagcaaccaggacgcgaagtatttttcagtgagaaccaggatatcttatttgacttgttaaatagggctacagacataagttctgtagattggttttctcgcatcaagttcattgattgtgtctcctcctttgtttgcctgttccctgatgttgcccaggatttgatcggatgtttgcttgacatgctgcatgatgctgattaccgtgtcaggttgtatttggctaggcaaatcgtcgtgttattccaaacatgggaagggcacaatgaattatttaatgatgtttggtag

SEQ ID NO: 114437 - DNA, 328 bp, Zea Mays
gacattcaaggagttctccacagtgctcatgcttgacactagggataaagtgcaattttgtttaacaaaaggcgagatgtcaattgttgaagattgttggcaagccatatggaattcccttgttcacgcatttccgttgttaagcagcatagatctagttgctgattcagctctgattttgctgggtggaatgatcatgcgggaccaagttcatacatcatttctatcagaagatacatggaacctgcaaatatttaaaaaatttccatcgccggctgaaccctactgtaatatgagagataacaatgatgttgaaatacagcagagt

SEQ ID NO: 114438 - DNA, 168 bp, Zea Mays
ccgcacgcccgcggcccgcctgttccccgcgcatcccgccgcacgacctccgctaccgcaacggccatccccgcacgcccgcctgttcaccgcgcatcccgccgacctcccctccgcgctcgcaaacgctctgttcccctcgcccgcacaaaccgccacatccgcatg

SEQ ID NO: 114439 - DNA, 777 bp, Zea Mays
atggaggcggaggaaggcgtgatggcgacggacttcttctggtcgtacacggacaagctgcatgcgtcgcgccgccgggagatcctggccaagtacccgcagatcaaggagctcttccgtccggatccgtgggccttcctcaagaacccagctgaaacaacatgctccaaatatgctaccaacattcaacagagaatggaaaaacacttatttacaccagaagaactaaaagttaggcaaaggatgatgacaatatctacagttggtgttccaaatacaataaaaatgctagcatctcacaagcttcagtcaacgttggcagtcagtctgcatgccccaaatcagaagctgcgggagacgattgttcctagcaccaagtcttaccccttgggagcactaatggatgactgcaagagttacttccttgaaactgggcgcatggtatccttcgagtacactctgctagctgggattaacgatgaaaagaagcatgccgaagagctagcagaactacttcgtatgtgtggaggtggttaccatgtgaacctgattccctataacccaattgaaggctccgagtacaagagaccttacagaaaagtggtccaaacctttgttgatgctttagaagcacgcaagataaccatcaacgttcgacggacccgtgggcttgacgctaacgcagcctgtgggcagctgaggaatgagtttcagaagaatccactacttgagattgaaccgtcaccctccacagagcggaccctcgtaactgcttaa

SEQ ID NO: 114440 - DNA, 96 bp, Zea Mays
atttcatgttctgtcattctcattctttgttctgcctttcccattctctctcccctcaaagctcattctcattccccccgtacagcccacaactag

SEQ ID NO: 114441 - DNA, 1142 bp, Zea Mays
cccgtcccgttcccatccttgagaaccgagcggacgccgagctgcaagtaactgcaccgactttcaaccggaagagccgagccgaaccaaagtcgcctcttcttctccaacctcccctcgcctcttgactaggccagggttccatcccaaccccgccgccatccgatccgatggagggcggcgactcgtccggcgccggcgccggctccggtggcgccgtggcggcggcggccaagtggcggagcgacgcgtcgcggtcgttccagtactacctggaccgctccacgcctcacgccactgggcggtggctcggcacgctcgccgccgcggcaatctacgcgctgcgggtctacatggcgcagggcttctacatcgtcacctacgggcttgggatctacctcctcaacctcctcatcggtttcctctcccccatggtcgaccccgagctcgacccctccgccgccgccgaggggccggcgctgcccacccgggggtctgacgagttcaagcccttcatcaggcgtctccccgagttcaagttctggtatgcaatcacaaaagcttttgttgtagcttttgtgatgactttcttctctgtgtttgacgttcctgtcttctggcctatactcctctgctactgggttgttctctttgtccttacaatgaagcgccagattgtgcatatgatcaaatacaaatatgtgcctttcagtatcgggaaacagaaatacggtgtgaagaagagtgtcgcaagcaccagttcctcgaaagactgattatgagtctacctcagtaggaacttggcaggggaacaagatacggtggatgatgatgtgctaaatacctaagtgtaatactccattcatatctagatgtagacggatattcgctcctgtttctgactctgggctcactgtttaattcgatattgtgcttagctccctcctatgcttgtatagcgaattccgcatctcagataaattatttcgtttatttactagatatctgggccccgaaaacaataacctccatgctctcagcgagtttcttggttgtgagttggagtgaattaggcgggttttttttataaaaaaaatcaaactgaacagaatgctaaagtttagacgcataacgtttgagcc

SEQ ID NO: 114442 - DNA, 498 bp, Zea Mays
atggggagggacgcgacgctggagaagcaaggcgggcgcgccatggggagtgggcggactgaggccgggaccaggggcacggcgcagagggtaggccgcggcgaggtccgagcgagctggggcagagacgtgtgcatcagggagccgtgcggttggccgtggagatgggcagagggactcgagcagagggaggaatttcggctgggaagggaaatccgagcaggagctgcgacggtgaggctccatggcgagccgggcgagcagggggaaccagcagcgggcgcagcagggagccggcgcgccatggctggagcacaagcgagcacaaaccgagagcagggtgcggcggattctaggcagggtcgaggagatgctggggaggagccgagcaccagtcaccggagcagggagaagctaccgccagagactgagaacgagcgcttggaagccatggctactactccgacggctagagaagaacaccagggcgatgcgtag

SEQ ID NO: 114443 - DNA, 567 bp, Zea Mays
atgggaggtggcgctgccccggtcccgtgccctcaggctcccgccagcagggaggtcgagatgtttataaacatcaaggagcatgttcttgttcctgagcatcatgtgctcacaaatgaggagaagaagacgctattggagcggtacatgttaaaggaaactcaggctaaatgtgaattatctatcaagaagggtataattaggatcacacaaggagttcagagcgggaaggcggggaggagtgtgaccaagctctcattttatacagatttatatttgttgacgcatgcacagatcggagcaaaggcagggtctgatggcgaacaatcgatgcgcaaggctctggaggcacagaacaagaagcttgtgctcatttcgaaccagggcagtgtgtccttgtctgcacaagcgttacatgagcgaggccctggcgctgaagccggtagtctgcaaataggcctgaggaatattttcgaagcgatggagaacttcacctctgcatctgcaaatacgtacagggagcttcatctttgcgccgaagaagcgatggagaatttcttgttgtaa

SEQ ID NO: 114444 - DNA, 1979 bp, Zea Mays
gtgccatatgcatgtttatggctacgctagctttagggcagagagagagagagatcctactagctagcagaaatgttagaatgatatgagagagagaacagagagagcagagagagagagcttttcttcttgccttgaaaggagaggaacgggaacaaaggtacccaatgctagcagatacataaggagggacgtacgggccgggtaaagcgacgaagccttatggatgggcatctccatttctctaacccgatatgcctagcttagcttccattggtgggggcgtgtgtgttctttgagagattctaaaagctcgtcaccgtagagctagcagtgcgacctttattttcttctccccctcgtgggggaagtggcatcgatcgattaagatcccctttacaaccaccatgatggcagcctcgtcgtcgtcgtccttcaacctcagtgatcatctcgttcaagatgacctcccgtggcctgcttcttcttcttcttcctcccagctgccatttgctccttctcatcctcctcacggcgccattattggaggcagccagcaatggtggcagcaacctcaaatgctaaactgtgcagaccggcatccctccgacgagcttgaggtcctcctctcagcacaaggcagccaccaccaccaccaccatccttcttcttcagtgatccatcctcagctaagctcgctgctaatgatgcaagacctagggttccaatggagcagctgcggcagcttcgtggacacctcctcgtcgtcgcccatgccaccaccactggtgaacggccagcagcacgacggccacaacaagatcaaggagtgggaccgcccgctcactgctaataactcatcaaggtcatcgtgtgcgagcacagctatggcttgccgagatgtcgtcctcgacggcggcggcggcggcggcctccctgccatggccgccgtcgccgccgatcttgacgacggcaccgtgctcccggcgagcgtcaacgtcccccggacgacgacgacgcgccagaggccattcccggcggcgccgccacctctccccggcgacgcgttcgagatactggcttcgtcgaggctatgcaagaccctgctgcttagccaagcttcttcttcggtactgctccataatggcacgacgatgcctttgttgagatcagagcatgtgccctatggccctcctgctcctgctcatccccaaggaccatccatcggcaactacaagcagtgcatgcagatgggcgcgtcttgtggaggccgcgcgcagcacgaagcggcatgtcaaagcatggcggcggcagcagcacgcccagcactgccagtggtgccgtcgtcgaagaagcctcgagtcgagcagcggtcctccaccatcgtcccttctttcaaggtaaggaaagagaaattaggggaccggatcgctgctcttcagcagctcgtctcaccgtttggcaagactgataccgcatctgtgctcatggaggccatcggttacatcaaatttcttcaagatcaagtcgagactctgagccgcccctacctgaaatcctccagaagtaagaagcccaggccgacaccgcggggttcttcaaacgcgagcgctggggagctggaggaaacgaggcctgacctccgcagcagagggctctgcctggtgcctctctcgtgcacgtcctacgtgaccaacgagaacggagtctgggttccaccgaattttagggcaaactaaagtcatgtcagcgctactagagacacagcacaacagtgtaccaagaactactaatccacggttcatctcagttcatccacggttaataccagttctccgggccaaaagacacccaccatctacctcttgtgttgtctctctttgccactttttttttttgctaagcagtaaataacagtcagatatatacaatctcttctcctgcagttatgcagaggcagagcggctgaatacgattac

SEQ ID NO: 114445 - DNA, 103 bp, Zea Mays
ttttttttgttttgcttccttctacaggagaagtatggagaagaagtggtcaaggctcatggtgaaggctatgattggtgaaacatgtcgattgatgatgtgg

SEQ ID NO: 114446 - DNA, 1604 bp, Zea Mays
gcgagcgagtgagagacctagctagactgaccggcggccgccggcaggccgagaacgaagcgtttgtgcattgaaggagcaggagccatggcggaccagcagcagccacagcagcagccgcaggagatggacgttgaccgtaccggtggcctcgaactgcctccagggttccgcttccacccgagcgactttgagattatcaacgactacctcacgaagaaggtgcacgacagggactacagctgcatcgccatcgcggacgccgacctaaacaagaccgagccatgggacctcccgaaagttgcaaagatgggcgagaaggagtggtacttcttctaccagaaggaccgcaagtacccgacggggctgagggcgaaccgggccactgaggcgggttattggaaggcgaccggcaaggacaaggaggtctacaacccctttgcagcggaagggctgctgctggtcggcatgaagaagacgctcgtgttctacaaaggcagggctcccaggggtgacaaaaccaactgggtgatgcacgagtacaggctcgaaggcagcggtaggctccctgctagtcctgcatccgcatccggctcagccaccaacatcgctgcggccatgatgaaagcttcagcttcggcttgcaaggatgagtgggtggtctgtcgtgtgttcaacaagaccaccgggatcaagaagacggctgcgccggcataccaggtggccatggccggtcctgagatggatcagaatcagaacaacattccggccatccccatccccatgccgctgcagctgccactgcccgtgcccatgcagatgcaatttcccatcctgccagattttgccatggacccggtggccccctactaccccaacccgaatgccggcgcggggatgatgccgcctatggcattggcaggtatgggtggcgccggcgggctccagatcaacggcgctctgttcggcaatccggtgcccgcgccgctgccgatgaacttctaccaccaccagatgggcatgggggcagcagctggccaggtggacatgggggcagcggctggccagatggacatgggagcagctggcgctggcgctggcggcttcgacgttgcagcgccggagagtaggccgtcctcgatggtgtcacagaaggacgaacaggctaatgccgccgagatctcgtcgatgatgtctgtgaccggcccagggtccgcgaccaccaccatagagatggatggcatatggaagtacaagtactgaaaaagtggatatggagtttggagacaaatgcatgaatatgcatgttatatctactatatctgcattgcattttgtgaaaatttgcatggttcctatatttctgcaataactagtcggtaagatatgtgtgcatgcatgtgctagtatatacatgcattgtatcattgcatgtgtggtatatgtgtgtgtcgtttggtcttagtaatccggggcatgatggtacccatacctggatttacatctgcttggtcgtgctgatgttgtgttgtaatttgtaaaaagcagattgaagttcggtacagtatattatcgtgaacctatatatattatacttgtgtgaa

SEQ ID NO: 114447 - DNA, 1643 bp, Zea Mays
ggctcactgcactaccagaacacaactcgctagctctgcatcatccgtcgttctggtgagcgagcgagcgagtgagagacctagctagactgaccggcggccgccggcaggccgagaacgaagcgtttgtgcatgagccatggcggaccagcagcagccacagcagcagccgcaggagatggacgttgaccgtaccggtggcctcgaactgcctccagggttccgcttccacccgagcgactttgagattatcaacgactacctcacgaagaaggtgcacgacagggactacagctgcatcgccatcgcggacgccgacctaaacaagaccgagccatgggacctcccgaaagttgcaaagatgggcgagaaggagtggtacttcttctaccagaaggaccgcaagtacccgacggggctgagggcgaaccgggccactgaggcgggttattggaaggcgaccggcaaggacaaggaggtctacaacccctttgcagcggaagggctgctgctggtcggcatgaagaagacgctcgtgttctacaaaggcagggctcccaggggtgacaaaaccaactgggtgatgcacgagtacaggctcgaaggcagcggtaggctccctgctagtcctgcatccgcatccggctcagccaccaacatcgctgcggccatgatgaaagcttcagcttcggcttgcaaggatgagtgggtggtctgtcgtgtgttcaacaagaccaccgggatcaagaagacggctgcgccggcataccaggtggccatggccggtcctgagatggatcagaatcagaacaacattccggccatccccatccccatgccgctgcagctgccactgcccgtgcccatgcagatgcaatttcccatcctgccagattttgccatggacccggtggccccctactaccccaacccgaatgccggcgcggggatgatgccgcctatggcattggcaggtatgggtggcgccggcgggctccagatcaacggcgctctgttcggcaatccggtgcccgcgccgctgccgatgaacttctaccaccaccagatgggcatgggggcagcagctggccaggtggacatgggggcagcggctggccagatggacatgggagcagctggcgctggcgctggcggcttcgacgttgcagcgccggagagtaggccgtcctcgatggtgtcacagaaggacgaacaggctaatgccgccgagatctcgtcgatgatgtctgtgaccggcccagggtccgcgaccaccaccatagagatggatggcatatggaagtacaagtactgaaaaagtggatatggagtttggagacaaatgcatgaatatgcatgttatatctactatatctgcattgcattttgtgaaaatttgcatggttcctatatttctgcaataactagtcggtaagatatgtgtgcatgcatgtgctagtatatacatgcattgtatcattgcatgtgtggtatatgtgtgtgtcgtttggtcttagtaatccggggcatgatggtacccatacctggatttacatctgcttggtcgtgctgatgttgtgttgtaatttgtaaaaagcagattgaagttcggtacagtatattatcgtgaacctatatatatt

SEQ ID NO: 114448 - DNA, 555 bp, Zea Mays
gatccatttcccactcgatcgccaataatggagtttccgcaccctgcattaggatggtcaacaacatctacctgaactttgatgctttacatggagacaaggaccatggtggtgtgcgcgacgggacggcccttgtgctgtgggagtggtgcgagggagacaaccagcgctggaagattgttccctggtgaacaaggaaatgtgtgaccgagcccgcaccaaggaggagctcctgccgtaataagtgaagtgattggtactgaagtttctggaaataagaggctcttctgagatgcctgtttgtgtgagtatttgcgtttccattccgttttcatgataataaaacgcattgattattaatatatgtaatgtgatgctacactgagtggcagcgttggtatatatttgtaagaattaagaacccattgttgttggactaagcgtgacgagtgatgtactgatgtatgaacctttgcttgatgcatatgctcttctgctcctaccgtgggcttcgatgagtcgattatatatatgtgtatcatgtttataatagtt

SEQ ID NO: 114449 - DNA, 1401 bp, Zea Mays
gggtcagcttctcccagaccgggctcgaccgaaccgaccagatcagaccgtccccatataaggcagccttctccgcggccccgatcgatccatttcccactcgatcgccaataatggagtttccgcaccaccaccaccaccacggccatcgccgcgacgacgacgaagacgaccgcagaggcccgcctcccccggtctacggcggctacggccagccaccgccacccgacccgtacggccgcgcgcccgtcgaccccgatccgtacggtcgacctccgccccagtccgcgtacggtggggccggggacgcctacggccacagcggccaaggctacgcgcccccgccggcctacggcgccgggggcgggtacggcaacgtcgtccacgtcgcgcacgaggtcggcgacgagaggccttactacggcggcggcggcggcggtcttggtggcgcctacggaggcggtggctccgagtacggccacgagggccgaccgcaccacggcggcggcggatcccagtacggccacgagacacgcccgcaccacggcggcgggggcggcgccccgcctgtgaggcagcagacgtacaggatctactgcaaggctggggaggaccagtacagcctcgcctcccgcgacggcaaggtctgcctcgtgcgcacggaccgtgatgacgacgcgcagcactggatcaaggacatgaagtacagcaccagggtgaaggatgaggaaggctaccctgccatcgtcctcgtcaacaaagccactggagaggctctcaagcattcccttggccagtcacaccctgttcttctgacccgccataatccagactccctggacgagtctgtcctgtggacagagagcagggacgttggggatgggttccgctgcattaggatggtcaacaacatctacctgaactttgatgctttacatggagacaaggaccatggtggtgtgcgcgacgggacggcccttgtgctgtgggagtggtgcgagggagacaaccagcgctggaagattgttccctggtgaacaaggaaatgtgtgaccgagcccgcaccaaggaggagctcctgccgtaataagtgaagtgattggtactgaagtttctggaaataagaggctcttctgagatgcctgtttgtgtgagtatttgcgtttccattccgttttcatgataataaaacgcattgattattaatatatgtaatgtgatgctacactgagtggcagcgttggtatatatttgtaagaattaagaacccattgttgttggactaagcgtgacgagtgatgtactgatgtatgaacctttgcttgatgcatatgctcttctgctcctaccgtgggcttcgatgagtcgattatatatatgtgtatcatgtttataatagtt

SEQ ID NO: 114450 - DNA, 1399 bp, Zea Mays
gggtcagcttctcccagaccgggctcgaccgaaccgaccagatcagaccgtccccatataaggcagccttctccgcggccccgatcgatccatttcccactcgatcgccaataatggagtttccgcaccaccaccaccaccacggccatcgccgcgacgacgacgaagacgaccgcagaggcccgcctcccccggtctacggcggctacggccagccaccgccacccgacccgtacggccgcgcgcccgtcgaccccgatccgtacggtcgacctccgccccagtccgcgtacggtggggccggggacgcctacggccacagcggccaaggctacgcgcccccgccggcctacggcgccgggggcgggtacggcaacgtcgtccacgtcgcgcacgaggtcggcgacgagaggccttactacggcggcggcggcggcggtcttggtggcgcctacggaggcggtggctccgagtacggccacgagggccgaccgcaccacggcggcggcggatcccagtacggccacgagacacgcccgcaccacggcggcgggggcggcgccccgcctgtgaggcagcagacgtacaggatctactgcaaggctggggaggaccagtacagcctcgcctcccgcgacggcaaggtctgcctcgtgcgcacggaccgtgatgacgacgcgcagcactggatcaaggacatgaagtacagcaccagggtgaaggatgaggaaggctaccctgccatcgtcctcgtcaacaaagccactggagaggctctcaagcattcccttggccagtcacaccctgttcttctgacccgccataatccagactccctggacgagtctgtcctgtggacagagagcagggacgttggggatgggttccgctgcattaggatggtcaacaacatctacctgaactttgatgctttacatggagacaaggaccatggtggtgtgcgcgacgggacggcccttgtgctgtgggagtggtgcgagggagacaaccagcgctggaagattgttccctggaacaaggaaatgtgtgaccgagcccgcaccaaggaggagctcctgccgtaataagtgaagtgattggtactgaagtttctggaaataagaggctcttctgagatgcctgtttgtgtgagtatttgcgtttccattccgttttcatgataataaaacgcattgattattaatatatgtaatgtgatgctacactgagtggcagcgttggtatatatttgtaagaattaagaacccattgttgttggactaagcgtgacgagtgatgtactgatgtatgaacctttgcttgatgcatatgctcttctgctcctaccgtgggcttcgatgagtcgattatatatatgtgtatcatgtttataatagtt

SEQ ID NO: 114451 - DNA, 748 bp, Zea Mays
cgtccccatataaggcagccttctccgcggccccgatcgatccatttcccactcgatcgccaataatggagtttccgcaccaccaccaccaccacggccatcgccgcgacgacgacgaagacgaccgcagaggcccgcctcccccggtctacggcggctacggccagccaccgccacccgacccgtacggccgcgcgcccgtcgaccccgatccgtacggtcgacctccgccccagtccgcgtacggtggggccggggacgcctacggccacagcggccaaggctacgcgcccccgccggcctacggcgccgggggcgggtacggcaacgtcgtccacgtcgcgcacgaggtcggcgacgagaggccttactacggcggcggcggcggcggtcttggtggcgcctacggaggcggtggctccgagtacggccacgagggccgaccgcaccacggcggagctcctgccgtaataagtgaagtgattggtactgaagtttctggaaataagaggctcttctgagatgcctgtttgtgtgagtatttgcgtttccattccgttttcatgataataaaacgcattgattattaatatatgtaatgtgatgctacactgagtggcagcgttggtatatatttgtaagaattaagaacccattgttgttggactaagcgtgacgagtgatgtactgatgtatgaacctttgcttgatgcatatgctcttctgctcctaccgtgggcttcgatga

SEQ ID NO: 114452 - DNA, 909 bp, Zea Mays
gggtcagcttctcccagaccgggctcgaccgaaccgaccagatcagaccgtccccatataaggcagccttctccgcggccccgatcgatccatttcccactcgatcgccaataatggagtttccgcaccaccaccaccaccacggccatcgccgcgacgacgacgaagacgaccgcagaggcccgcctcccccggtctacggcggctacggccagccaccgccacccgacccgtacggccgcgcgcccgtcgaccccgatccgtacggtcgacctccgccccagtccgcgtacggtggggccggggacgcctacggccacagcggccaaggctacgcgcccccgccggcctacggcgccgggggcgggtacggcaacgtcgtccacgtcgcgcacgaggtcggcgacgagaggccttactacggcggcggcggcggcggtcttggtggcgcctacggaggcggtggctccgagtacggccacgagggccgaccgcaccacggcggcggcggatcccagtacggccacgagacacgcccgcaccacggcggcgggggcggcgccccgcctgtgaggcagcagacgtacaggatctactgcaaggctggggaggaccagtacagcctcgcctcccgcgacggcaaggtctgcctcgtgcgcacggaccgtgatgacgacgcgcaggtaacgattgcggtggcgccctgcctagccaaagatatttgttccattttactgtaccctgctcttgctgttgggcgttgatgtagacgtggcctgatcctgatcatgttgagtttgaacttgaactgccccaaatccgagttctgatcgcggggtctggacgaagactcccgtccggtcttgctttggaaatttggcggcttcgttgatgcgatctcgttttgtc

SEQ ID NO: 114453 - DNA, 2265 bp, Zea Mays
aaataaaaaaaagaaaaaaaagaaaaaaagagagaggaaaaggggacaaaccaccaacaacaaccagaatatcgcatcgccgtcgcgtcgtcgtcgatctccccgccccgcccgcgccgcggaatctgacacatctctctaatctctcctaggaccgggtgcccttacatccacccgcaacgcaaatcgccgtccgagccatcgcggtgtctcgtctccccgtgcgagaggacgccggcagcagcggcgtgccagtgcggtggcttggtgggggaagaccggaggcgtcggcagagctcgcgtccagaggtgcacggcaggcctgttctcggcgtcggctgggggaaggcgagtagccgcggtgggtgattctcgccctctcccacctggtttggaatcgaattgaaggaaggacgagtgaataatcatgagctcgatctgccctttcgcgggagccaccactggtggtggtgtatgccctgtgaaatctgataagagcaacactggggtgtgccctgcaaaatctgacaagagcatcagtggtgtatgccctgtcactggcaaggatcatggtagcaagctcaaggaaagtggtgatcatggtgaagaaaagggcaccgatcctcgtgtcgtaccagcaaaatgcccattcggctatgactccaacactttcaagctgggtccgcttagctgcattgtctgccaggcactactccatgaaagtagcaaatgcaagccgtgtgcccataaattttgcaaggcatgtatatcacgctttaaagactgcccactatgtggtgctgatatagagggtattgagcctgatgcggaacttcaagctcttgttgaccgcttcattgatggtcatgccagaatcaagcgatcacatgctgcaggggatgtggaagcagcagatggcaagaacaaagtcatatatgaggatgtttccatggagagaggggcttttctggtgcagcaagctatgagggcttttcgtgcccgaaacattgaaagtgcaaagtcaaggctcactatgtgtgcagacgacatcagggaggagttaaaatcttcagaagataacttagacctatgttcacagcttggagctgtgttaggaatgcttggggactgctgtcggaccttgggagatgttcctgcagcaatcacctactatgaagaaagtgctgagttcctctcaaagccccctgcaaaagatcttgagctggttcatactctctctgtttcactaaataaaatcggtgaccttcgctactatgatggcgacctccaatctgcaagaaactattatgcccgttcattggatgttcgcagaaatgcagtaaaagaacactctgctgtggcttcccaggtcattgatctggcaacttctcttgcaaaagttgcggatgtggatagaaatcttggtaacgaaagtaccgcagttgagggttttgaggaagcaattcgatgccttgagaagttgaagctggattctgaacaaactaccctcgaacagcggcgcctctcggttctcgacttcctgcacaaccagttggccgataagtaagacatagtcttctcctaagaaggcaccaccagcagatatctcctcatggtaatgttcaactctactacataaggttccctttggaaggagttggtctagaagcagcgatgagtgtgtgtttaccatcgtttgaaactttgtcacggcacaaaataagagctcctgcactgtaaatgtaatcatatatatgctcatcgagtattcttgatgattgccgatatggtttagtagtctaagcactctggtttgtcaatgtcatagcctggagcagcgcataagatgttagttaacttgtggcaagttccatctcgctttgaagtgtcatgtgtgaagacctatcctgttgtatatttgacaataagacagggaggtagtaatcaaaaccgtggccgtcgtttctcataccatgtgattggttgttgtacggtggtagcctggttcgtatgtaaggaaccagactctttgtgcacaggctagattcgtgcataggcttttgtttgtttgtttgcattagtgtattcagtacagatatagctaatgtttggttgtctgcgtcagaatgaggagtgcataaataaatcttcaaatattatacatcatgagtgatttaattttgttcataaaaattttagaaacatagatataaaatcggtttgatgattaaatcttttaattagaagatataatgaaaaaacaaa

SEQ ID NO: 114454 - DNA, 2222 bp, Zea Mays
aaaaaataaaaaaaagaaaaaaaagaaaaaaagagagaggaaaaggggacaaaccaccaacaacaaccagaatatcgcatcgccgtcgcgtcgtcgtcgatctccccgccccgcccgcgccgcggaatctgacacatctctctaatctctcctaggaccgggtgcccttacatccacccgcaacgcaaatcgccgtccgagccatcgcggtgtctcgtctccccgtgcgagaggacgccggcagcagcggcgtgccagtgcggtggcttggtgggggaagaccggaggcgtcggcagagctcgcgtccagaggtgcacggcaggcctgttctcggcgtcggctgggggaaggcgagtagccgcgggaaggacgagtgaataatcatgagctcgatctgccctttcgcgggagccaccactggtggtggtgtatgccctgtgaaatctgataagagcaacactggggtgtgccctgcaaaatctgacaagagcatcagtggtgtatgccctgtcactggcaaggatcatggtagcaagctcaaggaaagtggtgatcatggtgaagaaaagggcaccgatcctcgtgtcgtaccagcaaaatgcccattcggctatgactccaacactttcaagctgggtccgcttagctgcattgtctgccaggcactactccatgaaagtagcaaatgcaagccgtgtgcccataaattttgcaaggcatgtatatcacgctttaaagactgcccactatgtggtgctgatatagagggtattgagcctgatgcggaacttcaagctcttgttgaccgcttcattgatggtcatgccagaatcaagcgatcacatgctgcaggggatgtggaagcagcagatggcaagaacaaagtcatatatgaggatgtttccatggagagaggggcttttctggtgcagcaagctatgagggcttttcgtgcccgaaacattgaaagtgcaaagtcaaggctcactatgtgtgcagacgacatcagggaggagttaaaatcttcagaagataacttagacctatgttcacagcttggagctgtgttaggaatgcttggggactgctgtcggaccttgggagatgttcctgcagcaatcacctactatgaagaaagtgctgagttcctctcaaagccccctgcaaaagatcttgagctggttcatactctctctgtttcactaaataaaatcggtgaccttcgctactatgatggcgacctccaatctgcaagaaactattatgcccgttcattggatgttcgcagaaatgcagtaaaagaacactctgctgtggcttcccaggtcattgatctggcaacttctcttgcaaaagttgcggatgtggatagaaatcttggtaacgaaagtaccgcagttgagggttttgaggaagcaattcgatgccttgagaagttgaagctggattctgaacaaactaccctcgaacagcggcgcctctcggttctcgacttcctgcacaaccagttggccgataagtaagacatagtcttctcctaagaaggcaccaccagcagatatctcctcatggtaatgttcaactctactacataaggttccctttggaaggagttggtctagaagcagcgatgagtgtgtgtttaccatcgtttgaaactttgtcacggcacaaaataagagctcctgcactgtaaatgtaatcatatatatgctcatcgagtattcttgatgattgccgatatggtttagtagtctaagcactctggtttgtcaatgtcatagcctggagcagcgcataagatgttagttaacttgtggcaagttccatctcgctttgaagtgtcatgtgtgaagacctatcctgttgtatatttgacaataagacagggaggtagtaatcaaaaccgtggccgtcgtttctcataccatgtgattggttgttgtacggtggtagcctggttcgtatgtaaggaaccagactctttgtgcacaggctagattcgtgcataggcttttgtttgtttgtttgcattagtgtattcagtacagatatagctaatgtttggttgtctgcgtcagaatgaggagtgcataaataaatcttcaaatattatacatcatgagtgatttaattttgttcataaaaattttagaaacatagatataaaatcggtttgatgattaaatcttttaattagaagatataatgaaaaaacaaa

SEQ ID NO: 114455 - DNA, 808 bp, Zea Mays
gtcctttagtattataccacaagagcggtcattcccttcccggccgttttttttgcagtgagcctctccttccatttcttttgatgtaattgatagcctcaacaaacgaaggagtcataatggggaggttttatgttgtgattcccagttcaaacgatgttgaagcttctctaactgatgagagctcagatgggaacactcaaattttctatggtctatatgaaacccttttcgagcttgaccagggacttgtttgctcctcatcatgcaatattggaaagatgaaaattggaactcttcagtgttactacctactatcttcttgaacaatctgaaaaaggaccagtgctccccctgtcagggacggatctagcggtgggtgggcggggctcgagtctccctaccgtttcggatcccatgaagccccactacagtctcctctaatctaaaatgtatacaatataatgtagaatgagcttttatactgcagcaatttagttcagtccctcctaaacttttttctggctctgtccctgcccctgttctattttgatttgtgatgtagtgagagacatattttttatttttgtgaaatgtatatttcaccgcttgtagtaagtagcctaaaaccatattggattggattcctaccgctgaataactatctttgtcataatgcttgtacttcagatgcttataagttgccagaatagaaagtattccctccgtcctaaaatacaatttgttttagactaaatatacattcattcaataacctatgaatatagtttataggtatgtctatata

SEQ ID NO: 114456 - DNA, 463 bp, Zea Mays
gttaaacacatatattgcaacatgtatgcatcagcagaccagatagctgatggttttccaccttgccaggcatgcaagtaccgtggtcaccctattgagcttgtcaccccaaataacgcaaaatggacttgtccaataaatgaacagcttgcagcttctgatgttactgacactgctgtgagaattgaagaacaaacagtgttgtttctgcctacttcggaagacagtccaaacttgcagggagcctctgcggttgggttgatagcccagtggtgaaggcggcgttgtccctttcaccaggtcaggggttcgaccgttggttccgcacccataaaaaaaatcccctcactgtcccgcctgctcttggggatcgatgtcctgtgcgccaccttccgtttgggccgctgcagagtggacagttgtactcgggccgttagtgatgtgggccaaggttcagaggttt

SEQ ID NO: 114457 - DNA, 3420 bp, Zea Mays
ttggagcggattccagcggcatccgccatggactggagcatcgacctcgacaggggtctccgctcccgccaaccagcaacgcgcgtccgcgccgtcgacgccgccggcccacgcctccgccagctctgcacttgcgccaccgcccccgcgcccgtcgcctccgcgtacggcgtcttgcccggggaggcgcgcgtcttcgcggagaccatgctcctccgcctcgccaccgaattcaggagcgccgacgtcgccatgcgggtccgcatcatcaagaccctcctcaattctgccacgggtccaggggcgctagccggggcgcgcatcacggagcctgaccagctgctcaggagggtcaaggtggtctacgacactgggaacaagcgggacagggcgcttgcactgcgcatgttcgggtgcttcgccgacatcgccaaggacagcgtgcacgtccgctctctcatactttccagtttgagtgcctccagtgctttggaggttggaaaacagatggttctaggcacactggaagacgtcttcaaatctgaaatgctcttttcactctcaagactgtcatccaagtcgatcattttgttttctgaccaggtggatttattgttactgtttatggatcataattcctcttctatgaagtctgtggcgttaaaatgcatgtgttttatgtttcggagaaatatctgccattttccagttattaggaatgtttttggcagattgtttccattaattgatgatgaggattttccacttgactgtaagagcgatgtgttaaggattctgcagaagatgttatgcagtaaaacgtcaagtaatcatcgtgccaatggttctgagttatctaagctacttctagctgctgaaagttctttagattcttcttgtttggaggtgcaaggtaccgctctggaaattcttgtggaaatcttttgtattctcaaggaagttgggtcagataacatatcagttctcaagggttcgtcatttgcacatgctgagtggcaaggaataacgaacaatgtaccattaactgaagataatagtatgaacggacctctgtgtaagatcattgcaatgattgtgaatcatattatatccctggccaatgaagttgctagcagagatatctgcatatcatctgcagtggataaggcatacaaaactcctttcagacttatgctaaagcttgtttcatgctacccttctgctgctgctgtaactcttcatatactgaaaagccttgtaaaagaactgtttctaattaatggaagtgattactctgaagtttctgttacatctgttgaaccattccagacaagtgttgcccttaaagaattgagtacttcagatgacaatgttcaactgttagctacatgcatcaaagcttcctgcattggaacacttattggcaatggaaaactggattttctcaaaattgattgcaagaatagaaagtccataatgcatgatctaatttgttgcatgctcaaatttgcaaatgcttgtcatgaggtgctatgtgaaacatctggtgctagatacaatcttcatgatagcatcaagggtctaatcaagtatgtgcgtcaggatgcccctcagcactggagcacatatgaatccttccatttgataatgtgtgcttgtgttacccggaatacttgtaaaatcaatcgtggtaatcaagaatctggtgattcaaaagagcatcataatacactattcactccttctgtttggataactcaggaattatgtgcacttcgaatgaccaaaatgcttataaagaagcagaaatactgggaagcttataggtcttctatgtactgttgttgtaaaggtctttggttcacagcttcttttgtcttcagaaaactggcagatgcttttgaagcaggctctttcagtttttggctcaaatcgttgctacttttttctgctggcgaaattgagatgaagctattgtttttttcctcagcaactataaagttagttggtgagctaaaaatggagggtgatttaagtgaggatctttactgtaatgaaacagatgctgatagcaccctcagtagatcatcagagttacatggtttccaagcaaagatatctgatatttgtggcagaacattattagcaaataatgctcttgcatccagtgcctcttcagatcatgacttcgtattccagaggtggttcatcagccttaggtcatcatttcttgaggtcctaacaaaagttcttgatatccttaatgcacactcttcctatgaagcaagaggagaccatttatctttgtctggagagtttgtcaaagaccaagtgcttgctttggatcattgctctctaagattaagtgacttggcaaaaagttatgaccttcttgctgcatcccatatggacctggagcgacatggctcaagtagtatagccaggcttgctttcatgtgctcacttttggcattttgtactgcatattctgtttatttctcaaaggcatgtaactacgtagagtactgcaagcttccaaagaggttttcccatgcttcaatcctacaagatttgtatggaagagtagatgggtctgactggcaggttgtttcccagctgcgacagtttatgtccacttcttttgacgaacttgacagcttacagtccagcacatggatcagtggttcatgtaatctggagaaggatttgtattctctttgtcattttgctgtggcatctttgcttggtgtatgtgatagtgctgaagctgaaaaaatacaaaatggagaggattgtttatctgctttgcaaggaggattgcaagtgttgtccagcatcttgcagaagtatttggaattgccttttgtggttcccaagtactttttcagagtaaagccttgccttggtgctgaactttacatatttgattcaaatcatttgaatgaaaaaggaatgtctatagagcctggttttctattgtctctaaccctctgcatgaagtggaagtgtgtgttagaaagaagcaccattcgcatcgtgaaattgtactgcattttggccgcaagcttagagacctgcttggatacagcaggaacaagaagcaagcagtttgatcagcacaggaccgctgaaatggtcgaattgaactccaagctgctacagtacataaagaatgatctgaggaaggctaggaatgagaagaagaattcccatagtgtcatggagatggtgactgcctttgcatgctttgaaccaacagatagtgggcaggggttctcaggatgcctgctggatgtctcctcgttccctgaaggctcttatcagataaagtggcaggcgtgctgtgtcgatgagaatgggtcctattttagtctcctgcccctgaacgatggttccatattttctgtccagaagtcctaa

SEQ ID NO: 114458 - DNA, 805 bp, Zea Mays
tttggttttgttttgtacgcgcattggttcctggcttgctcaataaattgcaaccacttccttccgaattccgatctagcggactaccagttcctcccgatcttgggtttgaggaggccccgagccgagcgtcaggcatggagcactgctatttgaggcagccgatctcgagggccgaggcagtgcccgagaggaggtccaggttgtggcagatggacgcgctgccgctgccgccccgggcggaggtcctctgcccccagcctcgccgcgccgcccggatccccttcgccgtttcagtaaacaaggccatccccaggtcgaattgtgcgcttccgccgtacagaccagcctccgcctgcgacatactcgatgatcttatcctcagcaagaatgacttctcagatggagcagattcgagcagcggccaggcgggttttttatgcggctcgcctccagtgcgcgctaacaaccctgtcgtccatgacccgcagttcggtaaaagagcgctgccatccatgtctcccctagggagcagctcccacgtcaagcttaaggttgaggcaggctcgccatcctgcggcgttagcagcagcccgaaagtgaggatcgaaggctttgcctgtggcaactcggagacccactacgcagttacgccgctccttgtgtgaatcgaatcgccgtggtggcgtagcctgatcagagtcgcgttttttgcccttctgaatctgctgccatctgaagcttcacaattgcattgagcagtatgatttatgtgtgtctagtaaatgtagctggagttgcatgg

SEQ ID NO: 114459 - DNA, 2655 bp, Zea Mays
gcaagaggggaaagagaagttgaggtctgccagcaggcctaccctgctctgtaaaactcatctaaatctgatgtactgccacctgcatgttcatggctagatccggcagcatatagcggcaggctcatccgtgctggcgagctccactaataaatgcgtgcgtatctgtgtgcatcgcggcagccggcagggaagggctggacaggattgcgcgtctgcgcttcagtctccagttcccggtgacgacgcccactagtctctactagataggcagcgccggctgctgctgctgccgccgccgatcagggctttcgcctgccgcccgcatggctccggcgtccgagacggagctgcaagcaccaccaccaccaccggcgtcggctaaggagatcaagtcgccggaggtgctgccggagccaggctcgctgtcagcgctgcagcgcaagaagctgggtgcgcacttcatggagagcgacgagcgccgcgtctcccgcgccaggacacctctcggcgccgcctatgaaccgccctccgccgccgctggcggcggcggcaccacgccggtcaacatccgcggcgagcccatccaggacctgtcgaggaccggggggtgggtggccgccttcttcatcttcggcaacgagatggcggagcgcatggcctacttcgggctctccgtcaacatggtcatcttcatgttcaaggtgatgcaccgcccgttcgccagctccgccaacgccgtcaacaacttcctcggcatctcccaggcgtcctccgtgctgggtggcttcctcgccgacgcctacctggggcgctactggaccatcgccatcttcaccaccatgtacctgctggggctcatcgcgctcaccgtgagcgccagcgtgccggcgctcgtgccgccgcaggagggctgcgacaagctcgccatgctgctgggcgcctgcgcgcccgccgcgccctggcagatggcctacctccagacggcgctctacgtgacggcgttgggcgcggcggggatccggccctgcgtctcctccttcggcgccgaccagttcgacgagcgcagccccgagtacaagcgccggctcgaccgcttcttcaacctcttctacctcgccgtcacgctcggcgccatcgccgccttcacggccgtggtctacatccagatgcagcacggctgggcggcggcgttcggcacgctggcgctggccatgggcacctccaacgcgctcttcttcgtgggcacgccgctgtaccgccaccggctgccggggggcagcccgctcacgcgggtggcgcaggtgctcgtcgccgccttcaggaagcgggacgcggccttcgacagcggcgacttcgtcggcctgtacgaggtcgccggcgccaagtccgccatccgtggcagcgccaagattgaccacaccgacgacttcagatggcttgacaaggccgcgctgcagctggagggtgacctcgccggcggcgaggacgaggaggcggtgaacccgtggcgtctgtgcacggtgacgcaggtggaggaggtgaagatcctgctgcggctgctgccggtgccggcgtgcacggtgatgctgagcgtggtcctcaccgagttcctcacgctgtcggtgcagcaggcctacacgctgaacacccgcgtggcggcgctgcacctgcccgtgacgtgcatgccggtgttcccctgcctggccatcttcctcatcctggcgctctactaccagaccttcgccccgctggcgcgccgcctgacgggccacccacacggcgcctcccagctgcagcgcgtcgggctgggcctcttcttctccatcctgtccgtggcctgggcggggctcttcgagcggtaccgccgcgggtacgccgtccgccacggatacctcggcctcttcctcacgcccatgccggacctcagcgcctactggctgctcatccagtactgcctcatcggcgtggccgaggtgttctgcctcgtcgcgctcctggagttcctgtaccaggaggcgcccgacgcgatgcgcagcgtcgggtccgcgtacgccgccgtcgccggcgggctcggctgcttcgtggcgtcggcgatcaacaccgcggtggacgccgcgacgcgggacgatgaggaggggcggccgtcgtggctggcgcagaacatcaacgtgggcaggttcgactacctgtactggctgctcgccgtgctcagcaccgtcaacctgctcattttcgtcttctttgccaagcggtacaagtacagggtcagggtcgacgtgccgaccacagttgctgttgataagcagtagctagccgctagcgccattacaaggatttgagtttggatgtgctgtaactattgattactgggaataccataaaacatagatcttgtaccgtcgcggcaatagaatagaccagccggaactggtgcctggtggagtgggagcttcagccttgggcctccatctggagatcaagtatccggtgactgctgtcagctcaggagcgtgatagcatgatgaaccacatcgtactgctgactgttcatcagtaattccccagttgctttagctttgctacaacctgtctcgttgatggccgaactgctacagactattttttttgaaacatgcaggaggtctgcctatt

SEQ ID NO: 114460 - DNA, 2698 bp, Zea Mays
agcacgcgcactgctccgggcgtcctgaacaacggacctggacgtggacggcccggccggtgcaccttgtcgctagtcgctacccaagcccaattgcccatcccgcgcgttcaaccaccaccacgccgcaccgcgcgttcaggttcaggattgctgccttgtcttcttccccggtccgcaagaggggaaagagaagttgaggtctgccagcaggcctaccctgctctgtaaaactcatctaaatctgatgtactgccacctgcatgttcatggctagatccggcagcatatagcggcagggtgagatatttctagctactgcagtgtgcagcgcgggaacgtaggacggacggagcaggggtcccgtcgtcatctcacttcgtccctgtcgcgcttaatgctgccattaaactgactgcttgcagctcatccgtgctggcgagctccactaataaatgcgtgcgtatctgtgtgcatcgcggcagccggcagggaagggctggacaggattgcgcgtctgcgcttcagtctccagttcccggtgacgacgcccactagtctctactagataggcagcgccggctgctgctgctgccgccgccgatcagggctttcgcctgccgcccgcatggctccggcgtccgagacggagctgcaagcaccaccaccaccaccggcgtcggctaaggagatcaagtcgccggaggtgctgccggagccaggctcgctgtcagcgctgcagcgcaagaagctgggtgcgcacttcatggagagcgacgagcgccgcgtctcccgcgccaggacacctctcggcgccgcctatgaaccgccctccgccgccgctggcggcggcggcaccacgccggtcaacatccgcggcgagcccatccaggacctgtcgaggaccggggggtgggtggccgccttcttcatcttcggcaacgagatggcggagcgcatggcctacttcgggctctccgtcaacatggtcatcttcatgttcaaggtgatgcaccgcccgttcgccagctccgccaacgccgtcaacaacttcctcggcatctcccaggcgtcctccgtgctgggtggcttcctcgccgacgcctacctggggcgctactggaccatcgccatcttcaccaccatgtacctgctggggctcatcgcgctcaccgtgagcgccagcgtgccggcgctcgtgccgccgcaggagggctgcgacaagctcgccatgctgctgggcgcctgcgcgcccgccgcgccctggcagatggcctacctccagacggcgctctacgtgacggcgttgggcgcggcggggatccggccctgcgtctcctccttcggcgccgaccagttcgacgagcgcagccccgagtacaagcgccggctcgaccgcttcttcaacctcttctacctcgccgtcacgctcggcgccatcgccgccttcacggccgtggtctacatccagatgcagcacggctgggcggcggcgttcggcacgctggcgctggccatgggcacctccaacgcgctcttcttcgtgggcacgccgctgtaccgccaccggctgccggggggcagcccgctcacgcgggtggcgcaggtgctcgtcgccgccttcaggaagcgggacgcggccttcgacagcggcgacttcgtcggcctgtacgaggtcgccggcgccaagtccgccatccgtggcagcgccaagattgaccacaccgacgacttcagatggcttgacaaggccgcgctgcagctggagggtgacctcgccggcggcgaggacgaggaggcggtgaacccgtggcgtctgtgcacggtgacgcaggtggaggaggtgaagatcctgctgcggctgctgccggtgccggcgtgcacggtgatgctgagcgtggtcctcaccgagttcctcacgctgtcggtgcagcaggcctacacgctgaacacccgcgtggcggcgctgcacctgcccgtgacgtgcatgccggtgttcccctgcctggccatcttcctcatcctggcgctctactaccagaccttcgccccgctggcgcgccgcctgacgggccacccacacggcgcctcccagctgcagcgcgtcgggctgggcctcttcttctccatcctgtccgtggcctgggcggggctcttcgagcggtaccgccgcgggtacgccgtccgccacggatacctcggcctcttcctcacgcccatgccggacctcagcgcctactggctgctcatccagtactgcctcatcggcgtggccgaggtgttctgcctcgtcgcgctcctggagttcctgtaccaggaggcgcccgacgcgatgcgcagcgtcgggtccgcgtacgccgccgtcgccggcgggctcggctgcttcgtggcgtcggcgatcaacaccgcggtggacgccgcgacgcgggacgatgaggaggggcggccgtcgtggctggcgcagaacatcaacgtgggcaggttcgactacctgtactggctgctcgccgtgctcagcaccgtcaacctgctcattttcgtcttctttgccaagcggtacaagtacagggtcagggtcgacgtgccgaccacagttgctgttgataagcagtagctagccgctagcgccattacaaggatttgagtttggatgtgctgtaactattgattactgggaataccataaaacatagatctt

SEQ ID NO: 114461 - DNA, 344 bp, Zea Mays
tagggtacggacatgcgcttgtgcttgaggagtcggatggcgcgtgccttgatggcttcctgggacgggccggggcgggtcttgcggatctgctccttgtacctggctagctcctcgtccagcttcttgatcttctcgtccaccgtctcaccccgcttactgactcgctcggtggcgtcctggatggaggggggcggccccttgtccttcttggcgccgaagatcttcttcatcgcagctcccgctccggttggctgccgccttgccggcgccgccgcccgagaggaagggttgaggcgcgtgcggagctgggtgaaattcgaaatcgagatgttgacaggggg

SEQ ID NO: 114462 - DNA, 4400 bp, Zea Mays
ggagagggctgagacggggaagaagccccgtaccctatcgcgctcgccccggggaggagggggagggacgggcggactggagggaggcatctggaattcttagcctcctccgccgcggcctctactaagcagcacgcgaggacgccggtactccgccgtctctgttgaattgctgttaccccgccgtggcgtccctcccccatccgccggccgacacggattggattggattgggttactggtgatccccaaagcctgggtgctggggctacaaggccgctactttgccccttgctacgcgctcgcccgcgagagccttgtgcctctcgtctccggcagacgccatggacgaagaggacgacgaccagcgcctgctgcacagcctcggcgtcacgtccgccaacatcgaggacatcgagaagaaaatcctctcgcaggtccaaactgaaccgaagcgcgatgacgagccaggagcagccgtcgatgaccccagcgggagtagtgttgcgcctgagtttgatgcgcaggccaatctgcaccagaagctgcgttccgtgcaactcgagatcgatgccgtagcttccaccattaaaagagctaagaacgccagcgttgatggacaagataaaaagaagcagaaacaagccaatcacacttctcaggatgaacctcatggaggagcgctccagcaggctcttgccactgagcgccttaaaagcctcaagaaagctaaagctcagattcagaaagagatattgcagtcggacccctacccatctggctcggacaacaggaaagataaaatgctagccatgctggttgaagaggagccaaggcgtaagaagaagtcgctaatgccggctcgagggcctaagaaaacgtcagctcctagactgaaaaccatgagttatgatgacgacgatgacttcgatgcagtgcttgatggggcttctgcaggatttatggaaacagaaagggaagaactaatcaggaagggcttgctgacaccatttcacaaattgaagggctttgagaagcgtgttgaattacctggaccttctcataggcaaaatgatccctccgaacaagctgaagaagcaattgaagcttccaggattgctagagtcgctcagtcaatgcagcaaattgcacaaagtcgccctacaacaaaattgcttgatccagaatctttacctaggctggacgcacctactgctccatttcaaaggcttggaagacccctaaaacgccctgtacctcctagttcagaaggacgggaaaggaagagacaaaggaataagaccaagaggcctttgcctgacaagaaatggagaaaagccaattcaaggaaggaatcactattggaaactgatggtgaggatgttggggactttgcgacatcagtttctgaggatgatgatcaagcagcagaaggtggattatctcctgttattcttgaaggtggtttgagaattcctggcacaatttatgaacagctatttgattaccaaaaagtgggagtgcagtggctgtgggagttacactgtcaaagagccggtggaattattggagacgaaatgggcctgggaaaaactgtgcaagttctatcatttcttggttctttgcataacagcggcatgtacaagcccagcatcgttgtttgtcctgtaacacttcttcaacagtggcaaagggaggccagtaggtggtatccaaaattcaaggtggaaatcttacatgattctgcaaatggttcgagtaaaaagagcaaggcatatagtgattctgacagcgaaggttcttgggatagtgatcaggaagaggttagacgtgcaaagcctgcaaagaagtgggatgacttgatttcacgggtagtaaattcgggatcaggtttgcttttaaccacatatgagcagctaagaatcttaggggagaagttgcttgatatagaatggggatatgctgtgttggatgagggtcatcgtataaggaaccctaacgctgagataacgctggtgtgcaagcaactgcaaactgtgcacaggataatcatgacaggtgcacctattcaaaataaactttctgagctctggtctcttttcgatttcgtgttcccagggaaactaggtgtgctgcctgtatttgagactgaattttctgtgccaattactgttggtggttatgctaatgcgacaccattgcaagtgtcaacagcatacagatgcgctattgttcttcgtgatcttatcatgccatatcttcttagacggatgaaagttgatgtcaatgcacagctccccaagaaaacagagcatgttcttttttgtagtctaactgcagggcagcgttctacttatcgtgcttttcttgctagttcagaggtggaacaaatatttgatggcaatagaaattcactgtatggtatagatgtcctaaggaaaatatgcaatcatcctgatctactcgagagagaacatgctgctcagaatcctgactatgggaatcctgaaagaagtggaaagatgaaagtagttgagcaagttctcaaagtctggaaggaccaaggtcaccgagttcttctgttcactcaaactcaacaaatgcttgacattttagagaacttcctgacggcctgtgactaccaataccgaagaatggatggactaacacctgcaaaacaaaggatggcactaattgacgagttcaataacacagatgaaatctttgttttcattctgaccacaaaagttggtggtttgggtacaaacttgactggcgcaaacaggattattatttatgaccccgactggaacccttcaacagacatgcaggccagagaacgtgcatggcgaattgggcaaactagagatgtaatggtttacagactgatcacacgtgggacaatagaggagaaagtctatcatcgacagatatacaagcatttccttaccaacaaagtactgaaaaaccctcagcagaggagattctttaaagccagagacatgaaggatttattcacactacaagatgatgaagggaatggttcaactgaaacgtcaaatattttcggccaattgtccaaagatgtgaacgttggagttccaaatgatggtcaacagcatcaggtacatattgcttcggctttgtcaagcaccagtgaagctgaaccatctaatggtgggaacagtaaagtggatgataactctgaccaagcagacgaagaatcgagcattttgaagagtctttttggtgctcaaggcattcatagtgcgatcaatcatgatgccataatggatgctaacgatgaccagaaagtgcgcttagaagcagaagcttcacaagtggcacaaagggcagctgaagctttacgtcaatcgcgaatgctcagaagccatgacagttttgctgttcccacatggaccggaagatctggtgctgctggggcaccctcctctgttcgcaggaagtttgggtccacagttaacagccagttgatcccttcctcacagccatcagaaacgtccagcagcaggaatcgaagtcttccagtgggtgctctgagtggcaaggcactgtcatctgctgaacttctggctaagattcgtggaacccgagaggcatctgcttcagatgcattggagcatcaactcaacgtaggatcatcttccaatcttgtatcaagtccatctgggaatggtggccgtgcatctaaccctcctaacagaagcatgatcgtgcaacctgaagtcctgatccgccagttgtgcaccttcattcaacataacggtgggtctgccacctccacgagcataacggaacacttcaagagtcgcattcagtccaaggatatgcttctcttcaagaacctgctgaaggagatagcaactttgcaaagaggcgcggaaggttctgtgtgggtgctgaaacctgattacacgtgatttttaactgtagttcacaggaacaaaattttggtataggagtcgttttcgatagggttttatttttaattttgctagggagatctttttttcgtggcttactgagtgattctttttctaaggagacttaacacgaagaaatcttaggcgatgtgttggtgttgtgaatacaagaataggaatcccaacatgctatgatcttggagaaaggatagcagattctttgcaggccacaaaggttggtgctcaagttttttagtagcttcttacttctggattagttggccagtattcgtttccatctggaatcttgtgcttgtttagcagaagctggtatataagatcggtcattcttggcatgtctggatcatgggctaactagactaacaactagttgctaaacttgatccatggaggatctaaataggagaaaataataagagaatagtttctctacaa

SEQ ID NO: 114463 - DNA, 663 bp, Zea Mays
ataaacaaacaacaaacttgttattccttatttacttcatattttttatcaattggtgaatgtatcagtagtcggtgagagtgttgcttgcttgatattatagtttttactagcgttatatatgtggtggatggataacttagtgcaaggtcacttaattatacaacttattatttgtatttcattctctctactaataatttttataccaaatcatgaactcgttgttcattacatagattttggatcatgatatcattaatcattacgatacttattgattatgagaagaacaagtatattggagatgaaacccgcgggtaacccatgggtacccgttaacccgatgggtacgggtttgggcaaaatctcaaacccgtcatgggtacgggttttttaatgggcatagatatttttcacgggtacgggtttgggacggtaaaacccagcggatttgtacccgttgccatctctaagcgcaacggtcggctccaacggtcgcctgcagcgctacagagtcagcagccacagaaggtgcaccaaacagtgaacagtggctgtccggtacggcgccggactgtccggtgccacatgaagacaaagctccaacggtcgaaaccgtcagaaccctaacggttgggtgacgtggctggcgcaccggac

SEQ ID NO: 114464 - DNA, 549 bp, Zea Mays
tttgtgatatataacactccatgttccatttcattatctaaaaaaacatatatgtaacacttacgtgtgtccctccaaaacgtgaatccaagatcaaaatgaggttgcagatctacatttgaggtcaacagaaaactcttatactacattggtaatatgtgacaagagaaacaaaagttatatttaaaaaggctctgctagctccctattcagctataaacatttcagaggcaatatacattagaccgtggactcaaatccatctgttcactagctatatgtattagcagactgaatcaactcaagggcttgatgagcgtgtgctcttgcttgtcagagacgacctcattgtcacaatggcagattcgtttgcggccaaccgcaccgcctgcttgctcgcctgcagaaagctcgtgatggctcgccgcacgtacgcatcggcctgtttgactgtcatcttcttcttacggttctcctgcgcaaggctcgtcagcatgtagtcgccgtttaggaagctcgcgagctcgacgagctcccgctggaaatctg

SEQ ID NO: 114465 - DNA, 1487 bp, Zea Mays
accatgaattcgtacttagaaaacaattttcttgtgcggttgatggaagaaatggaagaggaagaagaagagttgcagttggcgaggcacatggtcaataggaggcgacgtgcacgcaatgagcgtcgtcatggtggttcgattccagggcgtgttaggattcatcgtgatcacatgagcgacgatgcaagaatccgagcggactactttggagcgaacccggtgtacacggatgctcaatttcgtaggaggttccgcatgcgtcgccatgtctttgagcgtcttgttgatgttgtgcaacaagtggatccttattttattcagcgtccaaattgtgcgggtgagattggtctttctgctctacagaaagttgttgctgctgttcgaatccttgcttatggtattccggctgatgccgttgacgaatacgtacgtattggggaatctactgctcatgaggcattgaaacacttttgcacggccgtccaaaccgcgtttgctccgtattatctccgtgcaccaaatgcagaagatatcgcacgccttctcgaagttggcgagtcacgtgggtttcctggtatgcttggtagtgttgattgcatgcattgggagtggcgtaactgcccaagttcatggaaggggatgtttacagggcgtggtaaacatcctaccatgatcttggaagctgttgcgtcgtatgacctgtggatatgacatgcatattttggtctgccaggtagttgcaacgacataaatgttcttcaccgttcaaaccttttcgaaaggcatctgagcggtgacacacctccagtttcattcactgtgaatggtcacacgtacaatatgggatattacctagcggacgggatttaccttgactggcccgcatttgtcaagacaatctgtaacccctacgatgttagaacccaacactttgcaacaattcaagagtctgctcgaaaagatatagaacgagctttcggtgtactccagaagagatggggtgtggtccgtggacctgcatacggttggagtcctgaacacattggggacatcatgaaaacatgcataatattgcacaacatgatagtagaagacgaaggtccattgtctttgaacacaacctttgaaaacatcggagtgctggcagacacaactcaaggttcaatggaagagcgcaacgacttcgtcaatcaaaggtacaaccaactgaaagaccgcaacaaatatactcagcttcaggtagatctgatacaccatcactggcgcgacatggatccggagttgcataggacgcaatgaaacatgttgtgtcatggctgttcttatctactgtcgaactgtctttgtttactttacattgttgtactgtttgttttagtgtcatgtctgttgttatcaagtgtgtgtactatgtgtcttagtgtcgaagtgtcgtagtgtctcatgttgttgtttcaattcaataacaagtagtactactgtca

SEQ ID NO: 114466 - DNA, 2395 bp, Zea Mays
atgccggcccatccaacccctcccgccgcgcgcctcagcggcgtcacatcccgccgccacgcggagctgcttctccacagcggcgtcgacggcgtttctgtcaaggacctccgcctccgccgcatcgtcccacccgccgccggctccctcgacacctcccccaagtgcgtctcacccgtgaaacccggatctgttgacagcacgcctccggaggctgtgtcgtcagcggcggcggcggcggccggggaccttgaccggaagttgattcgtcttcgtttggtccgcatcgcattccccctgtgcttacgctgtctccctgcacgcccgtgtcctggtggttcagatagctcaatcggcaaggaggtgttcctgcaagacacggctgcacacccaacggatgagctcagccgatctgattctcggttagctgatgaatctataggcgttagtcacagcgaacctgatgccatggatcctgtcgagccggcggtggtgagcactggaggagacaccgatgggaaggctacctgcggcaatgtcatggaagagaccaagactgcccctcatgacctaactaacaagccgttgcttgcccgatgcacaaggtcgaggtttgtccatcatccaagctcgttcagctacaagaggatgctgccatttctaatggaagacgaaatatatgctcaagaaagtggcagggtcaaaattcgaaaagttgctgaggaaaggcagtttgcggcaaacaagcatgatgcctcagccaatgggcagcagtgtcttgctgtctcggatgactcttctcaggaaggcaatagagctcaatttaaaatagtggaagaagaaaagccactaaaagcagatgtgaatcatattcttgatgacagacagcttaagcctcctgtcatagaagcgtctcctgattgtagtgcaactgaagtgcaaaatgtcatgcagcaagaagctttagcttcaagtcaagttcccctaacttcttttgatggtgaattaacatcagacggggacaatgtccagtccattggacaacatcagcttgttgtatcagaagagtctcaagaggaatgcaaaagagatgaagtcaacagaagcattcacgatgaagcagtacaatcagatgggggctatgctctggatagcagagaatttcagcctgctgcatcagaagtctcttgttcagaaaacagcatggctggagtgcaaggggctgcacaagaagaaccgttacctttagatggagttcaggaaaattcagacatgggcgacgatgtttccacagagcaggctcagctctgtgtcacaagtgaatccttgtctgcgcagctgcaaaacaatgctgaattcgctgaagtactgccgtgccaagacttggactcaggatgtcacgacattggtttcggtagtcctaccaagagagtcgtaccatcgttgcatcggcattgcgcacaacaacctcaggactctgtggtttctcatgatgatcagcttcttgacgatgacatacaaatggtcggcagactttctgatccctgtgctgctgacagatcctcatcaatggaggaaatgtctggccgcattctgttcacccaatcagcatcgagcaaagcagccatatcatggccaagtggtgcccattcaatggaaaaaagagctcggtctcctaaggagctttccccaaagaaagggatactcaagaggagtacacgggggtgcaagggtatctgcatgtgcctggactgctgtacgtttcgcctacacgccgaccgagctttcgagttctccaggaagcagatgagagaagccgatgacatcataagtaacttactgaaggaggtggacagtcttaggagcctgctggagaagcatgctggccaagcagcccgaagacaggcctgccgggtgcaggaggtggccaggaaccgctgccagcagatgtttgcggatctaaactcccactgcagaatccccggaccaagggttaggttcgccgaatacgtcgaggagaaggccgcgtcgtctccacgcaggagcagccggaggtgactggatttcaggaggtggcaggtgaactggcctgcccgatcgtgttgctgaattgttcggtacaataactaagtagtgctgcttggcgaaccatcacccttgtcactggtttgtgttggtttgccatgctttgagctttgagttttgtactgtatactatgtgttccctacattccagaaaattgtaagtcgatttgactttttagttatatgcctagttacatagcaaaagttattacatatctagaaaagtcggagtgacttgtaatttgaagaggaggggatacaatttatatattcatagacaatagcttcagattcgttgagttggtcagca

SEQ ID NO: 114467 - DNA, 1334 bp, Zea Mays
ccgcactgagaaaccaaaccagcaagcgaagcccagcaagaaaaccacatgccccacctcgccgccactccccccacttcctccgccgccgccgtccccgccgcgggccgcatcgcgttccggcgcccgtggaacacgccacagccggaagcgctgcgcctgcgcctccgcctgcgcgcgcggggcgtccggcgtgaggacggcggcggcgtgcgcacggaggagcaggagcagacagcaccgcggacgttctacgacctgctcgggatctcagcggatgggagccccgatgatgttcgggcgtcctacaggcggctggcgctaaagtaccacccagacgtgtcccctccgggcgccgcggccgagaacacgcgccgcttcatcgaggtgcaggaggcctacgagacgctctccgacccaagccgccgcgccagctacgaccgtgcactcgcccgcggcgtctgccgcctcgccttctccgggcgccgttcccaatcccaccacgcctactaccattaccaggaacaggaagagggatctgggtggagaaggtcctgggaggaccagatcgccgagctgaagaggaggagcgtggcgaaggattcagaagagaacctgtcgtggggcgctcgcatgcggagaagggccgaggcgtcagcagcggagtagctgcgacaagcgagccttccaaatgcagctgtactcgtacgtagcatgtggagcgaagcgaaacggaatatatttttctggtgggtacaatttggtctgcaaggtttttaaggcgtggatctaaagatgtccagatggaaaccttcagagacagacctgttacgagaattggacgtgtagcagtagtagctgtagcggtggcatctggccaggattgaggaggaacagcagcacctggatggagtgtggtggctgctggctgcagaccaacacccttggccctggctacataatagttgagttcctgcctggccacctgggcctggctggctgtatgtaaacgactcaactatgttactccttgagactcctgttacatctgtggcaggtccagtgtaaatgtaaatactacaagcatcaataacgaaggagcaagccagttgttcttccaatattcagggtgtttccttcttttgttttgttttcctttctcaagcatcaatattgaggttgtgggcttatgcgggagaggcaattattcatatctttaggagcatgacctttgcttaggctatggccatacaaatggccgtgcaaaatagagtgcactgcttatagagtgtaagcttgaaatgagagatgacgataagataagtaagttgttg

SEQ ID NO: 114468 - DNA, 1431 bp, Zea Mays
tcaaggtccagatctcttgacagaaagcatcatcacagtgataaaaaggacagcagaaagtctgagattcaggacgacagaagatctcatagaggcagcagacgcgacaaagatgaaagttcagtgaaggatgatggggaaagatctcatagaggtagtagacgcgacaaagatgaaagttcagtgaaggatgatggggaaagatctcatagaggtagcagacgcaacaaagatgaaagttcagtgaaggatgatggggaaagatctcatagaggtagcagacgcgacaaagatgaaagttcagtgaaggatgatggggaaagatctcatagaggtagcagacgcggcaaagatgaaagttcagtgaaggatgatggggaaagatctcatagaggtagcagactcgacaaagatgaaagttcagtgaaggatgatggggaaagatctcatagaggtagcagacgcgacaaagatgaaagttcagtgaaggatgatggggaaagatctcatagaggtagcagacgcgacaaagatgaaaattcagtgaaggatgatggggaacgatctcatagaagcagtagaggtgacaacgatggaaggtctgtaaaagatccagtggaagataaaagggtggatagtaatgctgtcgcacataagaggagctctgaagatgaaatcctgaacaacaatagtagtaaccataagaaacatagacatgaagttggtttggaagttgatgaaggaaatgatgtgtgccctgctgtagcagaccctaatgggaaacatgaaactggaggcatgaagatcttcggagaactcgagtgctgttcggagcgctcatctgatatattaaaatgcttatgattccatgaagagttgttggagcacatttctgggatgtcggttgaagatacaaggaagtacacactcaagtttttcgagggggcctggcattggagtatgttttaagggaagtcagttcattttatgaatgaggattattttgtggatgctcaattacatgctctcaggaataagactgttctgcatctgagctgcgagcctgcaagtgaactgcgtatttgctggcgcacttctttcaaagcgggatcagcattacccttgttaagttgaatgggagctgagtcataactctcattgcaatgtttttccggagctagtagggaaacacccataaactccaatctcttttccgaaaaattcctttcttattaagggaaaaaagaaacatgctattctctttttttgggtaggaagaataataaaattaggtagggaggtgctagattccatacgctagttcttttcttcaccgccctcgttcgttaggctgtggccaccaaccgtgtatctgaccgtgcaaatagactatatctctagcagattatttatctcacttcctatgttaaa

SEQ ID NO: 114469 - DNA, 3399 bp, Zea Mays
atggcggcgcccaaaccgatctgggtgcgccaggctgaggaggcaaagctcaagtccgaggcggagaccgctgccgccgccaaggccgccttcgacgccaccttcaaggccctcgctgccgcgtctggtgacgactacaacgatgtcgaccccgccccaccctccccagccgagctcacctccaccgactcggacgacgatgctccggccctgccaggcccggtcgacccgtccaagtgctccgccgcggggcctggcatcgctggcggctctgccggaacgccctccactttcaccgtcgtcgccaaggatcgccacagccggaggctcaccgccggtggggcgcgcgtgcacgtgcgtgtctcgcccgctgcgggagtcggcggggacgatctcgaaggcactgtcaaggacaacggggacggatcctacacggtcacctacgtcgtccccaagcgcggcaactacatggtacacgttgagcttgacggcgtctccgtcatggggagccccttccccgtcttcttcagcggttccaccgccacaccatcagccgctttccccaccgcgctacctgctgtcagctctgcctaccccaacatggttaaccagaccatgcctaatatgcccaattacacaggcgcgccctccagtgccttccccagcctcctcggggccatgcctagttccaccgctgggtcctcgggcggagtcatcctgccaggggttggtgcttcactgggggagatatgccgggactacatgaacgggaggtgcacaaaggtggagactgactgtaagttcacccatccaccgcaacagctgctgatgtcgttgcttgctgccacgacttctgtcagtgctctcgggcatgcgcccttggcgccctctgcggctgccatggcagctgctcaggccatcatggctgcccaggcactgcaggcacatgctgcacaggccaaagctgcaggtggaacttcaggctcaacaaacaaagctgatgaagctgatgccctgaagagaacagttcaaattagcaacctgagtccacttcttactgtggattatattaaacagctatttggattttgtggtaaagttgttgattgtgtcatgacagatacaaagcagattgtgtatgttgagtactccaaacctgaagaagcaactgcagcattggagctcaatagcaagagtgttggtggtcgtccattgaatgtggagatggctaaagctcttcctcctaaagcaaataataacttgcctatgatgatgcagcaagccgttcagttgcaacagatacaattccagcaggcactaatgatgcaacagtcaatagcagcccaacaggctgctgcacgtgctgccaccatgaaatctgccactgaagcagctgcagcaagggctgctgagataagcaggaagttgaaggcagagggctttggtggggacaacatggaagaaaaggatgccaaagggaagtcaggatcaccatcttcccctactcgtagatcaaaatctcggtcaagatcacctatcaagtaccgtaggagcagacgatcccgctcctactctcccccagttggacgctcaagggagcatcgatcacgatcaccatcaagatctcgccactcaaagcatggtagtgatcgatcacatagggatgataaggatatgtatagcaggtccgggagaagggagagtgaacgatcccgtgatcatcattcatctcgttcaaggaggaacagaagcaaaagtagaagtccaaggcataagaagccctccagagttgactctaggtcacccaagaaacaaagactcgaaagtttaagcccatcaaaatcaaggtcggctcgggctggttcaaggtcaccacgacatcataagggaagcaaatcatcgccaactagtgatcgtcattctcgccatagcaggcattcaaggtccagatctcttgacagaaagcatcatcacagtgataaaaaggacagcagaaagtctgagattcaggacgacagaagatctcatagaggcagcagacgcgacaaagatgaaagttcagtgaaggatgatggggaaagatctcatagaggtagtagacgcgacaaagatgaaagttcagtgaaggatgatggggaaagatctcatagaggtagcagacgcaacaaagatgaaagttcagtgaaggatgatggggaaagatctcatagaggtagcagacgcgacaaagatgaaagttcagtgaaggatgatggggaaagatctcatagaggtagcagacgcggcaaagatgaaagttcagtgaaggatgatggggaaagatctcatagaggtagcagactcgacaaagatgaaagttcagtgaaggatgatggggaaagatctcatagaggtagcagacgcgacaaagatgaaagttcagtgaaggatgatggggaaagatctcatagaggtagcagacgcgacaaagatgaaaattcagtgaaggatgatggggaacgatctcatagaagcagtagaggtgacaacgatggaaggtctgtaaaagatccagtggaagataaaagggtggatagtaatgctgtcgcacataagaggagctctgaagatgaaatcctgaacaacaatagtagtaaccataagaaacatagacatgaagttggtttggaagttgatgaaggaaatgatgtgtgccctgctgtagcagaccctaatgggaaacatgaaactggagtaggtggatctttagggggcgctgcagaatctgctatatgatagctgctgtatcattcagttggctgtttgcagattgattgatgatgatggagaatgctgaactggtgtttattatctccctttctgatttaggagttttatttgcagggcatgaagatcttcggagaactcgagtgctgttcggagcgctcatctgatatattaaaatgtattcctcattagcttgagattcgctccttggagcaaacttttaaatgtaacactggagttgtaaggcgatttcatacagtgaggtagaaaccaaccatgtatttgtcgtttcaggcttatgattccatgaagagttgttggagcacatttctgggatgtcggttgaagatacaaggaagtacacactcaagtaaagtccatatacaagactataaacaactcatattctaggctcttgcatttgaactggaatgctttggctagtaaaattgtccaaatatgcttgtccgccttctgacgcactttgtttgttagaagtcctgtttttgtatcttgtatcaggaatggttcaaaaagtttgacctgatataccatacttgtacactgtcttttgacagtcacatggaattgtgaattgtgatgtaagttttatatatcttgtcttctgcttaa

SEQ ID NO: 114470 - DNA, 3270 bp, Zea Mays
atggcggcgcccaaaccgatctgggtgcgccaggctgaggaggcaaagctcaagtccgaggcggagaccgctgccgccgccaaggccgccttcgacgccaccttcaaggccctcgctgccgcgtctggtgacgactacaacgatgtcgaccccgccccaccctccccagccgagctcacctccaccgactcggacgacgatgctccggccctgccaggcccggtcgacccgtccaagtgctccgccgcggggcctggcatcgctggcggctctgccggaacgccctccactttcaccgtcgtcgccaaggatcgccacagccggaggctcaccgccggtggggcgcgcgtgcacgtgcgtgtctcgcccgctgcgggagtcggcggggacgatctcgaaggcactgtcaaggacaacggggacggatcctacacggtcacctacgtcgtccccaagcgcggcaactacatggtacacgttgagcttgacggcgtctccgtcatggggagccccttccccgtcttcttcagcggttccaccgccacaccatcagccgctttccccaccgcgctacctgctgtcagctctgcctaccccaacatggttaaccagaccatgcctaatatgcccaattacacaggcgcgccctccagtgccttccccagcctcctcggggccatgcctagttccaccgctgggtcctcgggcggagtcatcctgccaggggttggtgcttcactgggggagatatgccgggactacatgaacgggaggtgcacaaaggtggagactgactgtaagttcacccatccaccgcaacagctgctgatgtcgttgcttgctgccacgacttctgtcagtgctctcgggcatgcgcccttggcgccctctgcggctgccatggcagctgctcaggccatcatggctgcccaggcactgcaggcacatgctgcacaggccaaagctgcaggtggaacttcaggctcaacaaacaaagctgatgaagctgatgccctgaagagaacagttcaaattagcaacctgagtccacttcttactgtggattatattaaacagctatttggattttgtggtaaagttgttgattgtgtcatgacagatacaaagcagattgtgtatgttgagtactccaaacctgaagaagcaactgcagcattggagctcaatagcaagagtgttggtggtcgtccattgaatgtggagatggctaaagctcttcctcctaaagcaaataataacttgcctatgatgatgcagcaagccgttcagttgcaacagatacaattccagcaggcactaatgatgcaacagtcaatagcagcccaacaggctgctgcacgtgctgccaccatgaaatctgccactgaagcagctgcagcaagggctgctgagataagcaggaagttgaaggcagagggctttggtggggacaacatggaagaaaaggatgccaaagggaagtcaggatcaccatcttcccctactcgtagatcaaaatctcggtcaagatcacctatcaagtaccgtaggagcagacgatcccgctcctactctcccccagttggacgctcaagggagcatcgatcacgatcaccatcaagatctcgccactcaaagcatggtagtgatcgatcacatagggatgataaggatatgtatagcaggtccgggagaagggagagtgaacgatcccgtgatcatcattcatctcgttcaaggaggaacagaagcaaaagtagaagtccaaggcataagaagccctccagagttgactctaggtcacccaagaaacaaagactcgaaagtttaagcccatcaaaatcaaggtcggctcgggctggttcaaggtcaccacgacatcataagggaagcaaatcatcgccaactagtgatcgtcattctcgccatagcaggcattcaaggtccagatctcttgacagaaagcatcatcacagtgataaaaaggacagcagaaagtctgagattcaggacgacagaagatctcatagaggcagcagacgcgacaaagatgaaagttcagtgaaggatgatggggaaagatctcatagaggtagtagacgcgacaaagatgaaagttcagtgaaggatgatggggaaagatctcatagaggtagcagacgcaacaaagatgaaagttcagtgaaggatgatggggaaagatctcatagaggtagcagacgcgacaaagatgaaagttcagtgaaggatgatggggaaagatctcatagaggtagcagacgcggcaaagatgaaagttcagtgaaggatgatggggaaagatctcatagaggtagcagactcgacaaagatgaaagttcagtgaaggatgatggggaaagatctcatagaggtagcagacgcgacaaagatgaaagttcagtgaaggatgatggggaaagatctcatagaggtagcagacgcgacaaagatgaaaattcagtgaaggatgatggggaacgatctcatagaagcagtagaggtgacaacgatggaaggtctgtaaaagatccagtggaagataaaagggtggatagtaatgctgtcgcacataagaggagctctgaagatgaaatcctgaacaacaatagtagtaaccataagaaacatagacatgaagttggtttggaagttgatgaaggaaatgatgtgtgccctgctgtagcagaccctaatgggaaacatgaaactggagtaggtggatctttagggggcgctgcagaatctgctatatgatagctgctgtatcattcagttggctgtttgcagattgattgatgatgatggagaatgctgaactggtgtttattatctccctttctgatttaggagttttatttgcagggcatgaagatcttcggagaactcgagtgctgttcggagcgctcatctgatatattaaaatgcttatgattccatgaagagttgttggagcacatttctgggatgtcggttgaagatacaaggaagtacacactcaagtaaagtccatatacaagactataaacaactcatattctaggctcttgcatttgaactggaatgctttggctagtaaaattgtccaaatatgcttgtccgccttctgacgcactttgtttgttagaagtcctgtttttgtatcttgtatcaggaatggttcaaaaagtttgacctgatataccatacttgtacactgtcttttgacagtcacatggaattgtgaattgtgatgtaagttttatatatctt

SEQ ID NO: 114471 - DNA, 1641 bp, Zea Mays
cggcggtcccctccacccgggatccatgtggacgtatgcggatgcggtgagcaggtagcatccactgcactctgcagaggaggaaggaagaggaccgacaaagatggggatggcattgccattgccgccggcgtcacaggtaggggttgttgcgttccaggaggatgagcttcctcgcttcgccgccgctgtcgctcaaggcagccggtggaatcagcatcccatgcccgtggcgattggatggccgccgtccacgagcagccccagccagtgttcctcgactagcatcagtggtgaatgcgcagtcacttatcctcgatttccttgccgtcgcactcgcaccacatatatgcccgtagcgcaacgcaaccgggcgcccaaaacaaaaaaaagctgcgcgctctgatccgaatcgcactcgctggcacgccgcagcgaagcgtggtgctggacatcgagggcacgacgagccccatctcgttcgtgacggacgtgctcttcccctacgcccgcgacaacgtccgcacgcacctggacgccacctactccacccgcgagaccaaggacgacatcgccctgctgcgcgctcaggtcgagcaggacctagccgagggcgtccccggcgccgtcccggtcccgcccgacggcgccggcaaggaccgcgtcgtcgacgccctggtcgccaacgtggaggccatgatcgcggcggataggaagataacctcgctgaagcagttgcagggccacatctggaggactgggttcgagtgccaagaaatcaagggggtggtgttcgacgacgtgccgccggctctcgagaggtggcacgccagcggcatcaagacgtacatctattcaagtggcagcagggaagcccagaggctcatcttcgggaacactacctacggcgaccttagaaggcacctgtgcggattttttgacgcaacaattgggtacgctgtacatctagtatcacacctttccgctcactgatgattcgtatgcgtcactgtgactatggctgttaatctatcctttttggcctggcgcgcgtctgcaacgaaaggaccaagagagacgctcgcagctactatgagatctggcagacggtcggggtggaccggccgtctcagatactgttcctcacggacgtgtgccaggaagccacggcagcacaggctgcaggccttgaggtgctaatatctatcagacctggaaacgcgccactccctgctgaaaaccatgggtttgggacagtcgagtcatttgctgaaatcttgacatgaagggaggatgcatcctcaacatgcatgcatgctgtgctatttaaagatggaaacggattgaactagtttcaaaaggcagatggaatggtttcatggccatgatttgcatcttcatactagctttatttacattgcccatgttcagtttgtcggagaccataaacacatgggatcaccaagttatcttacccttgattggtttcctttaactcgtccggtttgctgttcgtttcttcagtttcgtcaggcattgggtctgttagtcagggccaggggcaaagctaggtagaagcctgtggatgcacatgcaccacaattttttgtaaaactagtgttttgtccaaatttttaccat

SEQ ID NO: 114472 - DNA, 1382 bp, Zea Mays
cggcggtcccctccacccgggatccatgtggacgtatgcggatgcggtgagcaggtagcatccactgcactctgcagaggaggaaggaagaggaccgacaaagatggggatggcattgccattgccgccggcgtcacaggggttgttgcgttccaggaggatgagcttcctcgcttcgccgccgctgtcgctcaaggcagccggtggaatcagcatcccatgcccgtggcgattggatggccgccgtccacgagcagccccagccagtgttcctcgactagcatcagtgcgaagcgtggtgctggacatcgagggcacgacgagccccatctcgttcgtgacggacgtgctcttcccctacgcccgcgacaacgtccgcacgcacctggacgccacctactccacccgcgagaccaaggacgacatcgccctgctgcgcgctcaggtcgagcaggacctagccgagggcgtccccggcgccgtcccggtcccgcccgacggcgccggcaaggaccgcgtcgtcgacgccctggtcgccaacgtggaggccatgatcgcggcggataggaagataacctcgctgaagcagttgcagggccacatctggaggactgggttcgagtgccaagaaatcaagggggtggtgttcgacgacgtgccgccggctctcgagaggtggcacgccagcggcatcaagacgtacatctattcaagtggcagcagggaagcccagaggctcatcttcgggaacactacctacggcgaccttagaaggcacctgtgcggattttttgacgcaacaattgggaccaagagagacgctcgcagctactatgagatctggcagacggtcggggtggaccggccgtctcagatactgttcctcacggacgtgtgccaggaagccacggcagcacaggctgcaggccttgaggtgctaatatctatcagacctggaaacgcgccactccctgctgaaaaccatgggtttgggacagtcgagtcatttgctgaaatcttgacatgaagggaggatgcatcctcaacatgcatgcatgctgtgctatttaaagatggaaacggattgaactagtttcaaaaggcagatggaatggtttcatggccatgatttgcatcttcatactagctttatttacattgcccatgttcagtttgtcggagaccataaacacatgggatcaccaagttatcttacccttgattggtttcctttaactcgtccggtttgctgttcgtttcttcagtttcgtcaggcattgggtctgttagtcagggccaggggcaaagctaggtagaagcctgtggatgcacatgcaccacaattttttgtaaaactagtgttttgtccaaatttttaccat

SEQ ID NO: 114473 - DNA, 1280 bp, Zea Mays
cggcggtcccctccacccgggatccatgtggacgtatgcggatgcggtgagcaggtagcatccactgcactctgcagaggaggaaggaagaggaccgacaaagatggggatggcattgccattgccgccggcgtcacaggggttgttgcgttccaggaggatgagcttcctcgcttcgccgccgctgtcgctcaaggcagccggtggaatcagcatcccatgcccgtggcgattggatggccgccgtccacgagcagccccagccagtgttcctcgactagcatcagtgcgaagcgtggtgctggacatcgagggcacgacgagccccatctcgttcgtgacggacgtgctcttcccctacgcccgcgacaacgtccgcacgcacctggacgccacctactccacccgcgagaccaaggacgacatcgccctgctgcgcgctcaggtcgagcaggacctagccgagggcgtccccggcgccgtcccggtcccgcccgacggcgccggcaaggaccgcgtcgtcgacgccctggtcgccaacgtggaggccatgatcgcggcggataggaagataacctcgctgaagcagttgcagacgtacatctattcaagtggcagcagggaagcccagaggctcatcttcgggaacactacctacggcgaccttagaaggcacctgtgcggattttttgacgcaacaattgggaccaagagagacgctcgcagctactatgagatctggcagacggtcggggtggaccggccgtctcagatactgttcctcacggacgtgtgccaggaagccacggcagcacaggctgcaggccttgaggtgctaatatctatcagacctggaaacgcgccactccctgctgaaaaccatgggtttgggacagtcgagtcatttgctgaaatcttgacatgaagggaggatgcatcctcaacatgcatgcatgctgtgctatttaaagatggaaacggattgaactagtttcaaaaggcagatggaatggtttcatggccatgatttgcatcttcatactagctttatttacattgcccatgttcagtttgtcggagaccataaacacatgggatcaccaagttatcttacccttgattggtttcctttaactcgtccggtttgctgttcgtttcttcagtttcgtcaggcattgggtctgttagtcagggccaggggcaaagctaggtagaagcctgtggatgcacatgcaccacaattttttgtaaaactagtgttttgtccaaatttttaccat

SEQ ID NO: 114474 - DNA, 1193 bp, Zea Mays
cggcggtcccctccacccgggatccatgtggacgtatgcggatgcggtgagcaggtagcatccactgcactctgcagaggaggaaggaagaggaccgacaaagatggggatggcattgccattgccgccggcgtcacaggggttgttgcgttccaggaggatgagcttcctcgcttcgccgccgctgtcgctcaaggcagccggtggaatcagcatcccatgcccgtggcgattggatggccgccgtccacgagcagccccagccagtgttcctcgactagcatcagtggtgaatgcgcagtcacttatcctcgatttccttgccgtcgcactcgcaccacatatatgcccgtagcgcaacgcaaccgggcgcccaaaacaaaaaaaagctgcgcgctctgatccgaatcgcactcgctggcacgccgcagcgaagcgtggtgctggacatcgagggcacgacgagccccatctcgttcgtgacggacgtgctcttcccctacgcccgcgacaacgtccgcacgcacctggacgccacctactccacccgcgagaccaaggacgacatcgccctgctgcgcgctcaggtcgagcaggacctagccgagggcgtccccggcgccgtcccggtcccgcccgacggcgccggcaaggaccgcgtcgtcgacgccctggtcgccaacgtggaggccatgatcgcggcggataggaagataacctcgctgaagcagttgcaggccttgaggtgctaatatctatcagacctggaaacgcgccactccctgctgaaaaccatgggtttgggacagtcgagtcatttgctgaaatcttgacatgaagggaggatgcatcctcaacatgcatgcatgctgtgctatttaaagatggaaacggattgaactagtttcaaaaggcagatggaatggtttcatggccatgatttgcatcttcatactagctttatttacattgcccatgttcagtttgtcggagaccataaacacatgggatcaccaagttatcttacccttgattggtttcctttaactcgtccggtttgctgttcgtttcttcagtttcgtcaggcattgggtctgttagtcagggccaggggcaaagctaggtagaagcctgtggatgcacatgcaccacaattttttgtaaaactagtgttttgtccaaatttttaccat

SEQ ID NO: 114475 - DNA, 1440 bp, Zea Mays
gccgtgaaaactacgcagagcagtaaaataaccgcagttaccagctgacctccctcaattcctcggccatccgtacgtctccgccttcggggctttcttcttggtctcgttccttggctggacaaaacacctgtggcagcggccgcgctgcttgcctcgccttgctctcggttcgtggggcatggcggcttcgccggcttgtgctccggggctcatctccggccccaccctccctcccctgcccgttgccttccgctgctactgggcccaaaagccctcctccgcgtcgacctcctccaggcgcccgtgccgcaggcggttcgttcccgttgcagctgcctccacccgcacctcctctgcggctgctcggggcctcgacgccgacgacttccgccacccgctggacaagcagaacactctgctgctgagagcaattcccgggctcaacgacgtgggcaaagctttgctaggacccgtctcggagcaagttatggtactccagaacattggaacatcagttctcgtctccccgaaccagcttccagatctccaccaactgctggttgaggctgcgaagctcttgaacaccgaagctcctgacttgtacataaggcagaatcctgttccaaatgcctacaccttagcaatcaacggcaaaaaaccattcattgtcgttcacacaagccttgtggagctgcttactccaagggaattgcaggctgttttggctcatgagctgggtcacctcaagtgcgatcatggtgtttggctcacttttgccaatatactcacaatgggagcatacactgtccctggttttggcatggttgctggcttcctggaagagcagctatacagatggctacgagctgcagagctgacttgtgacagggcagctcttcttgtggtgcaagatccgaaggtagtcatctctgttctgatgaaattggccggaggatgcccatctcttgccgacaagctaaatgtggatgccttcctggagcaagctcgttcgtacgacaaggctgcatcgaacccagttgggtggtacatccggaatgcacaaaccagagagctttcacaccctttgcctgtgatgcgagccagagagatcgatgagtggtcaagaagccaggagtacaagaccgtaatgcaaaaaatgtttcagatggggctgaacagagtatagttagtggcgacacatacgaagaggactgtagagtctgtagcttgtgtatggaagggaatgtctgtatatggagaaggctggtgtttctggaaaaaaaacagatacaaacatagacatattgtatatatttgcagttgaatttagtctccttgtatatgatatatttttttcttttttgttactgtgtaatactgtaactagaatgaataaaagtttgtttgagtttgccggataactggaaagatcggcat

SEQ ID NO: 114476 - DNA, 1552 bp, Zea Mays
gccgtgaaaactacgcagagcagtaaaataaccgcagttaccagctgacctccctcaattcctcggccatccgtacgtctccgccttcggggctttcttcttggtctcgttccttggctggacaaaacacctgtggcagcggccgcgctgcttgcctcgccttgctctcggttcgtggggcatggcggcttcgccggcttgtgctccggggctcatctccggccccaccctccctcccctgcccgttgccttccgctgctactgggcccaaaagccctcctccgcgtcgacctcctccaggcgcccgtgccgcaggcggttcgttcccgttgcagctgcctccacccgcacctcctctgcggctgctcggggcctcgacgccgacgacttccgccacccgctggacaagcagaacactctgctgctgagagcaattcccgggctcaacgacgtgggcaaagctttgctaggacccgtctcggagcaagttatggtactccagaacattggaacatcagttctcgtctccccgaaccagcttccagatctccaccaactgctggttgaggctgcgaagctcttgaacaccgaagctcctgacttgtacataaggcagaatcctgttccaaatgcctacaccttagcaatcaacggcaaaaaaccattcattgtcgttcacacaagccttgtggagctgcttactccaagggaattgcaggctgttttggctcatgagctgggtcacctcaagtgcgatcatggtgtttggctcacttttgccaatatactcacaatgggagcatacactgtccctggttttggcatggttgctggcttcctggaagagcagctatacagatggctacgagctgcagagctgacttgtgacagggcagctcttcttgtggtgcaagatccgaagaggtagtcatctctgttctgatgaaattggccggaggatgcccatctcttgccgacaagctaaatgtggatgccttcctggagcaagctcgttcgtacgacaaggctgcatcgaacccagttgggtggtacatccggaatgcacaaaccagagagctttcacaccctttgcctgtgatgcgagccagagagatcgatgagtggtcaagaagccaggagtacaagaccgtaatgcaaaaaatgtttcagatggggctgaacagagtatagttagtggcgacacatacgaagaggtctgtacatggaatccatcatgtttctttgcaaggatttagctttagatcatgactgtcctttcctgtatatctgatcatgagtttgtgattttctcctgggtggctgggcaccgttttttttccaggactgtagagtctgtagcttgtgtatggaagggaatgtctgtatatggagaaggctggtgtttctggaaaaaaaacagatacaaacatagacatattgtatatatttgcagttgaatttagtctccttgtatatgatatatttttttcttttttgttactgtgtaatactgtaactagaatgaataaaagtttgtttgagtttgccggat

SEQ ID NO: 114477 - DNA, 1470 bp, Zea Mays
gccgtgaaaactacgcagagcagtaaaataaccgcagttaccagctgacctccctcaattcctcggccatccgtacgtctccgccttcggggctttcttcttggtctcgttccttggctggacaaaacacctgtggcagcggccgcgctgcttgcctcgccttgctctcggttcgtggggcatggcggcttcgccggcttgtgctccggggctcatctccggccccaccctccctcccctgcccgttgccttccgctgctactgggcccaaaagccctcctccgcgtcgacctcctccaggcgcccgtgccgcaggcggttcgttcccgttgcagctgcctccacccgcacctcctctgcggctgctcggggcctcgacgccgacgacttccgccacccgctggacaagcagaacactctgctgctgagagcaattcccgggctcaacgacgtgggcaaagctttgctaggacccgtctcggagcaagttatggtactccagaacattggaacatcagttctcgtctccccgaaccagcttccagatctccaccaactgctggttgaggctgcgaagctcttgaacaccgaagctcctgacttgtacataaggcagaatcctgttccaaatgcctacaccttagcaatcaacggcaaaaaaccattcattgtcgttcacacaagccttgtggagctgcttactccaagggaattgcaggctgttttggctcatgagctgggtcacctcaagtgcgatcatggtgtttggctcacttttgccaatatactcacaatgggagcatacactgtccctggttttggcatggttgctggcttcctggaagagcagctatacagatggctacgagctgcagagctgacttgtgacagggcagctcttcttgtggtgcaagatccgaaggtagtcatctctgttctgatgaaattggccggaggatgcccatctcttgccgacaagctaaatgtggatgccttcctggagcaagctcgttcgtacgacaaggctgcatcgaacccagttgggtggtacatccggaatgcacaaaccagagagctttcacaccctttgcctgtgatgcgagccagagagatcgatgagtggtcaagaagccaggagtacaagaccgtaatgcaaaaaatgtttcagatggggctgaacagagtatagttagtggcgacacatacgaagaggtctgtacatggaatccatcatgtttctttgcaaggatttagctttagatcatgactgtcctttcctgtatatctgatcatgagtttgtgattttctcctgggtggctgggcaccgttttttttccaggactgtagagtctgtagcttgtgtatggaagggaatgtctgtatatggagaaggctggtgtttctggaaaaaaaacagatacaaacatagacatattgtatatatttgcagttgaatttagtctccttgt

SEQ ID NO: 114478 - DNA, 2637 bp, Zea Mays
atggctttgcagctgttcagggaaatgcagacactcagttttgacaggcatacattaccatttgctagcttgctcagtgtcgctggggcattgcctgacattaagatcgggagacaaatacatgcacaattaatccttcttggccttactttggaggatttcatgggaaatgccctgattgacatgtactcaaaatgtggtatgctagatgctgcaaagactatttttgcaaacaaaagtgacaaaactgccatttcctggaccgctttgataactgggtgtgtccagaatgggcagcatgaggaagcattgcaactattctgtaacatgagaagagctggtctaagtcctgatagggcgacatgttctagcatcataaagtcttcctcaagcctgggagtgattgggataggaaggcaattgcatgcttacctcacaacatcagggcacatgtccagtgtgttctcaggcagtgcccttcttgatatgtatgcaaaatgtggctgtttggatgaagccatcagaacatttaatgagatgcccgagaagaattccatcacgtggaatgctgtaatttcagcatatgcgcaatatggacaggcaaagaatgccatcaggatgtttgacagcatgcttcactgtggtttttgtccagatccagtcactttcttgagtgtgctagcagcctgtagtcacaatggtcttgcggaagaatgcatgaaatactttgacttgatgagatattacaatagcatgtcaccctggaaggaacactattcttgtgttattgatgccttgggtcgggcaggctgtttcgataaaattcagaaagtgttagatgagatgccatttgaggctgatccagtaatatggagctccattcttcactcgtgcaggatctatggaaaccaggatttagctacagtggctgctgaaaacttgttcactatggttcccacagacgcgactgcctatgtcatattgtccaacatatatgctaaagctggtaattgggaaggtgctgcgcgtgtgaaaaagattatgagagatagaggagttaggaaagagtcgggtaacagttgggttgaaatcaagcaaaagatctacatgttttcttctaatgatcacaccaacccaatgatagatgagattaaagaagagcttgagaggttgtacgaagagatggataaacaaggctatgagcccgatactagctgtgccttgcatatggtggataataagcaaaagttggagtcactaaaataccacagtgagagattggccatcgcttttgccctgatcaataccccaccagggacgccaattacggttatgaagaacttgagtgcctgcctagattgtcatgctgccatcaagatgatatcgaagattgtgaacagagacattattttgggtgccagtgacttcggcagttttcctcacactctggtgttccctatcaccgtgcgggtgtgccgttcagatgcgatcttggacaggaggccctcgcctccgccgccgccacccttttccggcgacgatcgcgagcagaaccacggcaagcggcggcgggatcaacattcaattcctacggtgcctggacgcaggccagtgcacgcgcgtctcgggccatgcgtccgggccgactctgcgcctgggggaacatgtgaaacgatcgcgctcccggtccccttgggggcagagagcaccgcttcggcttctccacccccggtgcgcctcgggccttgtggtggagccggctctgcgcctggatggacagttgggacgatcagtgccccgggccccttgagcgctgaggttgcagtgggggctgaggaagccgcttcgggctctacaattccgacgccagccccttcggtttctcccccaacggcgctcgtcacttcggttatagccccaagagccgccaatgctttaacaaccggctctctatctgaagatcctgggcccgcctcaataattggtgcaatttcctctggtctattggattctgagaggccaattctgcatgacacctcatttaatgtggcggcttttgaggaggctggcggttatcagaggttaggccagggcccagaaagtctttgtgctgatgcttcaggacgggcctctgtgccattttctcatgtcccgcatgtcccggatgttcctgctgataatgctgcacaagtcaggaatccctgggatattatcaaatactcactgcaagcaaaaccaccatgctttaaggtgtactctagaagaagagataccgtgcctgtgcaatcccaggaagtgagctcgccatccccgacccccttgcaagaattcagtcagcacatttctaaagccattaatggtttgctgagtcctccgccaatccccaaacgcagaaagaagaccctactaagaaatttcaggcctaggagatccaggagggtggccaagtttccacctgagctaggatccgaagcagcagcctctgtctgcaagaaattgggattctgtgatgatcatggcattatcactctggaagatgctagcaaatatgttgtcttattcaattcaccactctccagggagcacatcgctgccttggcagcgctgttcggatgggatacatctgagctcgcataa

SEQ ID NO: 114479 - DNA, 1526 bp, Zea Mays
atggctttgcagctgttcagggaaatgcagacactcagttttgacaggcatacattaccatttgctagcttgctcagtgtcgctggggcattgcctgacattaagatcgggagacaaatacatgcacaattaatccttcttggccttactttggaggatttcatgggaaatgccctgattgacatgtactcaaaatgtggtatgctagatgctgcaaagactatttttgcaaacaaaagtgacaaaactgccatttcctggaccgctttgataactgggtgtgtccagaatgggcagcatgaggaagcattgcaactattctgtaacatgagaagagctggtctaagtcctgatagggcgacatgttctagcatcataaagtcttcctcaagcctgggagtgattgggataggaaggcaattgcatgcttacctcacaacatcagggcacatgtccagtgtgttctcaggcagtgcccttcttgatatgtatgcaaaatgtggctgtttggatgaagccatcagaacatttaatgagatgcccgagaagaattccatcacgtggaatgctgtaatttcagcatatgcgcaatatggacaggcaaagaatgccatcaggatgtttgacagcatgcttcactgtggtttttgtccagatccagtcactttcttgagtgtgctagcagcctgtagtcacaatggtcttgcggaagaatgcatgaaatactttgacttgatgagatattacaatagcatgtcaccctggaaggaacactattcttgtgttattgatgccttgggtcgggcaggctgtttcgataaaattcagaaagtgttagatgagatgccatttgaggctgatccagtaatatggagctccattcttcactcgtgcaggatctatggaaaccaggatttagctacagtggctgctgaaaacttgttcactatggttcccacagacgcgactgcctatgtcatattgtccaacatatatgctaaagctggtaattgggaaggtgctgcgcgtgtgaaaaagattatgagagatagaggagttaggaaagagtcgggtaacagttgggttgaaatcaagcaaaagatctacatgttttcttctaatgatcacaccaacccaatgatagatgagattaaagaagagcttgagaggttgtacgaagagatggataaacaaggctatgagcccgatactagctgtgccttgcatatggtggataataagcaaaagttggagtcactaaaataccacagtgagagattggccatcgcttttgccctgatcaataccccaccagggacgccaattacggttatgaagaacttgagtgcctgcctagattgtcatgctgccatcaagatgatatcgaagattgtgaacagagacattattgtaagagactcacgcaggtttcaccatttcaaggatgggttttgctcttgcggagattactggtaggaacttggttggctgcctagttagatgaacaaacaattaaaagttacaca

SEQ ID NO: 114480 - DNA, 383 bp, Zea Mays
aaagacgccctgcctttggacgtcagacagccatccctccgagcttgtctcgtctattcctcatctcgcggatggcggcgatgtccgatctctgttgctgcccagtctgatgatttcttggacgcacgacgaacgcgagttggaaggagatctggaggtggacaggctttgggcagcgggggagctgggcgccagcagtgtcgaactcgaaccctaccaaatcacagatattaattttgagagctgtgaagtagaaaactctaatctttggaggagactttctgaatctgcatcaaaagttgagtgtggtgagaatcttacgtacaagtcaacaattgatgttagtttattttaatttttgtggataagaaaattgtcagcgt

SEQ ID NO: 114481 - DNA, 736 bp, Zea Mays
aatttaataatctcagtgatacttatctactactacacattgtgcaagggtagcaggtgggcttcgggagagatgtattatatgtttttactataatagatgtagacataaacacacatgtggtgtagtggtagctacaaacacatttatttgagaggtcgctggtttgaatccccttggagcctgtttttttaatttaattttagctaggcgtgggatgcacgtgggaatgggaataggctttgtgggagggagaatgagaaagacacgtgatagccgagaatggaaatgtgaatgggctttgcagggagggggaatgagaaagacaggcagctgggaatgggaatgggctttgcagtgaggacggaatgggaatggcagaacacggaatggggcagcctacccttaccatcttaataggtagtagagatttagacatacataggatcatcatcatcataacacaggcggatgcttcggctctaaagataaggcttcgacaaagagaaaaagaagcagtttcatgcttcgttgtgtacgaaaagaagggaaggtgtttttcgccttcggctcaaaaaatgctagtttcgtccacagcaaagcagttcaatacatggacaaaaaggtaaagatatattacaaagtatgcacaaatttacataattagtatctgattcttaaaattacaaatattttacaatgatattacaagatttttctctagaatttttctagc

SEQ ID NO: 114482 - DNA, 1772 bp, Zea Mays
aatcccgagtctcgagcgagtagcgacggccgcgcctgcgcctgcctgcgtcttccgtggcggcgcccctacctctcgaacccgtcaggcggtctggccgacctcgcttcctcggctagctacctactcgccagcgtctattgtccagcaggcgcccagctcccaagcggccgcagtgcccctgcttctgcccttgcacgttcggcccctgtgctgcactgcacagtaaggtttgttttcttccattcagtttgttgtactgtggagatcaaactagctaagggcagagccaaatttggggattcttcaactgaagccttgtatagatatagtttgaaagatgatgaacgaacacagagaggaggatgccttgagaggtcaagcagtcaaaaaccagaaggcgatatgggacaagaccatggaaatgagattcttgctgcagaaggcgttttctacttccaacaagttaccccaggaatccatcagaacaaggttttgcaatcatgataagcagatagagcaagcatatgatgatcttttgaattcgacgaaacatactttgagcagcatgatggagctgcaggaggctttgcttgagagtaatcaggctacaaaggatgccaatgaaattccttctgcctcaaatggagacaatgacgagtggtcagaagtacagagattgcaggcaaggataacaacattcagaaataccgagatagataaatggcacaggaaaatacaggtgacaacgggtgctgctgcacttaaaggaaagctacatgcatttaatcagaacattagtgatcaagttgctggttacatgagagatccaagccggatgattaacaggatgtacttgaccaactctgctgttagagtatttggaaaggatgtgggagaacctggaacagctgaggaggggcacattatggaaggtgatcctgaacttattgatgattctgagttttatcaacaacttctcaaggagttccttgagtcatgtgatagaggggcatcaagttagttcatttttaattattgaacttattattatttatttacacacataggcgtacacctatcgatcccggattcgattgaaatacattagggccaggatgacctattatccgtctgtttccacccctagaatttatttatatatcaacatgcatactgaaacatggttcatctaacagaagatacatgtttcaagaatttcagttttcatttgtatattcataaactgttaccattctaagatttgtaaaaatgtatatgtttgtactttcaccttaagcgtccaccaaataccatttattgtatgcagagtcggcattttactctctaaaaaagcagcaggttaaaaagagaaagcttgtcgatcgtcgtgcttcgaagagcaggaagatacggtaccatgtccacgagaagatcactaatttcatggcaccggagcccatggttcttcctccaatggctccgaagttgtttgagaatttatttgggaatagcagctagaatccataaactgcagtaggtttacatttctttctgttgccttttctacttctataaactgtagtaggtatgatgtcactagacttagactgaattgtaagttttgatgtcctcatcagttttgtgcgtagacaagcagagcctagttcaccaatcaaattatgcttcgatttgggcctgatgagtgccatttaccggtggacccgcggtgagtcgtgatatacgtgattatcgaaaaatgagttttccta

SEQ ID NO: 114483 - DNA, 1461 bp, Zea Mays
aatcccgagtctcgagcgagtagcgacggccgcgcctgcgcctgcctgcgtcttccgtggcggcgcccctacctctcgaacccgtcaggcggtctggccgacctcgcttcctcggctagctacctactcgccagcgtctattgtccagcaggcgcccagctcccaagcggccgcagtgcccctgcttctgcccttgcacgttcggcccctgtgctgcactgcacagtaaggtttgttttcttccattcagtttgttgtactgtggagatcaaactagctaagggcagagccaaatttggggattcttcaactgaagccttgtatagatatagtttgaaagatgatgaacgaacacagagaggaggatgccttgagaggtcaagcagtcaaaaaccagaaggcgatatgggacaagaccatggaaatgagattcttgctgcagaaggcgttttctacttccaacaagttaccccaggaatccatcagaacaaggttttgcaatcatgataagcagatagagcaagcatatgatgatcttttgaattcgacgaaacatactttgagcagcatgatggagctgcaggaggctttgcttgagagtaatcaggctacaaaggatgccaatgaaattccttctgcctcaaatggagacaatgacgagtggtcagaagtacagagattgcaggcaaggataacaacattcagaaataccgagatagataaatggcacaggaaaatacaggtgacaacgggtgctgctgcacttaaaggaaagctacatgcatttaatcagaacattagtgatcaagttgctggttacatgagagatccaagccggatgattaacaggatgtacttgaccaactctgctgttagagtatttggaaaggatgtgggagaacctggaacagctgaggaggggcacattatggaaggtgatcctgaacttattgatgattctgagttttatcaacaacttctcaaggagttccttgagtcatgtgatagaggggcatcaaagtcggcattttactctctaaaaaagcagcaggttaaaaagagaaagcttgtcgatcgtcgtgcttcgaagagcaggaagatacggtaccatgtccacgagaagatcactaatttcatggcaccggagcccatggttcttcctccaatggctccgaagttgtttgagaatttatttgggaatagcagctagaatccataaactgcagtaggtttacatttctttctgttgccttttctacttctataaactgtagtaggtatgatgtcactagacttagactgaattgtaagttttgatgtcctcatcagttttgtgcgtagacaagcagagcctagttcaccaatcaaattatgcttcgatttgggcctgatgagtgccatttaccggtggacccgcggtgagtcgtgatatacgtgattatcgaaaaatgagttttccta

SEQ ID NO: 114484 - DNA, 2031 bp, Zea Mays
atgccccaagtgaagtccagctacgatggcgccggcggggactacattaagtggatgtgcggcgccggcggccgcccgggcggcgccatggccagcctccaccgcggggtgggctcccttgttcgtgacatcagcgacccctgcctcaatccctccccagttaaggtatcaatactccatgccggtgacaatgccaatgtatctgttgctcccttgtcagtgacattggctgacacccccaaccggtgccactacaccgctttatttttccatgacactattgagacatcatgccttgtttacaatagcatttgtgctgcttatagaatcactgatcacttacaacatttattgcggcataagatacctcgcaggggaaacagaatgctgaaaccagaaagatggcacgcgtgttttgacagtgacgggaaggctatatgtttccgtaaagcccttaagttcattgtcttaggaggtgtggatccttctattcgagcggaagtttgggaatttcttattggctgctacaccttaagtactacagcggaatataggggaaaactaagagctgctcgaagggagaaatatcgttatttaattaagcaatgccagagcatgcatacaagcattggtacaggtgagcttgcatatgctgttggatcaaagctgatggatgtcaggaccttgcccaaagaaactgaaggtggagaagtcagcacaagtcagcaagctgaacatgaagtgccttgcagtttagcagaaaattcgaatttgatttatggttctggttgcacaacgcggccccataaaaggaaaatttgtagtaaatcagctgaaacagttggtttcaatcaacataatgataactctagaggttctggagattgtgatgtcattggtgaaccaaggtatgacagtgatgccttcatcgattttccttccctaactggtacaaacttggtcgcaaatggtgacggggatagcaatggagttgaagaaaatccttgcaatttcttggtctctgaacatagagtaaggccccatgatgaacacatgcacagcttccagatcaataataacatagatctcataatagagtcaaatacattctccaatgatatatttcgacctagcagtagtgactcagccatctttcactcagatgcgtacaagcatgatagatggttagacgatactggctatagtgaagaaattatagattccttgaggatatctgatgcaccagaatcagatttagttgatggaatgaaatcaaatggttcaatagctgacaaagatagagtctctgaatggctttggacactgcatcgaattgtggttgatgtggtgagaacagatagccaccttgatttctatggagaatcaaggaatatggctagaatgtctgatatacttgctgtttatgcatgggttgatccttccactggatactgtcaaggtatgagtgatctgctgtcaccttttgttgtcatatatgaggatgatgcagatgccttttggtgctttgagatgctactgagaaggatgcgtgaaaatttccagatggagggaccaacaggagttatgaagcaattgcaagcattgtggaagataatggaactgacagatgctgaattatttgaacatttttcggcaattggtgctgaaagccttcattttgcttttcggatgctgctagtcctttttcgtcgagagctgtcctttgaggaatcacttatcatgtgggagatgatgtgggctgctgattttgatgaagaagcagtcaggcatttagaagagaactgcctagaaccattgctagtagatctgagcaatggcttatcatctgaagtcaaagaaatgttcaatgataatgtgctcaaaataaatgtaaaaagatgtgtacgcttggcaatcaagctaaggaagaagtacttgtacaaggtgtgctggatcagtattgacctgaagtatggtacatgtccaagatccggcattattcaggattgcaagatgaagctgtggaattaa

SEQ ID NO: 114485 - DNA, 1817 bp, Zea Mays
acgagcatgatgatggcaactggcacggtccacggtacttcacgctgactgacacgggcggtggcaccctgtagatgccacacatgtacatcaaaattgcagccagctcatcggcaagacaccaatggtatatctcaacaatgtcgtcaagggctctgtcgccaatgttgctgctaagcttgagattatggagccctgttgtagcgtcaaggacaggatagggtacagtatgataaatgatgctgaacagaagggcttgattactcctggaaagagtgttttagtggaagcaacaagtggaaatacaggcattggtcttgcctttattgctgcttccaaaggatataagttgatattaacaatgccttcatcaatgagcatggagagaagagtcctactcagagcttttggtgctgaacttgtccttactgatgctgcaaaagggatgaaaggggccgtagataaggctacagagattttaaataagacacccaattcttacatgcttcaacagtttgataaccctgccaaccctaaggtacattatgagaccactggcccagagatctgggaggattcaaaggggaaggtggatatactcattggcggaattggaacaggtgggacaatatctggtgctggccgtttcctcaaggagaaaaattctggaattaaggttattggtattgagccttctgaaagtaacatactctccggtggaaaacctggtccacataagattcagggaattggtgcaggatttgttccaaggaacttggatagcgatattcttgatgaagtaattgagatatcaagtgatgaagctgttgagacagcaaaacagttggctgttcaggaaggattactggttggaatctcctctggagcagctgctgccgctgccataaaggttgcgaaaagaccagaaaatgctggaaagttgatagtggttgtgtttccgagttttggcgagaggtacctttcatctgtcctctatcagtccataagagaagaatgcgagaacatgcagcctgagccatgacggagccgtcactttaaacagcataataaatgtatctggaataagatgcgtgggcaccattagtgtgctccaattggtatcatttggcccatgctcacgctatccttttgcctctatgaccggaactaatcaggcgtgtgagaaatatccatgactctcccaattgctttccattaacaaaatgattacacctctgaattgtctatacgattcaggctgatttgattggtaattgtaaacaacttgtccttgaatctttgaagtcaaacaaagtcagttggctgaatcagctgaatatatgttatatgcattttttttgcgtgtcgctatcacagcattatgcatctcaaacaagtgtcacatgatggaacgaggatgatgtatggcagcgttatgcatctgaatgttggcatatggcaagcacgacaaggcgtgacagaagggagcagctagtgtgcatatccatttctgcgccgttctcccctcctgataatgacctggacgcacgtctaatggacgttcgtacactgcaatttttcacctggatagaaatgagcatgttatgggtatgccttaatttgcacggctgatgacacatgtccgtgaagtcttttacgtgagcctggaaatatgtccgatccggatactcatggtgcttggatttttgttgtctttccatgtatatatattaatagaaaaaactgtcatggaatctatctttttgtataatcgttgtgaaaccaaaccatcaaaagtcaaaaaaaagtctcaaaat

SEQ ID NO: 114486 - DNA, 944 bp, Zea Mays
atgatgagtgagcagtgtaatgcacctgagaattctcattttgttggaagaacatcacattgcatagaagtggatgaagcatgtgataaccctgttgacattgaggagaatgatgcagatgaagtcaaaactgaggcaagactaatatggaaaccaaatgaagatgggagagtgatgagcgcttggctgaaacactccatagattcacttcatggaaataacaagaaatcgaagaaatattggacagatgtgcaaaaggagtacaatcaagttaccatcaaaaatagatggagaactactaaacaggttaaagatagatggcacaaaattaaagcttgttcaatgattgttggttgaaagctaaaagggtttacacgagtggatattcagacgaaatgtggttagggaaagcacagaaattctttgaggaggagaataaaggactatgttttcagcttatgaatgtttggtacatggttcgtaacgaggcaaagtggatgagctataatgatcatagtcagggcaagagaaaggaaatggagaagggcaacccagaaggaggaggattagaagatgttgaccttgatagaccaattggacagaaggcagcaaaaagatctgtactcgaaggaaaaataaaatctaaattaagatcgacaaatgtggaagaacttgatagatttgagaaaattcaaaacaatgttgcactcaatcatatgaaggctcttgaaatgcaaggcaagattcatcgtgacaagattgaggcgaataaaattgctttgcaggctgctaaagaagagaaggaggccaaaatgttggagacctattcaaacctactcaaacaagatacttcagaaatgcctgaggatattagaactgagcatgttgctgatctaaaatgtttgaggaacaaactgtttgcagaattttcttaggctattatg

SEQ ID NO: 114487 - DNA, 1458 bp, Zea Mays
agagagagagagagatggacgagtacgggaggctggcgctcaccgttgccgtggtcgcagcggtgaccacgagcggcgcggccgcgtggggctggcagcagcagccgcagccgctggcgccgtgcatgtacgtcttcggcgattcgctggtggacaacgggaacaacaacaacatcctgagcctggcccgggccaactaccgcccctacggcatcgacttctacgagggcccgcccggccgcttcaccaacggccgcaccatggtcgacttcatctccgacatgctccgcctccgcccgccgctactcccgccctacgccacggcgcgcccggaggacctcccccgcggcgtcaacttcgcgtcgggggcctccggcatcctgcccgacacaggaaacaacctgggcgggcactacccgttctcggagcaggtggaccacttccgcgcggcggtgagcgacatggggaacaggtcggagttccgcggcaacgccacgaagctggcggaccacctggggcgctgcatcttctacgtcggcatgggcagcaacgactacctcaacaactacttcatgcccgactactacgacaccgcgcgcaggtacagcccgcgcgactacgccgcgctcctcctccagggctactccacccagctcacacagctccacggcctcggcgcacggaagttcgtcatcgccggcgtcggcctcatcgggtgcatcccttacgagctcgcaaggatgaacgacgacgacagcaggccgtctgggcctaacaataaccaatccgctgctagccaagaagacattgctatatccattggcataggtggcggaggtggaggaggcggtgtcggcgtcggtggaggaggcggcggcggcgacgactggagatcaccgtccatgccaccgccatacgcagacggtggcagtggcaatggcagtggcaacggcaacgcagacggtggcaatggcaacggaaacagtagtggcagccgcaccggcaccggcaccacgaacccagcgcctgccggcggcgggtcatgcaacgagacgatcaacagcgcgatcgacatctacaacaggggccttctggccatggtgaagcgcctcaacaaccgcggcggcctgcgcggggccaagctcgtcttcctggacaccgtgcagagcggcaaggacctcatggcgaacgcggccgcgcacgggttcgccgtgctcgaccgcggctgctgcggagtgggccggaacaacggccagatcacgtgcctgcccctgcagcggccctgcgacgaccgcggcaagtacatgttctgggacgccttccaccccacggaggccgcccacaggatctacgccgccaaggccttcggctccaactccaccgccgaagtttaccccatcaacatcagccagctcgccgccatctgaacaaaacactctcatccgctccggatcggag

SEQ ID NO: 114488 - DNA, 75 bp, Zea Mays
ttgggacttatgtcgtttgttcttttggtctctctggaaaacttcatgtatggcttcattggggaattacttcat

SEQ ID NO: 114489 - DNA, 1243 bp, Zea Mays
tttcttttttctcaacaatatgtagtgtaatagatatttttcttaataatacttatatccaaaagtttgttttgtatgagacgctgagtggtggcccctaccttccaacaaatatttgacggtgagtcggtgacaagtaatagcgggccggaagagataaggctcctcttggcaacaaaacagccggttggcgtgccgcgtgcacgcctggacgacgatgcagctccagcatggccctcggcctggagtggccggtgctgctcgtccccgcagtagtctcccccgccgacctagcctcccgcgccgccgccgcagcagcagcagcacgaccaggacgacgaggacggcgctggtggtgctagtagccgcggcgacaagagacggggccagaaagacgacggcgtcggccagcagggccacggcggcggacgtggtgaggcagttctacgacggggtgaaccggcgggacctggcggcggtggagccgctcatcgcggagggctgcgtgtacgaggacctggtgttcccgcgccccttcgttgggcgggagcgtgtggtcggcttcttcggcgagttcatggggaccatcagccccgacctgcagttcgtcatcgacgacatctccgccgaggactccgccgccgtcggggtcacctggcacctggagtggagggggaggccgtttcccttcagcaggggatgcagcttctaccgcttgctcggctcgggctcggactcggacgcggattcggactcggagcagcagcggctgcagattgtgtatggtcgagactgcgtggagccggccgccaagcccggggatttggcactggtaatcatcaggggagtgacatggatcctcgaacgatttccgagccttgcaagcaggctctgatgaccccaggtccccaaccgaggcaatagctacaggatacgctacgcatggctttgctctcgaaagtccagtgagatcgagctagcagacgtgtataatgttctacaattaatacattattctaagaaactggccaaacgtatgtctcgtcgtgacgaaaagaaaaataaaaatataggcccaattacttttattaaataggagtgtatagttctgcacctaagtaagagcttgttactatacaaaaactgactattagtaagatgagatgtatagtttacagtcggtctaccggctaaaccattaaccttgctctaattttatatatatgcaaacataaatgtatag

SEQ ID NO: 114490 - DNA, 887 bp, Zea Mays
atgcatcatgctcccttgctaattctacagtctattttgtccaggttttcacagaaaagcttcagcgccttccgaagtcgaagatgttagacctgtttcagaaggagtacatccgtgctgtcatagctggagttgggctcatggccctccagcagcttgggggtgtcaatggcgttctcttctacgccagtgaagtgttcgtctcggccggtttctcgtcgggaaacacgggaacagtggccatggcggtagtgcaggttccgatggtcggactaggggtgcttctgatggacaaggctggaaggaggccactgttgatgatctctgcagctgggacatgcgtgggttgcctgctagttggtctgtcattcttgtccaaggagcagcactgggaaagggacctgaacgtgttggctttggccggacttctggttttcatcggatccttttcactgggtatgggcgggataccatgggttataatgtcagagattttccctataaacatgaaagggtcggcagggagccttgtgaccttagtaagttggctcgggtcgtggattgtctcgtacgccttcaacttcctgctgatttggagttcttacggcaccttcttcatcttcgcggccatttgcggactcacggtcgtgtttgtgcatcggctagtgccggaaaccaaaggaagaaccctggaggagatccaagcctctatgaactcgtccttgacacccttccacaagtattagtttgcttgcatagttgattagtgtcacagatacggttcattgtatacaaagagagacatacaaatacatgtcatttctccataatactactatctcattattatacagtgttttaaatagcgggaaaatgaatttatcctc

SEQ ID NO: 114491 - DNA, 1543 bp, Zea Mays
gacaagacaacccatgcatggccggtccgatggagcgagagggacgagacgcagccgagaagcccctcttggtaagggtgggcggcagcggtggtagccagggcggcagcgcctcctcttcttcggttgccgtggtggtcggctgcaccgccatcgccgtcgccggctccttcgagttcggaatgtcgatcggctactcgtcaccgactcagctgggcatcatgcgcgatctccgcctctcgttagctgagtactctgtgtttggctcgatcctgaccatcggagcgatgctgggtgccattgtcagtggatctgtagccgatcgagcaggtcgaagaggtgcaatggcgatatcggatgttctctgcgctcttgggtatctcctgataggattttcccagagctattggtggcttgacatcggaagggtgctgatcggatgcggaatcgggattctgtcatatgtggttccggtctacatatcagagataacgccaaaggaccttagaggaggctttgcaactgtaaaccagttcatgatttgctgcggagggtcgcttgcatttgttcttgggacatttatcgcctggcgcaccttggcgatcgttggagtggtgccgtgtttagtgcagctggttggccttcttttgattcccgagtcccccagatggctggctaggtttggacacccaggtgcctttacaggagcactgcagacgctaaggggacatggaaccgatatctctgaagaggcctcagaaataaaagttttcacagaaaagcttcagcgccttccgaagtcgaagatgttagacctgtttcagaaggagtacatccgtgctgtcatagctggagttgggctcatggccctccagcagcttgggggtgtcaatggcgttctcttctacgccagtgaagtgttcgtctcggccggtttctcgtcgggaaacacgggaacagtggccatggcggtagtgcaggttccgatggtcggactaggggtgcttctgatggacaaggctggaaggaggccactgttgatgatctctgcagctgggacatgcgtgggttgcctgctagttggtctgtcattcttgtccaaggagcagcactgggaaagggacctgaacgtgttggctttggccggacttctggttttcatcggatccttttcactgggtatgggcgggataccatgggttataatgtcagagattttccctataaacatgaaagggtcggcagggagccttgtgaccttagcaccttcttcatcttcgcggccatttgcggactcacggtcgtgtttgtgcatcggctagtgccggaaaccaaaggaagaaccctggaggagatccaagcctctatgaactcgtccttgacacccttccacaagtattagtttgcttgcatagttgattagtgtcacagatacggttcattgtatacaaagagagacatacaaatacatgtcatttctccataatactactatctcattattatacagtgttttaaatagcgggaaaatgaatttatcctc

SEQ ID NO: 114492 - DNA, 1607 bp, Zea Mays
gacaagacaacccatgcatggccggtccgatggagcgagagggacgagacgcagccgagaagcccctcttggtaagggtgggcggcagcggtggtagccagggcggcagcgcctcctcttcttcggttgccgtggtggtcggctgcaccgccatcgccgtcgccggctccttcgagttcggaatgtcgatcggctactcgtcaccgactcagctgggcatcatgcgcgatctccgcctctcgttagctgagtactctgtgtttggctcgatcctgaccatcggagcgatgctgggtgccattgtcagtggatctgtagccgatcgagcaggtcgaagaggtgcaatggcgatatcggatgttctctgcgctcttgggtatctcctgataggattttcccagagctattggtggcttgacatcggaagggtgctgatcggatgcggaatcgggattctgtcatatgttccggtctacatatcagagataacgccaaaggaccttagaggaggctttgcaactgtaaaccagttcatgatttgctgcggagggtcgcttgcatttgttcttgggacatttatcgcctggcgcaccttggcgatcgttggagtggtgccgtgtttagtgcagctggttggccttcttttgattcccgagtcccccagatggctggctaggtttggacacccaggtgcctttacaggagcactgcagacgctaaggggacatggaaccgatatctctgaagaggcctcagaaataaaagttttcacagaaaagcttcagcgccttccgaagtcgaagatgttagacctgtttcagaaggagtacatccgtgctgtcatagctggagttgggctcatggccctccagcagcttgggggtgtcaatggcgttctcttctacgccagtgaagtgttcgtctcggccggtttctcgtcgggaaacacgggaacagtggccatggcggtagtgcaggttccgatggtcggactaggggtgcttctgatggacaaggctggaaggaggccactgttgatgatctctgcagctgggacatgcgtgggttgcctgctagttggtctgtcattcttgtccaaggagcagcactgggaaagggacctgaacgtgttggctttggccggacttctggttttcatcggatccttttcactgggtatgggcgggataccatgggttataatgtcagagattttccctataaacatgaaagggtcggcagggagccttgtgaccttagtaagttggctcgggtcgtggattgtctcgtacgccttcaacttcctgctgatttggagttcttacggcaccttcttcatcttcgcggccatttgcggactcacggtcgtgtttgtgcatcggctagtgccggaaaccaaaggaagaaccctggaggagatccaagcctctatgaactcgtccttgacacccttccacaagtattagtttgcttgcatagttgattagtgtcacagatacggttcattgtatacaaagagagacatacaaatacatgtcatttctccataatactactatctcattattatacagtgttttaaatagcgggaaaatgaatttatcctc

SEQ ID NO: 114493 - DNA, 1109 bp, Zea Mays
ctcgcaaataataatgtagggtatacaagagaggcagatttgacagccgtcctactccatttgctcctagtcccaaatactagcaggcggcaggcggccaagaccggtgtccctcgacgacctgccgagtgccgaggcaagacgcgaggaggctgtaatggcgggcgccgaggtgggagaagacaagtaccgctccttcatccacggcgagggcgagagggacaccgtgtggaggtacggcgccccgcccaactacgacgtggtcaacaagctcttcgaggaagagaggactcaggtgtggcccgagggctcgctggaggagaaggtgcagcggctgctcaagagctgggagatggagctggtgcacaaggcgcggcccgaggaccagaagaccgtcaactcggagaaatactctgccagcaccaacgggatgagcgctctgacccgggccgaggtgatggccatcggcggctacaacaacttcctgcgcaccaagctgcccccggagcaccgcatctacgacccggacagcgagaccgtggagtccgccatggccaccttcaccacggccttcccgcggggcttcgccatcgaggtgctcgacgtctacagcggcccgcccaggatcgccttcaagttccgccactggggctacatggaggggcccttcaagggccacccgccgcacggccagcgggtcgagctcttcggcgtctgcatcttccatgttgacgaagacatgaaggtggacaagtcagagtacttctacgagcgcggcaacttcctcgccggcttcttgagtgcccctgcccctgatggctcaggcggttgccccgtgatgcgcgggaactgaatgggcctgcaatgggacattggaagactaggcattggaacattgggattattagcattagcgatcccgaatccgcttttattacggtttaataattccatcatgtaacatgacacttgcatttgtgtttgaataaacatttcagttgcttccacgtattagcagaaatgaatgaacattcttcctacagaactgtacggtctggtggccaacatttgccagcactacacggttgttggccactcaaatgttaggc

SEQ ID NO: 114494 - DNA, 1045 bp, Zea Mays
catttgctcctagtcccaaatactagcaggcggcaggcggccaagaccggtgtccctcgacgacctgccgagtgccgaggcaagacgcgaggaggctgtaatggcgggcgccgaggtgggagaagacaagtaccgctccttcatccacggcgagggcgagagggacaccgtgtggaggtacggcgccccgcccaactacgacgtggtcaacaagctcttcgaggaagagaggactcaggtgtggcccgagggctcgctggaggagaaggtgcagcggctgctcaagagctgggagatggagctggtgcacaaggcgcggcccgaggaccagaagaccgtcaactcggagaaatactctgccagcaccaacgggatgagcgctctgacccgggccgaggtgatggccatcggcggctacaacaacttcctgcgcaccaagctgcccccggagcaccgcatctacgacccggacagcgagaccgtggagtccgccatggccaccttcaccacggccttcccgcggggcttcgccatcgaggtgctcgacgtctacagcggcccgcccaggatcgccttcaagttccgccactggggctacatggaggggcccttcaagggccacccgccgcacggccagcgggtcgagctcttcggcgtctgcatcttccatgtatgtctctgcttcgctgcttcatctttctcactaagctagtcactactacgtaccaaccaggcatgatgtcactatgataataatactgtgctaggttgacgaagacatgaaggtggacaagtcagagtacttctacgagcgcggcaacttcctcgccggcttcttgagtgcccctgcccctgatggctcaggcggttgccccgtgatgcgcgggaactgaatgggcctgcaatgggacattggaagactaggcattggaacattgggattattagcattagcgatcccgaatccgcttttattacggtttaataattccatcatgtaacatgacacttgcatttgtgtttgaataaacatttcagttgcttc

SEQ ID NO: 114495 - DNA, 1337 bp, Zea Mays
aaatcattattattttttttcgactaattgttagtgatacaacaaagacctccaaactcaatacatcggtcaaacaagcacaaaattcgatcaaatctgtatttaaaacttccatataagtatagtagcatagacattttgtttcagacgatcctaataatggagcaacaatatcaagtgcttgactgcagctgcagagggctcagaggctgcatgccgtgtcgatgtggtgccacctagaccacccgccgaagtagctgttccagacgccttcggcgagccgatccacgcgcatcgccgtgagctcctcctccagcgcggcgccgcgccgctgggcgtgaccggcgccgacgaagcccgccgtgcagggcgccagcgtgccggcgaacacgacctcctcgccgtcctcgtccacgcctcgcctcgcggacctgcggatgaagcatcccacctggacgctgccgagcctgtcgccgtacgcgctggtgttggcctcgccgatcacctgtagcagcccggcctcggcctttccctcgccgtccacgaccacggcctctacagcctccttggccgcgctccgctccacggcggcgaacaggcacgctgccgtgcagcagagggaggtggaggccacgagtggcaggaagaaggccgcggctcgcgggaacgccgcggcggcgcagacgagcgcggccacggcggctgccgtcgtcgacgaagagccggacgcgccggcgagggagcggcggcacgcccgcagctgcagctcaacggcgcggagcttgtcgtggagcactccgcgcagagcgtggcagctggcggcggcgagtctgggagcagccatggctgtgctgctgtgtgctgtgcctgtgcttgataggagagtttgcgagcgaactgatggtgcggcgaattaagctagccgtgggcgcatggttggcctatggacgatggagaagaacatattctcgtggtgcacactaatgtgacatgtcggctcgtgcatggcgtaatcgcctagcttttgcgaatggaggacggggacgggggttggggttgggcgaccggcaaagaatcttgtgacttgtgcagttgtgctcgtgtgtcatagcacaacacaattgctttttactccgtgctattatttattattattcaatgttatcatttattactgaatgataggagtgcaactgcaagtgaagttaagctatgaaccgcacttagaccatctccaagactaggacctaaaataggaggggaaaattacttatgtgtcatcaaaatttatactcattccttgtgtgttattgaccggcatatatggaattttttgt

SEQ ID NO: 114496 - DNA, 375 bp, Zea Mays
atggtggcggtgcggaggagcggtggcgcgcaacctgcgcggcggcacggaggcgcggcggtgctgcggcgcggtagcacggctgcgctgtggcgccgtggcgcggcggcgcggtggcgtggcggcgcggtggcgtgggggctcggcggcccggcggcgcaggagctcggccgcgtggctgctcgggcaggcggtggctcgggcgggcggcgacgttgggggcggctcgggcgggtggcggcgttgggggcgcgggcgggcgacaacgttgggggcgcgggcgggcggcagctcgggcgggcggcggcggctcgtcggtttcagactagagagaggaggaagaatgagtccgcgcgggctcggacatggctctaa

SEQ ID NO: 114497 - DNA, 759 bp, Zea Mays
atggagaaggcgctgctgctcttgctgctcagcttgtgcgcctctctgtctctgctcgacggcgcagtggcgcagcagtactggacgccggccaccgcgacgttctacggcgggagcgacgcgtccggcaccatgggcgggtcgtgcgggtacggcgacctgtacagcgccgggtacgggacgcagacgacggcactgagcacggcgctctacggcgacggcgcctcctgcggcgcgtgctacctcgtcacctgcgacgcgtcgcggacgcagtactgcaagccggggtctccttccgtcgccgtcacggccaccaacttctgcccgcccaactacggcgacgcggacgggtggtgcaactcgccgcggcagcacttcgacatgtcacagccggcctgggagaccatcggcctgtaccaggccggcatcatcccggtcaactaccgccgggtcccgtgccagcggtccggcgggatcaggttcggcatcagcgggcacgactacttcgagcttgtgaccattaccaacgtgggcggcgccggcgcagtggccgcggcgtgggtcatgggaaccggcacggactggctcaccatgagccgcaactggggggagaactggcagagcggggcctatctcacaggaaaggccctgtcgttcaaggtgcagacggacgacggcaaggtcgttgtggcgtataacgtggcgccggcgaactggcagttcggcagcacctaccaggcctcggtcaacttctactag

SEQ ID NO: 114498 - DNA, 363 bp, Zea Mays
atggcgcgcgaccagggcgagcaccggcagagagacgtccggccgacgactgctgtgaagatggctaggccgagcgcgggaaagagggagaggagacgcgcggcacagaaaaaggaacaggggcggcgaccatcgaacagaggggagagggaggggcttgagcggggtacagggcgcttgcagagagaactggaaggagctcggcgggctcgcggctgggagcagtaccgccatggttgggagctgcaagggcgcggcaccgcgaacgggagatggagcgcgcaggaagaaataccggctggagagaaaatgaaaaggaagatgaaggctgtgcagcggctgataaaaatcacagggagatga

SEQ ID NO: 114499 - DNA, 579 bp, Zea Mays
atggggaagggcgccgccgcttcccttggtcctcctttccagtcgccgggagatcctccgtccgccgcgggttgggctcgcccctcccttctcggcgggcgcggagcggccctgcgcgcgacggactccccactcagcgacccggtaagttcggcgaaggagctccctatttctcaggctcttatcagagatgattcctgcaagcaagctcatgattcccaagacaagggcgtcccatttcatcaatcaaagcttcaatggtccgccgcagctggcgatggctcctatgcgacgacccgggtggatacaagatcaaaatccaaagcagatccgcgtccagtgcaggcagctcttggtgatcctcttcggcagacttcaatgccgcgtatcctggcgtctggaaaggccgaggtaggcgacctggagcttgctgctggtgtgggtgcctcgccagggtctgttgacggtgccaaccaggaaacctccaaggaacctgatgcctccaagtgcaagtttagacagtgttctggccctgaacaatgttgttccagccaaggcccctgctatccaaccgactga

SEQ ID NO: 114500 - DNA, 1200 bp, Zea Mays
atggccgaccacgacccccgcgccgccgcggcctcctcgtccgccggaggcgacgaagacgacgagggtaccgacactgatgtctccgactccaacctcggcaatccccagggccaggatcctctacccttccccgacgcagcttgggtcccaccccatcctctcgctcccgcccacgagcccgccggcgcacttccgccgccgctgccgcagggtccttccgcgggcgcctcggccacgacggatgactcgcgtcggctgttccagcggctgtggacggacgaggaggagctcctcatcctgcgcggcttcctcgacttcacggcgcgccggggcaccactttcgcgtcgcaccagtacgacacgggccccttctacgaggagatccgccgccgcctctccttcgaattcaccaagagtcagctcattgagaagctgcgccgcctcaagaagaagtaccgcgtctgcgccgcgcgcgtcgcggcgcagggcgacgcgttcgcgttccggagcgtgcatgagggcgccatctacgacgtcgcgcggcacatctggcgccccgcgttcaggcgcggcgaaggcggcggcgcggccgacgcctcagacgaggacgacatcaaccccgtggccgccgctgcgatggaggatggcggcggcgggagcgcgtccacgcccgtgcccacggcgaggggcaggggaggccggtgcgttcggaggaggaccgcgcaagagctggaggcccccgcattgccagccacatccgcgctgctgctaagtgatgcagctgaggaccggcatgttgttgctgtcgagaatttagcaccgccgcctcctttgcaagtgccaactgtatcactaacgggggcgaccccttcacccatgccagtgtgcactggtggcgccgccgaggaggctatcaagagtatcatgtcaccgttactgaaggagttcatcaactctgtcgctgtcggtgggcagagtggattcggattggggcttggcacaggattcggcggcattggcggcttcgacattcttggtcttggtacaggggttcctggcccaaatcctggaatgcccagtgatgataagtggaggcagcagcagattctggagcttgaggtttatctaaagaggattgagcttgtgcgcgaacaggttactgctgctttagaagacctcaggtcatcagaaggctga

SEQ ID NO: 114501 - DNA, 417 bp, Zea Mays
tatcttacagttcatctgaatctttctgcgttatcgtaaatttggatttttcattgcctgtgttaattgggtcttactgcataatcgattgtcattcttcatgacttaaaaattcagcacgtagtcttatctgtatggatgttcttcatgaagccaatatctgtcgttccagttttttttaacgcatggagtctaattcacgtttatttcatttgtgtttgtcttattttttttttttactttttaacaaattctaaagtacctcactcacaaaatagtcttaatagtccgagactatagtccaaactattttcattgatcgagttaggattattatcacacattacgatttctttacgcaggcggagcacgttctatttattagtattagggatgaaaatgggacggatacggtcg

SEQ ID NO: 114502 - DNA, 387 bp, Zea Mays
atggcgaggtcttccaagatgatggtggcggcagctctgctggccttggccctggccgtgtcgaccgccgaggcgaggaacatcaagaccacgacgacggagaagaaggacgacgcggtggtgcagccgcagaccttcccgcccttcgaccgcctcggcggcggcgcgtccccggcgttcggcggcctccccggcggcagcattcctggcagcagcattcccgggttcagcatgcccggcagcggcagcagcctacccgggttcagcttgcccggcagcggcagcatgcccctcttcggcggcggctccccgggcttcagcggcttcggcggcatgcccgggtcgcccaccgccggctccgtccccgagcacgccaacaagccctga

SEQ ID NO: 114503 - DNA, 282 bp, Zea Mays
atggcggcgtggcgcagtggcctgtggccgcctggccaggcggtctgcgacgcaatagcctgtgggcagagggaggagggggagccaagatcagtggaggccgacgggccggcgacatacctgtgccggtcggctgactgttgtgggcagccgactgaggagggcggccgtctgagagagctctatgcgctggctgaggagaggaggcctccacgcacactggctgtaaacctaaagggccagaaaggtccactaatgactagaacgtcacagaacgagtaa

SEQ ID NO: 114504 - DNA, 1117 bp, Zea Mays
ctgcgctacgaagtgtggcccgcctagcccacaggataataaccggataaggggcatgcaatgcacgcccaggtggccgtgctcctcgccgccggcgcccctccgccaccgtggccgcctcacccctcgtggcaccatcgccagatcccttgccgtcggcctttcaagccgccccactctctgcgcgacggcggcggcggacagccgccgcccccggtcgtggtcccagcttcgaagaggcgcgcctggccggccgtctcggcggcgctgttcggtgcagggttcctcctgggcccgctcctcgacggaatccactcccgcgtcggcctccaggtgtacgggaacggcgccctcgaagccggggcccttcgcacccacgtcctggtgccgcccctgctcggcgcgttctacctcaccgtcggcctgctccacctgttcctggacgagagggcgcccccgaaatccagggccaccgggaccgcgcggaggacggcgacgtcgctgctcgttcttgcgctgttcatcgagacgagcgcggagatgtacagggcaggggtggcgagcaacgtggaggcctacgtcctgttcgccggcgcggagtttgcgtggctcttcctcgatggctcctggctgggcttcgccgtcgcctgcctcgtcggcacggtttgcccgctcgcggagatcccgctgatcaagttgcttgggtgctggagctatccgaacgccgacgtccacctgctcggcgaggggctggtgagctggacgacgacgtgctacttcgtctacaccccgttcctggcgaacctggcgaggtggctcgattcacggctggcaataaacaaggacgtcgcggacgcggagggaggcgacgaggcagctcggtcttgagtcacaccggcgggaacaccagccggcgtatcccgggcttgggtccatgcggactggagtttagtgctcggagcagcagtgctgttcgtctaaaggcgatgcggccttaattttacgatgatggccgggaaccatgtccggtgggccgggccgggccgggggaggagaacgatgggtacggttgcgcataacttttgttataatgatctgaaagcatggccgcattgat

SEQ ID NO: 114505 - DNA, 814 bp, Zea Mays
aacccctcgtctccctccccagatccaaatcgcgcaggaccaggcatcccatccaggcggttattggtcttcttgcgtgcgtaggtgagccctctccctctctccctcctctgcgtgctcccttttttttccaatcaagccgatgtgccgtggccatgtcccctgcgacagggcgtcttcaatccatggctgcctcccctgcgtgctccctctatttttcctcggtcggcggcgcggtgtggccaggcccgacgtcctcgggcgcggcgtccgggcgcggccagcccgcggctggcccagcgcgacggccagcgcgcggcagcctgcgcgtctcacccagcgcgacgcgggcgaccccagcaccccggcgtgcaggccccgcgcgccctcgcactgctccctcgcgcggtcgagctgtccctacgcaggcccctgtaggtgcgtttgtacgcggctgcattctccgtgcggctgctcaccacgccgtgctggcccctgcggtgtttgcctctcctgttagcgcggtggtccaaggctcccggcgagatcccctggtggccgatttcttgttccattagtgcccaggtcggcctcccttctcccctccatgctgctggcgagggagtttttcatttgtgatccatcgtgaggagagaaaggaagaagctagccacatgtgatcctaagcttgggatcttctatagctgtgtttcgtgtgaccatatgtgtggccagcctctagccaataataattagccatgtcgattaaattccgtaaagtactaaataattaatatatgtcgagttataaatc

SEQ ID NO: 114506 - DNA, 714 bp, Zea Mays
ccccatcatatctctagcctttgtggcttacattatgttgaaatgcctatcccgtgcaatctgtcagaggttcttgaagttctttcttttgtgtggaacaatgcttggtgtatgataaaattgcaacagaaacatcagagagagacagaactctctgttgctgaccctgtttcggtgattcagtggagccttcttgcagtttgtctattttatatgacaggtcactggtgtacatttgatggcctccgatatggtgcagctttcatcggtgtggtacaacaccatatccaaggacaacgaactgaaggacgtgattctcaacaatattaataaggtgcttttgatgtatggtcttataacaacaatcactgctacgctaacaatcatatgcgttgctattcaaaggcgtcacttaatggtttggggtttgtttgctccaaagtacgtattcgatgcaattggccttctcctcacagacttgttaatttgtttagcatcaatctactacagctgatgttgctttgcttcttgagttgcactgctaaccactaacacaacactgctattatgcttttgtgtgaatcggttgcagctagagatgctattttttcttattcttcttgtgactgcagtaagaccacacactaaacttagttcattcgtatttgtattggccaagtaagcataaaatatacaaccatagttggtctttcc

SEQ ID NO: 114507 - DNA, 1597 bp, Zea Mays
ttttcttctttttcttggtgttgttgctgtttcatcatcctttgctcattatctatcaccactagctgctaaatgggtctcctgtttcttaaatagcattggccgtgtaaacccagagttgtacgccttgagtatcgggacatgggtaaatcaaaggaggggtaccaatgcttgtacctcacaggatgatctagaagcatggatggggagatatgctgaagttctatgtgtaaattgttggcaggtaaagagatacattgatcaatattctgctacttccgttattggatttccatcagaagacctgcaacatatcatggacctatattcaagagctcaggaaaattggtcagcttctctgataactagttcatcagagacatgtagtcaagaaaaagtagagaagggttcagttctgctgcagcaaattgatgcatacaatgacttcttgaagagttttgcaaagcttgctcgctctgcttggacagaatttgatttatggtcaatgggcattggtcttttacttatgatgttgtcagttatcattcaggcatccatgcttaactttgtttttcttcttttaaatattttcacacggtttggaattgaggttgggatgtcaaaacaattgcctgccccaacaattacaaaggatcatcctgtgagcgtcatttataaaatccttggtgctaattcttgcaacatcctcttggagctattccccatcatatctctagcctttgtggcttacattatgttgaaatgcctatcccgtgcaatctgtcagaggttcttgaagttctttcttttgtgtggaacaatggtgagttatttatctatagcgtttcattgggcttcagagactactttgtttgctcatgctgggactgttcaagaatttggaagaagtttggctcctcgcattgtttacactattggaggtctatcactagccatttctgcattttctcggatatttggttcaactgttcatttgaagttgaacaaaaggataattattttatcggctgtcatgctttgttcttggagtccaactattttgatcctgttgggaaggcaagcttggtgtatgataaaattgcaacagaaacatcagagagagacagaactctctgttgctgaccctgtttcggtgattcagtggagccttcttgcagtttgtctattttatatgacaggtcactggtgtacatttgatggcctccgatatggtgcagctttcatcggttttgatcattttcatatcattcgacaaggccttctactttccattgacacctttggtatttctcatgtcctgccaattctaagccttccacttattgccatagtgtggtacaacaccatatccaaggacaacgaactgaaggacgtgattctcaacaatattaataaggtgcttttgatgtatggtcttataacaacaatcactgctacgctaacaatcatatgcgttgctattcaaaggcgtcacttaatggtttggggtttgtttgctccaaagtacgtattcgatgcaattggccttctcctcacagacttgttaatttgtttagcatcaatctactacagctga

SEQ ID NO: 114508 - DNA, 612 bp, Zea Mays
cccacttcgcgtccacccatcagctctcgtcctctcaccgtcctacgctctgccgcccgccaccaggcgccagatcgacaccggaggtgatgtcgccgccggcgagccaccgccgccgttctcggttccttagctggccgctgctcttcatcgcgatcctcgcgatccactcgctggcagtatacctttttacccgcggcttcctcctcacccgcaccgagctggacctccacagcagccgcgacgacttctcgccgcagggcaacgtctcccccgggtgcgactcctggcccccggccgccgtcgaccgccttgtcattgtcgtcctcgacgcgctaagatttgatttcgtggcgccgagtaccttttttgcagagaagcagccgtggatggacaagctgcacgttttgcagaagcttgctgccgacgaaaagacctcttcaaggatcttcaaagctctcgctgatccaccaacaactagcctccagcgccttaaggctctcaccacgggtggactccctacctttattgatgtcggcaatagttttggtgctcctgcaatagtcgaagataatataatgcatcagttggctaaaaatggaaagagagttg

SEQ ID NO: 114509 - DNA, 2631 bp, Zea Mays
atggctggcagagctcggggcccattcctggtgctgctactcgtcgccggcgtcgctgccaccgcagagtccaaggtgtacgctccggcggaccgggtgttgctcaactgtgggtcgacgacggacggcctggacgcggacggccggaggtgggtggctgacacgaacgacaacacgtggctggccgactccggcaagtcgtccctgatgatggcggccgacaaggtggacactgggctgccgtccaccatcccctacatgacggcgcgtgtgttcaccgtggaggccgtgtacaacttcaccgtgaacccacgggaccgccactgggtgcgcctccacttctacccgtcctcctacagcgggctctccgccgccggcttccacttctccgtgtccacgtccaccggcatcacgctactccgcaacttcagcgcgtacacctacgcaaaggcgctgagccaggcgtacatcatccgggagttctccttcccgcctacgcccgcggggttcctcaccctcaccttcacgccaacgcccatgggcaacgagacctacgcctacgtcaatggcatcgaggtgatctccatgcccgacatcttcgtcgacccggcgatcatggtcggcttcgcggaccagaccgtagacatcgccagctccacgctccagaccatgtaccggttgaatgtcggcggctcgtacatcccgccgtccaacgactccggcctcacccggcactggtacgacgacacgccatacgtgtacggcgcgacgcagggcgtcacctacagggccggcccgcatttccagatcaagtaccccagcgagatcgccgagtacgccgcgccgccggaggtgtacctgggcacccgatccatgggctccgaccctcgcctgaaccagaactacaacctcacctggaccatggcggtggacggcaacttcacctacgtcgcgcgcctccacttctgcgagctgctgctcagccgggccaaccagcgggcgttcgacatctacgtcaacaacaagacggcgcaggccgacgccgacgtgatcgggatgacgtcggagaagggcgtgcccatatacaaggactacgcggtgtacgtggccgacgaccctgatggccaggccatgtgggtggcgctgcacccgtccgtagcgctccggccgcagttctacgacgccatcctcaacggcctcgagatcttcaagctcaacgacaccgcgggcaacctcgccgcgccagaccccgagccgtccaggttgctcgccaaggcggagctgggcgctggagagcaggaggcgcccaggagtgagcacccccacatatcgacggtgatgggcggcacggcaggcggcgcggccgtgctcgggatcatcgctgcgatctgcgttgtgtggaaccatgaaaagaagagcagggaggcagccagcaccggcgggtcgcacacctccgggtggctgccgctgtaccactcccacaacagcggcaagtcgtcgggccacctcccggcgaaccttgctggcatgtgccggcacttctcgttcgccgagatcaaggtggccaccaagaacttcagcgagtcgctggtgatcggtgtgggcgggttcggcaaagtgtaccggggcgtcgtggatggcgacaccaaggtggccatcaagcggtcgaacccgtcgtcggagcagggcgtgcaggagttccagacggaggtggagatgctgtccaagctgcggcaccggcaccttgtctccctcatcggcttctgcgaggatgccggcgagatgatcctcgtgtatgactacatggagcatggcacgctgcgggagcacctctacatgggcggcaagccgccgctgtcgtggcggcaccgcctagacatctgcatcggcgccgcgcggggcctccactacctccacacgggcgccaagtacaccatcatccaccgcgacgtcaagaccaccaacatcctcgtggaccgggactgggtcgccaaggtctccgacttcggcctctccaagtccggcccgacgacagtgaaccagacgcacgtgagcaccatggtcaagggcagcttcgggtacctcgacccggagtacttccggcggcagcagctgacggacaagtccgacgtgtactccttcggcgtcgtcctcttcgaggtgctcctcgcgcggccagcgctcgacccggcgctgccacgggagcaggtcagcctcgccgactacgcgctcaactgccagcggaccggcaccctgccagacgttgtcgacccagcgatcaaggaccagatcgcgccggagtgtttgaagaaggtcgcggacacggccgagaagtgcctcgccgagcagagcatcgaccggccgtccatgggggacgtcctgtggaacctcgagttcgcgctgcagctgcaggacacctacgaaggaggcagctgcgggcggcgggccgtgggcgacggcagcggcacggggcgcccggcactcgagccgagcaacagcaacgggagcacggcgagcgtcacgacgctggggacgtcgtccacgtcccgggcgcacgaggcggcgtgcgcgatcatggaggagaccgacaatgaggcgttctcgcagctcgtgcgcccaactggccggtaa

SEQ ID NO: 114510 - DNA, 2869 bp, Zea Mays
ctgaaaaatccccctcccctccccgaggttgcagcggcgagggaggggagagataataataatcgcaggagggaaaagcagcagcgcaggcgcaaaaagcaaatcaaagccacaccaccaccaccaccggcagctgccgagagccgcgcccgcgcccgaacacaagggagagcggccggagaggaaagccaaatccatccactccaccccgtacgccgccgccgtccctgtccctcccctcttcccgcgcgcatgggccccaaatcgccagcgccgcgacgagcgcgcctgcccccgcggcggcggtagcagcagcagcagctgctgctgtgtgcttcgcgtcttcgccggggatggcgcggctcgggcgagcgggctgccgctccggtccagcccgaggaattcctgaagacacattgagaaattttatgtccaatgtcttgcctgctgtattgatcctggagtttctcagtgggaccaatttgattgttcaaacgtttgctctagaagtagtcgcccctgccatgcctccattccaaggttggggaccatttcattctttggcatcccaaactaaagtccttgtgagtgtttctgcacaaccagatgatggcctccaaagacaaaagaagctatattcatcagcagttgccatgtcatccacacatcctcctatttcagcacctagctatcgttacatgcctggtgctttagatcttgccatttattcctcagatctatcacgtcctccagtgcagcataccagacacttagcaacagctgctcctgctcacgtagatgctgaccctccggatgcagcttcaaattctagcgcagctcctttgggattagtgcagcctccagtgtctcctcacagtggttgttgtgcaccgaacatggtacaaaaacgagggacccgggactgccattgtgtttatccagtgagaattgagctcttccttcgtaatgtttccttgacttcaaactggagcaacaaatttcttcaagaacttgcttctcagctcaacctgcgcgttaatcagtttgagattgtaaatttttatgttgttggagcttctgggctaaatatcacaatggatatagctccctacactggaattagctttgctgctgatcaagtcaaggcaatgaattattcacttactctgcatacagttcggattgatcctgtgttggtcggggactataatcttcttaatttaacttggttcaggtcattggctccagctccagctccagcattcacaatggcacctagggcctctccatctacagcatctacctttccaagacagagtgagggtccaagcaaaaatagacatgcaagcctgatcacagtggttattatatgtgttggttctctaattggagtcttgctgattgttttaacaatatgcttctgcacatttaggaaagggaaaaagagagtgcctcatgttgaaactcccaagcaaaggacagcagatgcagtttctacagtggagtcccttcctcgccccaccagcacaaggttcctttcatacgaagaactgaaagtggcaacaaataacttcgagccttcaagtgtgcttggagaaggtggttttggccgtgtcttcaagggggtactgggtgatggcactgctgtcgctataaagaagcttactaacggagggcaccaaggagataaggagtttttagttgaagtggaaatgctgagcaggttgcaccaccggaatcttgtgaaactgattggttattacagcagccgtgaatcatcacagaaccttctttgttatgagcttgttcccaatggaagcctagaggcttggcttcatggtacacaaggtgctagccgccccttggactgggacgccaggatgaggatagcacttgatgctgccaggggattagcatacctccatgaggattcgcagccttgcgtaatccacagggatttcaaagcatctaatatattgcttgagaatgatttccatgctaaagtgtccgattttggtctggcaaaacaggcgccggaaggtcggacgaactatctttctactcgtgttatgggaactttcgggtatgttgcaccggagtacgccatgacaggacacttgcttgtaaaaagtgatgtatatagctatggagttgttctacttgaactactaactgggaggaggcccgttgatatgtcacagccctctgggcaggaaaacctagtgacttgggcacggccaattctccgagaccaagatagattaggagagctagctgatcccaggcttggcggccagtacccgaaagatgattttgtgcgggtgtgcacaatcgcagcagcctgcgtttcgccagaggcgaaccagaggccaacaatgggcgaggtggtgcagtcactcaagatggtgcagcgctctgtggagttccaggaatctgtgccaacacctcccgctcgccccaacgtccggcaatcgtcgacgacctatgagtctgatggcacctcgtccatgttctcttcgggccccttctcaggcctcagccccttcgagaccgaaaccattccaaggactgcggttttctcagaagatctccatgaaggtcgatgactggtggggggtggctgccttgccatcgccgagccgagccgtttctctagagcctgtagccatgtagtcaagcattcaaaggctggtggtccaattggcctggccagccattgggaggaaaggggtacctgtaaattccatttttctgcgccgtctcaaaagactactactagattattacaacccacaaggacgttctctggctttgtatggaagaaatggttttgttcgaagttgctgctgtcctcagtccatagctcctg

SEQ ID NO: 114511 - DNA, 2978 bp, Zea Mays
ctgaaaaatccccctcccctccccgaggttgcagcggcgagggaggggagagataataataatcgcaggagggaaaagcagcagcgcaggcgcaaaaagcaaatcaaagccacaccaccaccaccaccggcagctgccgagagccgcgcccgcgcccgaacacaagggagagcggccggagaggaaagccaaatccatccactccaccccgtacgccgccgccgtccctgtccctcccctcttcccgcgcgcatgggccccaaatcgccagcgccgcgacgagcgcgcctgcccccgcggcggcggtagcagcagcagcagctgctgctgtgtgcttcgcgtcttcgccggggatggcgcggctcgggcgagcgggctgccgctccggtccagcccgagcttttttttcaggaattcctgaagacacattgagaaattttatgtccaatgtcttgcctgctgtattgatcctggagtttctcagtgggaccaatttgattgttcaaacgtttgctctagaagtagtcgcccctgccatgcctccattccaaggttggggaccatttcattctttggcatcccaaactaaagtccttgtgagtgtttctgcacaaccagatgatggcctccaaagacaaaagaagctatattcatcagcagttgccatgtcatccacacatcctcctatttcagcacctagctatcgttacatgcctggtgctttagatcttgccatttattcctcagatctatcacgtcctccagtgcagcataccagacacttagcaacagctgctcctgctcacgtagatgctgaccctccggatgcagcttcaaattctagcgcagctcctttgggattagtgcagcctccagtgtctcctcacagtggttgttgtgcaccgaacatggtacaaaaacgagggacccgggactgccattgtgtttatccagtgagaattgagctcttccttcgtaatgtttccttgacttcaaactggagcaacaaatttcttcaagaacttgcttctcagctcaacctgcgcgttaatcagtttgagattgtaaatttttatgttgttggagcttctgggctaaatatcacaatggatatagctccctacactggaattagctttgctgctgatcaagtcaaggcaatgaattattcacttactctgcatacagttcggattgatcctgtgttggtcggggactataatcttcttaatttaacttggttcaggtcattggctccagctccagctccagcattcacaatggcacctagggcctctccatctacagcatctacctttccaagacagagtgagggtccaagcaaaaatagacatgcaagcctgatcacagtggttattatatgtgttggttctctaattggagtcttgctgattgttttaacaatatgcttctgcacatttaggaaagggaaaaagagagtgcctcatgttgaaactcccaagcaaaggacagcagatgcagtttctacagtggagtcccttcctcgccccaccagcacaaggttcctttcatacgaagaactgaaagtggcaacaaataacttcgagccttcaagtgtgcttggagaaggtggttttggccgtgtcttcaagggggtactgggtgatggcactgctgtcgctataaagaagcttactaacggagggcaccaaggagataaggagtttttagttgaagtggaaatgctgagcaggttgcaccaccggaatcttgtgaaactgattggttattacagcagccgtgaatcatcacagaaccttctttgttatgagcttgttcccaatggaagcctagaggcttggcttcatggtacacaaggtgctagccgccccttggactgggacgccaggatgaggatagcacttgatgctgccaggggattagcatacctccatgaggattcgcagccttgcgtaatccacagggatttcaaagcatctaatatattgcttgagaatgatttccatgctaaagtgtccgattttggtctggcaaaacaggcgccggaaggtcggacgaactatctttctactcgtgttatgggaactttcgggtaatctgaatgtccttttacatttagccatgggtccatggcccagcaatttattttctgaatttaccttcaccttgtacttctggcctttttgcaggtatgttgcaccggagtacgccatgacaggacacttgcttgtaaaaagtgatgtatatagctatggagttgttctacttgaactactaactgggaggaggcccgttgatatgtcacagccctctgggcaggaaaacctagtgacttgggcacggccaattctccgagaccaagatagattaggagagctagctgatcccaggcttggcggccagtacccgaaagatgattttgtgcgggtgtgcacaatcgcagcagcctgcgtttcgccagaggcgaaccagaggccaacaatgggcgaggtggtgcagtcactcaagatggtgcagcgctctgtggagttccaggaatctgtgccaacacctcccgctcgccccaacgtccggcaatcgtcgacgacctatgagtctgatggcacctcgtccatgttctcttcgggccccttctcaggcctcagccccttcgagaccgaaaccattccaaggactgcggttttctcagaagatctccatgaaggtcgatgactggtggggggtggctgccttgccatcgccgagccgagccgtttctctagagcctgtagccatgtagtcaagcattcaaaggctggtggtccaattggcctggccagccattgggaggaaaggggtacctgtaaattccatttttctgcgccgtctcaaaagactactactagattattacaacccacaaggacgttctctggctttgtatggaagaaatggttttgttcgaagttgctgctgtcctcagtccatagctcctg

SEQ ID NO: 114512 - DNA, 765 bp, Zea Mays
atgcccccgcccctatcccgaccgttcgattgccgaatccaccccgcatacctcatctgccatccattctcgctccctcgcatgcctcgctcccgccctcgaccccgccgccatgcgcgcatccgcctccgcccaacaaccatgcgggatcctcgcccaacagccatgcgcgccgactacgcctccaccggatccggccttcctatagtcatcctgtcatccaacagggatcccggccacatagagtttcgcccgaatcgatcgccgattgactccgctagggttcggctcgatcgtcgcttcgtcctctcggctcccgcagggaccccgccgagatgtctgaccggagctcgccggctgcgccgacgttcttccttttggcccgcaggccgaggcgtgggacgtcaccttcaaggggggaccaggggttgggctttccgtgttgaaccgtcaatcggacgtagtagtagtgcggattcgaggtcaaatatggtgatacacttaaaaggttttatggttgtgtcaatgggaatcattttttacatgaatttatctactctacgggcgaggattgatactgcctttaagtttggtcctgatgttgactttgttctgacttacaccgatgaggatggtgatattgtcatgatagatgatgatgatgacttgcgtgatgcagctcttcgtcagaaattaaaccctctcaggattactgttcaactgaagaaaaatcaaccaactgcaaaaaagatacttctgccttag

SEQ ID NO: 114513 - DNA, 1333 bp, Zea Mays
gtcggcgctgtacaattccttcctctccgccgatgcaacgctcgatcccggcgtgcgcatctccttctccgaccgcatccacccgcagccgtcgcctgcaagcttagtagctagccgtgcccgactgcccgtgcatcaccaacgctacgtacgcctacgtacagatccatcccgcccatatattccgacaccaggccagcagctcgccgcaggtccttctcttcgtagccattgttgcctagttagacagctcgccgcacgtctcgttgttttcatccatgtacgcggcgccgacggcagcaacgacgatgccgccagccgtgacccacgacgacctgtccctgcgcaaggcgcaggagcggcgcgccacgcggtccagcggccaggtcgccgtgtccctcgtcgcgctctccgtgctctgcggcctcgttgccttcatcctctgcctcgccgccgaggggtcgcgctcagaggtgtcgcactacctcatgagcgtgggcggtagcaaggaccagctggacgtgtgcgtctacaacagcagcggccgcctcgcgctcgcgtacgccgtcggcgccttcatcctcctcgccgtcgccatgttcgccgagcacgcctacatgctggtcgccgtcgccgccccggagtccgcctccgccggcatggccgtcgcccaggaccacccgcgcgtcgcgtccaccgccgccgcgctcacctggcagacgggctgcctcttcttcctcacgtggatttgcttcgggcttgccgaggtgatgctcatgatcggcatcgccgtggagtccggccacatgagcgactggcggaagccgcggcccgtgtgccaccgggtgcgcccggggatgttcgcggcagcggggatcctggggctcatcaccgtcgtggtcggcttcgtggtctacatcacagctgtgcaggcacagcggctgaggggacagcagtaccagcacggcggcggtcacttcgtcggctacggcgctccccatccgggcgcccagcaccagcaccagcacctgcgcccgccagtgccgcacccacacgggccacaccctcatccggtgccgtccgcgccaggagcgccggagataacagcggcgccgtgccaagtgcaacccagctgtgcgtctttcatcaccaaggaggccttcgacgtgtgaaaaggctagtcagaaagaccaaaacgtcaaacgggagcgcccagccccaactacggctatattctttgcctccttgtttaagtttatttgtttattggaccgaggtattgctttgtaaatgtcaaaaaaaacacataactgttgagcggaaatttgttgta

SEQ ID NO: 114514 - DNA, 907 bp, Zea Mays
atggcgaagttcgcggtgcctttggcgccattcgcatttcataagggcactctggtaatatcgccttcgccgattttgaatatactcgggttctcggcaaaaccccacaccggcgccgcctcttcctctcggttaagtccagcccactccgccgccgccgaccgcgagaggagttctcttcgccgcctcaaggacgagatggacacatcaagccctgcagcacttgtcaatgcaaagattatgaacatgtttgttgggcaaagagtgcgcacagttgttcaagtccaacacaatgatggtggaatgcttgtcgggcagtcccctgatgggcatcaattgagtatcaaaagcgccatggatgtccctgtatcacactttatggaagtttatggaattgctgaaaacagccagaccatccgcgctgaagtttgcacagattttggtcctgactttgatcccgagacttttaatcaattgtgcaacctggcgagtaacaagttcaagcacatgttcctgtagaggtcatcatcaagtggaggaccttcggccaactgaagcttgtttgaaatcgatatgattcacctctaaatgttctttcactcaccccagtactctgttgtcagtattggactccttttagcatgtattaatctaagcaacataagactacgaaggcaagcaaaatatatcgtgtagttgaagaacgtatggtcttttctacttttaggcaatccaaagctaagcttgttatgttgctgtcacttacatttggaccctgagaagttgctacaatggctaatgcagcttgatgagaggaaagagttctaatgtgataattacatgccccatctgaaaattctagctttgattttatgtctgcaagatccaccgtagtcaacctgaaacc

SEQ ID NO: 114515 - DNA, 696 bp, Zea Mays
atggcatccgtttgcagcaggccgccgttttcgttcctggcagcggcgtgcatcgcctgctttatttgctgcttcctgatccggctcccagctgcctgctgcagctcagcaggtccccgtttcttcgcctgctctgctctcaagtcctcgcacatacgtcacggttccatgttgctcatcactgcactggtacgtacgtacgtgcggaactcatgcatatgcagaattgcagatggaggagcagcagcagcgttccacggccagaagacagacgccgcgagcatagtcgggagagccctgtcctgcttcaacgatcgctacatctacagcgggtgccagggcgcgctccggctgggccccgagggcgcgctggacgtgccgccggggtcggtggacgccttctgcggcgggccgtgcctggtggagacgcacctcgtgctgcgctgcgtcgacgacggcatcgtggccggcttccgcttctacaacggcgcctccgccgccgacgtccgcctcgtgctcgcccgcgggtggtgcggccgctccggcctccggggcgacttcgacgacgtgctgcagcgcctcggaggcgacgggcacttgtacggccgcgggagcgacgcccgcgtcagcagcctggcgcaagcgatgccgctgctgctgagtgcggccgctgctgtcgtcctcgtatggacgtga

SEQ ID NO: 114516 - DNA, 1444 bp, Zea Mays
agaggtaagttgttctagaacaagtagacgccaccgaagaatctagaatacagcacgcagggcacaaggagaagaagaggggaagaaatattcttcccgtcgaaagacggagagaggaaaagggacaagggcaaggcaagagagaggcgtcgtcgtttgatctgctgccggagtgcgaagaggaagaggaagaggagcgccggagttgtaaagatgttcctggtggactggttctatggggtgctggcatcgcttgggctgtggcagaaggaggctaagatcctcttccttggcctcgacaacgccggcaagaccaccctcctccacatgctgaaggacgagcggctcgtacagcaccagccgacgcagtaccccacgtcagaagagttgagcatcggcaggatcaagttcaaggcgttcgaccttgggggccaccagatcgcccgccgcgtctggaaggactactacgccaaggttgatgctgttgtgtacttggtggatgctgttgacaaggaacgttttgccgagtcgaagaaggagcttgatgcgcttcttgcagatgactcccttgcaaacgttcctttcctcatactgggcaacaagattgacatcccatacgcggcttcagaggaggagctgaggtactacctcggcctgagcaacttcacaaccgggaagggcaacgtgaacttggccgactccaatgtccggcccctggagatcttcatgtgcagtgtggtgcgcaagatgggctatggcgaaggcttcaaatggatgtctcagtacatcaagtgagtcgctgctgtcctcttttgtccatggcgctgctgctttcgcaggagggttgaaatcaagtctggtcgtgacatggcagctgcatggaaaggtttatggtagctagtgataggcaaagcttgtaagtcggtgttaatcctagatatgtgatgtggggtctactttctcttctgattgtttcttggggtggtctaaacggttaaaaaaaatgcgacttcttcgggtcagctagaagttatgtaatcacgttacatgaagcagcgcattgttcgccagctgctttggtgtggtggacttctgtcggtaatggtgagcttgcggtttctaaaagtatgcgtgtagagtaattgtgtatctacagattccaaaccttgcatttgctgttgactgaggtagcccggaaatgataaaacatcctggtgaaagttgcattgctttcatgttgcgttttcgttggaacgaagcagcacaccaacccgaacgctgctattcatttcaatttgaacatttaaaagcaccttgggcttcgtttggctaaccgtgtattgtacacgcattgttagagcatctgagtcctaaacggagttgtaggacatcaaaaacttgctttaatagggttctattttacaaaaaaaaaatatataggaaa

SEQ ID NO: 114517 - DNA, 3804 bp, Zea Mays
tctctctctcccccaaccttctcttccacatctccgcttctctctcgcctccgcttcgcttcgcgagagacgggccgacgacggaaccctaggattcgcgcccgcctgagcggccaagccaccaggaccgcgccctccggacccgggggcgccagacaagctccggggcgcgcggatcgaccactggccggcttaccgccgccgctgccatgtcgtcgctcagccgcgagctcgtcttcctcatcctgcagttcctcgacgaggagaagttcaaggagaccgtgcacaagcttgagcaagagtcagggttcttcttcaatatgaagtacttcgaggagaaggtccatgctggggagtgggatgaggtggagagatacttgtcaggattcaccaaggtagatgacaataggtattcgatgaagatcttctttgagatcaggaagcagaagtatttggaagcgcttgataggcatgatagagcaaaggctgtagatattcttgtcaaggatcttaaagtcttctcgacattcaatgaggagttgtataaggagataacacaacttctcactcttgagaattttagggaaaatgaacagttgtctaagtatggggatactaaatcagctcgaagtattatgctggttgagctaaaaaaacttattgaagcaaacccccttttccgggaaaaacttgtcttccctactcttaaggcatcacgcctccgaactctaatcaatcaaagcttgaattggcagcatcagctttgtaagaaccctcgtccaaatccagatatcaaaactttattcaccgaccatacatgttctccacccaatggagctcgtgcatcgccggtatctgtaccactggcagctgttccaaaggctggtgctgcatatccaccactcacagctcatactccgttccaacctccacctggtccatctttagctggttggatggcaaatgcagccgcctcttcatctgttcagtctgctgttgtagcagcagcatcaatacctgttccacccaatcaagctgtctccatgttgaaacgcccagctctaacagactatcaaagtgcagagtctgagcaactaatgaagcgcttgaggcctggtggacatggcattgatgaggccacatatcctgctcccacccctcaacctgcatggtcagtggatgatcttccaaggacagttgcttgttcattgtcacatggatctaatgtaactagcatggattttcatccaactcggcatacactgcttctagtgggatctgctaatggtgaatttacactttatgagatcggtctgcgtgaaacattactttcaaagcccttcaaaattcgggatataaatgcatgttcaccacaatttcagaatgctgttgtcaaagattcctccatatccattaatcaagttacctggagccctgatggagaaatgattggcgttgcattcacgaaacatttgatccatctgcatggataccaaccaccaaatgagacacgacaccttctagagattgaggctcattctggaggtgtaaatgatatagcattctcccgaccaaataagcaactttgtgtggtcacttgtggagatgataaactaataaaggtatgggatatgcatggacataaattattcacatttgaagggcatgaggcacctgtgtattctatatgtccgcatcacaaagagagtattcagttcatcttctcaacttcccttgatggaaaaattaaggcctggctttatgacaatatgggatctagggtggactacgatgctcctggcaagtggtgtactactatgctatatagtgctgatggaactaggttgttctcatgtggaactagcaaagagggagactcctatttggttgagtggaatgaaagtgaaggatctatcaagaggacatattctggattccgtaaaaggtcagctggtgttgctggtgtagtgcagtttgatacagctcagaatcacattctggctgctggtgaagataaccatattaaattttgggatgttgacaataataacatgctgatctgcaccgatgctgaaggaggcctcccagctcttcctcgcttgaggtttaataaagaaggcaatcttcttgctgttactacagcagacaatggttttaagatacttgcaaatgctgatggacttagaactctacgcgcattagggagccggcctccttttgaagcatttaggccgcaatacgaagcttcttctatgaaggtctcaggtgctcctgttgttgctagcatctctcctaacataggccgaatggatcacttggataggaattctcctgcaaagccatctcctatactgaatggtggggatacagcatcaaggagcatagatataaagccaagaatctcagaagaaaagcctgataaagcaaaaccttgggaactaatggaagttctaaatccccagcaatgccatgtagcaacaatgccagaaactccagaccaagccagaaaggttgtccgacttctgtacacaaattctggtgttgggttgctagcactagggtctaacgccattcaaaggctatggaaatggagtcgaaacgaacaaaatccgagtggaaaagccacagctagtgttgtgccacaccattggcagccaaatagtggtcttgtcatgacaaatgatacagcagataccaatccagaggaggcagttccatgcattgcactctcaaagaatgattcctatgtgatgtctgcttgtggtgggaaggtttctttgtttaacatgatgacattcaaggtgatgacaacattcatgccacctccaccagcatcaacatttttagcatttcaccctcaagacaataacatcatagcaataggaatggaagattcaaccatccacatatacaatgtcagggtagatgaggtaaaaactagactcaaaggacatcaaaggaggataactgggttggcattctccaccaaccttggcatacttgtttcttcaggcgctgatgcacagtggataccccaggacacattgtcagcttccatatcgcatgcatcatactcatgtaacagccagctagtttttgctgccttcactgatggtaacttaggtgtttttgatgcggagaacttgagattaagatgtcgaattgcaccatcggtgataaacagatcaatccgtagtgtcattgagcttactcagggcttcaggcagctggggtgcctattctgcctctgcaatccacctgttcaccctcttgtcgtcgccgcacatccccacgagccaaaccaatttgcggtcgggctgtcagatgggtccgtcaaagtgctggagccattggagtccgaagggaaatggggagcgcccgctccggcagacaatggcatcattcccaatggcaagacgccagcttcgtcggctactagcaaccctgctgcggatcaaatccaaagatagattgtattccctaagcttttctttttctgcaaactttctaattacactgacttatttgtatgtggatgccgttaggatattatcgtcatttgttgtaaaaaggacagaataggttttatgttcaggtgtggttaactttcaggtactaccctagttatcctgttcatggaagattatgtttgcgatacggggtaatagtgtctataaagtatgtcgcctaaggttttctcaggtttagctcgatagctcaaatgatgtaagctatatatttcttcatgaatgtaaagcaatacatagtttttgctcaagatctatttttacctggttttacata

SEQ ID NO: 114518 - DNA, 698 bp, Zea Mays
ccaccaacagacacctttaggtaattaggatcgatgttatagagagatagggacattgttgtagatgttgccatataatcaaagcagtgtggatgaagtggtgtcaagtatctggtgttctatatggcaagaggataccacaaaaactaaaagataagttttataggacgacaattagacttgctatgttgtatggtggagaatattagcctataacaagacaacatgtttagcaaataagtattgcaaaaatgcatatgttgtgttggatttgtggccatacaataagggatcaaatctagaatgatattatatgtgataggctaggggtatcacgaattcattaaaagattatctaacatcggttgagatagtttggatatgtccaatagagacctacagaggcaccaatgcatagtggttagtgggatcctaaggtgtgatggcaatgggaagagaggaagagggagactgaagttgacatgagaagagacagtaaaatgagccttctaaggatgatatatacccaaggatttagccttgaataggagtgcgcggaaaacaattatccatatgctcgaaccttgatttgtgagttctcttaggttttgaactctagcatacccctacttgcttgtggctaaaaggtttttattgttattgtcgaacatggatcactgaacgtgtctggtgcaaca

SEQ ID NO: 114519 - DNA, 174 bp, Zea Mays
atggtggcgcttccgtttcgattagccgagcaacaagagatcaaagatcctacaggagcaagaacacgtctgcgcaccacaggacaggcggctggaggtccgagtctcaaggggcaagaacagggcgaagcttgtagcgtgctgcccacaggccaggcgtgggcaggagcttaa

SEQ ID NO: 114520 - DNA, 1149 bp, Zea Mays
caaggaaaaagggcagagcaaggggaacaaaaagggatttaaaaattttttaggtctaaacgtgaattattttctgaaaagagggtaaaatacaaaaaattcgggacgaaaaccaatcggcccccccccccctcgtcgcactcgcaagagggatgattcctttaaagatcgcacccgcggttgaacagcgtttcgttgtttcctccccaacttccaacacgcctcgatctagctccccttttccccccccccccccccccccccccccttctccttccggtcctccccccgagactattcatataggcgggtaggcgtccgaggcctcgtttgttctcggcttctcgtctccaagggtgctactccgtccgcgcttggtctgctctcgtccttccggaggccgcggcgcaacatggcgaagatcaagccgaaggccttgctcgcgcaaagcaaggtgaagaaggtccccggccaaatcagcgtggccacgatcgtcacctacatgatcctcggcgtcctggttgtgtcctccgtttacgctgcctacaggtactgctgggcaggcacaggagcagcggaggcagtgggcgcccaggggaactgatcccccttccgactgcgtggctgatctcgctgttgttgtatcatccggttggggtaaaatttttggttgttgctgtctagcaaatggggttcatgggacatggataggttgtatgttgatacggttacaccgtagccgatgatatgtatgttgaatttcttcccttttattatcctttgatgatccgattgcctctgctcctggaactgctttactttgaagtctgtgcctgtgacgttagcccagaagtcagaaccgcacagcacaggcatctttttgtttatacttgaacctgaaaggcctttctttccatcaagaggggtagagtttgtctgtctgtttttcgtacagcaagcagggaatcggcaacaacaggttgaaatacgctgcgacgacatacagcatatttattaggatgagattagcctttttgttttttgcatggtggaaatggaaagaaaaatgaacgaatgtttctggtaccttttgaagcctgaaagagtgaactgtagtgtgccaagaaaaagaaaaaaaaaaggctatcg

SEQ ID NO: 114521 - DNA, 252 bp, Zea Mays
ccattctttttgactccctatcacctgcaacatagacacaagcaacaatttctccttcaattctttagtttattcatgtaacacctctaaaatagaagaataatacaaatcactatttagtgcaaaaagatggttacaacctcaccattatatcaatcagaatctaacgaaggaagttgtattctgtttctgtatgtactccattcacatagagtagtctagtgttctaatgctggtagcactactctctcc

SEQ ID NO: 114522 - DNA, 1003 bp, Zea Mays
atgacggagcagagcaccagagacgtgcgcgcgatgctcaccgtcgagactcgatcgagaattagtgcaagaagaaagaggtgcgagcaagagccaagagggatgaacggcgccggcaatggtgagccctcccttgtagttgtagcggaggaagggccgccgaacgatggcaacggcgccggcgttcacgcacccaacttcggcgcgaatgaagcggacacgctgctggtggtggcgacactgatcacagcgctgacgtaccagctgggcaccaacatcccgggcgggtactggcaggacgatctcaaggggcacgacggcctcgcggggcacgtcgccggagacccgatcatgcgtgacaagcaccggcggcggtactggctgttcatggcggcgagctgggtggggttcggcacctcgatgctgctcacggtggggctcatcacgggggtgcccgcgaggtcgcgcttcgtccggttcgcgttcctgctggcctactccagcctcgtgctcacgttcgtgacgtcgcagccgcgcacgtcgctcttctgggacctcatcatctgggctgtcgtcatggcgctgctcgccatcgccaccaagtacctgcgcctcgacaggctcccgagatgggcgcgtaccctgtgccctgctcctccatccgcgttctgctgctcacgttcgtgactcgtgagcgagctcgccatggacgatcgacctcgtcatctgggtcgccgtcatggcatcgacgcatcgtcgccatcgtcaccaagtaccagcacgtcgacagacctccccggctgggtgcacaccgtctatcttcagtaccagcttgctagtagcaacaatgtgtgtgttttcaaaaaaaaggaagaatgtgtttttatctttgtttaattttggccgtaatgtcttgtttagtggctgatgttcttgttctctgctactgtgtgcgtcctcattggttgatctgaatctgatgttaaatgtatcgctgttcagt

SEQ ID NO: 114523 - DNA, 1790 bp, Zea Mays
agaccttctttcgtcccgtcctttcccctgcgcgccgcgagtgaattccggaatccccaatctatccgacgccacacgaaacgaaacacaagagaagagaatagagagaaggtcggagggctagacccggtcccccaattccaattcgcccctctcgcggccggcctcgcgagacgccgattcggatcccatctcctgctcagagcctcgattcgaccggcgggggcgacgattcgaccgggtcggtagccaggcagaggcagcggaaggagaggatgagcttccaggacctggaggcggggcacgtccggggggcgccgctcggcggcggccggaggaacggcaggggccccgcgggggcggggggcgccggcgccggcgcgtcgcaggccgtggcgtcgggcgtcttccagatcaacaccgcggttgccacgttccagcgcctcgtcaacacgctcggcacgcccaaggatacccccgacctccgcgacaggatacataaaacacggcaacacataacacaactagtgaaggatacatcagacaagcttaaacaagctagcgaggcggatcatcgcgttgaagtcagcgctaccaaaaagattgctgatgcaaagctagctaaagatttccaagcagtcctaaaagaattccagaaagctcaacgattagcagtagagagagaagctgcatatgcaccttttattactcaagcgggcctgccacagagctacaactcaagtgaagtgaacaatggtgctgataagttggcagagcagcgcacgcagcttctagaatctagaaggcaggagttggtcttcttggacaatgaaatagtgttcaatgaggccatcattgaggagagggatcagggaatacaagagattcaacaccaaatcactgaagtaaatgaaatcttcaaagatcttgctgtgctagtccatgatcaaggagcaatgatagatgacattgattcccatatagagaatgctgttgtagcgacttcgcaggctaaaggtcagctttcaaaagctgccaagactcagaagtcgaactcttcgctgatatgcttgttactggttatcttcggcgtggtcctgctcatagtgataatagtacttgcagcataaaagcttggaaggcagctgaggttccaatgatcgagcttattgcgatgaattccttattattattttttttgctgtgcagccaggaatggatcctggcatccgcctggatgtatccaggcggtgattggtgatgtgcttgtggtatggctgtgtatttggtgatgatgtatctggaatgcatgggtggtttcacataaggccccgttcggtttggcctgaacgacctggaatacagcatattccagctgaaattatgtcacttggattaaaactggatcaatcctaaatatctgttcggatagatttaaccctgaacgaaaccagagcgttttcagccttttaacctctcttccactcggattggagccacacctatgaacacctggaatcaaaccagaccaggatttagtaaataaccagaatccactccatcccggcgtggaacggttcctgagcaggaactgatcttggactggcgaacggcccctaaaagtatactctttcctgccagtgtagttcctcttgtctcatatgcacgctttgtttatatattgtaatgtatgagtgcgtgctgtagaacaaggttggattatctgtggtatgaatttcctcgattccatgagaaacgcttttctatatgtgaacttcgcttcctctttt

SEQ ID NO: 114524 - DNA, 1402 bp, Zea Mays
ggcgcgcgtgacccacgaagcaatttcaaacccagccagaatcaggagcaccgcgtacgcgacgtcgcggtcgcggcccagcttccagcgcccgacccggcgggcaagacataaaacacggcaacacataacacaactagtgaaggatacatcagacaagcttaaacaagctagcgaggcggatcatcgcgttgaagtcagcgctaccaaaaagattgctgatgcaaagctagctaaagatttccaagcagtcctaaaagaattccagaaagctcaacgattagcagtagagagagaagctgcatatgcaccttttattactcaagcgggcctgccacagagctacaactcaagtgaagtgaacaatggtgctgataagttggcagagcagcgcacgcagcttctagaatctagaaggcaggagttggtcttcttggacaatgaaatagtgttcaatgaggccatcattgaggagagggatcagggaatacaagagattcaacaccaaatcactgaagtaaatgaaatcttcaaagatcttgctgtgctagtccatgatcaaggagcaatgatagatgacattgattcccatatagagaatgctgttgtagcgacttcgcaggctaaaggtcagctttcaaaagctgccaagactcagaagtcgaactcttcgctgatatgcttgttactggttatcttcggcgtggtcctgctcatagtgataatagtacttgcagcataaaagcttggaaggcagctgaggttccaatgatcgagcttattgcgatgaattccttattattattttttttgctgtgcagccaggaatggatcctggcatccgcctggatgtatccaggcggtgattggtgatgtgcttgtggtatggctgtgtatttggtgatgatgtatctggaatgcatgggtggtttcacataaggccccgttcggtttggcctgaacgacctggaatacagcatattccagctgaaattatgtcacttggattaaaactggatcaatcctaaatatctgttcggatagatttaaccctgaacgaaaccagagcgttttcagccttttaacctctcttccactcggattggagccacacctatgaacacctggaatcaaaccagaccaggatttagtaaataaccagaatccactccatcccggcgtggaacggttcctgagcaggaactgatcttggactggcgaacggcccctaaaagtatactctttcctgccagtgtagttcctcttgtctcatatgcacgctttgtttatatattgtaatgtatgagtgcgtgctgtagaacaaggttggattatctgtggtatgaatttcctcgattccatgagaaacgcttttctatatgtgaacttcgcttcctctttt

SEQ ID NO: 114525 - DNA, 97 bp, Zea Mays
atgtgcttgtggtatggctgtgtatttggtgatgatgtatctggaatgcatgggtggtttcacataaaagtatactctttcctgccagtgtagttcc

SEQ ID NO: 114526 - DNA, 600 bp, Zea Mays
gagtctttctcttcctggccgcgctgaagtcctgcttcgtgggagtctggagcagccgtggacgcgcccgcgccgtccctgctcggattcctgtcagccactgcccagctccatctcacggtactctgtctgctcggttccatggcgcgccacgaccccgccatggaagtttccttgccgcgccagctcgatttcatggcgcgccctcttcagtcggcctctgctcctcctctgccggtcgcccctctctgcttgccctccagttccatctttggtcgtgcacggacgcagccgggaagcgctggtggctgcgggcgcgatggtcgtggacgggcaagccgtcgtgtgcccttggtctctgctttgaattccccggcaccgtcagcctctcctgcagtcgctgagcgtcgctcgctcgctgttgctgatgctccctgctgctgctccatccaagccgcatctgggtttcttccccatcgatcgagttcggtctctccaacacatgtcggtcttcaatctaccatgtcgcgccctgacctcaatctcgccgatgtcctccctgccatgtctgttgccgaccatcgatctccatcgtgctga

SEQ ID NO: 114527 - DNA, 973 bp, Zea Mays
ctccaccacaccacaccacaccggccggctcacacgcgccgcaaagcagagcacggggggctgagaccagagcagagcggagcgccaccagccaatcctttgcctgcccaagcagcagcagcagctggcccgatggctctgtctctctccggcacctccgcccgcttcgccctcgcgtcgctggtcccccgggccagggcctacgcggcgtcggcggcgtccggggccatgaggcgcgcggcggagggcgcggccgcgggcgaggccaaggaggccgggcgcgccgccgccgccgccgccgagggctcgtgggtgcccgaccccgtcacgggccactaccgccccgccaactgggccgccgccgtcgaccccgccgacctccgcgccgcgcacctcgcccgcacctacgcccgggcctgagcggccccggctcccttcaccctgctccgcctcgtctcgtatgacatacgcgcaccgtaccagggtgagacgaggtgggggctgggggttcgtgtggcgaacggcgtgttgagccacgcgcgcgtgcggccgcgctctgcgacgcccggaacgttcttgggagagcgcgagcgaggtcttctgtcttctcggtgcgggtcgctgtgccatgagatgtgacgctgggtcgttttgggtccgaccaacgggagaagagcggcctgtggtcggtggtcgccgccgtgtgtgggctggatggcctgctctcttgtgctcctcctatatatcagatgtacttcctccgaggagcagggtttcgccctttcgctaccttttcgtactcgctagtcgctacagctacagctagtacgtactatactatactaataaaagctacagtttcttccggttcttgtcctacctttcacgtcatctcgattacgtggtgaacttgtatgcagtatgctgtatttttttcatcggacaaaatatatctttttttattgaacataaa

SEQ ID NO: 114528 - DNA, 1691 bp, Zea Mays
actccgccactcccactcccccctccgccgctccacttctcctccgtcgcgaaaaccctagaaactaccgaccccctcggcccgccgtcatgtcgtccccgccgccggctgtcgcgtcgcctgcctctgagcaagccaaatcgaagaagaagaagcataaatcgaagaacgacaccgttgccgctgacccgccgtcgcttgctgaggccgaggagaaaactgatggctacctcatcaagccgcagtcccttgtaccttccctcgacacctccacctggccgctcctcctcaagaactacgaccgcctcaacgtccgcaccggccactacaccccgctaccctccggccactcgccgctcaagcgccccctcgccgagcatctccgttacggcgtcatcaacctcgacaagccgtcgaacccgtcctcccacgaggtggtcgcctggatcaagcgcatcctccgcgccgagaagaccggtcacagcggcacgctcgaccccaaggtcacaggcaatctcatcgtctgcatcgaccgcgccacgcgcctcgtcaagtcgcagcagggcgccggcaaggagtacgtctgcgtcgcccgcttccacgccgccgtgccggacaccgcgcgagtggcccgagcgctagaggcgctcactggcgccgtgttccagcgcccaccgcttatctctgcagtcaagcgccagctcagggtgcgaacaatctacgagagcaagctcctggagcacgatcccgagcgtcaccttgccgtgttctggatctcctgcgaggcaggtacctacgtccggactctctgtgtgcaccttgggctgctccttggtgttggtgcgcatatgcaggaactgcgccgtgtcaggtcggggatcctcggggagcaggacaacatggtcaccatgcacgatgtgatggacgcgatgtggtcgctcgacaactacaaggatgagtcatacttgaggcgtgtcgtgatgccactagaggttgtcacgtcgtacgccacttgaattccagctgtttctaaggaccaatattcttgttcctcgcatgattgttcatttggactgtaagtattggtaaaatggtaactatgtgtatttggggttttgttgagatgtgataagggcaaaattgtgttgctaaccacacgttgctttctagttagtatcgtgcttgctcattcttttctttatcaggatgaggttaggcataacttgtgaactggttatcagactggcacttggctccaaccatcaagatgccagggtggtacttcatattcttaagtgaacatacaatgcactcaagtattttgagctaacacagtggtgttttgggtctgcatccccgagggatcctctcaactgggactttaatggttaaattcagttccggagaatgttcaaagtgcatgatgggtttattgaggcaattgtccctgccaggatcaaaccctagctgttgtagagcgccctttgctctatcaggaatcggaggaattgaggttagccctagctgtcggaggactttaatggttaaattcagttccggagaatgttcagaaagtgcaggtatgctgctaaattcaatatgtgcattgtataatcaaaatccagcatgatcataagttaggtatgcaaacgttaagactaaatgtcatgtggctttaatcttgtcagttt

SEQ ID NO: 114529 - DNA, 2059 bp, Zea Mays
gcgctcactccgccactcccactcccccctccgccgctccacttctcctccgtcgcgaaaaccctagaaactaccgaccccctcggcccgccgtcatgtcgtccccgccgccggctgtcgcgtcgcctgcctctgagcaagccaaatcgaagaagaagaagcataaatcgaagaacgacaccgttgccgctgacccgccgtcgcttgctgaggccgaggagaaaactgatggctacctcatcaagccgcagtcccttgtaccttccctcgacacctccacctggccgctcctcctcaagaactacgaccgcctcaacgtccgcaccggccactacaccccgctaccctccggccactcgccgctcaagcgccccctcgccgagcatctccgttacggcgtcatcaacctcgacaagccgtcgaacccgtcctcccacgaggtggtcgcctggatcaagcgcatcctccgcgccgagaagaccggtcacagcggcacgctcgaccccaaggtcacaggcaatctcatcgtctgcatcgaccgcgccacgcgcctcgtcaagtcgcagcagggcgccggcaaggagtacgtctgcgtcgcccgcttccacgccgccgtgccggacaccgcgcgagtggcccgagcgctagaggcgctcactggcgccgtgttccagcgcccaccgcttatctctgcagtcaagcgccagctcagggtgcgaacaatctacgagagcaagctcctggagcacgatcccgagcgtcaccttgccgtgttctggatctcctgcgaggcaggtacctacgtccggactctctgtgtgcaccttgggctgctccttggtgttggtgcgcatatgcaggaactgcgccgtgtcaggtcggggatcctcggggagcaggacaacatggtcaccatgcacgatgtgatggacgcgatgtggtcgctcgacaactacaaggatgagtcatacttgaggcgtgtcgtgatgccactagaggtactgctcactagctacaagaggcttgttgtgaaggactctgctgtaaatgctatctgctatggtgctaagcttatgattcctgggttgctccgatttgagaatgatattgagactggggaggaggtggttctcatgacgacgaaaggggaggctattgctattggtattgctgagatgactactgctgtgatggcgacctgtgatcatggtgcagttgcaaagatcaagagggtggtgatggacagagatacatacccgaggaagtgggggcttggcccggtggcactcaagaagaaaaaactggttgctgagggtctccttgacaagcatgggaagccaaatgagaaaacgccagctgaatggcttcggaatgtggtgcttcccactggtggtgatgtctcaattgccagcattgcagctgctcctgagccagagaaggtgaaggtggagcaggacacagctgtgactgaagaagtcaaggagaataaaaagaagaggcggaaggatgatgaggacaatgatgccgatgcttctattcctgcgaagaagatcaaggttgaggaagctgctgaagcagtggaaggggagaagagtgagaagaagaaaaagaaaggcaagggggaatcaagatcagctaaagctgtggaggtcaaggaggaggttgatgcagctgatgagaaggggagtgaaaagaagaagaagaagaagagcaaggaaggaagtgatgctgatccagagagtgctcagaatggagatgatggcacacatgctgagagaagtgagaagaaaaaggagaagaaaaagaagaaccgagatacagaggggacacaatagttgtagtttatgttggctggttacctttatttaaagttgtcggggaagattgaaatacttttcttgcttcccttgtgtctgctgtgcctaatgtaccatccttaggtagttaggttattgctattctactgctttgaattgctatgccaagtggtgatattttcattggaactcttgaacgatggctcataccagataatgcaatgagttctgctctcatcttg

SEQ ID NO: 114530 - DNA, 996 bp, Zea Mays
acccggtacttttttctctagatttggcgtcgcgagactcctcgcgcttctcgccgagagaaaactagggttttgctcctggaatctcctcccccgcagccgccgcccgaccgtgcgccaacgatacatccttctccctcctccgatccggcctttttgatccccggatcccgtacaatatgcttcccctctcgctcctcaagaccgcccaggggcaccccatgctcgtggagctgaagaatggtgagacatacaacgggcatctggtcaattgcgacacgtggatgaacatccatcttagggaggttatttgcacctcaaaggacggtgacaagttttggaggatgccagagtgttacattcgcgggaacaccattaagtatcttcgagttcctgatgaggtgattgacaaggttcaggaggaaacttctaaaagccgatcagataggaagccaccaggtgttggccgtggaagaggaaggggggacgtcggtgctaaacctggaggcagaggcattggacgtggccaagatgatggaggtagaggcagtggtggccgtggaaggggtggagttggtgccaaaggtggtaacaaagtgcaggtgggggccgtggtcgtggctgaagctggtcgacacaagggagaatgccgctttttgaggcctgtaattgtgttgcatagattgcttaggacatgatgaatgaaccaagttggctggttgtattggggcacaaaccagaatggttcctgtgatctagacaccgaggatgcggcggcaaccaggcttgttgctattccccaaaactgtttggttgatatcttgagtatgatccaatttgttcatttgcttagagttatcccggttagatgactaattgattgatgttgcccattattttgctagtggcgcacgttgtgctgagtatgagcattttcagcgtgagatgttcgaatacgatagaatgtttttttatatataattttcaatttagcaa

SEQ ID NO: 114531 - DNA, 991 bp, Zea Mays
acccggtacttttttctctagatttggcgtcgcgagactcctcgcgcttctcgccgagagaaaactagggttttgctcctggaatctcctcccccgcagccgccgcccgaccgtgcgccaacgatacatccttctccctcctccgatccggcctttttgatccccggatcccgtacaatatgcttcccctctcgctcctcaagaccgcccaggggcaccccatgctcgtggagctgaagaatggtgagacatacaacgggcatctggtcaattgcgacacgtggatgaacatccatcttagggaggttatttgcacctcaaaggacggtgacaagttttggaggatgccagagtgttacattcgcgggaacaccattaagtatcttcgagttcctgatgaggtgattgacaaggttcaggaggaaacttctaaaagccgatcagataggaagccaccaggtgttggccgtggaagaggaaggggggacgtcggtgctaaacctggaggcagaggcattggacgtggccaagatgatggaggtagaggcagtggtggccgtggaaggggtggagttggtgccaaaggtggtaacaaaggtgggggccgtggtcgtggctgaagctggtcgacacaagggagaatgccgctttttgaggcctgtaattgtgttgcatagattgcttaggacatgatgaatgaaccaagttggctggttgtattggggcacaaaccagaatggttcctgtgatctagacaccgaggatgcggcggcaaccaggcttgttgctattccccaaaactgtttggttgatatcttgagtatgatccaatttgttcatttgcttagagttatcccggttagatgactaattgattgatgttgcccattattttgctagtggcgcacgttgtgctgagtatgagcattttcagcgtgagatgttcgaatacgatagaatgtttttttatatataattttcaatttagcaa

SEQ ID NO: 114532 - DNA, 892 bp, Zea Mays
acccggtacttttttctctagatttggcgtcgcgagactcctcgcgcttctcgccgagagaaaactagggttttgctcctggaatctcctcccccgcagccgccgcccgaccgtgcgccaacgatacatccttctccctcctccgatccggcctttttgatccccggatcccgtacaatatgcttcccctctcgctcctcaagaccgcccaggggcaccccatgctcgtggagctgaagaatggtgagacatacaacgggcatctggtcaattgcgacacgtggatgaacatccatcttagggaggttatttgcacctcaaaggtgaaaaatctggtgcccttgattcacattgtgaaaggctctagttagcaaaagattagttaagtgcactgtctgatttttgggtgaatctcttacccgaagcaagcatggttgaaattcaaatagtaacaatgtggggtctcagttatcctgctctattagcttgtgagtttcctgtagttatggtttatgatggctcgaattgcaggacggtgacaagttttggaggatgccagagtgttacattcgcgggaacaccattaagtatcttcgagttcctgatgaggtgattgacaaggttcaggaggaaacttctaaaagccgatcagataggaagccaccaggtgttggccgtggaagaggaaggggggacgtcggtgctaaacctggaggcagaggcattggacgtggccaagatgatggaggtagaggcagtggtggccgtggaaggggtggagttggtgccaaaggtggtaacaaaggtacacacttcgtaaccacttacatatatttacagtcccaccccatagtttcaagggataccaccaatctgtgggacgcgttacttg

SEQ ID NO: 114533 - DNA, 515 bp, Zea Mays
acccggtacttttttctctagatttggcgtcgcgagactcctcgcgcttctcgccgagagaaaactagggttttgctcctggaatctcctcccccgcagccgccgcccgaccgtgcgccaacgatacatccttctccctcctccgatccggcctttttgatccccggatcccgtacaatatgcttcccctctcgctcctcaagaccgcccaggggcaccccatgctcgtggagctgaagaatggtgagacatacaacgggcatctggtcaattgcgacacgtggatgaacatccatcttagggaggttatttgcacctcaaaggacggtgacaagttttggaggatgccagagtgttacattcgcgggaacaccattaagtatcttcgagttcctgatgaggtgattgacaaggttcaggaggaaacttctaaaagccgatcaggtatggagtggtcaacattactttggcagcttaattacatgtttgctctgttcgttaaccacataatatat

SEQ ID NO: 114534 - DNA, 1223 bp, Zea Mays
atgcacacacaccgactgccttcaactgccactgccgctgcaagcgtcgagatcacgccgcccgcccgctactccttcgttgctactacgtgtacacaggagaggagacaggcgaataagcgatgggcccgcgtgtgccgcctccgacgcccgatcgagcgcaatgatcaggtggtgactgaccgcgtcgcgaggcttttatatgtacgttgatcgatcgagacctgaccaggcaagaggcaacggtcgctgtcaatcccccacctactgccgacgcgacatctctccctccctttctcatcgccggtcctctcgcgcgccctcacctactgccgtccgctcgtcccgccattgccatgacccatgttataacaccccccattcccacccctcattctcccacgccaccaccaaacgcctctctctctctctctctctctctctctctctctctctctctctctctctctctctctctctctcggccgccggccctccgtcgcattcaacacgtacgccatggcgcgcctgctccgcgccgccgccgtcctggcgctcctggccgtctccaccgccgcgctgtcggcgccggcgtgggcgggcggcgtgtccgccggcgacctggcccatctgggcgccgccgtcgtgattcggcgcggcggcgggcgggcgtgccgcggcggtacgacggtgggcgagtgcatggagtacctggacgtggacgccgagggcgaggccgacgtcgccggcatggccacgggcggcagcaagcgccgggtgctgcagggcggctccggctacatcggctacgacgcgctgcgccgggacaacgtgccctgctcgcagcgcggcgcgtcctactacaactgccagcccggcgccgaggccaacccctactcccgcggctgcagcgccatcacccagtgcaggggctgatcgatgcatgcatggtttcacattccattctccggcagcagggtaaatcggttgctgctagcttcattcatgcatgtgtgtggtgcttgattttcttttttggggtctttaattgtcgtccgtcgattattgtggtgcagtggagatgtgtctgtgctgttgctagcatccttttcaggatgaatctaaaagtaataataataattatatatgatgatcctgtaataattctggtgtcgatgatattcacagccaacgtataatttgcagtgcctgcctttcatttc

SEQ ID NO: 114535 - DNA, 1499 bp, Zea Mays
catttttgcctatcacaagttcacgaatcacgacaaaacggaagcaatggccttaaaatggagattttataaggccgcaaataattggatgctagtaattccttcatgtcttgaaaatgcaattgtagtcatgattataagagaccgctgatcacctaatgatttttttactctatatggttctcagccacctatgaaccaagttacaccagctggaggacagcaagctgttccagtaggggcatcttatggtttgtcgcaccaggggcctacctctgccatgacttatggcagtcattatgcgcaattatattcttcatctgggacttcaagcagcaacatacaagaatatgcctttccagagcgaccggggcagcctgaatgtgaacattacatgaagactggaacctgtaaatatggggcagcctgcaaatatcatcatcctcaatacttcagtggaccaaagtctaactgcatactgagccctctgggtctccccctccgtcctggttctcagccatgtgcttactatgcacaccatgggtattgcaagtttgggccgacatgcaagtttgatcacccgatgggtactccaaactatagtatttcaacatcttcacttactgatgtgccaatcgctccatatcctcagagtttccctgttactcctatgccttcatatctgccatcttctgatctgcgtccacaatacactcaagtcaaggattcctctgctaatccaccaccatcgcctggaactacttatggtcctgttgggtctatatcaaaggtttatgctccccacacgcttatccgatccccggcttctgcagctgctggcatgcaagcgtcctaatgagacacggttgagagcattagtcctctctgtcatgaagatagttcttgggcaatcttctcaggtttttctaccattggcggaatgaggtctcgattcttttttgctccagttcgacttcccagcaattgtgaataaaggctgcagctgacatagaaaagtctcaataaatgcaaagataggaattggcaagctcattcacttgccatttttctgtccatctcggaaatgagaggagaaaattctgattgtagtaggatccagagctacgttattatcctgtataagatgcaccgatgcaagggattcgtatctgaaagctgatgggttctgtagctcaaaaccttttgtttatctcaccatcatatatatagagagggcagatcaccctaggtgatgattatccacgctggaatggtttaacaaatcttcaataattgttaaaccattcgtgctttttgttaaaccatctcaggatgggtgatcatcacctaggtgacgaatagccatatatatgaatatgagcagcagctatgacttcacaacatgtatatctacctatatatatgaactgggaacacggcatgttgtagcgagacgctttggaacccttgattgaatcatctgaaaccattcgctggtc

SEQ ID NO: 114536 - DNA, 2360 bp, Zea Mays
gctgtctcccgcggcacggggctccagcgccgaacggaaaaccccaccccaccaccactggctactcccgatccccagtccccatccctctcctcgcaaaaggccaccgcgacgcgaccgcgtactgggggcgagacgccagtgcaggcaggcaggcagaagaggagtcgccaggaagcaaccgcgagggagctgcaagcgagcacagcagcagcgcagaaaaaaaattctggaataatttttcttccctttggctccgtgaggttccggtgctcgctcgctcgcctgagcttcgatcgagcccggtcggcgaggcaggcgcccgatcgccgctctccgggagcttccggggggccgtcggatggagccgtacgcggcggcgaagagcggcggggccgacgccggcaccggcaccggactggaagactcgatgcggaggctggggctcggcgacgacggggaagcaggggaggagaagcttccggagcggccgggcgaggcggactgcgcctactacctccgcacgggcgcctgcggctacggggagcgctgccgctacaaccacccccgcgatcggccggccccggttaatggagttggaaagaccgcagttacagtggagtacccagagcgtcctggacagcctctctgtgagtactatgcaaagaatggcacctgtaaatttggttccaattgcaagtttgatcatcccagggagggtggttttgtacctgtcacattgaacagcggtggattccccctgcgtctgggtgaaaaggaatgttcctattacatgaaaactggacattgcaagtttggagctacatgtaaattccatcacccagaacttggtttccttacggagacgcctggcatgtacccaccagttcaaccaccacctatttcctcctcgcatccatatccacatcttgccaattggcaaatggggaggcctcctgttgtgccagggtcatttttaccaggctcgtatccaccaatggtgcttccacatacagttataccaatgcagggatggaacccttatgttccacctatgaaccaagttacaccagctggaggacagcaagctgttccagtaggggcatcttatggtttgtcgcaccaggggcctacctctgccatgacttatggcagtcattatgcgcaattatattcttcatctgggacttcaagcagcaacatacaagaatatgcctttccagagcgaccggggcagcctgaatgtgaacattacatgaagactggaacctgtaaatatggggcagcctgcaaatatcatcatcctcaatacttcagtggaccaaagtctaactgcatactgagccctctgggtctccccctccgtcctggttctcagccatgtgcttactatgcacaccatgggtattgcaagtttgggccgacatgcaagtttgatcacccgatgggtactccaaactatagtatttcaacatcttcacttactgatgtgccaatcgctccatatcctcagagtttccctgttactcctatgccttcatatctgccatcttctgatctgcgtccacaatacactcaagtcaaggattcctctgctaatccaccaccatcgcctggaactacttatggtcctgttgggtctatatcaaaggtttatgctccccacacgcttatccgatccccggcttctgcagctgctggcatgcaagcgtcctaatgagacacggttgagagcattagtcctctctgtcatgaagatagttcttgggcaatcttctcaggtttttctaccattggcggaatgaggtctcgattcttttttgctccagttcgacttcccagcaattgtgaataaaggctgcagctgacatagaaaagtctcaataaatgcaaagataggaattggcaagctcattcacttgccatttttctgtccatctcggaaatgagaggagaaaattctgattgtagtaggatccagagctacgttattatcctgtataagatgcaccgatgcaagggattcgtatctgaaagctgatgggttctgtagctcaaaaccttttgtttatctcaccatcatatatatagagagggcagatcaccctaggtgatgattatccacgctggaatggtttaacaaatcttcaataattgttaaaccattcgtgctttttgttaaaccatctcaggatgggtgatcatcacctaggtgacgaatagccatatatatgaatatgagcagcagctatgacttcacaacatgtatatctacctatatatatgaactgggaacacggcatgttgtagcgagacgctttggaacccttgattgaatcatctgaaaccattcgctggtc

SEQ ID NO: 114537 - DNA, 141 bp, Zea Mays
agctcctagcagaaggagtgtaaattcaagatgaagtggttgtggaagaggagtttgcaccagtgcctattcatcaagtggatggagctatctaactgggtattgggtagaaaggtcttgagcctcttcactgcaacaaag

SEQ ID NO: 114538 - DNA, 2178 bp, Zea Mays
gagactgcgagacacaggcagcggaaaaatagagacaaagaaggggcaggagcagtgacctgccacaccagaggaaacgagagagagaaaaacagcccgatctcctcctcccactccgatcgccctaccgatcgccgcctcgtgaagcttccctgttccctccccgccgcccgcgacgccatggagccgccgcacaccgaggaggccgccgctgctgcagcaggaggagcagagggcggcagcgcaagcccgggcaccggcctcgaagggccgatgctgaggctggggctggacggcggcggggagggggaggacggggagctgggggctggggaggaggcggacacgtggcttccagagcggcctggcgaggcggactgtggctactacctccgcacgggcgcctgcggcttcggggagcgctgccgctacaaccaccctcgcgatcgtggcggcactgagtttggtggaggtgccaagaatggagcagcacaatactttccagaacgacaagggcaacctgtatgtgagtattatttgaagactgggacttgtaaatttggttccaattgcaaatatcaccatcctaagcaagatggatctgtgcaatctgttatattaaacaacaatggattccctctacgcccgggtgagaaagaatgctcctactatatgaagactgggcaatgcaagtttggttctacatgtaaatttcatcatccagaatttggtggtattccggtaacccctggcatatatccagcattacaatcagcatctgtgccctccccccttacatatgcttcaaattggcaaatgggaaggtcacccgcagttcctggatcatatatagcaggctcatacactccaatggtgctcccatctggaatggttccattgcaaggatggagcccttatccggcaccggtaaatcatgtagcatcaggtggagcacaacaaactattcaagctggaccattatatggtataggacaccatggatcttccactgcaattgcttatggtggtacatacttgccatactcttcctcaactggacaatcgagcaataatcatcaagaacatggatttcctgagagaccagggcagcctgagtgtcaatattatatgaggactggagattgcaaattcggaactacatgtaaatataaccatcctcaagattggagcacttctaagtccaattacatgttcagtcatctctgccttccgcttcgtccgggtgctcagccttgcacgtactatgcccaaaatggatattgcagatatggaattgcatgcaaatatgatcacccaatgggtacactaggctacagttcatctgctttacccctatctgacatgccaattgctccctaccctatgggcttctctgttgcgacgttggctccatctccatcttccccagaatatatctcaaccaaagatccatctatcaaccaagtagcatcaccagtggcggcacctgaacctgttggagcaatcttgccaaaaggggtattccctccggataccattatgcgaactcagacttctacaagtgttggcagttcaagccctggtggtggtcgctgatttttctgagctggtgggagtgatcctatcagcacaatttttttctgtcacttgacacagttctgataggcctttacaatgtgaataagaagctgtggcctctgtagagaagccgtggcgagggtggttttctctaccatcagaataagagagcattgatcggttacaagcaagctcgattcacctgcaattttttgcgttgttccgttcgtgtccaaaacgggaaaaggaaggtttttttttttggatgtcaggttctatagcatgttgggcgcggttgtgaggctccaggtccattccctcggtaaataattctggggcaagaaagttttcgttgttatcaagaaaattttcacacgcagagttactgggttcctccgcctttcaattttttttgttctatgtatattgttatatatatagtacacacatatatatcttcatcagacttgagacatgtaattacgtatatatagatgtttatattgggagcaaggcgcattgtaatggaccgaaaaatgctgaattgaagagatcttgctgtcgatactgaaatggctgcatcgatgaggccaacttgac

SEQ ID NO: 114539 - DNA, 2158 bp, Zea Mays
gagactgcgagacacaggcagcggaaaaatagagacaaagaaggggcaggagcagtgacctgccacaccagaggaaacgagagagagaaaaacagcccgatctcctcctcccactccgatcgccctaccgatcgccgcctcgtgaagcttccctgttccctccccgccgcccgcgacgccatggagccgccgcacaccgaggaggccgccgctgctgcagcaggaggagcagagggcggcagcgcaagcccgggcaccggcctcgaagggccgatgctgaggctggggctggacggcggcggggagggggaggacggggagctgggggctggggaggaggcggacacgtggcttccagagcggcctggcgaggcggactgtggctactacctccgcacgggcgcctgcggcttcggggagcgctgccgctacaaccaccctcgcgatcgtggcggcactgagtttggtggaggtgccaagaatggagcagcacaatactttccagaacgacaagggcaacctgtatgtgagtattatttgaagactgggacttgtaaatttggttccaattgcaaatatcaccatcctaagcaagatggatctgtgcaatctgttatattaaacaacaatggattccctctacgcccgggtgagaaagaatgctcctactatatgaagactgggcaatgcaagtttggttctacatgtaaatttcatcatccagaatttggtggtattccggtaacccctggcatatatccagcattacaatcagcatctgtgccctccccccttacatatgcttcaaattggcaaatgggaaggtcacccgcagttcctggatcatatatagcaggctcatacactccaatggtgctcccatctggaatggttccattgcaaggatggagcccttatccggcaccggtaaatcatgtagcatcaggtggagcacaacaaactattcaagctggaccattatatggtataggacaccatggatcttccactgcaattgcttatggtggtacatacttgccatactcttcctcaactggacaatcgagcaataatcatcaagaacatggatttcctgagagaccagggcagcctgagtgtcaatattatatgaggactggagattgcaaattcggaactacatgtaaatataaccatcctcaagattggagcacttctaagtccaattacatgttcagtcatctctgccttccgcttcgtccgggtgctcagccttgcacgtactatgcccaaaatggatattgcagatatggaattgcatgcaaatatgatcacccaatgggtacactaggctacagttcatctgctttacccctatctgacatgccaattgctccctaccctatgggcttctctgttgcgacgttggctccatctccatcttccccagaatatatctcaaccaaagatccatctatcaaccaagtagcatcaccagtggcggcacctgaacctgttggagcaatcttgccaaaaggggtattccctccggataccattatgcgaactcagacttctacaagtgttggcagttcaagccctggtggtggtcgctgatttttctgagctggtgggagtgatcctatcagcacaatttttttctgtcacttgacacaggcctttacaatgtgaataagaagctgtggcctctgtagagaagccgtggcgagggtggttttctctaccatcagaataagagagcattgatcggttacaagcaagctcgattcacctgcaattttttgcgttgttccgttcgtgtccaaaacgggaaaaggaaggtttttttttttggatgtcaggttctatagcatgttgggcgcggttgtgaggctccaggtccattccctcggtaaataattctggggcaagaaagttttcgttgttatcaagaaaattttcacacgcagagttactgggttcctccgcctttcaattttttttgttctatgtatattgttatatatatagtacacacatatatatcttcatcagacttgagacatgtaattacgtatatatagatgtttatattgggagcaaggcgcattgtaatggaccgaaaaatgctgaattgaagagatcttgctgtcgatactgaaatggctgcatcgatgag

SEQ ID NO: 114540 - DNA, 2075 bp, Zea Mays
gagactgcgagacacaggcagcggaaaaatagagacaaagaaggggcaggagcagtgacctgccacaccagaggaaacgagagagagaaaaacagcccgatctcctcctcccactccgatcgccctaccgatcgccgcctcgtgaagcttccctgttccctccccgccgcccgcgacgccatggagccgccgcacaccgaggaggccgccgctgctgcagcaggaggagcagagggcggcagcgcaagcccgggcaccggcctcgaagggccgatgctgaggctggggctggacggcggcggggagggggaggacggggagctgggggctggggaggaggcggacacgtggcttccagagcggcctggcgaggcggactgtggctactacctccgcacgggcgcctgcggcttcggggagcgctgccgctacaaccaccctcgcgatcgtggcggcactgagtttggtggaggtgccaagaatggagcagcacaatactttccagaacgacaagggcaacctgtatgtgagtattatttgaagactgggacttgtaaatttggttccaattgcaaatatcaccatcctaagcaagatggatctgtgcaatctgttatattaaacaacaatggattccctctacgcccgggtgagaaagaatgctcctactatatgaagactgggcaatgcaagtttggttctacatgtaaatttcatcatccagaatttggtggtattccggtcacccgcagttcctggatcatatatagcaggctcatacactccaatggtgctcccatctggaatggttccattgcaaggatggagcccttatccggcaccggtaaatcatgtagcatcaggtggagcacaacaaactattcaagctggaccattatatggtataggacaccatggatcttccactgcaattgcttatggtggtacatacttgccatactcttcctcaactggacaatcgagcaataatcatcaagaacatggatttcctgagagaccagggcagcctgagtgtcaatattatatgaggactggagattgcaaattcggaactacatgtaaatataaccatcctcaagattggagcacttctaagtccaattacatgttcagtcatctctgccttccgcttcgtccgggtgctcagccttgcacgtactatgcccaaaatggatattgcagatatggaattgcatgcaaatatgatcacccaatgggtacactaggctacagttcatctgctttacccctatctgacatgccaattgctccctaccctatgggcttctctgttgcgacgttggctccatctccatcttccccagaatatatctcaaccaaagatccatctatcaaccaagtagcatcaccagtggcggcacctgaacctgttggagcaatcttgccaaaaggggtattccctccggataccattatgcgaactcagacttctacaagtgttggcagttcaagccctggtggtggtcgctgatttttctgagctggtgggagtgatcctatcagcacaatttttttctgtcacttgacacaggcctttacaatgtgaataagaagctgtggcctctgtagagaagccgtggcgagggtggttttctctaccatcagaataagagagcattgatcggttacaagcaagctcgattcacctgcaattttttgcgttgttccgttcgtgtccaaaacgggaaaaggaaggtttttttttttggatgtcaggttctatagcatgttgggcgcggttgtgaggctccaggtccattccctcggtaaataattctggggcaagaaagttttcgttgttatcaagaaaattttcacacgcagagttactgggttcctccgcctttcaattttttttgttctatgtatattgttatatatatagtacacacatatatatcttcatcagacttgagacatgtaattacgtatatatagatgtttatattgggagcaaggcgcattgtaatggaccgaaaaatgctgaattgaagagatcttgctgtcgatactgaaatggctgcatcgatgag

SEQ ID NO: 114541 - DNA, 1754 bp, Zea Mays
gagactgcgagacacaggcagcggaaaaatagagacaaagaaggggcaggagcagtgacctgccacaccagaggaaacgagagagagaaaaacagcccgatctcctcctcccactccgatcgccctaccgatcgccgcctcgtgaagcttccctgttccctccccgccgcccgcgacgccatggagccgccgcacaccgaggaggccgccgctgctgcagcaggaggagcagagggcggcagcgcaagcccgggcaccggcctcgaagggccgatgctgaggctggggctggacggcggcggggagggggaggacggggagctgggggctggggaggaggcggacacgtggcttccagagcggcctggcgaggcggactgtggctactacctccgcacgggcgcctgcggcttcggggagcgctgccgctacaaccaccctcgcgatcgtggcggcactgagtttggtggaggtgccaagaatggagcagcacaatactttccagaacgacaagggcaacctgtatgtgagtattatttgaagactgggacttgtaaatttggttccaattgcaaatatcaccatcctaagcaagatggatctgtgcaatctgttatattaaacaacaatggattccctctacgcccgggtgagaaagaatgctcctactatatgaagactgggcaatgcaagtttggttctacatgtaaatttcatcatccagaatttggtggtattccggtaacccctggcatatatccagcattacaatcagcatctgtgccctccccccttacatatgcttcaaattggcaaatgggaaggtcacccgcagttcctggatcatatatagcaggctcatacactccaatggtgctcccatctggaatggttccattgcaaggatggagcccttatccggcaccggtaaatcatgtagcatcaggtggagcacaacaaactattcaagctggaccattatatggtataggacaccatggatcttccactgcaattgcttatggtggtacatacttgccatactcttcctcaactggacaatcgagcaataatcatcaagaacatggatttcctgagagaccagggcagcctgagtgtcaatattatatgaggactggagattgcaaattcggaactacatgtaaatataaccatcctcaagattggagcacttctaagtccaattacatgttcagtcatctctgccttccgcttcgtccgggtgctcagccttgcacgtactatgcccaaaatggatattgcagatatggaattgcatgcaaatatgatcacccaatgggtacactaggctacagttcatctgctttacccctatctgacatgccaattgctccctaccctatgggcttctctgttgcgacgttggctccatctccatcttccccagaatatatctcaaccaaagatccatctatcaaccaagtagcatcaccagtggcggcacctgaacctgttggagcaatcttgccaaaaggggtattccctccggataccattatgcgaactcagacttctacaagtgttggcagttcaagccctggtggtggtcgctgatttttctgagctggtgggagtgatcctatcagcacaatttttttctgtcacttgacacaggtacctttagcctccgattgtatttttcatcatctcgttaaaacatactgctgccgacaaatgattattatcttgctttattgatatcagttctgata

SEQ ID NO: 114542 - DNA, 4491 bp, Zea Mays
tagacattggctagcattttctggaaagttaagtttgctatatgccaagatcaattatattctgcttaggaagtacacaaggttgttttgcaaggcatgtttgttgctttcaagttatttacatttttgccttgagtccccagccccttgctctaattattttctcgtacctgtgttggcaacaaccaccttgtgagtacatatgcagaacctgtatcacatgctatttatctgttaccctgtttttgctgttttgcctttatgtactgttttcttaccattgattatgcttctatgcaggataaaaagcttcctgaaaattctatacatgacctggcttacgatctcgtcaaagcacttcagttcttgcattctcaaggaattgtatattgtgatctgaagccatcaaacattctgcttgatgaatttggatgcatgaagctgtgtgattttggattagcaaggcgcttaaaagacattgagaaaaccaatcctggagatgtgccacaacccatgaggggaacaccatgctatatggctcctgagttatttcgagatggaggagttcactcatatgcttctgatttctgggcacttggatgtgttttgtatgaatgctatacaggaaggcccccttttgtaggtagagaatttacgcagttggtcaaatctgtaatttctgatcctacaccacctttacctgataatccatcaaggtccttgcaaaatttgattgattgcttactcatgaaagatccggcagaaagattacagtggtctgaattgtgtgaacacaacttctggagaacaagtatcctgatgattcctttacctcctcagcctgcttttgacaacatgattgaactttctgctacaccatatctagctgagagaaatggtgacaaaccttccagacagttgacaccacctaaacatcgtgaaaatattggccttcggaagaaggatgaaaattctactaagccatccatgacacctgttaaaaatgtgcaaagtggcaagaaaaatagtgcaaaaccaaaagctgtgggtttcaaaggggtaaatatcctccgaatgtctcgcattgctaaattgaatttgcaaagggaaagggataaggagaactacaggcgtccgcccacagaaacaactgaaaatgagactgaagttaatatagaaaataatgacatggaacttgattttggtgaaaatccagagggtgatgcacctgatgacaccgatggatcagataatcctggatctgcaggaaatgaaaatcctcaaagcactgacgctaatgaagagaattatatggaaaatcaggttgacatgcttacagatgagggatcagttaagcctgatatcatggtggaaactgagcagaattcttgttcagataacctggatgtggcggcaagtccacctagtagcatgcgaaaagcacatcgtgcaaaggtaactccatgtcctgcaactggttctgagccatctaacatctttgaagcattctggcatccaacagatcttgcagttaaaccagttatgcctattaggaaagcagataaagctgtggacatgatccccacacttccttttgaagctcttacagcaggtgattatactaagttaccaaaggaacagatgaatgcattcaacagtcagatacttcagagtttaagtggaacttatcaggtttcacaaaaacaaaatactatcagatacctggagatgttaagcatgaactcagatgctgcgaacaaaataactaatggaccaattatgttgctactaataaaaatgcttcgactgtcaaaaacttcagtcttgcgtgtccaaattgcctcactcatggggttgctgatacgctattccactgctcttgatgtggagctggcaagttcaggaatttttaatgcactatcagatgggttaagggataaacatgataaactcaggcgattctgtatggcaacactaggagagttattattctatatttctacccagtctgatcaagataacaaggaaatcaatacccaagagtctcctttgaagggtaacaggcctgcaacatcttggcaggttcctagtgctgtaattgcactggtgtcatctatcttgcgaaagggcgaagatgatctagatcagctatatgccttacggacaattgataatatatgtagccaaggaactgaatggacatcccgttttgcatctcaggatgtgattggacatctgtgctacatctataaagcaactggaaagcaagagagtacaaggctcattgcaggatcttgtttggcccgcctctcccgcttcagtccatcatgcattcatttaattctggaaaagatatcattcagggatattgcatccacacttatcaagggaaatggacgtgaacagcagattaatctcaatattctcaattcggcattagttaacagtcacactgtgacaagcatgaaccggtatattctttcattatcagatgacaaacaattggtccctgggctcatttctctgatagaacagggaactgatgttctgcgtgggaaggcctttttgtttgttgctctgctttgcaagaatagtcgaaggtggcttcctcatttcttttgcaatgcaaaattaatatcagctgttgatagatttggaaaagagaaggagggtttcattcatcaatgtacagaagcatttgtgcagttggttgcttctttggtccctggtatccttgaaactgtctccagtgatatacagcagattatgtgtggcaaacgccatggacctgttactgctttagctgggcgagctcatccaaagagcacaattcatctgttccctgtcattcttcgtcttctgggaagtgcatctttcaagcacagagttgtgacaggccatgtattgcttcagttggcaaatcttattaagattttggaggcaccgtttcaggctagggatgatttccaaatgacattgttgcgagttctagaagctgctacagaggagccttctgttatacttgatgaacacacaatattcacaagtcgtatcattccaagcttatctgtcttgtacaacggcaataaagatggtgatgctagatttctgtgtttgaagatactctcagatgtcatgattgtgatcttcagtgactcttcattaacttctgacgaacaaatattaactgatttgaaatcaatctctcagaggcattttctgccactgtacccttcttttgcagaggatgaagatcccatacccatatttgctcaaaaactgctagtaatgctaatggaacatggttatataaaagtctctgatattctacacaaagcaacagtatcccaatgctttgattttttgctaggagatctgtcaaatgcaaatgtaagcaatgtcaagctttgctttgccctggcatctgcacctgagatgaacacccatattctttctcagcttcaagttgttagaaggatagggaacctacttgagtttgtcgctgcaaaagacatggatgattttcttgaaccaaccctggagttttgcagagctttcattattcgtggcactggcagcaacagaagtggtgtcgccctctccgaaaacccagcacttcttgttgacagtgccttcagcatgagtattgctgttgatcaacaaacttgtgtcacggatatatgcgactttggtggcaacatgggtacttttcttgagctagttggcaattcagatccacagataagtaatttagcgtcagactgtgtagtgttgttatccaaggcagcacctcgagaggctacagtgggcttgttgacaaatcttcctaaattaagcactgccatggacttgctgaagcatgagagctccctacgtctgattcgcttattatacggcctagccttctcatgcagacaatacttggcccagggaatgatcctgtcaatatcagtgtcagctttgatgcgagttgaagcacttgtttcagttttcaagggctccaatgatagccttcttgctgatgctgcttcttatttgagcgccgaactgcagcgcttacctcgctgtggttgaagctgcaacttgtccaaggaggcaaggatgcacttgtttttgctgtggttgaagctgcaacatgagctgagcaagtgagcaggacatcaagtacaggtactttatatcagtgactgatctcagttgccacaattgctaagtggtagtttcgctcgtaaatgtgcagccagggtgttttatgctatcatttatgtccagttcggggctgctgtatatggtgcttttgaaccatatttggaaggtggctagaaggaaagaacactttgtttcctcgcgactttggttggcaattaccccagtttcatgtaattctgtaatacctgtaatttctctgagaatactgtagttcaatatcatgtgtaaataaatcatctataaatgcatgtgaagttcatgtacagtagctgttaaagagtt

SEQ ID NO: 114543 - DNA, 920 bp, Zea Mays
gcgagcggccgtctcaaaaatcccgcccactctctctctctctcaccaggcacccccattccctccccgtcttcctcccccatttctaccacggcctcggcatcccaagtctcaaacgtcaaacccttacctcatcagcgacgagaggggagccccgcctccgcctcctgcttctctactatgaacaacttccatgtctacgaggccatcggccgcggcaagcactcgacggtgtataaggggcggaagaagaagaccatcgagtacttcgctgttaagagcgtcgacaagttgcagagctccaaggtcctcaacgaggttcggatgctccattccttagaccatgccaatgtcctgaaattttactcttggtatgagacaaccgtacatttctggttagtgttggagtattgcgttggtggagacctgaagggcttgcttgaacaggtttcttgcttgtcaatttagttactgcatgcaattttctctagctctaaaacgatatacagtacatgccatgtctttatgtggttgataaattgtaaccagtctgtttaagttagcaagtactgaccatatacatcaatgcaaaaaaatacaacattattggtttgcacttgctagttgtaattggctacttcaaaataatagtaatcaatgtgaaatgttgaaattaagagctaaaaattatagtacactttggtttgagaaattgattgaacaaatgaacaatcatctacacatgtggctttctatgttattaaataaaggcatagaaaaattgaacagatgcttttatgttctcaatttctcatcagatgcacctcatatgcatatcagatcattgctggccttttggtatcttttgctgttacatcattggtgtactactttaatttcgctttcccctttggattgaa

SEQ ID NO: 114544 - DNA, 1592 bp, Zea Mays
atgtccctgatgaacacccagcgccgggacccgcgcgctgacgacgtgcccgacgaggacgtggaggacgacgaggacgagcgggacgaggcggttaccggcggggctgcctccccgtgtgttcccgtcgcgtcggggccggggccgagatccggcgccgggacgacgagcgcattgataagcttgagccgcggtgacgcgctgtggagcggggacatggaccgagcgcggcggtgcacggacgcgctctggggcgtgaggtcgcggccgcgcgtcggcgcgtggccgcccacacagtcctcgtcgtcgtcgcttccggggtcgagatccgggagtgggggcaggctcgtgcctgccaaagtgccaacgaagaacaaaggatccatccgcggatcggcgatcgcgatggagatcgagcaggcgatgcgcggcagcagcgacgtccggctgcgcgccaagtacgacgccgctgtctacatcgtccgccgcgcctacgccttgtacccgttcgaggagctggctttcagtttcaacgggggcaaagattcaactgtgctgctgcatttgcttcgggccggctactacctccacagagcaagttcaggtggtgacgtggacgacgacagcacggtcctccagaccgtgaagaactgccccatgcggaccatctacttcgaggaccccgatgctttccccgaaatcgactgcttcacgtacgagacggcatcgacgtacggcttgccactggaaagtatcaggacagggtacaagtccggactagaagccctgctcaaggagaagcctaccaaggcgatcttacttggcactagaaacggcgaccccaacgcggttggtcaacaagagttctcccctagctcgcctgactggcctcctttcatgagggtgaaccctatcttggattggtcctacagtgacgtctggtctttcctgttaacgtgcaaggtccaatactgcagcctctatgaccaagggtacacttctattggcagcgtacacaacactgttccaaaccagcttctgcgtgatggcccgggcgggtcgtacaggccggcgtatacgctgtcagatgggagtcttgagagggctggtcgagcaaagaagaccgggaagagagatggctcggctaatggcacgaagaacaacggcaatgaaacgaaacaatagcctatcaactctggttgttctcaggtttattgtgaagaaaaagaatttcgtatgaaaaaaatgacaactgtacatgtgcgcgttcgaaggcaactcactattttatttactacttgattttatgatgtggtgggtgagggaccaagtatcgtgaacgttttctttgtgtgtgtgtgtgtttgggaataatggttcctccaccaaaatatgttctttttaagtgaaaacaacaaacaccatatgctctggtctgtcattgtggtaaagaaacatctccataagttacgacagtattggaaaaatttctaaagtctaatttagggactctaatttcccttgaaaaaatgagtttgccaaactagccttaagggttaatttagaaatttaaattatctccgggattcctg

SEQ ID NO: 114545 - DNA, 645 bp, Zea Mays
gttatttctcaggacttgtccatatattcaaaccaatatagagaccatattatatccatttgcattgtctcactggttatttgaccctttgttgaaccttgctcactgatcattatacactattcaagtatgttcatcatactgaatttcctgttcaacacttagcaaacttgttagacctttaaatgtgttgttatccaaatcaccaaaactcacaaaagggatgaatgcactttcaatctccccctttttggtgattgatgacaacacatttaaagcttacataagatttgataaataagattttgaatcctatgatatagtttcctccccctaaatatgtgcatttcagaaaataccaattttgtacttaaatgccaaaaccacatatttgggtcaaagagtgaagacaacttatatcatactattcatagggtgctttgtgtcataaataaacgtgatgctcatgacatattatgcactcatcaatttccttcatcttatgttttacttatgattcaacccccattttgtcaattatttctcccccttttcaaaagtcttcttacacttagttacataagactaaaggtaagctttaatgcacaatttctccccttttgtcataaatctccaaaaaaaaga

SEQ ID NO: 114546 - DNA, 1782 bp, Zea Mays
caaagcgatgccgcactcgcatcgcacgcaccccgcttgacatggagatgcaagcgcaccaccggatcaagcgtggagacatggaggtacaggagcagagggaggaccggctgagcaggctccccgacgacatcctccactccatcctccgcggtatcccactcaagcacgccgcgcgcaccagcgccctctcgcggcgctgggcgcgcacgtggctccgcgcgctcgcctcctccagggtgctcgatttcaccgaccgcgacttcgcacgcggccaggccccggcgcgggccgcggccacggtgagccgctgcctccagctccacgccgagtacggcgcgccgctcgacgtgttccgcctggcggttacggcgccggcgccggcgccgggcagcaccggcgcgttcgagcgagacgtcgtcgggtgggtcgtgtccgccgtggcgagaggcgccagggaggtggaggtggacctgaggccgccgccgccgccgttggcggcaaaagcggacgccggtgacgaaagtgcggcgttcgtggagctgcctggcgacctgttcgtggccacgaactcgctggcgcgcctcgcgctgggcgggttcaggctccgcgctgtcccggccggcctagcggagggtctccgctcgctctccctcagccacgccgacgtcacagacgaggcggtccgggacatcgtgtccagctgccgggcgctggaggtcctcagtctccagggctgcaacctcctcagatcggttaggatcgacggcgagacgctgcggtccctggagatcgtgcgctgcttgggcgtgcgggagctccgggtcaacgcgccctcgctcgagtcgttcgccttccacggcgacaacgtctactcgacgagcgacgacgacgacgacgacttgtcttctgccgtcgacctgggatccacgccggctctgcgggacgcgtacctttctcacatcggcttcgacgacgccaagaacgcgtacgatgagcgcgagtacgcctactccaacttcttgagctgcgtcgctcatgcccgggttttgacgctctgttccgtcggcttgctgcatctgtgggcacagcttagttatgatccgctcgtggaaattgatatgacgagcgtacaagagctgcagctgctgatgtcctccctaggtgaagacgacgaaggcctccatagcttctccagtttcttcgagctttacccgcttccactcctgggccgcttgtttgtcagcctgcccagccacactgccgaggcgacgacggcactgcccggcgaagtcgtagacgactcaaaaatgatgttttactgctacgacgacgacttcgtccttgaccagctgagctacatcaagctggtgaatttcagagggacgaggttcgagctgcagctgctcgccttcctcctgaagaggacccctgccctggagcagctggtgcttgtcactgtaggagaagagggaggagctccgggagacgagcgcgtcatccaaggctgggtgtcggcgatacaaaaggcgtccccagaggctcagctcaccgtgtgccagtcgagcgaagatcgcagccagaatcctgtgcacacaaggttctaccacgaacttttggaagaataaacgggcaccattgatccctcaacatatacccttcgttgaaagcattaggtgtcgacaatgacatgccgtacttgtaagtactataaagtgcactactgtaactgttgtgaagcaagcagcgataacactatgggggtgtttggttctgtggact

SEQ ID NO: 114547 - DNA, 108 bp, Zea Mays
ggctggaacttgtttgatgattctgcattagtacaacaacaccatagccttttgtcccaagcaagttggggcaggctagagatgaaacccacaagaaacaaagataaa

SEQ ID NO: 114548 - DNA, 1243 bp, Zea Mays
gccgcacgaacgtgcatcctcctccttagagtcatctcctcccgagcggtgggttcggacgcgagccgcagcgacgtcgccgcggagggcctgggcgcggcttccgtgggcggttcgtgcgcgtccagcggcgtggtctcggttgagcggtcgacgacgaccaggcatcgcagccgtgaagagaagaaggccttggtggtggtggtggcggatcatgaatgcgacgacgacttgggcgccggcgagtctgacatctccgaggagctgggtgcgaaccatgaaggaaacagtactgaaggtggcatatcatcggtcgacagcgtttctagcttgctcagtgggataagctaccaagacgttagctctggctgtgcctaccgagcatcctctcatcatcaccatcagaggaggaggacatccaaaaaaagggtgccgaccaactgcgtccttccaaacccggtccagaggcggagaaggtcggtctcagacatgaggcggtggacggtcggagggccgctgaggagtggatggtcgactacgctctccggaaggaagtcaagaggctggctcgtgctcagaagaggaaagttgagatgcttgtccaggccttcgaatcagttctgcccacggtagcaatagcaagcgagaagaagctaatggatacagacacaagacaatcttatactgggacttgattagcttggtgtttggaaaagatcatgcaaatggtgaagcggcaaagaccccagctgatggtgcgagagatatgagtaaggaagagggaactggtaaagatcttacttcatcaacaacctcaggaagcttgaagaggcaaccggtaaagaaatttttagcacattggaggagatagttgggttagatgaggacttgattagcttggtgttttgatttttagtttatgttgggtgaattgaacatcacattgagtagcaagtaatgtgttccaaagatatgtagacatttgagacaaatctgcattattattactattctcgtgatgcatgctgcttgataaattgtagggtgaaaacttgtctctaatctattgcacatgtatatgactcatcaaggtacatgtgcacacaagaaacatgtgtattttgtcatgtacaagttgatgtggttacttccctctaaatatgtaaattccatatataactatccaaacaggatattgaatttgattcatggaaaagaattccattagcatccaaacaaaaaa

SEQ ID NO: 114549 - DNA, 771 bp, Zea Mays
atggctgatgagagagcttgcggccacagcttgaggaagagaggagaagcgccgctgagaaagggagagcgaggctacgagagggacacagacgtgctgatgattgatgggctctctctctttatagctagtagtatagatgccattcctgaagggaaggatgccgccaaaatcaaagaagatgagcagcacactgaggagcagtacaatgagaaggagcacaatgaggctgagcagcacaatgaggaggtagagcacaatgagaaggtggagcacgcgacatgggaccaggccgcgcagcatcaccagaattgggaggacttgtcctttgaatacaagggacaccacactcaggttaaccttacgttgggttctctttgccgccttcactaccctggtatagtgaaggtgtcaaacggtgataccgaggatgaggtgctcgtcagtacctgagacgagtacaagtttaaaaaggaacgaaaccacaccgacagacagggacttgtgcgtaatgacttttgggtatgaattctttattgtttttgttatgtttcttaatattgtaattctatgacttataccattgtatttgtattctttatgttgtagcttcgatatcggttgcctgacggagaggattacatggggcacgctgaacgtgtattccaaaacaatgcaaagaagctggtgaaggatgccatatactatgcgagaattcaggctacaaacctgtattttcaaaagcatccagaagaagcaggccccttgaat

SEQ ID NO: 114550 - DNA, 3959 bp, Zea Mays
tcgacagtgaccggacctcttcgttagggtttcgcgcctcttctcaccgtctgcctactactagggatagacctccggcaaggcctccctcgcgccggcggcgtcagcagcggatatgggtgttccggcgttctaccgatggctggcggagaagtacccgatggtggtggtggacgtggtggaggaggagcccgtagagatcgagggcgtcaaggtgcccgtcgacacctccaagcccaaccccaacagcctcgagttcgacaacctctacctcgatatgaacggaatcatacacccctgcttccacccggaggacaggccctccccaacaacatttggtgaggttttccagtgcatgtttgattatatcgacagactattcgtcatggttcgcccccggaggcttttgtacatggccattgatggtgttgctcctcgtgctaagatgaaccagcagcgctcaagacgattcagggctgcaaaagatgcagctgatgcggctgcagaagaagaacggttacgtgaagagtttgaaagggaaggcagaaagcttcctccaaagcagcaatcacaaacatgtgattcaaatgttattactccagggactgaatttatggctgttttatcagttgctttgcagtattacatccatcgtagattgaattatgatcctggatggaaacaaattaaagttattttgtctgatgccaatgttcctggtgaaggggaacataaaatcatgtcatatattcgtggccaacggaatctgtctggttttaacccaaatacgcgccattgcctgtatggcctggacgcagatctgatcatgctagctttggcgacacatgaagtacacttctcaatactgagagaggtagtttatacacctggacagcaggataaatgcttcttgtgtggtcaggtgggacatctagcagcaaactgtgaaggaaaggtgaaaagaaaagctggggagtttgatgagaagggtggtgctattgttcccaagaagccctatcagttcttgaatatatggaccctgcgggaatatttagaatacgagttcagaatgccaaacccacctttcaagattgattttgaacgcattgttgatgatttcatcttcatgtgcttctttgttggcaacgattttcttccacatatgccgacgctagagatccgtgagggagctattaatttgctaatggcagtgtacaagaaggaatttccctcaatgggtggatatttaactgattcttgcacgcctgatctgagcagagttgagcacttcattcaagcagttggttcatatgaggacaaaatatttcagaaaagagcacgtttgcatcagcgtcaagcggaaaggataaaacgggaaaaagctcaagcaaagcggggtgatgatctggatccccatgttagggatgaccttattgtacctattcaacgttttcaagggtctcgcctagcctctggggctgtacctgtgccatatgagcagaatggatcccataaagacaataaagaaaggaatagtcgagctcggaaagctgcacgagtatcaacgtcaggttccagcattgcctcagccttagttgaagctgaaaatgacctcgaagcccaagaatgtgaaaacaaagaagaactgaagtcaatgcttaaagatgcacttcgcgagaaatctgatatttttaattctgacaatccagaggaggataaggtgaaacttggagaaccaggatggagggaaaggtactatgaagagaaatttggggcaagaacacccgagcagattgaagaaatacgcagagatgttgttctcaaatacacagaaggattgtgttgggtaatgcactactattatgaaggggtatgctcatggcaatggttctacccttatcattatgctccgtttgcttcggatctaagtggattgggccaacttaatattaaatttgaacttgggacaccattcaaaccttttgatcaacttatgggtgttttcccagctgcaagtgcccatgcgctaccgctacagtatcgacgattgatgaccgatccaaattcaccaataattgatttttatcctacagattttgaagtagatatgaatgggaagagatattcttggcaagggattgcaaaactaccgtttattgatgaagatcgtttgttggctgagataaaaaaagttgagcatactttgacgcctgaagaagcaaggagaaacagtatcatgtgtgatatgctttttgtgaatgggtcacatccactttcgccttatatctactctctcaacagcaaatttgggcatctgcctgacaaaaggagaaatgaaattaaagaaaaacttgatccttctgctagtggaggaatgaatggatacataacactttgcagtggggatccatgccctcctatctttaggtctcctgtggacgggctggaggatattatggacaatcaagtgatatgttcaatctacaatcttccagaccatcataagcacatagcccagccgccagttggtgttatcatgcccaagaagattgttgaagccggtgatctgaaaccacctccagtgctgtggcatgaagatagtggcaggcggcctcatgataatagcaacaggcaaaacccatctggtgccatatcaggccgtcaacttggagaggcagctcaccgacttgtcataaacagcttaaatgctcagggtagggggcaacatagtggcacatcaatgccatatcgaactataatgaatggcttgcatcatctggatgtagcgtcccctgtcagcaatcaaggcatgcgtccacaagtggggcagtctgccggacctcctggttggtatgttcctaggggtagtgtatcaaatggtcaaccaccagcttatgcatcatcaggatcaggtcattatcagtatgaaagttcggggcattcacaatatgaacaaggtaaccatggaaggcaacaatctcacccatatgcaagagatggcttccatgatacacgaggaagggttccacctgcatatgggtaccagcagagcaacatgtatccatcgggtcctggattgtatgggcaacctccatcagcatatcctggggttcatggtggaggctaccaaccccctccatatggcggaggccagcagtggcagcaacaatcatatagttcgtatgccgtgcgaggcccctacggaggcaggccaccacccacaagggctgattcagggtcacagcaaccacagaaccgttatggtgctttagacagaagtaacaaccggaggccttcatctggatacagaagataatagtttgtgacccagtttatgttataactcaaagtttgttatcagtaaagcttcgagtaactcagctaaagcataggcggaatagtctgctaagtcttgtgaccttcaagcagttagggggtggccatcaaagatattgggaggcaaaatttgtatgctagtgcagactttcaggtactagcggttttgatcgccattgaagcagctaggtttgcggcatctcagaggttttgtgaagcaagatttgtatactactgttatcaacgggccatcaggtactggtggctggtcgccattctttatctgtagctgccatttgtttagaagatgtcataaacggccctggggtttaaataggtcccattgagaatatttttgaaggacgtttactctgagacttgacaagttttgggggcattttgatatcagataaatgtatgcaggagtgcagttttgatgatgtgtgtattccaagtcattaattaaagtgtgacgtgtctattgccaggcgaggaaggaaacgttacgctttgcacttatcccgttccaaattacaagtgatttcaagaaaaaaaattcagctttcttggagagtcctaaattactacctccattctcaaatattatttgttgttcgctaatt

SEQ ID NO: 114551 - DNA, 3865 bp, Zea Mays
ctcttcgttagggtttcgcgcctcttctcaccgtctgcctactactagggatagacctccggcaaggcctccctcgcgccggcggcgtcagcagcggatatgggtgttccggcgttctaccgatggctggcggagaagtacccgatggtggtggtggacgtggtggaggaggagcccgtagagatcgagggcgtcaaggtgcccgtcgacacctccaagcccaaccccaacagcctcgagttcgacaacctctacctcgatatgaacggaatcatacacccctgcttccacccggaggacaggccctccccaacaacatttggtgaggttttccagtgcatgtttgattatatcgacagactattcgtcatggttcgcccccggaggcttttgtacatggccattgatggtgttgctcctcgtgctaagatgaaccagcagcgctcaagacgattcagggctgcaaaagatgcagctgatgcggctgcagaagaagaacggttacgtgaagagtttgaaagggaaggcagaaagcttcctccaaagcagcaatcacaaacatgtgattcaaatgttattactccagggactgaatttatggctgttttatcagttgctttgcagtattacatccatcgtagattgaattatgatcctggatggaaacaaattaaagttattttgtctgatgccaatgttcctggtgaaggggaacataaaatcatgtcatatattcgtggccaacggaatctgtctggttttaacccaaatacgcgccattgcctgtatggcctggacgcagatctgatcatgctagctttggcgacacatgaagtacacttctcaatactgagagaggtagtttatacacctggacagcaggataaatgcttcttgtgtggtcaggtgggacatctagcagcaaactgtgaaggaaaggtgaaaagaaaagctggggagtttgatgagaagggtggtgctattgttcccaagaagccctatcagttcttgaatatatggaccctgcgggaatatttagaatacgagttcagaatgccaaacccacctttcaagattgattttgaacgcattgttgatgatttcatcttcatgtgcttctttgttggcaacgattttcttccacatatgccgacgctagagatccgtgagggagctattaatttgctaatggcagtgtacaagaaggaatttccctcaatgggtggatatttaactgattcttgcacgcctgatctgagcagagttgagcacttcattcaagcagttggttcatatgaggacaaaatatttcagaaaagagcacgtttgcatcagcgtcaagcggaaaggataaaacgggaaaaagctcaagcaaagcggggtgatgatctggatccccatgttagggatgaccttattgtacctattcaacgttttcaagggtctcgcctagcctctggggctgtacctgtgccatatgagcagaatggatcccataaagacaataaagaaaggaatagtcgagctcggaaagctgcacgagtatcaacgtcaggttccagcattgcctcagccttagttgaagctgaaaatgacctcgaagcccaagaatgtgaaaacaaagaagaactgaagtcaatgcttaaagatgcacttcgcgagaaatctgatatttttaattctgacaatccagaggaggataaggtgaaacttggagaaccaggatggagggaaaggtactatgaagagaaatttggggcaagaacacccgagcagattgaagaaatacgcagagatgttgttctcaaatacacagaaggattgtgttgggtaatgcactactattatgaaggggtatgctcatggcaatggtaatttagctgctcaagttagccaaatatatcaaattatgcagaggttctacccttatcattatgctccgtttgcttcggatctaagtggattgggccaacttaatattaaatttgaacttgggacaccattcaaaccttttgatcaacttatgggtgttttcccagctgcaagtgcccatgcgctaccgctacagtatcgacgattgatgaccgatccaaattcaccaataattgatttttatcctacagattttgaagtagatatgaatgggaagagatattcttggcaagggattgcaaaactaccgtttattgatgaagatcgtttgttggctgagataaaaaaagttgagcatactttgacgcctgaagaagcaaggagaaacagtatcatgtgtgatatgctttttgtgaatgggtcacatccactttcgccttatatctactctctcaacagcaaatttgggcatctgcctgacaaaaggagaaatgaaattaaagaaaaacttgatccttctgctaggttaactaagctcaatattgttgttgttcgacaaagtttaacacctgctattattttgtacagtggaggaatgaatggatacataacactttgcagtggggatccatgccctcctatctttaggtctcctgtggacgggctggaggatattatggacaatcaagtgatatgttcaatctacaatcttccagaccatcataagcacatagcccagccgccagttggtgttatcatgcccaagaagattgttgaagccggtgatctgaaaccacctccagtgctgtggcatgaagatagtggcaggcggcctcatgataatagcaacaggcaaaacccatctggtgccatatcaggccgtcaacttggagaggcagctcaccgacttgtcataaacagcttaaatgctcagggtagggggcaacatagtggcacatcaatgccatatcgaactataatgaatggcttgcatcatctggatgtagcgtcccctgtcagcaatcaaggcatgcgtccacaagtggggcagtctgccggacctcctggttggtatgttcctaggggtagtgtatcaaatggtcaaccaccagcttatgcatcatcaggatcaggtcattatcagtatgaaagttcggggcattcacaatatgaacaaggtaaccatggaaggcaacaatctcacccatatgcaagagatggcttccatgatacacgaggaagggttccacctgcatatgggtaccagcagagcaacatgtatccatcgggtcctggattgtatgggcaacctccatcagcatatcctggggttcatggtggaggctaccaaccccctccatatggcggaggccagcagtggcagcaacaatcatatagttcgtatgccgtgcgaggcccctacggaggcaggccaccacccacaagggctgattcagggtcacagcaaccacagaaccgttatggtgctttagacagaagtaacaaccggaggccttcatctggatacagaagataatagtttgtgacccagtttatgttataactcaaagtttgttatcagtaaagcttcgagtaactcagctaaagcataggcggaatagtctgctaagtcttgtgaccttcaagcagttagggggtggccatcaaagatattgggaggcaaaatttgtatgctagtgcagactttcaggtactagcggttttgatcgccattgaagcagctaggtttgcggcatctcagaggttttgtgaagcaagatttgtatactactgttatcaacgggccatcaggtactggtggctggtcgccattctttatctgtagctgccatttgtttagaagatgtcataaacggccctggggtttaaataggtcccattgagaatatttttgaaggacgtttactctgagacttgacaagttttgggggcattttgatatcagataaatgtatgcaggagtgcagttttg

SEQ ID NO: 114552 - DNA, 3282 bp, Zea Mays
cgcctcttctcaccgtctgcctactactagggatagacctccggcaaggcctccctcgcgccggcggcgtcagcagcggatatgggtgttccggcgttctaccgatggctggcggagaagtacccgatggtggtggtggacgtggtggaggaggagcccgtagagatcgagggcgtcaaggtgcccgtcgacacctccaagcccaaccccaacagcctcgagttcgacaacctctacctcgatatgaacggaatcatacacccctgcttccacccggaggacaggccctccccaacaacatttggtgaggttttccagtgcatgtttgattatatcgacagactattcgtcatggttcgcccccggaggcttttgtacatggccattgatggtgttgctcctcgtgctaagatgaaccagcagcgctcaagacgattcagggctgcaaaagatgcagctgatgcggctgcagaagaagaacggttacgtgaagagtttgaaagggaaggcagaaagcttcctccaaagcagcaatcacaaacatgtgattcaaatgttattactccagggactgaatttatggctgttttatcagttgctttgcagtattacatccatcgtagattgaattatgatcctggatggaaacaaattaaagttattttgtctgatgccaatgttcctggtgaaggggaacataaaatcatgtcatatattcgtggccaacggaatctgtctggttttaacccaaatacgcgccattgcctgtatggcctggacgcagatctgatcatgctagctttggcgacacatgaagtacacttctcaatactgagagaggtagtttatacacctggacagcaggataaatgcttcttgtgtggtcaggtgggacatctagcagcaaactgtgaaggaaaggtgaaaagaaaagctggggagtttgatgagaagggtggtgctattgttcccaagaagccctatcagttcttgaatatatggaccctgcgggaatatttagaatacgagttcagaatgccaaacccacctttcaagattgattttgaacgcattgttgatgatttcatcttcatgtgcttctttgttggcaacgattttcttccacatatgccgacgctagagatccgtgagggagctattaatttgctaatggcagtgtacaagaaggaatttccctcaatgggtggatatttaactgattcttgcacgcctgatctgagcagagttgagcacttcattcaagcagttggttcatatgaggacaaaatatttcagaaaagagcacgtttgcatcagcgtcaagcggaaaggataaaacgggaaaaagctcaagcaaagcggggtgatgatctggatccccatgttagggatgaccttattgtacctattcaacgttttcaagggtctcgcctagcctctggggctgtacctgtgccatatgagcagaatggatcccataaagacaataaagaaaggaatagtcgagctcggaaagctgcacgagtatcaacgtcaggttccagcattgcctcagccttagttgaagctgaaaatgacctcgaagcccaagaatgtgaaaacaaagaagaactgaagtcaatgcttaaagatgcacttcgcgagaaatctgatatttttaattctgacaatccagaggaggataaggtgaaacttggagaaccaggatggagggaaaggtactatgaagagaaatttggggcaagaacacccgagcagattgaagaaatacgcagagatgttgttctcaaatacacagaaggattgtgttgggtaatgcactactattatgaaggggtatgctcatggcaatggttctacccttatcattatgctccgtttgcttcggatctaagtggattgggccaacttaatattaaatttgaacttgggacaccattcaaaccttttgatcaacttatgggtgttttcccagctgcaagtgcccatgcgctaccgctacagtatcgacgattgatgaccgatccaaattcaccaataattgatttttatcctacagattttgaagtagatatgaatgggaagagatattcttggcaagggattgcaaaactaccgtttattgatgaagatcgtttgttggctgagataaaaaaagttgagcatactttgacgcctgaagaagcaaggagaaacagtatcatgtgtgatatgctttttgtgaatgggtcacatccactttcgccttatatctactctctcaacagcaaatttgggcatctgcctgacaaaaggagaaatgaaattaaagaaaaacttgatccttctgctagtggaggaatgaatggatacataacactttgcagtggggatccatgccctcctatctttaggtctcctgtggacgggctggaggatattatggacaatcaagtgatatgttcaatctacaatcttccagaccatcataagcacatagcccagccgccagttggtgttatcatgcccaagaagattgttgaagccggtgatctgaaaccacctccagtgctgtggcatgaagatagtggcaggcggcctcatgataatagcaacaggcaaaacccatctggtgccatatcaggccgtcaacttggagaggcagctcaccgacttgtcataaacagcttaaatgctcagggtagggggcaacatagtggcacatcaatgccatatcgaactataatgaatggcttgcatcatctggatgtagcgtcccctgtcagcaatcaaggcatgcgtccacaagtggggcagtctgccggacctcctggttggtatgttcctaggggtagtgtatcaaatggtcaaccaccagcttatgcatcatcaggatcaggtcattatcagtatgaaagttcggggcattcacaatatgaacaaggtaaccatggaaggcaacaatctcacccatatgcaagagatggcttccatgatacacgaggaagggttccacctgcatatgggtaccagcagagcaacatgtatccatcgggtcctggattgtatgggcaacctccatcagcatatcctggggttcatggtggaggctaccaaccccctccatatggcggaggccagcagtggcagcaacaatcatatagttcgtatgccgtgcgaggcccctacggaggcaggccaccacccacaagggctgattcagggtcacagcaaccacagaaccgttatggtgctttagacagaagtaacaaccggaggccttcatctggatacagaagataa

SEQ ID NO: 114553 - DNA, 96 bp, Zea Mays
gttgttgtgtctgacttgtatacggggagagagcttgtgtctatctatacgaaatgtagaataagggtaaattggtcctttgaaaatccagaatgt

SEQ ID NO: 114554 - DNA, 3377 bp, Zea Mays
agccttggaaatgcgggtggttggacgccttcgagtacaactgaccctttttttttcttgaataggtgatagggacctgggaactccaagctgctcttaagcaatgtatgggggtgctctccggaggcagctcccgcatccagcgtttcccttcgtattatgctctgcgaacatttgaccgagcatgggagtgcaggaggtatcaccagcagataaaggaaccgggccagaatgatagagtagccatactggttcatctgctggctttgcataatacccgaacatggatggcaaatcagggaacatagtgcagagtctgcctgatacgctgtcatccctcatggggctcaacaagtacctcgcacccagaaccagctatatcgaatcggtgtctcacatcatcgaggagttgtcaccaaccaaaccgaagatgaaagtaatggttcacacggctcaaaatatttgttctgatgatacagattcagatgctgaagctgcaaaggttcaagaggaactggttttgctggatggtaaactaaagcagataacgctgcagaggaggcagtcactaaataactatttggatctgaaagggaatataagggtgttctgtcgtgtgaggccttttcaccatgaagaaaattatcaatccagaactctgtacaccctggatgagagtaatatattcctaaaagttgctgagaccaagataaagcaatacaagtttgacaaggttttcaaccaatgctcaacacaaggtgatgtatttgctgaagtggaaccagtgataaaatcagctttagatggctataatgtttgtatatttgcctatggtcagacaggtagtggaaaaacttataccatggcaagcctacagatctaggtgtcataccacgtgggattcaagcactgtttgatcgaacttcagagagcaacagaaggtttctgttcactttcagtatgctcgagatatatatgggaaatttgcgagacctgctagttccaagaggcaaggcacaaggttttaagaaggtaccaagcctttccattaaaacagatccagatggcggcatcgagattgaaaacctagtggcagttactgtcagtagttttcatgaagtgaaaagactatatgaagtggggacccactttagatcaacagcttccactatggctaattctacatcaagcagatctcactgtttgattcgtatttcattgacctcatttgacgcaccagagaggaaaagagcaagaaacaaattatggatgattgatctaggtggaagtgaaaggcttgtaaagacaaaggcaactgggaaaaggctcaaggaaggcaaagccataaatctgtcgctgtcagccctagcggatgtcatagatgcactacagaccaaaaaatcccacatcccttataggaatagcaagctcacacaaattcttaaagattctataggatgtgagtccaaaacgcttatgcttgttcatatccgtccaaatgaggatgatttgtgtgagagcatctgtaccttgggttttgcgacaagagtcagaagtattcgcctggaaaatgaagaaccacaagaagtaaaagcaagaaaggaacatttattaatggaattagaaaaggagatcagtgatctagaacaagaatgtgaaggtattgttagaaagattaagaagctcaaggagacaatggagcattttaaagggcatcagccatctgctgaagcaaattttgacatttcacatccatccagtgaagagctgaaaactgtcatgccaaagaatacaaaggattcaaagaatcggagagatgtttcttccaggttacccaggtttatgaagccaacagcgtctagccagcacaggatagacttaaataaacaaatacctgttagtaacaagacaaaaccaccagtgccaccaaagagaaggccttcctcagtttatgctgagtctgtaaggctgccagtaaatgctgcaacttggcagtcagaatgtagttctgaatgcagtatctccatgacaagtgacatgaactggataccaagtatacaagatgggacagaatgcagccaggatacatcagaatatgagaccaaacaagtgattttctcagaacatgagaaaccacctcagagtcaagtgatttcatttgaagaatcaggggagatgcaggataaaaccaaggaaatgggcatcatagacattgacagctggattcatcaacagatcattgaaaacactggcatatgtcagtgtcacactgaaaggacgctagatgttattgaagtaaatgaatatgaaacttacaattctaatactgcttcaccagttcagaaggaatttactaatggttccaaaccctcactggatgaagatagcaacctgaacctttgtccccccacgcaaaacacagaagatagcaaggaaaccagggctgttaatcaattcacaaaaacagaattatacactcctccattaaaagaactttgcggcagtgccaaaattaaggaacataagaatgaaaagcttgggcgtcatggaagttgcagaagatcactgcaggaagagctcggcaattgcaagccagagcagccagacaaggaaccaaaagctgatccaaacatgcaacctgaaattgaattccatgacaacaaacaccatataggtaagttgacaaaattcattcaagctcttcgaacagcatggattggtgctcttcttggactaggcaccatgaaccttggattagagcaagacttcttcaagagcttaacactctgatttaactagaacttcaccatttcaaaaggatttaacgaagctgtatacagtttcagtaagagtatctacttcaggaatcaatgggcactgtatatataaggctgcaatgaaatgtaagctgccaatatgccagtggcagatgaattgctagtctgaaatggtttctttggttataaatggatagtttcaagacaagtgggaaaatgggaagaaatgtgatatatgacaaattttgaattaacattatcaatttatcataaatgataaatgattgttacagtatgcagagaagctattgcaatatctgaactgagggagagttatttacatctccaggccatttcagtcgattgagcactatatatgccaaacataacatgtcacagcaatgactcttactatgatatctttcatatagcaacttttgagctaaagctgtaaagtagtggcgtattttcttccaaatatatgcaaaaggagaagcatgtagactggggtgccaaccataagtttatatcaagtcacgaggccctgcagctgattttcatacctgtaaggtccatatacttcaataaaattaaatcttt

SEQ ID NO: 114555 - DNA, 673 bp, Zea Mays
attcaattgaactggttgagtcgaccagttttatgacgaactattgaactggttttgtgatgaacaagaaataaatttgatgtttgcacattgatttagtactttagacaatagactaatattggaccagggaaccagtagcttgacccattcgaactccgatccgacttttcattctatgaattttatggttttgcatccacttccacagttctaccaacgggcatattgtgcctaattgggaagctccatatatactgattttgctcttctctacaggtaagttgacaaaattcattcaagctcttcgaacagcatggattggtgctcttcttggactaggcaccatgaaccttggattagagcaagacttcttcaagagcttaacactctgatttaactagaacttcaccatttcaaaaggatttaacgaagctgtatacagtttcagtaagagtatctacttcaggaatcaatgggcactgtatatataaggctgcaatgaaatgtaagctgccaatatgccagtggcagatgaattgctagtctgaaatggtttctttggttataaatggatagtttcaagacaagtgggaaaatgggaagaaatgtgatatatgacaaattttgaattaacattatcaatttatcataaatgataaatgattgttac

SEQ ID NO: 114556 - DNA, 2159 bp, Zea Mays
cagtaagttccatgaccagttattccaactattctacgtatagctgaagcagccagaagagttcctgagggtagcatgatgccatccatggcggatcctactgtcgaggctccgaatgctgaagccaacaggaggcaataacctgcaggttgcatactctcatgtgctttgctctcagccccttcagttcactgcttttgtgtgggttggggactgtttcctctgacggggacacggccgcggcgatggatatgaggcacagaatccgcagtctttgaaggtgatagggacctgggaactccaagctgctcttaagcaatgtatgggggtgctctccggaggcagctcccgcatccagcgtttcccttcgtattatgctctgcgaacatttgaccgagcatgggagtgcaggaggtatcaccagcagataaaggaaccgggccagaatgatagagtagccatactggttcatctgctggctttgcataatacccgaacatggatggcaaatcagggaacatagtgcagagtctgcctgatacgctgtcatccctcatggggctcaacaagtacctcgcacccagaaccagctatatcgaatcggtgtctcacatcatcgaggagttgtcaccaaccaaaccgaagatgaaagtaatggttcacacggctcaaaatatttgttctgatgatacagattcagatgctgaagctgcaaaggttcaagaggaactggttttgctggatggtaaactaaagcagataacgctgcagaggaggcagtcactaaataactatttggatctgaaagggaatataagggtgttctgtcgtgtgaggccttttcaccatgaagaaaattatcaatccagaactctgtacaccctggatgagagtaatatattcctaaaagttgctgagaccaagataaagcaatacaagtttgacaaggttttcaaccaatgctcaacacaaggtgatgtatttgctgaagtggaaccagtgataaaatcagctttagatggctataatgtttgtatatttgcctatggtcagacaggtagtggaaaaacttataccatggaaggcaagcctacagatctaggtgtcataccacgtgggattcaagcactgtttgatcgaacttcagagagcaacagaaggtttctgttcactttcagtatgctcgagatatatatgggaaatttgcgagacctgctagttccaagaggcaaggcacaaggttttaagaaggtaccaagcctttccattaaaacagatccagatggcggcatcgagattgaaaacctagtggcagttactgtcagtagttttcatgaagtgaaaagactatatgaagtggggacccactttagatcaacagcttccactatggctaattctacatcaagcagatctcactgtttgattcgtatttcattgacctcatttgacgcaccagagaggaaaagagcaagaaacaaattatggatgattgatctaggtggaagtgaaaggcttgtaaagacaaaggcaactgggaaaaggctcaaggaaggcaaagccataaatctgtcgctgtcagccctagcggatgtcatagatgcactacagaccaaaaaatcccacatcccttataggatgtgagtccaaaacgcttatgcttgttcatatccgtccaaatgaggatgatttgtgtgagagcatctgtaccttgggttttgcgacaagagtcagaagtattcgcctggaaaatgaagaaccacaagtaagttgacaaaattcattcaagctcttcgaacagcatggattggtgctcttcttggactaggcaccatgaaccttggattagagcaagacttcttcaagagcttaacactctgatttaactagaacttcaccatttcaaaaggatttaacgaagctgtatacagtttcagtaagagtatctacttcaggaatcaatgggcactgtatatataaggctgcaatgaaatgtaagctgccaatatgccagtggcagatgaattgctagtctgaaatggtttctttggttataaatggatagtttcaagacaagtgggaaaatgggaagaaatgtgatatatgacaaattttgaattaacattatcaatttatcataaatgataaatgattgttac

SEQ ID NO: 114557 - DNA, 3219 bp, Zea Mays
cagtaagttccatgaccagttattccaactattctacgtatagctgaagcagccagaagagttcctgagggtagcatgatgccatccatggcggatcctactgtcgaggctccgaatgctgaagccaacaggaggcaataacctgcaggttgcatactctcatgtgctttgctctcagccccttcagttcactgcttttgtgtgggttggggactgtttcctctgacggggacacggccgcggcgatggatatgaggcacagaatccgcagtctttgaaggtgatagggacctgggaactccaagctgctcttaagcaatgtatgggggtgctctccggaggcagctcccgcatccagcgtttcccttcgtattatgctctgcgaacatttgaccgagcatgggagtgcaggaggtatcaccagcagataaaggaaccgggccagaatgatagagtagccatactggttcatctgctggctttgcataatacccgaacatggatggcaaatcagggaacatagtgcagagtctgcctgatacgctgtcatccctcatggggctcaacaagtacctcgcacccagaaccagctatatcgaatcggtgtctcacatcatcgaggagttgtcaccaaccaaaccgaagatgaaagtaatggttcacacggctcaaaatatttgttctgatgatacagattcagatgctgaagctgcaaaggttcaagaggaactggttttgctggatggtaaactaaagcagataacgctgcagaggaggcagtcactaaataactatttggatctgaaagggaatataagggtgttctgtcgtgtgaggccttttcaccatgaagaaaattatcaatccagaactctgtacaccctggatgagagtaatatattcctaaaagttgctgagaccaagataaagcaatacaagtttgacaaggttttcaaccaatgctcaacacaaggtgatgtatttgctgaagtggaaccagtgataaaatcagctttagatggctataatgtttgtatatttgcctatggtcagacaggtagtggaaaaacttataccatggcaagcctacagatctaggtgtcataccacgtgggattcaagcactgtttgatcgaacttcagagagcaacagaaggtttctgttcactttcagtatgctcgagatatatatgggaaatttgcgagacctgctagttccaagaggcaaggcacaaggttttaagaaggtaccaagcctttccattaaaacagatccagatggcggcatcgagattgaaaacctagtggcagttactgtcagtagttttcatgaagtgaaaagactatatgaagtggggacccactttagatcaacagcttccactatggctaattctacatcaagcagatctcactgtttgattcgtatttcattgacctcatttgacgcaccagagaggaaaagagcaagaaacaaattatggatgattgatctaggtggaagtgaaaggcttgtaaagacaaaggcaactgggaaaaggctcaaggaaggcaaagccataaatctgtcgctgtcagccctagcggatgtcatagatgcactacagaccaaaaaatcccacatcccttataggaatagcaagctcacacaaattcttaaagattctataggatgtgagtccaaaacgcttatgcttgttcatatccgtccaaatgaggatgatttgtgtgagagcatctgtaccttgggttttgcgacaagagtcagaagtattcgcctggaaaatgaagaaccacaagaagtaaaagcaagaaaggaacatttattaatggaattagaaaaggagatcagtgatctagaacaagaatgtgaaggtattgttagaaagattaagaagctcaaggagacaatggagcattttaaagggcatcagccatctgctgaagcaaattttgacatttcacatccatccagtgaagagctgaaaactgtcatgccaaagaatacaaaggattcaaagaatcggagagatgtttcttccaggttacccaggtttatgaagccaacagcgtctagccagcacaggatagacttaaataaacaaatacctgttagtaacaagacaaaaccaccagtgccaccaaagagaaggccttcctcagtttatgctgagtctgtaaggctgccagtaaatgctgcaacttggcagtcagaatgtagttctgaatgcagtatctccatgacaagtgacatgaactggataccaagtatacaagatgggacagaatgcagccaggatacatcagaatatgagaccaaacaagtgattttctcagaacatgagaaaccacctcagagtcaagtgatttcatttgaagaatcaggggagatgcaggataaaaccaaggaaatgggcatcatagacattgacagctggattcatcaacagatcattgaaaacactggcatatgtcagtgtcacactgaaaggacgctagatgttattgaagtaaatgaatatgaaacttacaattctaatactgcttcaccagttcagaaggaatttactaatggttccaaaccctcactggatgaagatagcaacctgaacctttgtccccccacgcaaaacacagaagatagcaaggaaaccagggctgttaatcaattcacaaaaacagaattatacactcctccattaaaagaactttgcggcagtgccaaaattaaggaacataagaatgaaaagcttgggcgtcatggaagttgcagaagatcactgcaggaagagctcggcaattgcaagccagagcagccagacaaggaaccaaaagctgatccaaacatgcaacctgaaattgaattccatgacaacaaacaccatataggtaagttgacaaaattcattcaagctcttcgaacagcatggattggtgctcttcttggactaggcaccatgaaccttggattagagcaagacttcttcaagagcttaacactctgatttaactagaacttcaccatttcaaaaggatttaacgaagctgtatacagtttcagtaagagtatctacttcaggaatcaatgggcactgtatatataaggctgcaatgaaatgtaagctgccaatatgccagtggcagatgaattgctagtctgaaatggtttctttggttataaatggatagtttcaagacaagtgggaaaatgggaagaaa

SEQ ID NO: 114558 - DNA, 954 bp, Zea Mays
atgcgccgtcgcgggctccccagtttctgccacggcgtcgcctccacgtccacggtgcagcagctccacggcaaggagctggccgccggcagcgccgcgggcgcggacgcagcatcctcatccttcgttgccgtgccgccgtcggtggttggctcgtgcgtggcggagaccgaggtgagcggcaccgggggcgacggtggttcggcggtcacgcttgagcagatgatcctgcagctggacctggaggaggaggccgccaggaaggcgcggcgcgcggcgacgggggaggggacgtcggcggaggagcagggctggtgcccgcggcggatgtcctgcgtcgacggcggcccggccgaccacgtgctccggtcggcgcgggacgcgctgacccagtacccgcgcttctcgctcgacggccgggacgccatgtaccgcgcgtcgttcagcggcttctaccagggcatgggccgcgacggcgacggcgccaaccgcccggcgagggcttcggtgtgctgcgccgccggcgccgggtgcgcggcgctcgcgtgcagcgtggggggatacgagatggacctggagcggacgctgcggttgcccgcaaccgtcgccggggaaagcgtggtgtggtgcaagcccggcgtggtggccaagctaatggggctggaggccgtgcccgtgccgctcaggggagggctccggcggaggaaggcgggcgggcatccggtggcagcttgtggcggcgtcggcggtggcgtcaggaagcagaagccgcggaggacggggcaagacgagctggccttgcacagggagaagctcttcatggcgttgcatggctacgatcttgtcgggacgggcgggcgtcacgctggaggcctccggtccggcgtggcgcccgatgtcgtcggtgccatggacgcggacggcgatgtctgggagtcacggcttcgtcgttga

SEQ ID NO: 114559 - DNA, 2296 bp, Zea Mays
agacaagcagtgcacccacagcttcctggctgcttcgtccatctcgcccaatcgccctcccctactactcgctccccaccaccctacctctgacgcttcccccacccagtgccgccactcccagccttgactcgtccgctgggccgaacaccgccctcgagctcttcgctgtgccccctccaggctcctcttccccgcacggcggcgccgtcctggtggttacgcggggcgccggtcgggcgcgatcggccgtgcgggcacctgggctccggagagacattgtaaaatggaagtactgcgtgatatgcacctgccaccaggatttggattccatccttctgatatagaacttgtttctcactatctcaagaggaaaatacttggtcagaaaattgaatatgatcttataccagaggtggatatatacaagcatgaaccatgggatttacctgcaaagtgcaatcttccaatcaaggacaacaagtggcatttctttgcctctcgtgacaggaagtaccctactggctctaggtcaaacagagcaacactagctggttactggaaatcaactgggaaggaccgagccataaagctgaacaagctaactctaggaacaaaaaagacgttagtttttcatgaaggccgaccaccctctggcagacgcactgagtggattatgcatgagtactacatcgacgagaatggatgtaaagtcagccctgatatgaaggatgcctttgtcctctgccgtgttactaaaagaaatgactggtcattagataatgataatgaggtgggcaacaggagctctcatctggaacaaccagatgctgctacatcagttgtcagcactgtaaagccagaagatgttgctgcctcagtcatctgtccagaagaatcgaaccatgcaactacaccaattggcagtgctgaactatctaatgatgttgctcaggcagctatcactcctgcagctatcactcctgattcaacaactccaaatggtggtaatgaactggaaacatggctgcaagaactgttggatccttcacctccatttaaccttgtagctgatactggttctgctgacgtgtgtccgactgaacaatatgctgaatcatcaaatttgcagaatcctggttccatggctccgaatatcagaccaggccatgctagccctatccaggatggaacagatgccacagactacctattcacagatgatcttcccgaggatctttacagtatgttgtatcctggtactgaccagttcaatgatagcatatttttggaacaaactggccaggaaggtaataacaatcagacaaactacatgatggggattggttcatatgttcttccaaacaactttgagaatgaaactccgaatgccgaattgcagttagatcatgaaaataacaagatggatatgtcaaatgaaaataatgacaccggaattacaatacgaaggcgcagagcaactgcgcctcccgctaacatttcactagcagctggcaagattaaaatgcaggttggaattaagaggatggttacgagtaattcagaatctatcaaccagactatgaagtttacagataacagtggtcgtcgtcttgatctcaggactgatgttgagcaccagaagaaaaatgcaaacaatgtcatttctgccaagcagtctgatgcagccaatcatgaagcccacagcaaccaaggttatctcgagggcttcaaaagatgttcatcagctggattcagggcatacatatttgttgccctttttgtggttggagttgctgctctagtgctgcattatcaccgctccaatgccaacctatgaatttgaatcatggaacatcagcatgcttgattgtagctctagtggtcagtggcagcattggcttcgtccttggagtagttcgctagctttgcttgcattggaaatggaatagaaatcgagttcctcagcttatctcactgggattactggaaatacatttttgcgaccactgattcccagttatctccactttttttttgtggtgctgtacatattaattttttttctctcttcttttgatcgtctagttgctaccaacgggtgcctatcgaaaatcgaaaaagaaaaaaagtgggaaaagggttggtcgtatgaacaaaaaagatgtagcttcagactgttactactatccttagctttgtaaatctgaaccatgtttgtacagtacactacatagtggagcggccactgcattgtctgcattctcttttattatagcatctttttgaacaagtg

SEQ ID NO: 114560 - DNA, 2889 bp, Zea Mays
atggatcccgcgcccgatcagctctctatctccgcctctgccccgttccccaccatcccggctgcctcaagccccaggccccgcgccgcgaggacgcggcgccatgccgcgcccttccggtcggaccaccccaccgccgggagctggcgctccgggatcgatctcccgcgccgtccttcggcctccgccttttcccagcaggagcgttatccttccgtggcctcctggagcgcctctcgcgacgccaactttgtgttcgggagcggcgtggccggtgcgccggagatgaggaggagcttctcgtctggatccggtgaggcatcgttggctgaactttcgtacgcagttcacaggttcgcgttggacggttctggcaggccaagcgacattgacgctcccggaggagaaggtacgcttccagtgacagactccggtggtcgctttggggcccgtggatgcagttccactttgtatgagggcttctctctggattctattcaccatcagactgagcacctcgatgaagaacgtggagtcccgtctcaaaccatacaatgcgagagtgtggggatgcgatcattagcttcaccaacccgcactgatgagaatgctcccattgaatttgcaaagagaggggacagcttgcccattcaagattctgtggatcaaagtagaaattctggacatgatgctaatgcccaccatgatttctttgtttttggtggacatgctgggtccaatagcttcgctaccaatgcaactcaaactaataccagtaagctaaatacttcagtttctaaagatggaaattgcatcaagttcattttgcaggatgcaaagcatgtgtttggttcaagtgacaatgatcttccaggttcggaaccttgtgaaatttctaccacggtggaaacaccggatactataacctctagctttggatctgaagatgggatcgtgacggtttcttccataaaggtgccttgcaatattgaagtagtaccagcctcagaacttgttgaatgtcagccatttgatgagaaatctttcacctttgacgaccaaaatgtaccatataggaacaaaggaggggttaagggtatgggcatgaacagaggagcttttatgccaaataagtcctcagcaaaccaagcttcttttgaatcagtctcaagaagcgggcattgttctaaaaaagtgtctcctgaagaaaagttaaatttgaaagaagccagtagctctttgcaaacaacagaaagtgggcatgctgaagcagagtttacgtctgcagcaaatacggaacattctggtcaatccgatttcatattttctgcatcaactttccatcaaagcatgttgcacccgcaaagacgacataacaagaaaaaaagtggaggaatgggtaatcatgctagctctattcaaagtctcccttcatccgccattggactcgcatgctcagaagtctcaggaagtcagcaatgtgtggatttagctgccaagtggactgaatacaacaaaatagaacctaacagggttgcaatcagcagaggagccagatgctcaacatcagaaaactttggagaccatgacaattgtgaaacatggcgattaaggggaaaccaagcatatgcagaaggattgttaactaaggctgaagaatgctatacccatgggattgattctttttctccaaatgaagtttcaagaaaagcattaatgctgtgctacagcaatcgagcagctactcggatgtctctgggtaagatgagagatgccctatctgattgtcaagaagccattgatattgattccagttttctcaaggcacacgccagagccgccaactgcctacttgccctgggggatgttgaagaagcacaaaaggcttttgagatgtgtttaaagtctaatcatctatcaagcttggaccataaaattgtagaagaggcttctgatggtctacaaaaagctaagaaaatatctggtttaattagtcattctgaggagtatcttataaagaaagcatttgacaagatacccagtgccttacaaatgatctctgatgctttgtccataagtatttattcagataagttaatggagatgaaagcagaagcactgttactgttgcagcgatatgaagaagtaattcggttttgcgaagaaactctttatgtagcagaaagaaatagtgtgtgtttgtgtcttgacaagcagtcagaaagcaataacatggtcaacaatacttgctttgtgaaattgtggcgttatcatcttattgctaagtcatatttcttccttggaaagcttgaagaggctaaccagttcttaaagaagaatgatcaaataaaagtcatggggtgcagaacactggctaggtgtgggaatcaatctcaggactcaattttatcattctccatggctatctctgaactattgcggcttaaagctgctggcaatgaagcattccaatctggtaaatatttggaggctgtggaacattatactgctgctttgatgagcaatagcgagtccctacgctttttagcagtctgcttttgtaaccgtgcagcagcatatcaagcaatgggtcaaattttagatgcaattgcagattgttcactggctatagcccttgatgcagattatgctaaggctatttccagaaggtctagtttgtatgaacttataagggactatggccaggcagcaaatgatctccgtaggttgattgctcttcttgagaaacaactgcaagaagatatgaccatgccagtagagaggtctgagagtattcgtaacaatctgaatcgagccaatcttcggttttcttctttggagcgggatgccagaaaaggggcttcattaaatatgtatttgatattgtaa

SEQ ID NO: 114561 - DNA, 1259 bp, Zea Mays
atcgactgcgggagcttatccgcactccgaccggtgccacctccaagctgagcccgctcctagactcccagtcccctccgcagtccgcaccgccgcctcgccatggaggcagctgccgccgccttcttgtcccctccccgcgtcgccctcgacgtccgcacactcttctccccgccccgttgcctccccgtctcgccctcatcccagctccgcctcgctgcccgcccccgcgcgctcgccggcgccaagccgcggttcctgagcccccatcgagaacccgccgtcgacggcggtcgcggcgccagggatgtcgtcgcgatggtggtgccgttcctgaggggggccgcgtgggagcagccaccgccggacttggcctcgttcctgtacaagaaccggatcgtgtacttggggatgtgcctcgttccgtcggtcacggagctcatgctcgccgagtttctctacctccagtatgacgacgccgagaagccaatctacatgtacatcaattccactggcaccaccaagaatggcgagaagttaggctatgagacagaagctcttgcagtatatgatgctatgaggtatgttaaagttcctattttcactctgtgtgtcggtaatgcatggggagaagctgctttactcttagctgctggcgctaaaggtaaccgtgccgcacttccatcatcgacaataatgataaaacagccaattggtcgctttcaaggtcaggcaacagacgttgacattgcaagaaaagagattcgaaatgtcaagatagaaatggttaagctgctggcaagacacattggtaaaccaatggaagagattgctcgggacatcaggcgtcctaaatactttagccccagtgaagctgtggattatggcatcatcgacaaggtgatatacaacgagaaaatccaggaagatggcggtgttgtgtcagaactcaaaagatcaaatttgatatagcgttctttttccacaagtagacacgtctttgtatgtttagtggtcattcacgtgtgtttgagtattgagtagttaccactcgatcactcagtacctggttgtagaggcgtagagcacatagccaatgcattgaacaagcatttccttcccccctctgccgtttcaacgctgtattgcccttacccaacgggcgtgctgaaagatgaattttggtaggttgttgatcgttggtgccctgtttgcgtgtttgttttagcccgcggggaagcatatagtttgatcgtggc

SEQ ID NO: 114562 - DNA, 1191 bp, Zea Mays
tggggaactcccatcgctactcgccagtggctgagacagagcccgggcttctttcgtcggtgtcctcttggaccgcgccacgcagttctctaagctcactatccccttctcgaagaaggttgtggccgtatgggaaggcggtgaagaaggagaatacagaggagaagcttgctggcggcgacaggaagccgatatacatgcatgtgtgaccccagcaggttcacgccacggactgccacatctcgccgagcaggtggtgccgttcctgaggggggccgcgtgggagcagccaccgccggacttggcctcgttcctgtacaagaaccggatcgtgtacttggggatgtgcctcgttccgtcggtcacggagctcatgctcgccgagtttctctacctccagtatgacgacgccgagaagccaatctacatgtacatcaattccactggcaccaccaagaatggcgagaagttaggctatgagacagaagctcttgcagtatatgatgctatgaggtatgttaaagttcctattttcactctgtgtgtcggtaatgcatggggagaagctgctttactcttagctgctggcgctaaaggtaaccgtgccgcacttccatcatcgacaataatgataaaacagccaattggtcgctttcaaggtcaggcaacagacgttgacattgcaagaaaagagattcgaaatgtcaagatagaaatggttaagctgctggcaagacacattggtaaaccaatggaagagattgctcgggacatcaggcgtcctaaatactttagccccagtgaagctgtggattatggcatcatcgacaaggtgatatacaacgagaaaatccaggaagatggcggtgttgtgtcagaactcaaaagatcaaatttgatatagcgttctttttccacaagtagacacgtctttgtatgtttagtggtcattcacgtgtgtttgagtattgagtagttaccactcgatcactcagtacctggttgtagaggcgtagagcacatagccaatgcattgaacaagcatttccttcccccctctgccgtttcaacgctgtattgcccttacccaacgggcgtgctgaaagatgaattttggtaggttgttgatcgttggtgccctgtttgcgtgtttgttttagcccgcggggaagcatatagtttgatcgtggc

SEQ ID NO: 114563 - DNA, 1743 bp, Zea Mays
ctacctcctagtcctagttccgcgccctctcgtccgcgaacaacacgcaacgcccccgcagccatagccgcagcacttggcctagctagccgcatgagggagttctcgtacgaggaggtggaggcggcgacgggcgggttcgcggagaagaacctggtgggcaagggcagccacggcaccgtgtacagggccaggctgaggagaggcggcaggacggccgtcgtcgccgtgaagcggccgtcgcacgcgcagggggaggccaagctggccaacgagatcgccgtgctctcggccgcgccgcgccacccggggatcatcggcatcgtcggcgtgtcgccatcgccatcgccacagccgcagccggggcctcggctgcccccgctgctcgtcatggagttcatgcccagcgggtcgctgcacgacatgctgcaccggtcgccgcggccgccgccgtggccgcaccgcgtggagatcgcgctagacgtggcgcgcgccgtgctggcgctgcacggcgcggcgccgcgcgtcatccaccgcgacgtcaagtccgccaacgtcctgctcggccgcgacggccgcgcccgcctcgcggacttcggcctcgccgtgagcgtcgtcaaggccgccgccgccgtccacgcagacgcgccacctggaccagcagccgaggaaggctcggcgtcggcggggccgccaccagccccggcgggcacgatcgggtacctggacccctgctacacggagcccgggaagctgggccccgcgagcgacgtgttcagcttcggcgtggtgctcctggagctggtgagcgggcgcaaggtgatggacgtggactcgtgcccgtcgtccatcgtgtcgtgggccgcgccgctgatcggcgccgggcgcgcgcgggaggtgctcgacgcccgggtggccgccgcgccactgccgcccacggaccgcgcgctggcccgcgtcctcgccgtggctgcgcggtgcgtgtcggagagcgtggagcggcggccggccatggacgaggtggtggccgagctgcgcgagtgcgccgggtggcggcacgggcaccgcggcggcggcgtggtggggcgggtgtgcgagcgcgtcgcggcgtggggccagcgcgtgatgaggaggggcagcaaccgggtggtggcgaccaaggtcgagtgcaccgagcactccgacagcgacgtggcacccgatcgccagggctcctcctcctcctcgtgcacgaccgcggctctgccaccgcatcggaacgacggcatgatgaccggcgcacccaaatgaaccgaagacgaggtagtgtctgacccaattcgagagcgagtttggatctcgttttcagtagttgacaaactacggatgtttactggtaatagtactagctagttacgtgtcacgagactattactgtcacagcagttatggcatgcgctaatctgcgactgctttgctcgttccgatcatcgcacagtctcgagatatggattgacgtcgtggtgtatatacgcttcttcattttacgtttggaatttgggtttcttttgtctttgaccatcatgctggcagtggcatgcatgaggcccgacggcattcatcggcagcacaggtagcggtatactagcatcagaaggacatttcctttcttctccggttcaggcatgagatggccattatgtgaacaccgaagaaccggcagctgctgaactgccctgcacgcatgctgcatgcaaccgtagt

SEQ ID NO: 114564 - DNA, 1623 bp, Zea Mays
ccatgcctcatctgatgacaaatagacagagagaatcagagaaagaggccaagaaaatcacaagaggaggggaacagcaatcctagttccgcgccctctcgtccgcgaacaacacgcaacgcccccgcagccatagccgcagcacttggcctagctagccgcatgagggagttctcgtacgaggaggtggaggcggcgacgggcgggttcgcggagaagaacctggtgggcaagggcagccacggcaccgtgtacagggccaggctgaggagaggcggcaggacggccgtcgtcgccgtgaagcggccgtcgcacgcgcagggggaggccaagctggccaacgagatcgccgtgctctcggccgcgccgcgccacccggggatcatcggcatcgtcggcgtgtcgccatcgccatcgccacagccgcagccggggcctcggctgcccccgctgctcgtcatggagttcatgcccagcgggtcgctgcacgacatgctgcaccggtcgccgcggccgccgccgtggccgcaccgcgtggagatcgcgctagacgtggcgcgcgccgtgctggcgctgcacggcgcggcgccgcgcgtcatccaccgcgacgtcaagtccgccaacgtcctgctcggccgcgacggccgcgcccgcctcgcggacttcggcctcgccgtgagcgtcgtcaaggccgccgccgccgtccacgcagacgcgccacctggaccagcagccgaggaaggctcggcgtcggcggggccgccaccagccccggcgggcacgatcgggtacctggacccctgctacacggagcccgggaagctgggccccgcgagcgacgtgttcagcttcggcgtggtgctcctggagctggtgagcgggcgcaaggtgatggacgtggactcgtgcccgtcgtccatcgtgtcgtgggccgcgccgctgatcggcgccgggcgcgcgcgggaggtgctcgacgcccgggtggccgccgcgccactgccgcccacggaccgcgcgctggcccgcgtcctcgccgtggctgcgcggtgcgtgtcggagagcgtggagcggcggccggccatggacgaggtggtggccgagctgcgcgagtgcgccgggtggcggcacgggcaccgcggcggcggcgtggtggggcgggtgtgcgagcgcgtcgcggcgtggggccagcgcgtgatgaggaggggcagcaaccgggtggtggcgaccaaggtcgagtgcaccgagcactccgacagcgacgtggcacccgatcgccagggctcctcctcctcctcgtgcacgaccgcggctctgccaccgcatcggaacgacggcatgatgaccggcgcacccaaatgaaccgaagacgaggtagtgtctgacccaattcgagagcgagtttggatctcgttttcagtagttgacaaactacggatgtttactggtaatagtactagctagttacgtgtcacgagactattactgtcacagcagttatggcatgcgctaatctgcgactgctttgctcgttccgatcatcgcacagtctcgagatatggattgacgtcgtggtgtatatacgcttcttcattttacgtttggaatttgggtttcttttgtctt

SEQ ID NO: 114565 - DNA, 269 bp, Zea Mays
gataagatttttgcttcttctaacacctcatacctactaggcgacaagcttgtgggggaagttagtagacttgtggtggcagaagcttgtatccaagctttagacattgaatctactgaaggacaaatatatgagattaattcaatgaaggtactcatttttttctagaacaggtacacttagttattggtaattagctaattatcatcaggtctcaatcgagatataatgtgatttagtcccttaaaaattttcaatctctttatttt

SEQ ID NO: 114566 - DNA, 1418 bp, Zea Mays
gcacaactacaaggcgtgcggtcgaagaaagaaattgatgaaacggcggctgaggccgcaagcttctcactggccgcaagcaaaccgaacgaacccaaccgaagcgagagctgagcaaggcagaggcgtcgtgaccggcgatggagcggctgcagcggatctttggcgcctccggcatggggcagccgccgacggactcgccgctgctcgattcctccgagcaggtctacatctcctccctagcgcttctcaagatgctcaagcacgggagggctggggtgcccatggaggtcatgggcctcatgctcggcgagttcgttgacgactacaccgtcagggtcgtcgacgtcttcgccatgccgcagagcgggactggtgtcagcgtcgaggccgtcgaccacgtcttccagacaaacatgcttgacatgcttaagcagaccggcaggccagaaatggttgtaggttggtatcactcacatcctggcttcggatgctggctatcaggcgtcgatatcaatactcagcagagttttgaagctttgaaccctagagccgttgctgttgtgatagaccccatccagagtgtgaaggggaaggtggttattgatgcattccgcctcattaatcctcagaccatgatgcttggccaggagccacgtcagacaacatcaaatgttgggcacctaaataagccatctattcaggctcttatccatgggttgaatagacactactattcaattgcaatcaattaccggaaaaatgagcttgaggagaaaatgctgttgaacttgcacaaaaagaaatggaccgatgggctaattttgaagaggtttgacactcactcgaaaaccaacgagcagactgtccaggaaatgctaaacctagccataaagtacaacaaggcagtgcaggaggaggacgaactgccacctgagaaacttgcgatagcaaatgtgggtcggcaagatgcaaaaaagcatttggaagagcatgtgtcgaatttgatgtcatcaaacatagttcagaccctaggaaccatgctcgacacggttgtcttttagtctactaataatattgttgtcccaaactgaaacatagccacactatggaagcatgacacatgcaatgagcttgaggccagatacattttggttctaaggtttgtttatgaatggatttgtctacatttcattgtcgttaaacttcctgccttttctatcaaagcttcagtgcgttctagttatgtttaagccaaggtggctccagatgtcagttgggatgtcattgccctgggagaactgtgtaatgtgattatgacctgtggcagataacttatttttgagttaatccatcaccacttcattctttattgttagttgtttagtactaatatgtggaatggagtcatcccatca

SEQ ID NO: 114567 - DNA, 1444 bp, Zea Mays
gaaccggcccagcggtggccaaaccggcccgggcacaactacaaggcgtgcggtcgaagaaagaaattgatgaaacggcggctgaggccgcaagcttctcactggccgcaagcaaaccgaacgaacccaaccgaagcgagagctgagcaaggcagaggcgtcgtgaccggcgatggagcggctgcagcggatctttggcgcctccggcatggggcagccgccgacggactcgccgctgctcgattcctccgagcaggtctacatctcctccctagcgcttctcaagatgctcaagcacgggagggctggggtgcccatggaggtcatgggcctcatgctcggcgagttcgttgacgactacaccgtcagggtcgtcgacgtcttcgccatgccgcagagcgggactggtgtcagcgtcgaggccgtcgaccacgtcttccagacaaacatgcttgacatgcttaagcagaccggcaggccagaaatggttgtaggttggtatcactcacatcctggcttcggatgctggctatcaggcgtcgatatcaatactcagcagagttttgaagctttgaaccctagagccgttgctgttgtgatagaccccatccagagtgtgaaggggaaggtggttattgatgcattccgcctcattaatcctcagaccatgatgcttggccaggagccacgtcagacaacatcaaatgttgggcacctaaataagccatctattcaggctcttatccatgggttgaatagacactactattcaattgcaatcaattaccggaaaaatgagcttgaggagaaaatgctgttgaacttgcacaaaaagaaatggaccgatgggctaattttgaagaggtttgacactcactcgaaaaccaacgagcagactgtccaggaaatgctaaacctagccataaagtacaacaaggcagtgcaggaggaggacgaactgccacctgagaaacttgcgatagcaaatgtgggtcggcaagatgcaaaaaagcatttggaagagcatgtgtcgaatttgatgtcatcaaacatagttcagaccctaggaaccatgctcgacacggttgtcttttagtctactaataatattgttgtcccaaactgaaacatagccacactatggaagcatgacacatgcaatgagcttgaggccagatacattttggttctaaggtttgtttatgaatggatttgtctacatttcattgtcgttaaacttcctgccttttctatcaaagcttcagtgcgttctagttatgtttaagccaaggtggctccagatgtcagttgggatgtcattgccctgggagaactgtgtaatgtgattatgacctgtggcagataacttattttgtttcttctacatgcattgacacgaatctgagtgatcttgtaaactcttcggagcatggccggccttgag

SEQ ID NO: 114568 - DNA, 1624 bp, Zea Mays
gaaccggcccagcggtggccaaaccggcccgggcacaactacaaggcgtgcggtcgaagaaagaaattgatgaaacggcggctgaggccgcaagcttctcactggccgcaagcaaaccgaacgaacccaaccgaagcgagagctgagcaaggcagaggcgtcgtgaccggcgatggagcggctgcagcggatctttggcgcctccggcatggggcagccgccgacggactcgccgctgctcgattcctccgagcaggtctacatctcctccctagcgcttctcaagatgctcaagcacgggagggctggggtgcccatggaggtcatgggcctcatgctcggcgagttcgttgacgactacaccgtcagggtcgtcgacgtcttcgccatgccgcagagcgggactggtgtcagcgtcgaggccgtcgaccacgtcttccagacaaacatgcttgacatgcttaagcagaccggcaggccagaaatggttgtaggttggtatcactcacatcctggcttcggatgctggctatcaggcgtcgatatcaatactcagcagagttttgaagctttgaaccctagagccgttgctgttgtgatagaccccatccagagtgtgaaggggaaggtggttattgatgcattccgcctcattaatcctcagaccatgatgcttggccaggagccacgtcagacaacatcaaatgttgggcacctaaataagccatctattcaggtaagtactaagtaatattgtatcatatcttggcctgcatgacaggttttttctatcgcacaatgcatgggggctgtcttacccccgcaagtcaagtttttttttaaaaaatattgtatcatatgaacttgttttgttcctttattaaaaaatgatttgaccatatctgttctttatcaggctcttatccatgggttgaatagacactactattcaattgcaatcaattaccggaaaaatgagcttgaggagaaaatgctgttgaacttgcacaaaaagaaatggaccgatgggctaattttgaagaggtttgacactcactcgaaaaccaacgagcagactgtccaggaaatgctaaacctagccataaagtacaacaaggcagtgcaggaggaggacgaactgccacctgagaaacttgcgatagcaaatgtgggtcggcaagatgcaaaaaagcatttggaagagcatgtgtcgaatttgatgtcatcaaacatagttcagaccctaggaaccatgctcgacacggttgtcttttagtctactaataatattgttgtcccaaactgaaacatagccacactatggaagcatgacacatgcaatgagcttgaggccagatacattttggttctaaggtttgtttatgaatggatttgtctacatttcattgtcgttaaacttcctgccttttctatcaaagcttcagtgcgttctagttatgtttaagccaaggtggctccagatgtcagttgggatgtcattgccctgggagaactgtgtaatgtgattatgacctgtggcagataacttattttgtttcttctacatgcattgacacgaatctgagtgatcttgtaaactcttcggagcatggccggccttgag

SEQ ID NO: 114569 - DNA, 1396 bp, Zea Mays
gaaccggcccagcggtggccaaaccggcccgggcacaactacaaggcgtgcggtcgaagaaagaaattgatgaaacggcggctgaggccgcaagcttctcactggccgcaagcaaaccgaacgaacccaaccgaagcgagagctgagcaaggcagaggcgtcgtgaccggcgatggagcggctgcagcggatctttggcgcctccggcatggggcagccgccgacggactcgccgctgctcgattcctccgagcaggtctacatctcctccctagcgcttctcaagatgctcaagcacgggagggctggggtgcccatggaggtcatgggcctcatgctcggcgagttcgttgacgactacaccgtcagggtcgtcgacgtcttcgccatgccgcagagcgggactggtgtcagcgtcgaggccgtcgaccacgtcttccagacaaacatgcttgacatgcttaagcagaccggcaggccagaaatggttgtaggttggtatcactcacatcctggcttcggatgctggctatcaggcgtcgatatcaatactcagcaggtctatgcaaatccacttgttctctaaaagggatcttttggaatggtctatcaaaacaggatagctgctgtcattgcactgtactatatgtcatgtcaacgtcattataaacactgatgtgttttttaataaagcatggatatgatattatgatatgttgtactataattgatcaactgtaggcaccagtcagcttctccctctctatccccctattgcctgttttcaatttcactaccttcattgtgtatttgtgtaggttccatcaccctgaaagttgtggatgaactcatcttgttgagttttgaagctttgaaccctagagccgttgctgttgtgatagaccccatccagagtgtgaaggggaaggtggttattgatgcattccgcctcattaatcctcagaccatgatgcttggccaggagccacgtcagacaacatcaaatgttgggcacctaaataagccatctattcaggctcttatccatgggttgaatagacactactattcaattgcaatcaattaccggaaaaatgagcttgaggagaaaatgctgttgaacttgcacaaaaagaaatggaccgatgggctaattttgaagaggtttgacactcactcgaaaaccaacgagcagactgtccaggaaatgctaaacctagccataaagtacaacaaggcagtgcaggaggaggacgaactgccacctgagaaacttgcgatagcaaatgtgggtcggcaagatgcaaaaaagcatttggaagagcatgtgtcgaatttgatgtcatcaaacatagttcagaccctaggaaccatgctcgacacggttgtcttttag

SEQ ID NO: 114570 - DNA, 3242 bp, Zea Mays
ccctccaatcgtatattcgtatggctgccgtgacggggtctgtcgtgtctcgtaggagtgacggggtctgtcgtgtctcgacccgacctccctccctccctccttccgttccgatctaaacccgccgaaaccctaatcctcatgcccgccgccatgggcacccccatcctgaccctccccgcaccggatggcaacggcaccggtggcggcgacgccaaccagcagctgctgcaggcgccgccaaagcctccccctcccggcgcgaagacggaccccccggcgacggtggccacccacacgcgcaccatcggcatcatccaccctccgcccgacatccgcgtcattatcgagaagacggctaccttcgtcgccaagaacggacccgagttcgagcgccgcatcatctccctcaaccagggcaacgccaaattcaacttcctccagccctcggatccctaccacgcctactaccagcaccgcgtttccgagatagccgctacgccgcccagcgcggacggcctctcgggcgcggagactgacacggctcccgccgaagcgccagcgtcgaccccggccgacggcgccgccgccgtacccgcagatggcgccgctgtggacacaaaggccgaccactccgcgcccttccgcgtggtgccgccgcccaaggtgctggtgccacccaaggcggagctgtacacggtgcggctgcccgagggtatcacaggggaggagctagacatcatcaagctgaccgcccaatttgtggcgcggaacgggaagaacttcctgacgagcctggcacagcgcgagagcaacaacatgcagttccacttcatccggcccacgcacagcatgttccccttctttacggagctcacagatgcgtactccagggtgctgaggccggcagagggggtgcctgcactgctaaaagagctgagggaggggtcaaaggacctgactacagtgttggagagatgcttgaaccggttggagtgggatcggtcgcaggagcaggcaaggcagcaggcagaggatgaggttgagcaggaacggatgcaaatgtcaatgattgattggcatgattttgttgttgtggagaccattgaatttgcagatgatgagtatgaagggcttcctgtgccacttacattggaggaattgaagcgtcagaagaggatggagaacttgggagaggaggaagccatggatttgactgaacctgctaaggaggttgagatggagatggatgaagaggagatgcaacttgttgaagaaggaatgcgggcagcacagcttgaggagaatgatggaggatcacaagttaatgttgctggtgatgacgagacacctatgaggattgtcaagaactacaagaggcctgaggagaggattcctgccgagagagacccaactaagtttgttgtctcaccgataactggagagctcattcccatcagcgagatggaggaacacatgcgcatctcactcattgatcccaagtacaaggagcagaaagagaggatgttggctaagatcaaggaaactacccttgcacctgatgatgaaatttcacggaacattgttggtcttgctcgcactcgccctgatatttttgggactactgaggaggaggtgtctaacgccgtcaaggcagaaattgagaagaaaaaagatgagcagccaaagcaggttatttgggatggtcattctggtagcattggtcgcactgctactcatgcattatctcagattcagggtggtgaggaacagtttgatgcttccaatgttgatgggagacctgttcctggtccagctccacttgtccgacctggcatgccgctgccccgacctcctcagccacttcctcttgttaatgttcctcgttttattgctccaccagcaccatactctgttccacccccaggttctcatatgcctggagttccacagatgatgcctcacatgcatctgcacccacagcagatacctgggcaaccgccgatggttaggatgccaggtcaaatggttcatatgccaaccagcattcctccgcctcctggccaaactcagtttatgcctggtccaccaccacacacatttgctatgcccccatcatcgcacatgccacacatgatcaatcccattggaatccctcagcctccagcacccccactgcctccgcaacctcctgctgaagagcaaccgcctccacccgatgaacccgaacctaagaggcagagaacagacgatggttctcttatcccagctgagcagttccttgctcagcatcagggtcctgctagcatctctgtatctgtacccaacctcgatgaagggaacttgcgaggccaagttttgcagattcctgttcaatcactgtcagacacagttggtagtctgaaggagcagattgctggagagttacagctccctgctaataagcagaagctgagtgtgaggactagtttcctcaaagacaaccttactcttgcttactacaatgtgggtcctggagtggtgatcaatctaacactaagggagcgtggtgggagaaagaaatgagtcttttggttctcagtgtaatggcaggttaatgattacaactatacatcagcagctatcatggagaacctttgtgctggatcttgctgccataacttccatattgtttttcttttggatgctatgtgcaattatttgtgttatgtgaacgtcgtactttcctctatatcttgatacagttaaatgctgtgaggggttctgcctaatatgttactcgaggttgctactggatgcctactcggtcaagtgctaaattgaatggctgctctagcttcttctactagattcttctgtacaacttcgatggtggtacaatttgttcagtggttattttgaaagaatggcttggcatccatcgcgtcgctgctgctgaaatatctaaagtagaattttttttatttgtttgtataagctgaaatatctgaagtaggactaggaattatttttgtttgttatgtacattctctggtcgtttccctgtgctattgcctattgaactgagctaccctgcaaagattgttgtacgctaaccaggttttttgtactgtatgttctcacaagtcactgtcgtacctgtttttttgggtatagtgtgtgtgttgcatacaactttccagtatacgatattattcgttcccagagcattatgtttgttaatccttacttttgttggtatt

SEQ ID NO: 114571 - DNA, 3090 bp, Zea Mays
ccctccaatcgtatattcgtatggctgccgtgacggggtctgtcgtgtctcgtaggagtgacggggtctgtcgtgtctcgacccgacctccctccctccctccttccgttccgatctaaacccgccgaaaccctaatcctcatgcccgccgccatgggcacccccatcctgaccctccccgcaccggatggcaacggcaccggtggcggcgacgccaaccagcagctgctgcaggcgccgccaaagcctccccctcccggcgcgaagacggaccccccggcgacggtggccacccacacgcgcaccatcggcatcatccaccctccgcccgacatccgcgtcattatcgagaagacggctaccttcgtcgccaagaacggacccgagttcgagcgccgcatcatctccctcaaccagggcaacgccaaattcaacttcctccagccctcggatccctaccacgcctactaccagcaccgcgtttccgagatagccgctacgccgcccagcgcggacggcctctcgggcgcggagactgacacggctcccgccgaagcgccagcgtcgaccccggccgacggcgccgccgccgtacccgcagatggcgccgctgtggacacaaaggccgaccactccgcgcccttccgcgtggtgccgccgcccaaggtgctggtgccacccaaggcggagctgtacacggtgcggctgcccgagggtatcacaggggaggagctagacatcatcaagctgaccgcccaatttgtggcgcggaacgggaagaacttcctgacgagcctggcacagcgcgagagcaacaacatgcagttccacttcatccggcccacgcacagcatgttccccttctttacggagctcacagatgcgtactccagggtgctgaggccggcagagggggtgcctgcactgctaaaagagctgagggaggggtcaaaggacctgactacagtgttggagagatgcttgaaccggttggagtgggatcggtcgcaggagcaggcaaggcagcaggcagaggatgaggttgagcaggaacggatgcaaatgtcaatgattgattggcatgattttgttgttgtggagaccattgaatttgcagatgatgagtatgaagggcttcctgtgccacttacattggaggaattgaagcgtcagaagaggatggagaacttgggagaggaggaagccatggatttgactgaacctgctaaggaggttgagatggagatggatgaagaggagatgcaacttgttgaagaaggaatgcgggcagcacagcttgaggagaatgatggaggatcacaagttaatgttgctggtgatgacgagacacctatgaggattgtcaagaactacaagaggcctgaggagaggattcctgccgagagagacccaactaagtttgttgtctcaccgataactggagagctcattcccatcagcgagatggaggaacacatgcgcatctcactcattgatcccaagtacaaggagcagaaagagaggatgttggctaagatcaaggaaactacccttgcacctgatgatgaaatttcacggaacattgttggtcttgctcgcactcgccctgatatttttgggactactgaggaggaggtgtctaacgccgtcaaggcagaaattgagaagaaaaaagatgagcagccaaagcaggttatttgggatggtcattctggtagcattggtcgcactgctactcatgcattatctcagattcagggtggtgaggaacagtttgatgcttccaatgttgatgggagacctgttcctggtccagctccacttgtccgacctggcatgccgctgccccgacctcctcagccacttcctcttgttaatgttcctcgttttattgctccaccagcaccatactctgttccacccccaggttctcatatgcctggagttccacagatgatgcctcacatgcatctgcacccacagcagatacctgggcaaccgccgatggttaggatgccaggtcaaatggttcatatgccaaccagcattcctccgcctcctggccaaactcagtttatgcctggtccaccaccacacacatttgctatgcccccatcatcgcacatgccacacatgatcaatcccattggaatccctcagcctccagcacccccactgcctccgcaacctcctgctgaagagcaaccgcctccacccgatgaacccgaacctaagaggcagagaacagacgatggttctcttatcccagctgagcagttccttgctcagcatcagggtcctgctagcatctctgtatctgtacccaacctcgatgaagggaacttgcgaggccaagttttgcagattcctgttcaatcactgtcagacacagttggtagtctgaaggagcagattgctggagagttacagctccctgctaataagcagaagctgagtgtgaggactagtttcctcaaagacaaccttactcttgcttactacaatgtgggtcctggagtggtgatcaatctaacactaagggagcgtggtgggagaaagaaatgagtcttttggttctcagtgtaatggcagttaaatgctgtgaggggttctgcctaatatgttactcgaggttgctactggatgcctactcggtcaagtgctaaattgaatggctgctctagcttcttctactagattcttctgtacaacttcgatggtggtacaatttgttcagtggttattttgaaagaatggcttggcatccatcgcgtcgctgctgctgaaatatctaaagtagaattttttttatttgtttgtataagctgaaatatctgaagtaggactaggaattatttttgtttgttatgtacattctctggtcgtttccctgtgctattgcctattgaactgagctaccctgcaaagattgttgtacgctaaccaggttttttgtactgtatgttctcacaagtcactgtcgtacctgtttttttgggtatagtgtgtgtgttgcatacaactttccagtatacgatattattcgttcccagagcattatgtttgttaatccttacttttgttggtatt

SEQ ID NO: 114572 - DNA, 2913 bp, Zea Mays
ccctccaatcgtatattcgtatggctgccgtgacggggtctgtcgtgtctcgtaggagtgacggggtctgtcgtgtctcgacccgacctccctccctccctccttccgttccgatctaaacccgccgaaaccctaatcctcatgcccgccgccatgggcacccccatcctgaccctccccgcaccggatggcaacggcaccggtggcggcgacgccaaccagcagctgctgcaggcgccgccaaagcctccccctcccggcgcgaagacggaccccccggcgacggtggccacccacacgcgcaccatcggcatcatccaccctccgcccgacatccgcgtcattatcgagaagacggctaccttcgtcgccaagaacggacccgagttcgagcgccgcatcatctccctcaaccagggcaacgccaaattcaacttcctccagccctcggatccctaccacgcctactaccagcaccgcgtttccgagatagccgctacgccgcccagcgcggacggcctctcgggcgcggagactgacacggctcccgccgaagcgccagcgtcgaccccggccgacggcgccgccgccgtacccgcagatggcgccgctgtggacacaaaggccgaccactccgcgcccttccgcgtggtgccgccgcccaaggtgctggtgccacccaaggcggagctgtacacggtgcggctgcccgagggtatcacaggggaggagctagacatcatcaagctgaccgcccaatttgtggcgcggaacgggaagaacttcctgacgagcctggcacagcgcgagagcaacaacatgcagttccacttcatccggcccacgcacagcatgttccccttctttacggagctcacagatgcgtactccagggtgctgaggccggcagagggggtgcctgcactgctaaaagagctgagggaggggtcaaaggacctgactacagtgttggagagatgcttgaaccggttggagtgggatcggtcgcaggagcaggcaaggcagcaggcagaggatgaggttgagcaggaacggatgcaaatgtcaatgattgattggcatgattttgttgttgtggagaccattgaatttgcagatgatgagtatgaagggcttcctgtgccacttacattggaggaattgaagcgtcagaagaggatggagaacttgggagaggaggaagccatggatttgactgaacctgctaaggaggttgagatggagatggatgaagaggagatgcaacttgttgaagaaggaatgcgggcagcacagcttgaggagaatgatggaggatcacaagttaatgttgctggtgatgacgagacacctatgaggattgtcaagaactacaagaggcctgaggagaggattcctgccgagagagacccaactaagtttgttgtctcaccgataactggagagctcattcccatcagcgagatggaggaacacatgcgcatctcactcattgatcccaagtacaaggagcagaaagagaggatgttggctaagatcaaggaaactacccttgcacctgatgatgaaatttcacggaacattgttggtcttgctcgcactcgccctgatatttttgggactactgaggaggaggtgtctaacgccgtcaaggcagaaattgagaagaaaaaagatgagcagccaaagcaggttatttgggatggtcattctggtagcattggtcgcactgctactcatgcattatctcagattcagggtggtgaggaacagtttgatgcttccaatgttgatgggagacctgttcctggtccagctccacttgtccgacctggcatgccgctgccccgacctcctcagccacttcctcttgttaatgttcctcgttttattgctccaccagcaccatactctgttccacccccaggttctcatatgcctggagttccacagatgatgcctcacatgcatctgcacccacagcagatacctgggcaaccgccgatggttaggatgccaggtcaaatggttcatatgccaaccagcattcctccgcctcctggccaaactcagtttatgcctggtccaccaccacacacatttgctatgcccccatcatcgcacatgccacacatgatcaatcccattggaatccctcagcctccagcacccccactgcctccgcaacctcctgctgaagagcaaccgcctccacccgatgaacccgaacctaagaggcagagaacagacgatggttctcttatcccagctgagcagttccttgctcagcatcagggtcctgctagcatctctgtatctgtacccaacctcgatgaagggaacttgcgaggccaagttttgcagattcctgttcaatcactgtcagacacagttggtagtctgaaggagcagattgctggagagttacagctccctgctaataagcagaagctgagtgtgaggactagtttcctcaaagacaaccttactcttgcttactacaatgtgggtcctggagtggtgatcaatctaacactaagggagcgtggtgggagaaagaaatgagtcttttggttctcagtgtaatggcaggttaatgattacaactatacatcagcagctatcatggagaacctttgtgctggatcttgctgccataacttccatattgtttttcttttggatgctatgtgcaattatttgtgttatgtgaacgtcgtactttcctctatatcttgatacagttaaatgctgtgaggggttctgcctaatatgttactcgaggttgctactggatgcctactcggtcaagtgctaaattgaatggctgctctagcttcttctactaggtctttgagacgcctctatattaagaatgcagatttctgttttctattcaacgttatgtttttt

SEQ ID NO: 114573 - DNA, 5241 bp, Zea Mays
gtaatattgccacacagttgttgataggccaattcacctccataagccatatactcagaaaaacccctgatatatattattaatgagccaataagcaaacaaaatgacaggcttacataaaaaactactaacattaattacttttcacacagatgcaaatgcagtcaccaaaattatagatgactaaaaaaacttgacaaaatccataaccgaagtgcctaacaattatatttctgagttactatacttacaataaagaaaacacatcaatgactgccacagtcctaaatatgggccacagcatcaggcctagcgctggcgagctgtggcctcatggaggcccaacgtcaggccctggtgagccgtggcctcaccctggcaccgcaaaagaagtgcacgagacagggggcgcagcccctgccgctcctagagttcatcgcgccggagagaacaggaatagatcaaaaatctggaggtagccttcgataaattggaataaataaatcgagttcgtttagaaaaggagattggtttgttaggaatagtgaatccaaatctgtaaggactcttctagtttgcttggaatacaagtctaaatctataaggaatcatctagtttgcttggtatacaattctaataaggactatacatactcggcaatgtatccgtttcaatctaagcaagactagagctattgctcctccctttatctctcactctagtttgcttggaattcaacaacccccccccccaaccgtctcgatcccatgggtaacaattccaccatgtccacagaaatggagtggctcgagaccctcgctgctgatctcaccaagcacatggacaaggtgcaagagcaccttgccaaggtcgacgtctgcctgggcaacatgaagcaaggagggtccaaaaacgagatcgccaccgcagccaaggaaaagctggaatgtgaggctgtcaccaagcagctcgaagtggagaccaagcacgccatagatcaagctcgacgtgccttcctcaaggaggagacagcaaggtcattgaccgtcctcgagcttgtggaagaagtggcaaactgcaccacccacaacatcatcgacatcaactttgccaagccggccaaccttgcggaacagcgcatccaaaccataaagcttgtcaacagtggcaatgagattgctcgccaggaagcctgcctcaacacttggcttcacatcaacaccaagacgttccagatcgacgtcatcttcgacatgccatggttggtcgaccatggcaacatcatctagaactttgtgaccctagagaagcaattctaatgggacgaacataccatcatcttcgtcaatgtccctgaccgttgagcaccatagaatttgcttgttcttcctgtcttatgccaatcctaccggtgcctcgacacccatcacttctcccacgatcatggtctccatcgcagccatgatgtaacatgagcaaggcaattcaaccgtgtcaacctaatgccctcgacaaaatcagcattgtacgacgccatcataggcaatggtactcgagctacgcgccatcaccaccaccatcataggcgggagagctgcatcaacttagtccatggaccaagatctcctcttcttcaacggacaattctacctccccacgacattaccactattgctcgacctcttcgagacacgtcgtcattggcgaaatgaggaatctacgactactagtgttggggttctacacgccaccaacgactgcagccatcacctgcagcttccctatcagcatccttatgatccgtgagtggccgcaaggtatcattccttcgtcaatttcatcttcttcgacatcgccaattgccacttcctcgctaccaagaacacatcaacaccatccatgacttgagacactcgagcctctcgccaaacaacttcaacggggcaagttcatgtttggtgacttgctagacctaacaacaacacaatctatgtgcatcatgttgacaatttgtcgtcgtatggcagccttcatccttcgcagcaacaaggtacatagctttgagagatctccttaagctatgcagatattcactcttgacgtagccatacaccgatcgatcctcacctctagcaactatcgttactactttgagctcatcatcatcaggatccaagacaactagatcttggctaacatcatccacgatcgtctcattgtcaggatctaggcaatcccatttggagaacctcttccctcaaactgcatcaacaactagactataatagagcgcgaggacacgctgagtggagaagggggagatgtcataggcctaaatgtgggctgcagcattgggcctagcgggcaacggaggcccaacaccggccccttgtgaaccgcaatctcaccttgggtgtcgtaaaggaggcgcgtgagtgaggggttgcaacccctgccgccccagaagtccatccagttgaggagaatatggaatagatgaaatctaaagaaagcctttgataagtttggagtaaataaaataaagtttatttaggaaagaatattggtttgttaggaaaggagtgtccaaatctataaagactactgctctagtttgtttttaatacaagtccaataggggctataaatatataggtaatgtaacggtttcaatctaaggctaactctaacaataatatgcaaaaatgggaatccaaatacacgttcgtgttatgcagtcagccgaaagacgagacccaaatatttttgtgcccaaatacacgtttgagaaaatggccatcaatatataggtactctcccacatcacatctaaaatgggtatcgagtttaaattacctgttcgagatgctatagtgtcatttagatatctataatagatttaggtgtcacgataggtactctgttggagttagcctaagcaagcatagagccattgctccctcccatcccctcctctcccaccccacataacagcagcaagcacccccccccccccccgcatggttgtgacaatgacattttaaattttaccgcttgaaccattctagcatggaattatacaaatatagtgacgatgcaaattccttttgctaatattctgaggtatgttctccttttctgaatatattacatgacagatacctaaatttctagtgggttataagcaaaaaaaaacatagagctagatcaacaacccgcaagaccaagaaaaacttatgtaggtacataacaccggacccgtttgtataataggtctgaacattataaaaattctgttgggaaacatacatacacattggaaccatagcaagaaattcaacagtcctcctgatgggaaaagaaactaccaaatgagcattctgcacatactattgaattctaccttgttactcctttagtcctttgtatataactggtagtgcatcaaaatgtaaatggaccttatctagtatcccaaaggtagaggagactactgcaaactgaaaacaattgaacctttcttgtcatctgtcccttccatctcaaaatttattccaagctaacatggcatctgaccttcctacgtaggcgaagttctcatttaaaattgcacaaaacatctatttttatgtccgaagaattttaggcctactattatacacaatgaacaactttggagggttcaatgctagaaacttcctaaatcctaagagaatctttaccaaaacaatcccctctccctgtaaccagcaatgaaaaggattgaagcaaaaaaaacaagctccaacacatcccctttcctaatttttttctcaacctctcaaaatctcctttcttcctcctcatgtcactaagattgtggccttgtgggtccataggataggactggagcaccaccgcaacaccagtgcaccaagcacgaagcacgcaggccccatgccgccgacaccacttcgggcagtcaagtgtgtgggttggccacaccgccacaccactgccacactgggcacgcgggcccagaccgcgctaggcagacgagcacttgggtcgccacattgtcaccttgggcaagcactgaaagagatgggagggagaggaaagagagaacaggaagataaaagaagagagttgcaatgacatgtgggtctcatgaacgtaaaggggatggattttctcaattgctatagaagccctcccctataacatggaattcagttttatcaatccgctatagggaattttaagggaaaaggaagcttaactaaaacattacagattctaaaggtctgtttgtgagctataaaaaaagttgttgtgagctatgtgttggcaaaagattgtaagttttttgttttttggttgaaacaactataaaacttacaccgtctcttcatttccctcgaaacagctataaaatattaaaagtctcactatttccacctatttgggaaagtcgaaagccaaaataagggtccaagaagcggtgaaaattaagttacacgaaaggaactgcttctggaaaagcagtttcaggttctaaacatttggttgagcttcagcttctcattagaaacactttccagaagctgaaccaaacacagcctaatatatggtgcaaggatccacagttcaaagctatgttccaatcacaatccaaagttatggtgtaagacgaaaataattactctaaccacccaacaagtataactcaaatccacactgcacaccagcaacacaacctaaaactacgaacataacatagaaacacatcacttcaggatgcaaaaaaccaataaactgaagcaccaaaaataactagatgagatgacaggagagcagacagagacatcatgacggggatgggctgctcacaggatggatatctaatgtttttgctggaaattccccaattttggcaggaacagaactgtttccgatgaacctttgaaacaggcctatactgtatcgactaccgcgttcaaggctaataaaataaaatgctacagaatcatatcagaactagagtccagcacaatctggcctacagcactacagagtctttaacacgtcaccagaaatcttttgtatgaccattagggttcatagttcagaactgggacggctgggccgcaccggaaaacgacggcggtaccttcgtagcgtggagtaggcctcggcccggcgctgttgcacggcgaggaacccgcggagcaggcccaccaacgcggcagcgctacgcc

SEQ ID NO: 114574 - DNA, 504 bp, Zea Mays
atgtccacagaaatggagtggctcgagaccctcgctgctgatctcaccaagcacatggacaaggtgcaagagcaccttgccaaggtcgacgtctgcctgggcaacatgaagcaaggagggtccaaaaacgagatcgccaccgcagccaaggaaaagctggaatgtgaggctgtcaccaagcagctcgaagtggagaccaagcacgccatagatcaagctcgacgtgccttcctcaaggaggagacagcaaggtcattgaccgtcctcgagcttgtggaagaagtggcaaactgcaccacccacaacatcatcgacatcaactttgccaagccggccaaccttgcggaacagcgcatccaaaccataaagcttgtcaacagtggcaatgagattgctcgccaggaagcctgcctcaacacttggcttcacatcaacaccaagacgttccagatcgacgtcatcttcgacatgccatggttggtcgaccatggcaacatcatctag

SEQ ID NO: 114575 - DNA, 2204 bp, Zea Mays
ttgtagttaaaaaataaataaaaataagacttgattttaattagatccttaaattttattgtaaaatttagatcatattgttacccatattccaactgtcacactgccactgcagagccaccacaccgcgcctgcagctagactccaagaaggaaatctccagcgtccagcccatagtgaatctcccggagtcgcccaaaccacagcgacaaccatggccgccgccgcctgctattcgccagcgcgcatcatcatctcctgctcagccaccaccacctcctcatcgtcgtcagcgcgcacgctgcgcgtcgccgtagtggggggtggccccgcgggcgcgtcggctgccgaggcgctggcctcggcgggggcccggacgttcctcctcgagcgcagccccgcgggcgccaagccctgcggcggtgccatcccactctgtatgctggacgagttcgccatcccgcgggacctcgttgaccgccgcgtcacccggatgcgcgtgctctccccctccaacctcgcagccgacttctcccgcgcgctgccccccggggcgcacatccccatgctccgccgcgaggtgctcgactccttcctccgccgccgcgccgtcgaggccggggccgagctcgtcccgggcctcgtcacctcgctctcgctccccgcggggcccgccgacccctacctcgtccactacatctcgtcctccccggagggcgtgggagcgggacggagcgtgctggaggtggacgccatcgtcggcgcggacggcgccaacagccgcgtggcgcgcgaggtcggggccggggactacacgacggccatcgcgttccaggagcgcatccgcctccccgacgccggcatggcgtactacgacgacctcgccgagatgtacgtgggcggggacgtgtccccggacttctacggctgggtgttccccaagtgcgaccacgtggccgtcgggaccggcaccgtcgccgccaagccggagatcaagcgcctccagtccggcatccgggcgcgcgcgggccccaagatcgccggcggccgcgtagtcaaggtggaggcccacccgatcccagagcacccgcgcccgcgccgcgtcgtggggcgcgtggccctagtcggcgacgcggcggggtacgtcacgcggtgctccggcgagggcatctacttcgcggcaaagtcggggcggctgtgcgggcaggccatggcggaggagtgggcgcgcacgggctccgtgacggaggccgggctgaggcgcggctacctgcggcgttgggacgacgagttcctgctcatgttccggttcctggacctgctgcagcgcgtgttctacggcgggaatgccggccgcgaggcgctggtggagatgtgctccgacgactacgtgcagcggcggacgttcgaaagctacctgtacaagcggatggtgcctggcgagccgtggggcgacctccggctgctgtggcggacggtggccagcatggtgcgctgcggcgtcatcggcagggaggtggagcgcctgcgacggctggagctgcaaggctagataggagctttgctgaataataataatgtaagatgtggccgattgacgttgtcatcgttttctcaatgcattttatacccttcctttgaaatttggtaaagatcttaaaactttgccatgaataagctgtggttaggaaccggatacatatcgaactatacccacaatgcgaatgtcaagtgataaccttatcgtacagcacaattgcgatgcattaaaatgaactgaattgctcagtaaacgatctaccagcgctaatggccaattacagtgtcttaacatcggaacatgtattgagagtaatcacgcaacataagtacaaaacaaaaccagctctctgaaaagcctaccaaagaaatacaacacttaaacattccaatgaaacaacaatcatcaaaatgaccatggctccgtttctgcggaaaatgcctcaccatgtgctccgtgaaaccgcagaaatatccaatcaggcctgtgttcattggtccgacttatttcaaagatcatgggaatgctgattaaactacaataattttgcaaacgagtgtgtggagtttggtaatcaataccttgtttgcaatgttgttcgagagccagtcaagaccctcgtacaaacctatctcctgtggtagcacatgtgctctggatatac

SEQ ID NO: 114576 - DNA, 810 bp, Zea Mays
aaaatgatgtatctaaatcatattttgttgatcttatgtgtgatatgtcagtgatagtgcgagcttagatgtccactgaagcactctacatgttttataggtttaaaatattaccaatcagtgtcacacttatatggatttgagacatgatctgccatcttatatgcaggatgcaaaagatggctgtagaatacaatgaaaggatagaaaatgtcaatcgcgagaggaagttccaccagcaaaatactggaggacagctgcatgccctgaaaatggaatggcaggagctgtgtcaaaaaaatatagctattcaggctgcttgtgttgacctgcagaatcatattgatcagcttaaacttgaagcaaaagaactgggaatgcccatggacgacaactcaggaaccgacccacaagcatcatgaggatttgagatacagaggtggcaaggaagaagctacgcttcatttgagtctggcagctggacgtttcattagccattgtgattacctgtcctgcaattgtcatatgggacagtctgtttgatattgaaaacaatgtggactgtgcctagcaatcccatgacctgtgctcctgaaaacacctcgcagaggaagaatctaaattcgtgtattgttgtccgttgaagtgccctaacttgtggcaagagaaatgcagctgatgtatgcagactctccagttgacattgagttcttacatgaagcttttctgtttgattttctgcttgtttctgaaaataccttgtgctttgccctcttctgaacacgcttacaagtgtttgcagacagtgca

SEQ ID NO: 114577 - DNA, 1369 bp, Zea Mays
tttcctccatctccatccggccatcccacctccgcttcctcctccgcgccggcctacgcgactgcttccctctctctctcgagtctcgactctcgactgcgccgctacagcctgacgcgatggcctcgtcggcgacgagagaggttctcatgcttgaggcgcctccgccgtccgaccccgctgcggggccctggcgcgcggtgccggacgcggaggccattgacgcgctgccctacatcgacggcgactacggcgatgcggcggtgaagcgggaggtcgatcgcctcgtcgaggaggagatgcgccgagggaagcgcaagcctgcagacttcctccgggacctgccccctgttcccaccgccggattcgagaatcatcctatgctttctaaagaatatgaacgtgttagggctggcaaacctccttttatgctagatatgtctcgctatggtttggagccacctccaatgaacaagaggaatgatgttggcgcttggaggcaggctctacggaatgctcagagccagttgcagcatcaaattataaggatagagaatctcgagcttatgctgaaatatggcgtagatgtttggaagctccagaacagacaaatggaatcagttctgtctagcttcggcgtcggaggctggagccggagttgcaccaaacagccaggagaggagaaacgcttctgcacctgtggaagaggaactggggctgttttacatgatgcaaaagatggctgtagaatacaatgaaaggatagaaaatgtcaatcgcgagaggaagttccaccagcaaaatactggaggacagctgcatgccctgaaaatggaatggcaggagctgtgtcaaaaaaatatagctattcaggctgcttgtgttgacctgcagaatcatattgatcagcttaaacttgaagcaaaagaactgggaatgcccatggacgacaactcaggaaccgacccacaagcatcatgaggatttgagatacagaggtggcaaggaagaagctacgcttcatttgagtctggcagctggacgtttcattagccattgtgattacctgtcctgcaattgtcatatgggacagtctgtttgatattgaaaacaatgtggactgtgcctagcaatcccatgacctgtgctcctgaaaacacctcgcagaggaagaatctaaattcgtgtattgttgtccgttgaagtgccctaacttgtggcaagagaaatgcagctgatgtatgcagactctccagttgacattgagttcttacatgaagcttttctgtttgattttctgcttgtttctgaaaataccttgtgctttgccctcttctgaacacgcttacaagtgtttgcagacagtgca

SEQ ID NO: 114578 - DNA, 1317 bp, Zea Mays
gaaccgtgctcaatccaaaacgccaaacggcccacgtgcgccgcgtttcctccatctccatccggccatcccacctccgcttcctcctccgcgccggcctacgcgactgcttccctctctctctcgagtctcgactctcgactgcgccgctacagcctgacgcgatggcctcgtcggcgacgagagaggttctcatgcttgaggcgcctccgccgtccgaccccgctgcggggccctggcgcgcggtgccggacgcggaggccattgacgcgctgccctacatcgacggcgactacggcgatgcggcggtgaagcgggaggtcgatcgcctcgtcgaggaggagatgcgccgagggaagcgcaagcctgcagacttcctccgggacctgccccctgttcccaccgccggattcgagaatcatcctatgctttctaaagaatatgaacgtgttagggctggcaaacctccttttatgctagatatgtctcgctatggtttggagccacctccaatgaacaagaggaatgatgttggcgcttggaggcaggctctacggaatgctcagagccagttgcagcatcaaattataaggatagagaatctcgagcttatgctgaaatatggcgtagatgtttggaagctccagaacagacaaatggaatcagttctgtctaggatgcaaaagatggctgtagaatacaatgaaaggatagaaaatgtcaatcgcgagaggaagttccaccagcaaaatactggaggacagctgcatgccctgaaaatggaatggcaggagctgtgtcaaaaaaatatagctattcaggctgcttgtgttgacctgcagaatcatattgatcagcttaaacttgaagcaaaagaactgggaatgcccatggacgacaactcaggaaccgacccacaagcatcatgaggatttgagatacagaggtggcaaggaagaagctacgcttcatttgagtctggcagctggacgtttcattagccattgtgattacctgtcctgcaattgtcatatgggacagtctgtttgatattgaaaacaatgtggactgtgcctagcaatcccatgacctgtgctcctgaaaacacctcgcagaggaagaatctaaattcgtgtattgttgtccgttgaagtgccctaacttgtggcaagagaaatgcagctgatgtatgcagactctccagttgacattgagttcttacatgaagcttttctgtttgattttctgcttgtttctgaaaataccttgtgctttgccctcttctgaacacgcttacaagtgtttgcagacagtgca

SEQ ID NO: 114579 - DNA, 1225 bp, Zea Mays
tttcctccatctccatccggccatcccacctccgcttcctcctccgcgccggcctacgcgactgcttccctctctctctcgagtctcgactctcgactgcgccgctacagcctgacgcgatggcctcgtcggcgacgagagaggttctcatgcttgaggcgcctccgccgtccgaccccgctgcggggccctggcgcgcggtgccggacgcggaggccattgacgcgctgccctacatcgacggcgactacggcgatgcggcggtgaagcgggaggtcgatcgcctcgtcgaggaggagatgcgccgagggaagcgcaagcctgcagacttcctccgggacctgccccctgttcccaccgccggattcgagatatgtctcgctatggtttggagccacctccaatgaacaagaggaatgatgttggcgcttggaggcaggctctacggaatgctcagagccagttgcagcatcaaattataaggatagagaatctcgagcttatgctgaaatatggcgtagatgtttggaagctccagaacagacaaatggaatcagttctgtctaggatgcaaaagatggctgtagaatacaatgaaaggatagaaaatgtcaatcgcgagaggaagttccaccagcaaaatactggaggacagctgcatgccctgaaaatggaatggcaggagctgtgtcaaaaaaatatagctattcaggctgcttgtgttgacctgcagaatcatattgatcagcttaaacttgaagcaaaagaactgggaatgcccatggacgacaactcaggaaccgacccacaagcatcatgaggatttgaggtacattatgtgccgtccagttaagttgagacgccacgagacagccattgtttccgttatgtttacaaaattatgctgttgctactacagatacagaggtggcaaggaagaagctacgcttcatttgagtctggcagctggacgtttcattagccattgtgattacctgtcctgcaattgtcatatgggacagtctgtttgatattgaaaacaatgtggactgtgcctagcaatcccatgacctgtgctcctgaaaacacctcgcagaggaagaatctaaattcgtgtattgttgtccgttgaagtgccctaacttgtggcaagagaaatgcagctgatgtatgcagactctccagttgacattgagttcttacatgaagcttttctgtttgattt

SEQ ID NO: 114580 - DNA, 718 bp, Zea Mays
aaagctgccctcgccacggtcacggcctcacctcgagatcgagaagaaaagaggtgaggagagcacggggaggggaggcgcaggcgctccgctccgctccggactggcgctgtgatggcgcaacagcgcagctgcggcggcgtcgtccgcctcgccgcgctgctcctcctggccctggccttggccttgctctcgccctgcctctcccgcgccgacgccgtggccgctccttcggctcctctcgcgtctgctgccgccgccgcctcggactcggagcatggtgtggcgaccgcacgggagaatgctctagcacagggtggcgatgtggagtggatccaggactacggcggccccagcgccaatacccggcacgtcccgcacccgtgatgatcggcggccgccgccgccgccgccgccgcatgagaccagcgggatcgggacagggacagcaggagtgacacagggtagtcgcagcaacagtgtagttcgcgcgtggcgccgggggccggctactcagcaatcactttttgtcttgtaaaccttttttgtttttgttttggtgcttcctctgcatgcactgcactgcacggccttctggtcctcaacgtgacaatgtggctgtgattatatgcgcgtgcggctgtgttttgctttgttcctcgagtgtgaccatatctggttaccatgcgctggaagcctcgtttaatctgctcctgtg

SEQ ID NO: 114581 - DNA, 1680 bp, Zea Mays
aagaaaaatgtagcagtgcttgctgtttaataagtggcagagctgttttcactccacctacgcttgtccaggaccaaaattttaatctgtcactttgagctaaaactgaagcaccaaaccgctacaaagaacgtaagagctgaattgtaacttgatgggattactatagcagttgctacagttcttgctagctaccttatactatacgcatcaccctaacaacccggctgactgctgcatctgaccccaccgtcccctgctccaaaccaactctcctttccttacatgcactacacccacttcctgcagctatatataccaccatatgcccatcttatgaaaccatccacaagaggagaagaaacaatcaaccagcaacactcttctcgtataacataatacagcgaaggtaactcacatggcaacttccatgggttgtctcgtcttgctctgccttgtttcttctctccttcccagtgccgtccttggccacccatggggtggcttgttcccacagttctatgaccattcgtgccccaaggcgaaggagattgtgcagtccattgtggcacaggctgtggccaaggagaccaggatggcggcatctttggtcagactgcatttccatgactgctttgtcaagggctgcgatgcttcggtgctgttggacaacagcagcagcatagttagtgagaaagggtccaacccgaacaggaactccctcagggggtttgaggtgatcgaccagattaaggctgctcttgaggctgcctgcccaggcacagtctcctgtgccgacattgttgcccttgcggctcgtgattccaccgccctggttggtggaccatactgggacgtgccacttggccggagagactcgctcggtgcaagcatccagggctccaacaatgacatcccagcccccaacaacacactccccactatcatcaccaagttcaagcgccagggcctcaatgttgttgatgttgtcgccctctcaggtggtcacaccattggtatgtctcggtgcactagtttccggcagaggctatacaaccagacaggcaatggcatggctgacagcacactggatgtatcctacgccgcaaagctgaggcagggatgcccccgctctggtggtgacaacaacctcttccccttggacttcatcacccctgccaagtttgacaatttttactacaagaacctcctggccggcaagggccttctaagctctgatgagattctgttaaccaagagcgctgagacagcggccctcgtgaaggcatatgctgctgatgtcaatctcttcttccagcactttgcacagtctatggtgaatatgggcaacatctcgccactgacagggtcacaaggtgagatcaggaagaactgcaggaggctcaacaatgaccactgagggcactgaagtcgcttgatgtgctgaattgttcgtgatgttggtggcgtattttgtttaaataagtaagcatggctgtgattttatcatattatcgatctttggggttttatttaacacattgtaaaatgtgtatctattaataactcaatgtataagatgtgttcattcttcggttgccatagatctgcttatttgacctgtgatgttttgactcccaaaaccaaaatcacaactcaataaactcatggaatatgtcc

SEQ ID NO: 114582 - DNA, 1309 bp, Zea Mays
gatcctcagaatttctttgaccacccgccgtgacttcgttcctgttgggcttcaaatagaccacgacatcatcgggttaccttgaatttggacgctttgttagtcctcactcttttctaactggttcaggtcctattgactatattcagaaaatgcataatggagatttagtgcactgtgaaactacattccacaagatgggtcgtacagcacaggtaaacatcatatgtggacattgctcgaacaaagtgtgcaaagatgaacaaggatgcatttgcaacatatcttaccatgaacgaatgtgcagggtgattgtcgaactagctattcgttgtgttaaaagtggtcccagagtatttaaaggtttcacggtgggcttccatccccgctcatcagaaattgtttataatggattcactcagcctggatttgaacaacctcaccatggatttagcttccagactgagcagattcatgtgtctctttaccttagcgccaagtcctcactctcaggccttgttgggaaaccgaccttcaaggttaatccagtgaaagggcttggtgttacacttgcaggatcaggattcaatgatgccatgcctagtaccctgtctcctacagttttgaatgtggattggagatgtgaaattgttcgaaccagtccttatgaggtccatatttttatccctgtggagggctatgacccaattgaatttacactaacgaaaaaatgtggttacagacaagaaaaagagagtgatcccatgaaaggctgggcaaaatttggaattgtttcttgcgtgttcattgtcttatcatgcatactttgttgtggagggttcatctacaaaactcgcacattgcatttgtacggtttagatgcgctgcctggtattgcggtcttgtctgccctattggatgctgttgggagaccaagaggctacttgcctgcagttaatcctaatgaaaaccatgcaagccatgcatcttgagagcacgtggttggtaccacacaagtaggaagtagcacaatggataaatcatagggcatatgggccaatgtgaactaatgggtatattctgaggactgtttcctgtatgttttcattatatattcaattaatctagtctctactttatcagacataattcgttgacacatccagcatcagcctacccaagaaattttccctctgctacaagcaagtgagctcatggagcgttgctaattatcgcactattagtgtagcttttatgcacaagttctttacatgttcaaaaatgaaaagcatatacaccatcctttgta

SEQ ID NO: 114583 - DNA, 1930 bp, Zea Mays
ccggccgttccgttttgccgaagctagaaggtagctctcctggtgagtgcgagtctccgtcgccccccaaagcccaagccaacccatcgccgcaatgtccaacacgacggtcgacgggtccgacagcgacgccgacgccctgcgctccgcgtccgccgttccaggcgaacgaacctctaggtgacgcgtttgccgtcgaccgacgtcgccggcggtatggacggccatggccttgtgtgcatggacgataaagcccatatggccacatccatgcatggactccacggctccaccccaggcgccgacgagcaaccccgctccgtgcgaagctccaccttcgcacgttcgatttccccttggtttgctgtgttgttttgagcgtacacatatctaacagggaaccactttgaaacttgaatatattggcgttgctatagtggagtaacatggccttctgcactatgtataccattcatctgtccgtcatagttttgttggcagtcacctacatgcatgtaccagttactgctatcatcgttgttccaacctctaattgttatacatttgataatgaaagccgtcttgttgattttacacatctgattggaaatgttttcgaatataaggaacagggctcacctcgctctgatttggttgtcgaattctgcaaagatgtgcagaaaagatctcaagagggttaccttgaatttggacgctttgttagtcctcactcttttctaactggttcaggtcctattgactatattcagaaaatgcataatggagatttagtgcactgtgaaactacattccacaagatgggtcgtacagcacaggtaaacatcatatgtggacattgctcgaacaaagtgtgcaaagatgaacaaggatgcatttgcaacatatcttaccatgaacgaatgtgcagggtgattgtcgaactagctattcgttgtgttaaaagtggtcccagagtatttaaaggtttcacggtgggcttccatccccgctcatcagaaattgtttataatggattcactcagcctggatttgaacaacctcaccatggatttagcttccagactgagcagattcatgtgtctctttaccttagcgccaagtcctcactctcaggccttgttgggaaaccgaccttcaaggttaatccagtgaaagggcttggtgttacacttgcaggatcaggattcaatgatgccatgcctagtaccctgtctcctacagttttgaatgtggattggagatgtgaaattgttcgaaccagtccttatgaggtccatatttttatccctgtggagggctatgacccaattgaatttacactaacgaaaaaatgtggttacagacaagaaaaagagagtgatcccatgaaaggctgggcaaaatttggaattgtttcttgcgtgttcattgtcttatcatgcatactttgttgtggagggttcatctacaaaactcgcacattgcatttgtacggtttagatgcgctgcctggtattgcggtcttgtctgccctattggatgctgttgggagaccaagaggctacttgcctgcagttaatcctaatgaaaaccatgcaagccatgcatcttgagagcacgtggttggtaccacacaagtaggaagtagcacaatggataaatcatagggcatatgggccaatgtgaactaatgggtatattctgaggactgtttcctgtatgttttcattatatattcaattaatctagtctctactttatcagacataattcgttgacacatccagcatcagcctacccaagaaattttccctctgctacaagcaagtgagctcatggagcgttgctaattatcgcactattagtgtagcttttatgcacaagttctttacatgttcaaaaatgaaaagcatatacaccatcctttgta

SEQ ID NO: 114584 - DNA, 1677 bp, Zea Mays
caagaagcgccatccgccgtgccgtgctcgccgcccccattttgaagccgtcgctctctctcgcggtctcacactctcacccaaggccggcatcccgctcggtgactgtgccgttcatttccgccgcgtacacatatctaacagggaaccactttgaaacttgaatatattggcgttgctatagtggagtaacatggccttctgcactatgtataccattcatctgtccgtcatagttttgttggcagtcacctacatgcatgtaccagttactgctatcatcgttgttccaacctctaattgttatacatttgataatgaaagccgtcttgttgattttacacatctgattggaaatgttttcgaatataaggaacagggctcacctcgctctgatttggttgtcgaattctgcaaagatgtgcagaaaagatctcaagagggttaccttgaatttggacgctttgttagtcctcactcttttctaactggttcaggtcctattgactatattcagaaaatgcataatggagatttagtgcactgtgaaactacattccacaagatgggtcgtacagcacaggtaaacatcatatgtggacattgctcgaacaaagtgtgcaaagatgaacaaggatgcatttgcaacatatcttaccatgaacgaatgtgcagggtgattgtcgaactagctattcgttgtgttaaaagtggtcccagagtatttaaaggtttcacggtgggcttccatccccgctcatcagaaattgtttataatggattcactcagcctggatttgaacaacctcaccatggatttagcttccagactgagcagattcatgtgtctctttaccttagcgccaagtcctcactctcaggccttgttgggaaaccgaccttcaaggttaatccagtgaaagggcttggtgttacacttgcaggatcaggattcaatgatgccatgcctagtaccctgtctcctacagttttgaatgtggattggagatgtgaaattgttcgaaccagtccttatgaggtccatatttttatccctgtggagggctatgacccaattgaatttacactaacgaaaaaatgtggttacagacaagaaaaagagagtgatcccatgaaaggctgggcaaaatttggaattgtttcttgcgtgttcattgtcttatcatgcatactttgttgtggagggttcatctacaaaactcgcacattgcatttgtacggtttagatgcgctgcctggtattgcggtcttgtctgccctattggatgctgttgggagaccaagaggctacttgcctgcagttaatcctaatgaaaaccatgcaagccatgcatcttgagagcacgtggttggtaccacacaagtaggaagtagcacaatggataaatcatagggcatatgggccaatgtgaactaatgggtatattctgaggactgtttcctgtatgttttcattatatattcaattaatctagtctctactttatcagacataattcgttgacacatccagcatcagcctacccaagaaattttccctctgctacaagcaagtgagctcatggagcgttgctaattatcgcactattagtgtagcttttatgcacaagttctttacatgttcaaaaatgaaaagcatatacaccatcctttgta

SEQ ID NO: 114585 - DNA, 1766 bp, Zea Mays
caagaagcgccatccgccgtgccgtgctcgccgcccccattttgaagccgtcgctctctctcgcggtctcacactctcacccaaggccggcatcccgctcggtgactgtgccgttcatttccgccgcgtacacatatctaacagggaaccactttgaaacttgaatatattggcgttgctatagtggagtaacatggccttctgcactatgtataccattcatctgtccgtcatagttttgttggcagtcacctacatgcatgtaccagttactgctatcatcgttgttccaacctctaattgttatacatttgataatgaaagccgtcttgttgattttgtatccatacaatcatgctcttcactatgcaccatgtactttgaaactagatgaaattctttcatgttgctctcctaagcagctttcagacacatctgattggaaatgttttcgaatataaggaacagggctcacctcgctctgatttggttgtcgaattctgcaaagatgtgcagaaaagatctcaagagggttaccttgaatttggacgctttgttagtcctcactcttttctaactggttcaggtcctattgactatattcagaaaatgcataatggagatttagtgcactgtgaaactacattccacaagatgggtcgtacagcacaggtaaacatcatatgtggacattgctcgaacaaagtgtgcaaagatgaacaaggatgcatttgcaacatatcttaccatgaacgaatgtgcagggtgattgtcgaactagctattcgttgtgttaaaagtggtcccagagtatttaaaggtttcacggtgggcttccatccccgctcatcagaaattgtttataatggattcactcagcctggatttgaacaacctcaccatggatttagcttccagactgagcagattcatgtgtctctttaccttagcgccaagtcctcactctcaggccttgttgggaaaccgaccttcaaggttaatccagtgaaagggcttggtgttacacttgcaggatcaggattcaatgatgccatgcctagtaccctgtctcctacagttttgaatgtggattggagatgtgaaattgttcgaaccagtccttatgaggtccatatttttatccctgtggagggctatgacccaattgaatttacactaacgaaaaaatgtggttacagacaagaaaaagagagtgatcccatgaaaggctgggcaaaatttggaattgtttcttgcgtgttcattgtcttatcatgcatactttgttgtggagggttcatctacaaaactcgcacattgcatttgtacggtttagatgcgctgcctggtattgcggtcttgtctgccctattggatgctgttgggagaccaagaggctacttgcctgcagttaatcctaatgaaaaccatgcaagccatgcatcttgagagcacgtggttggtaccacacaagtaggaagtagcacaatggataaatcatagggcatatgggccaatgtgaactaatgggtatattctgaggactgtttcctgtatgttttcattatatattcaattaatctagtctctactttatcagacataattcgttgacacatccagcatcagcctacccaagaaattttccctctgctacaagcaagtgagctcatggagcgttgctaattatcgcactattagtgtagcttttatgcacaagttctttacatgttcaaaaatgaaaagcatatacaccatcctttgta

SEQ ID NO: 114586 - DNA, 116 bp, Zea Mays
gggtttttctcaaatgccaaaccaagaaccatcattttatgtgaaccaaagtaagcatgagcatcaaaacaacttaagtaatagagaattcaccaagtatatacttaaaagtaaca

SEQ ID NO: 114587 - DNA, 1235 bp, Zea Mays
atctttattatctgtgattctgcaatccacatgtttgattttttacttagtttctctttgagaccggtcgccatgtttggttagcacatctagaatgcattacaattggaggcaatagctgttcactatccactataacctgaaagcttagctgttcaactgagctttctgattcttccatttttttccattcaagtatatgatattcttgtgtgctattcaatattacaaataacaaatttgcatatgagaataattaagtaaatttggccacctaatcagtaggattgtttggttggaggaatttttgtagcatgtgaaacttgagctaattagaaagcaaccactaccttctcttcagcatgaaaaaatagcttagccatttcttagagttaagcccttagccacttgctggccttatcgtctggaagaagaaatggtactcaactgctggtctctttggcaaatttttctttgcacttttcttgttcgaactggcaatccacaaccaagtaccttgcttgcaccaacaaaagtcccttctactgtagggcaatccatggatttattgcttgtcctgaaatttgatagaggcattcatgatatcagttgctcgttaattccatttgtttcttgttctcttgtgcattgttatgacatatttgcaccttttgcggggaacgatcgaccaacaatggagtggcccactagattaaagatcgctctgtgtgctgccaagggtttagctcatcttcatgaagactgtcatccaaagatcatccaccgcgacattaaggcatctaacattcttcttgacttcaaatttgaatataaggttgctgactttggacttgcaaagttcactactaataataacacccatgtttcaacaagagtaatgggcacctttgggtatttggcacctgagtatgcagcgtctggcaagctcacagaaaaatttgatgtattttctttcggagtcatgcttcttgagcttattactgggcggcgaccaattgacacaacccaattggcactgcttgctataagcacatatgtacttccatttgcatgttgtataatactaataccaattgcaaaattatagttattttttctacccttgttagttaataagcatatttctggtcaataggttgtattcttattcttgtaaccgtgttaattaatgttatggacttgtagtcttgtattaccttgtgaatatatctgtc

SEQ ID NO: 114588 - DNA, 419 bp, Zea Mays
gggctctctacctagatccccatgaagtttagatggtaatagaataaacatagaaggcgctttcagtttgccgtgttccgcaaggaagagagctagttatagatctttctgagtgtacagtttatttggaggggagaaggataaagatgagaatggcgatgaagcgccatcgaaagtattggcaaatattaagtggcctgaaacactcgagactgattttatctacagtgctttatcatttgggacttcaattaatccacagttcattgcaagctttgcttctgctgctggtaaacgtcctcatcaagatttcgactctcaagaatctgatccagagtggggttggtggatagcaaaccatgagctgaagaagccatcaattagtctgttgtttccaacaatcatcctcctcagtcgcc

SEQ ID NO: 114589 - DNA, 1597 bp, Zea Mays
ctcgaggcaccgaacgccaacaacgaaaaactccgcagcagtccacccagtccaccagacatccgacagggaattgggaggtgttgataggactcatccgcctaattcttgtagtggaattcaaccaattgattgctatttgggacagcggatttgtgatcctgttaccacagtcttcttgcgggccagaaacgcgaatcacgatggttccaggaatcgccaccaagacggcggcgcgaccggtggcctgggcacctcagcctcggaacatgttcgtgttcggcgcaggtttcgtcggccgctacgtctcggagcgcctcctcgcgcagggctggcaggtctccgggacgtgcaccactgtcaccacgaagagggagctagagatgctgggcatgaatgcttccgttttcgatggcacagaggacagcctggaaaatattcacagtttacgacaagcaactcacttgctcatctccatcccacccatccctggagttggtgatcctctacttattaatttagatgaagatctgaggagaatactcggccatggtaatcttgaatggctatgctacctttcgtcaacaagtgtgtatggtgattgtggtggtgtattggttgatgaggagtaagggactcgttggttcttttctcgtccatgaagtacattttaatagaaagctaaatacactgctgtgtatgcagtcatacagtaaacccaaagagcgagtctgccaaattaagatataacgcagaaaaaggatggctgaatcttattgatgatccaaaactgtcagcttttgtattccgtttaggtggaatatatgggcctggaagaagtgctttggacaccttagcgaagagcaaatctttgtcacggaaacagaagttgcgagaatctaagcaatatactgcacgaatccacgtggctgacatctaccaggctgtcttggctagcatgagcatcagatgtgcaaggaaaatatttaatgtggtggatgacgaccctgccccaagagctgaagtttttgcgtttgctacgagtttgatacagaggagatatcctgatatgataactgaaaccattgatgccaagcctgcaggcttagattatcaagagatgatcgtacctgcagagaaacgggtttctaatgctcggatgaagcaggaacttggtgttaatctgcttcatccaacttatagatctggtctgcagagtatccttgatgcttggcaaattcagcctccacttcccaatacaagtcaatgatgatttagttttgaaaggcatataggtgtatgtaagtgtatttgtgcttgatttggttcagatatactacctccgttctaatatttgtataaaaaagaacggagcgaataataatttagtgacattgtagcctttttggctgagttggactggtgctcgtgttatttttagcattgtttacgaatcatatagtacaatctagtcgccatggatctgactagacgattaatcgtgatgagattgattagtggagcctatttggaatcatatagttgaccgacatatttcaagacatatacgtattatatagtagtaatagatatttat

SEQ ID NO: 114590 - DNA, 1562 bp, Zea Mays
tacattgctggagcctggagcgtggtctttctcagccgggttctcgaggcaccgaacgccaacaacgaaaaactccgcagcagtccacccagtccaccagacatccgacagggaattgggaggtgttgataggactcatccgcctaattcttgtagtggaattcaaccaattgattgctatttgggacagcggatttgtgatcctgttaccacagtcttcttgcgggccagaaacgcgaatcacgatggttccaggaatcgccaccaagacggcggcgcgaccggtggcctgggcacctcagcctcggaacatgttcgtgttcggcgcaggtttcgtcggccgctacgtctcggagcgcctcctcgcgcagggctggcaggtctccgggacgtgcaccactgtcaccacgaagagggagctagagatgctgggcatgaatgcttccgttttcgatggcacagaggacagcctggaaaatattcacagtttacgacaagcaactcacttgctcatctccatcccacccatccctggagttggtgatcctctacttattaatttagatgaagatctgaggagaatactcggccatggtaatcttgaatggctatgctacctttcgtcaacaagtgtgtatggtgattgtggtggtgtattggttgatgaggatcatacagtaaacccaaagagcgagtctgccaaattaagatataacgcagaaaaaggatggctgaatcttattgatgatccaaaactgtcagcttttgtattccgtttaggtggaatatatgggcctggaagaagtgctttggacaccttagcgaagagcaaatctttgtcacggaaacagaagttgcgagaatctaagcaatatactgcacgaatccacgtggctgacatctaccaggctgtcttggctagcatgagcatcagatgtgcaaggaaaatatttaatgtggtggatgacgaccctgccccaagagctgaagtttttgcgtttgctacgagtttgatacagaggagatatcctgatatgataactgaaaccattgatgccaagcctgcaggcttagattatcaagagatgatcgtacctgcagagaaacgggtttctaatgctcggatgaagcaggaacttggtgttaatctgcttcatccaacttatagatctggtctgcagagtatccttgatgcttggcaaattcagcctccacttcccaatacaagtcaatgatgatttagttttgaaaggcatataggtgtatgtaagtgtatttgtgcttgatttggttcagatatactacctccgttctaatatttgtataaaaaagaacggagcgaataataatttagtgacattgtagcctttttggctgagttggactggtgctcgtgttatttttagcattgtttacgaatcatatagtacaatctagtcgccatggatctgactagacgattaatcgtgatgagattgattagtggagcctatttggaatcatatagttgaccgacatatttcaagacatatacgtattatatagtagtaatagatatttat

SEQ ID NO: 114591 - DNA, 1921 bp, Zea Mays
ctcgaggcaccgaacgccaacaacgaaaaactccgcagcagtccacccagtccaccagacatccgacagggaattgggaggtgttgataggactcatccgcctaattcttgtagtggaattcaaccaattgattgctatttgggacagcggatttgtgatcctgttaccacagtcttcttgcgggccagaaacgcgaatcacgatggttccaggaatcgccaccaagacggcggcgcgaccggtggcctgggcacctcagcctcggaacatgttcgtgttcggcgcaggtttcgtcggccgctacgtctcggagcgcctcctcgcgcagggctggcaggtctccgggacgtgcaccactgtcaccacgaagagggagctagagatgctgggcatgaatgcttccgttttcgatggcacagaggacagcctggaaaatattcacagtttacgacaagcaactcacttgctcatctccatcccacccatccctggagttggtgatcctctacttattaatttagatgaagatctgaggagaatactcggccatggtaatcttgaatggctatgctacctttcgtcaacaagtgtgtatggtgattgtggtggtgtattggttgatgaggagtaagggactcgttggttcttttctcgtccatgaagtacattttaatagaaagctaaatacactgctgtgtatgcagtcatacagtaaacccaaagagcgagtctgccaaattaagatataacgcagaaaaaggatggctgaatcttattgatgatccaaaactgtcagcttttgtattccgtttaggtggaatatatgggcctggaagaaggttttgacctgctgaatttcattccatttcaccattttaatttctactaattcagtttgagggatatttgttggcatgctgattagtagctctgtttaaagcttgtgaaaactgaaacatatttataatgccaagtttgtataaaaagggaagggcaggcccaatgctggtggctcccacatgattggggtctaggaaggaataaccgatgcaactcttatctctgcatttttgcagagaggctacatcgaagatagtacctttggctaagtgggaagatctatcaccactgtgccaggcctgtcctttggaatgctaagtgtttatacttgttgaaaaaaaggtggccaaaaatagaatagattatgacatgaagaatatcttattggatgctattgtagtgtttcgataactgttttgtgaaatattttcttttataattcttttcctatattccaatgactggacgctgtttactgcagtgctttggacaccttagcgaagagcaaatctttgtcacggaaacagaagttgcgagaatctaagcaatatactgcacgaatccacgtggctgacatctaccaggctgtcttggctagcatgagcatcagatgtgcaaggaaaatatttaatgtggtggatgacgaccctgccccaagagctgaagtttttgcgtttgctacgagtttgatacagaggagatatcctgatatgataactgaaaccattgatgccaagcctgcaggcttagattatcaagagatgatcgtacctgcagagaaacgggtttctaatgctcggatgaagcaggaacttggtgttaatctgcttcatccaacttatagatctggtctgcagagtatccttgatgcttggcaaattcagcctccacttcccaatacaagtcaatgatgatttagttttgaaaggcatataggtgtatgtaagtgtatttgtgcttgatttggttcagatatactacctccgttctaatatttgtataaaaaagaacggagcgaataataatttagtgacattgtagcctttttggctgagttggactggtgctcgtgttattttt

SEQ ID NO: 114592 - DNA, 1427 bp, Zea Mays
tacattgctggagcctggagcgtggtctttctcagccgggttctcgaggcaccgaacgccaacaacgaaaaactccgcagcagtccacccagtccaccagacatccgacagggaattgggaggtgttgataggactcatccgcctaattcttgtagtggaattcaaccaattgattgctatttgggacagcggatttgtgatcctgttaccacagtcttcttgcgggccagaaacgcgaatcacgatggttccaggaatcgccaccaagacggcggcgcgaccggtggcctgggcacctcagcctcggaacatgttcgtgttcggcgcaggtttcgtcggccgctacgtctcggagcgcctcctcgcgcagggctgatttgggagtgggtgaatctgcaggcaggtctccgggacgtgcaccactgtcaccacgaagagggagctagagatgctgggcatgaatgcttccgttttcgatggcacagaggacagcctggaaaatattcacagtttacgacaagcaactcacttgctcatctccatcccacccatccctggagttggtgatcctctacttattaatttagatgaagatctgaggagaatactcggccatggtaatcttgaatggctatgctacctttcgtcaacaagtgtgtatggtgattgtggtggtgtattggttgatgaggatcatacagtaaacccaaagagcgagtctgccaaattaagatataacgcagaaaaaggatggctgaatcttattgatgatccaaaactgtcagcttttgtattccgtttaggtggaatatatgggcctggaagaagtgctttggacaccttagcgaagagcaaatctttgtcacggaaacagaagttgcgagaatctaagcaatatactgcacgaatccacgtggctgacatctaccaggctgtcttggctagcatgagcatcagatgtgcaaggaaaatatttaatgtggtggatgacgaccctgccccaagagctgaagtttttgcgtttgctacgagtttgatacagaggagatatcctgatatgataactgaaaccattgatgccaagcctgcaggcttagattatcaagagatgatcgtacctgcagagaaacgggtttctaatgctcggatgaagcaggaacttggtgttaatctgcttcatccaacttatagatctggtctgcagagtatccttgatgcttggcaaattcagcctccacttcccaatacaagtcaatgatgatttagttttgaaaggcatataggtgtatgtaagtgtatttgtgcttgatttggttcagatatactacctccgttctaatatttgtataaaaaagaacggagcgaataataatttagtgacattgtagcctttttggctgagttggactggtgctcgtgttatttt

SEQ ID NO: 114593 - DNA, 583 bp, Zea Mays
tattattttttctcgtattttttctcactggagcgtcatcccagtggttctattttgctgcacatcatctgttatagaattaaaggtattagtgttatttcccctacatatactaacagttcctataggttgaataaaacgatatatttgccttgcccccctcctcttttgtttgcatacataccatctctgtgtttactactcgatgtagcattggcgtctgtggtaaatctgattgcctatggtgaactatgcacagggatctgaaggagcatcttggaaggttgcagcagtcgtctaattccaggagggctgctatgaatgaaatgatgagggcggcggaggttgccgcagatgagaacatgtccactatgcatttaatcaatcatcggtggggattttttttgtgatcaatttcttctgtggaagaagtttttttggaaacgacccaatcatcagtggggattgtattgtgatcaatttcttcaccttgcaagcattatgatcaacctaagttgggtgcgagaagttcggaagcagcaacttggtggatcatctgcgtaatggagtttgcattaaaggc

SEQ ID NO: 114594 - DNA, 2499 bp, Zea Mays
ggtggcacgtctaaatccggtgaccggcggcggcatccacgtcgcggcgtgcctgcgtcgagcggcagaacaggcacgggacccggccgcaagctaggccgtgaccagtgcagaaagtgtgggcaaaccggccactgggctcgtgattgcaaggcaaggccaaagcaggaggcggcccacatggcccaggaggaggaggcgctcatgctgttgagggccgcaccactgcgtcgatccccgccagtagggtccgcgcctccaccgccaccggcagggtccgcgcctccaccgccgccggggcggatccagctacaggagggaaaggtgttcgtgcagctcggcgcgaaggagcagcgggaccctaggtcctggatctgcgacaccggggccacgaaccacatgacggggtctcgggcggcgttcgcagatctggacacggcagtgtctgggtcggtgcggttcggcgatgactccatggcggagattgaagggcgcgggaccgtgctgttcaagtgcaagaatggcgagcatcgctccttcaccggcgtttactacatcccgcgactcacggcgaatatcgtgagtctcggccagttggaggaggccgactacgacgtccacctctggcgcggtggcatggagattcgggagcctgaggggcgactgctggcgaggatcccacgcgcaggcaaccggctgtatgtgctcaacgtcgacgtggcacgaccggtgtgcctggcagcgcgcggcgaagaaagtgcctggcggtggcatgccaggctcggccacatcaacatgccggcgctgaggaagatggcgcgggaggagctcgttcgtggactgccttccatcgagcaggtggaccaactctgtgaggcgtgtctcgccggcaagcagcgacggacggcgttccctgaccagacacagtggcgggcggaccgcgcactggagctggtgcacggggacttatgtggacccgtgacaccggcgacaccaagcgggaacacctacttcctgcttctcgtcgacgatcggagtcgctacatgtggctgacgctgctgcggtccaaggatcgagcggcggctgccatcaaggagttccaggcacgtgcagaagctgagtccagctgcaagctgctggcgctccggacggatcgtggtggcgagttcacatccaaagagttcatggagtactgcgcggcggacggcgtgcaccggcagctgacagcgccgtattccccacaacagaacggcgtcgtcgagcgccggaacgccatggtggcaggcacagcacgctgtctgctcaaggcaaaggggctgccggcttggttctggggagaggcggtgaacactgccgtgtatctcctgaaccgggtaccgacgaaggcagtagaaggcaagactccattcgaggcatggtacgggaagaagccggcagtacaccacctgaagaccttcgggtgcattgtctatgttaagaatacgacaccgcacctgaagaagatggaggatcgtggccgcaagatgattttcgtcgggtacgagcgcgggtctaaggcatatcgagcctacgatccggccactaagcgcgtgcacgtgacgcgcgacgtggtctttgatgagtccgcccagtgggactggtcagagggagctaagaccggcactggcgcggatcatggcggcgacgacacgttcaccatccaatttcaggtggtggcggggccaggaggtgcccaggcgggggcaccggtggctgcattgcagcatatgacgccaccaggaacaccaggggaggccggagtagcttctccgggtgtgcagttcgccacaccacctgctgcgttagacgaagacctggacaccgaccacgacgacaacgcaccactgcggttccgaacagtggaggacgtcaccggagctgcgtcgccacctgggtacgccgtgcgcgtactgtacagcgagcaactctttgcagtgagtgcggaggagcctgggtcgcttgcacatgctgggcaagacccgtgctggcgacgagcgatggaggaggaactgcgcgccatagaggacaaccacacctggacactcactgagttgccatctgggcagcgagccattgggctcaagtgggtattcaaggtcaagaaagatgaacacggtgccgtggtacggcacaaggcacgacttgtcgcaaaaggctacgctcagcgccaaggaatcgactacgatgaggtgtttgcaccggtcgctcgcttggaagcggtgcggctgctgctggcgttggcagcgcaggagggatggcaagtccatcacatggacgtcaagacggcgttcttgaacggcgacctccaggaggaggtgtatgtgcagcaagcgcctggatttgctcaaccagggcaggaacacaaggtataccgactacacaaagctctttatggtttgcatcaagctccccgtgcctggaatcaaaaactggatgaaaaaatgggtgttctggggttc

SEQ ID NO: 114595 - DNA, 802 bp, Zea Mays
ccgcatcctcaccctcgtccgctcctccgctgccccaaaccctagcctgaggaggggtcctcctccgctaccgagacccacgatgtcgaccatcgctgcctcccgccgctcgtcctcctcgtcctcttccgcgaccgccaagcgccccgcgattgcggacggccccgggggacccaaggcgaccgccgcacaggccaagaagcgcgtggcgctcggcaacatcaccaacgttgccgcgcggggagggagggcttccgttggcggcagccttgggaacgtcatggcgcccaccagcagcgcggtacgtacgagtacgacacgactctgcccgtcaagacggattgttgtggccgggattccggaaattcatgcggaaacgggactccttgcgctttcctcggaccccaagatccctgggcggggcgtgggctaattattcgttgaaatgtttctgtttctggtctatgactgaatggttcacgaatcgggcgtgcctttgctgccttcagagatggatcgatggcttttgcgttttcttggctgatgatttttttccgattcattagaaatgcagtctacgttttgcacttttgctacgtactaggagatgcgctgatttggtttctttagccattcgccccagtttgagttccgttgcgtctccgttcttgtgaggcgtcacctcttcaacattccctgaaacctgcgtacaatcttctgatatcccactgttgctcacatcagtattgcaactttactctgagtctgagcccttgcgttgcgttgcttttctgttgtcata

SEQ ID NO: 114596 - DNA, 906 bp, Zea Mays
caaactgcgcagcaggttgaagcagcaacagcaagccaagcctagtggtgctcatctagagagagagcagcagcaataggatatatacaatacatggggtccttgggcttgctggttgttgtggcggtcgccgcggtggtgctggagctcaccgcagccgactcctggaacggcggccgcgccacgttctacggcggcggcgatgcctccggcactatgggaggagcgtgcgggtatggcaacctgtacagcgcggggtacgggaagaacaccgcggcgctgagcaccgcgctgttcaacaacgggcagagctgcggcgcgtgctttgagatccgctgcaccggcagcggcagctgcctgcctggtggttccgccgtcgtcacggccaccaacttctgcccgcccaactatgcgctccccaacaacgacggcgggtggtgcaacccgccgcagccgcacttcgacctcgccgagccggccttcacgcagatcgccgtcgccggcgccggcgtcgtgcctgtccaatacaggagggtggcgtgcaccaagcagggtggcatccggttcaccgtcaacggccactcctacttcgtcctgctgctcatcacgaacgtgggcggcgccggcgaactgacggcggtatcggtgaagggctcgcggacgggatggcagaccatgagccacaactggggcgccaactggcagaacggcgcgctgctggacggccaggcgctgtcgttccaggtcaccggcagcgacggccgcaccctcacgtcggagaacgccgcgccggctggatggagctacggccagacctacaccggcaagcaattctaacgggccggtcgcctgtgagctgtgcagccggcgtcgccgccggaggaggggctctgttttgaagcagct

SEQ ID NO: 114597 - DNA, 1551 bp, Zea Mays
cgcagcagcacagctcgccgcctcgccgtctcttagctgaggcgtccgacgccaccgcccccaatccggtggcgctcctccgtccggccctgcgcggcggccgtggagcaggagggcggcgccgcgggggaggccccgcggctggtgctgcacgactccctcgactccgtgggggtggccaccgcgcacgctagggcggcgcgggaggggttcgtggcgcaggtggggcggctcacccgggtaagtgcggggagcagcatcgccatcagccgcggccctgacctcgcccgcgcagcgctctgcgtcgctgccgaggacgactcgctcgtctcccactcctcggtcccgctccccgtagatgccttcatcgcgcgcctcgacgacctctccacgggcttctgcgccggcgggaacttcccgccctcgggtgcgccgcccgaggtcttcttcgattaccttaaccgctacctctacgtccataaggggtttcggagaacaaatggagtgtcagatgtgcggattatgtaccttcactcggtcttgacatgccgttctggatcagctctaatgcttgcgttaatatattcagagatattgaagactgtacgaacatatggcttactggattttgatgcagagattttctttccaaatgatctcaatagcctccctaggggctatgacaaacaaaaaagcaaattggtcgatgagccacatattatgacttcaaagtcacttttggttgagactttgagaactttgaagtgtgcattttggccatttcaatctgatcagtctagtagcttatttctaaatgctgttgctgcaaaccagcgtggccctggtactttaggtgataaccaagcgaggtcatatgggaacacaagtgccattgagatggctgctgctaaagctgctcagcatagattgatgcgtggagtatggactaatgctcgttttggtgatatgcgtcgtgctttagcagcttgtgagcgactgatactactgcatcacgatccgcatgaactgagggattatgcagcccttctgtaccactgtgggtactatgaagactgcctacactacttatcattgtaccaaactgcaaagtctgggaaatccccaaccaatcgattggagatcttggaggacgaagctgtgaatactctcaaagcgcggttaatgcttattttagcagaggatggctggagcagatgtagacctgtggcaaggtactggaccaagaactctgagccgtggtaattagagctggccaacgttgcggctgaagcaaataactacagattgtacatagcattttcaactgtggatatgttgtacagtcacttggtaatccatgcgggatgtgaatcaaattcctaattttatacaacaccgcgttgttgctttatctgagattcgcagggcttttttatatttttgaataaatttgatacaatacaacaacatcctcaaatctgtatctacattttttagtcaaacaatattatgttacagaactatcagttttccgtaagttctttcaggcac

SEQ ID NO: 114598 - DNA, 1354 bp, Zea Mays
gtcatacaaaagggaatttttcatcttaattttgcctatactcttcactttctccaggaaaaagaatgtttgcatttatttctaatgtttccaaatcagacttcaacaaaatcaaataattcaatatattatctcctacctacaaatttcaccaatattggtttttgttatggtcctaccgcagcatgattcattttgtcagcatctgatagatatggttttgttcctttcttgcctgtacaagatttttcttaaagagatcagacaacagcaatgacacacacatgcacatgcaaacgtgcgcccactctctctctctctctctctctctctcttctcatggtaagcctgttgttcgcttcaaccattatgttgtgagtaagcttgttcctaagaatcctaacaaatcttctgttttctccttctgtgtttgagaccttttaatccaacttgaaacttcaacctaatgggttgaacctgcatataattaaattgatttaggaatccaatttgttgcaaaaaattttgaacagcgtcagaacacattttatttaaagtcggtgtctgttcttaatgttgttcgtaatgtttggtattattctgtgaaagacggtataaacaggatgagaaagtttctgtttttttttttgcaataacattcggacttatttttattagtccttttatgcagactttgagaactttgaagtgtgcattttggccatttcaatctgatcagtctagtagcttatttctaaatgctgttgctgcaaaccagcgtggccctggtactttaggtgataaccaagcgaggtcatatgggaacacaagtgccattgagatggctgctgctaaagctgctcagcatagattgatgcgtggagtatggactaatgctcgttttggtgatatgcgtcgtgctttagcagcttgtgagcgactgatactactgcatcacgatccgcatgaactgagggattatgcagcccttctgtaccactgtgggtactatgaagactgcctacactacttatcattgtaccaaactgcaaagtctgggaaatccccaaccaatcgattggagatcttggaggacgaagctgtgaatactctcaaagcgcggttaatgcttattttagcagaggatggctggagcagatgtagacctgtggcaaggtactggaccaagaactctgagccgtggtaattagagctggccaacgttgcggctgaagcaaataactacagattgtacatagcattttcaactgtggatatgttgtacagtcacttggtaatccatgcgggatgtgaatcaaattcctaattttatacaacaccgcgttgttgcttt

SEQ ID NO: 114599 - DNA, 1377 bp, Zea Mays
atcttgcttttacacgtacgacgcagcagcacagctcgccgcctcgccgtctcttagctgaggcgtccgacgccaccgcccccaatccggtgaatctgactcaccgctgccgccatgaactgcgcggtggcgtggtctcccccctcatccgctctcgtccaccgtcccggccgtgtacgcaggtggcgctcctccgtccggccctgcgcggcggccgtggagcaggagggcggcgccgcgggggaggccccgcggctggtgctgcacgactccctcgactccgtgggggtggccaccgcgcacgctagggcggcgcgggaggggttcgtggcgcaggtggggcggctcacccgggtaagtgcggggagcagcatcgccatcagccgcggccctgacctcgcccgcgcagcgctctgcgtcgctgccgaggacgactcgctcgtctcccactcctcggtcccgctccccgtagatgccttcatcgcgcgcctcgacgacctctccacgggcttctgcgccggcgggaacttcccgccctcgggtgcgccgcccgaggtcttcttcgattaccttaaccgctacctctacgtccataaggggtttcggagaacaaatggagtgtcagatgtgcggattatgtaccttcactcggtcttgacatgccgttctggatcagctctaatgcttgcgttaatatattcagagatattgaagactgtacgaacatatggcttactggattttgatgcagagattttctttccaaatgatctcaatagcctccctaggggctatgacaaacaaaaaagcaaattggtcgatgagccacatattatgacttcaaagtcacttttggttgagactttgagaactttgaagtgtgcattttggccatttcaatctgatcagtctagtagcttatttctaaatgctgttgctgcaaaccagcgtggccctggtactttaggtgataaccaagcgaggtcatatgggaacacaagtgccattgagatggctgctgctaaagctgctcagcatagattgatgcgtggagtatggactaatgctcgttttggtgatatgcgtcgtgctttagcagcttgtgagcgactgatactactgcatcacgatccgcatgaactgagggattatgcagcccttctgtaccactgtgggtactatgaagactgcctacactacttatcattgtaccaaactgcaaagtctgggaaatccccaaccaatcgattggagatcttggaggacgaagctgtgaatactctcaaagcgcggttaatgcttattttagcagaggatggctggagcagatgtagacctgtggcaaggtactggaccaagaactctgagccgtggtaa

SEQ ID NO: 114600 - DNA, 558 bp, Zea Mays
aacagactctcgcgcctgcgaccgattctttcccatcggcgcgattgctgggcaggtccccctcctggcgatccgaagtactcgcgcccaacctccttctgcccgaggtataagaccgacctccccttccttcgtccatccgttcgtggtgcgccattgcagggaggaatcagagagagagaaagaaatcgaggtgagagaatgaggggatcaacaaattgggggggagagtccccggacccgcgtgcgtccttcaccggagtccacgcaaccgttggcaccctcatcgtgtggagttgcggtcggtcctagggtcaattgctcgccgataattgtgagcaccgcggaaacacaacctgccgcggtcgactcatgcttgcagcgccaccccaccgtcggcggatggccagggtcaacccctggagttcaaggagcatctttgtggctgttgcgggagcgatggacaaccatggagactgggattctccaccgcggattcatggatgcggctgaccctcgcttcaccggggacctggtggctctgtgcataaattttcg

SEQ ID NO: 114601 - DNA, 638 bp, Zea Mays
atgccgtcgaggacctcctaccccttagctccacgattacggggatccgaggccgccatcaacgccctcctccccacaccatcgatggcgcgcgcaggcaacaccgcccatgatcctcggctgatcctcgccatcaacgcgtttcaggaggatcagcgggctcgtggacagggtccccctccagaacgaggaagtcaagctcgtcaccgtcgacgaccctttcaacaccacggactacatggtttcgggaggatcagcgggctcgtggccagggtccccctccagagtgaagatgtcaagctcatcaccgtcgatgaccctttcatcaccacggattacatggtacaggggaaatacggcagaatcaaaaaggaggtgaagaggtactacactgtcgcgagcgcgggttgcgtcgcaagaccataccatccggctctgggaacctctgcgtccacagactgcaaggcactttcccctgataacacatatggtgttgatagtggtgggaacccaaatgaaatcccaaaacttacttttgaagaatccatggagtttaatagtaagtattatcatccaagcaacgctaggatctggttctatggtgatgatgacccaaaagagtacacattctaagtggt

SEQ ID NO: 114602 - DNA, 1229 bp, Zea Mays
caggttgtgaggttcttgattgagcggtcacaagtcctgtcactacaatggtcgccatgatgttgccatgcttatggatctcggcgtgcgtgctcgtgctgcttttgagcctgcacccgcgtgtccatgccttctacctccccggtaccttcatgcacacctactcccctggagaggtgatctcggccaagatcaactcgctcacctctatcgagaccgagcttcccttcagctactacaacttgccatactgcaagccactggatggtgtcaagaagagtgctgagaaccttggtgagatcctcatgggtgaccagatcgacaactcttcataccgcttccaagttaatgtcaatgagtcagtatatctttgcaccacggacccgctcatcaatgagcaggccgagctgctcaagaggagggcacgagatctataccaggtcaacatggtcctggacaatttaccggtcatgcggttcaccgagcagaacgacgtgataatccagtggactgggttcccagttgggtacaaccttgggtacaacccgatatggagcaatgaggattatatcattaaccacctcaagttcagagtcttggtccatcagtaccaggcgcagggcgacgttgtggtcacgagtgaagatggtgttgcaatggtagagtctgatagcaagagtgggttccagattgttgggtttgaggtcgtgccttacagcgtaagacgtgatcctgagtccatgtccaagctcaagatgtatgacaaggctgactctgtgaattgcccgttggagcttgagaaatctcaggcgatccgtgagaatgagcggatcacatttacctatgaggttgagtatgtcaagagcaacatcaactggtcgtcgaggtgggatgcatatctgaagatggatggtgccaaggtccactggttctcgatcatgaactcgatgatggttgtcttcttcccggctggtatcgtgtttgtcatattcttgaggacggttcgaagggatcttacaaggtataaggatatggacaagaaggcacaagctcagatgaacgaggagctcttaggatggaaacttgttattggggatgtcttcagagagcccagctgttatggtcgcttataacaccctgaatttggagtataaaatttcttttcttatatccaccaaattcgggtgtttctttttctttctttccttttcttttgcctaaatggtgga

SEQ ID NO: 114603 - DNA, 585 bp, Zea Mays
accgcaaggttctgacttcacatataatgaacatatatgtttttgatctctttatatggctgctggcaaagagtgcttgttattgacgtccctgtattacgcagaatgggatgaccaggaagaaggcaacgaagccgtccagcagtgggaggatgattgggatgacgatgacgtgaacgatgatttctcgctgcagcttaaggaagagctggacggaagcaacggccagaagagctgaagtattatttctctactttatataaatgatttttatatggcagctacttttggaaccgttgatgtgctttggatgtgaaagtttttggacatcagtcggcaatttgacagcactgtacgtgttagttgtcgttaggatatgtctctagccgaaacgctagaatccgccacaatgtctacgccccaactgtttctcttaaaagagtgccgcaactgtttttccaacaaaaaaatagaacaaagtatggacccgttaacccgttaacaaaaaaatctaaacatctctattgggcctctcctccgggacctcccccagctcccctcacttttcccttcacttacctgaga

SEQ ID NO: 114604 - DNA, 851 bp, Zea Mays
ccgattccttcttcagtcttctttagattcatcagtgttgccttcttcaccgtagcagatctagtaacgctgacattgtggtcccagagtggtgccttggcagacctgaccagctagcaaataggcccagccaactccgatcgcaccagcacctgcaccactgcaccagccgcccgcaacccgcaaagctgcttcccggactagctagggtttcgtgtacgccgcttgatctagtcctctctcccggcacgcgaggtagggcgcagcgttgatggcggcggcaccggcggacgctaaggcggaggccgccaagatggacctcctcgaggacgatgacgagttcgaagagttcgagatcgaccaagaatgggatgaccaggaagaaggcaacgaagccgtccagcagtgggaggatgattgggatgacgatgacgtgaacgatgatttctcgctgcagcttaaggaagagctggacggaagcaacggccagaagagctgaagtattatttctctactttatataaatgatttttatatggcagctacttttggaaccgttgatgtgctttggatgtgaaagtttttggacatcagtcggcaatttgacagcactgtacgtgttagttgtcgttaggatatgtctctagccgaaacgctagaatccgccacaatgtctacgccccaactgtttctcttaaaagagtgccgcaactgttttttttagccaacaaaaaaatagaacaaagtatggacccgttaacccgttaacaaaaaaatctaaacatctctattgggcctctcctccgggacctcccccagctcccctcacttttcccttcacttacctgaga

SEQ ID NO: 114605 - DNA, 847 bp, Zea Mays
ccgattccttcttcagtcttctttagattcatcagtgttgccttcttcaccgtagcagatctagtaacgctgacattgtggtcccagagtggtgccttggcagacctgaccagctagcaaataggcccagccaactccgatcgcaccagcacctgcaccactgcaccagccgcccgcaacccgcaaagctgcttcccggactagctagggtttcgtgtacgccgcttgatctagtcctctctcccggcacgcgagggcgcagcgttgatggcggcggcaccggcggacgctaaggcggaggccgccaagatggacctcctcgaggacgatgacgagttcgaagagttcgagatcgaccaagaatgggatgaccaggaagaaggcaacgaagccgtccagcagtgggaggatgattgggatgacgatgacgtgaacgatgatttctcgctgcagcttaaggaagagctggacggaagcaacggccagaagagctgaagtattatttctctactttatataaatgatttttatatggcagctacttttggaaccgttgatgtgctttggatgtgaaagtttttggacatcagtcggcaatttgacagcactgtacgtgttagttgtcgttaggatatgtctctagccgaaacgctagaatccgccacaatgtctacgccccaactgtttctcttaaaagagtgccgcaactgttttttttagccaacaaaaaaatagaacaaagtatggacccgttaacccgttaacaaaaaaatctaaacatctctattgggcctctcctccgggacctcccccagctcccctcacttttcccttcacttacctgaga

SEQ ID NO: 114606 - DNA, 1035 bp, Zea Mays
atagctagttctggtattaaccgtaaccctctttgcttagtgcttaactactatgattaacacttggtggaccctgttacatccggtccttactggcatatttaggattgagcttcggtactctttggcttctcttcagtatgacaccgattccttcttcagtcttctttagattcatcagtgttgccttcttcaccgtagcagatctagtaacgctgacattgtggtcccagagtggtgccttggcagacctgaccagctagcaaataggcccagccaactccgatcgcaccagcacctgcaccactgcaccagccgcccgcaacccgcaaagctgcttcccggactagctagggtttcgtgtacgccgcttgatctagtcctctctcccggcacgcgaggtaggtcggtgccgctctcgccgtctgtccttcccacgcctcgagtcgctccccgctgatacactcggccgcatcgcagggcgcagcgttgatggcggcggcaccggcggacgctaaggcggaggccgccaagatggacctcctcgaggacgatgacgagttcgaagagttcgagatcgaccaagaatgggatgaccaggaagaaggcaacgaagccgtccagcagtgggaggatgattgggatgacgatgacgtgaacgatgatttctcgctgcagcttaaggaagagctggacggaagcaacggccagaagagctgaagtattatttctctactttatataaatgatttttatatggcagctacttttggaaccgttgatgtgctttggatgtgaaagtttttggacatcagtcggcaatttgacagcactgtacgtgttagttgtcgttaggatatgtctctagccgaaacgctagaatccgccacaatgtctacgccccaactgtttctcttaaaagagtgccgcaactgtttttgtacctacgcccgacctcgttctttagcagtaatccaacagttctgtatatccactcctaaaacctccgagctaccaaatgaggattgcttgcgt

SEQ ID NO: 114607 - DNA, 874 bp, Zea Mays
tcttgctggtgatggttggacaagggtggtgatcagaatagaaaaagaaacagtcctggaaattttggaggtgggcgtggcttcgggcgaggacgagggagaggtaggggtcgggaatctggagatttcaatggcagaaatgatcaaggaaattgaaagaattcatggggtggtgacaatgctgaaaaatcttcttggaggtttgataatcaggtagacaatgaagctggagattctggtggatataggggacggggaagaggaggaagggggcaatatggaggacgaggaagaggcagagacaatggttggagaaatggtgatggaccaaaatgggatggtggagataattggaacgctacaaatccaccaagtaatcagccttggagtagcagtggaggcaccaagtcatatggtcaaaatcagccttccacttggaataattcagaggataacaaaccatctgtaggtgaaaggctcttcctgcaatgatgggggttgatttattagacagccctattgccagactacctgacatagagaccacaacacttggagccacatatgttgctagcttagatgcaggagtttggaccaaggaacaagtatttgcaggttagcacaaggagaacgcgacaatctttcgcccaaaactggatgaggtgcacaagaagagggctgattcatggtacaagacggtttcaagatcattcgatttggctgacctttctctgtaaatgtttcttgtcggcgttgatctatctgtttttggaagatgcaaatgaataaattggtctttgctggtactattcttaactacttgttatttacggtctttacaaaagcgagtacaagaatatcctcaaattttcgg

SEQ ID NO: 114608 - DNA, 1163 bp, Zea Mays
ccctgaaactcaactagccgttggagtcagggcagcggcggcggacgcggctgaaagctgtcgaccgtgccgcgccgcccccaacggtcactggagaggaagaagaaactcgcatttccatccccagccaattgtcgctcgcctttaaatcctgcgccccaccgccgcctccactcccaccgctctctatcctcccactcaaatactcctcaatagccatcgaggagaagggagatagaaacgggagggaacacccactcgatcgtcagccatgacccggggagagaaccaggagtcgcaaaccggtaacgtccccgccgcatccgcggcggcgccggggccgaagccggcgtcggcggggggcgggaaaggcgcggagggccagtcggtggtgcggcggctgcagtcggagctgatggcgctgatgatgggcggcgacccgggcgtgtcggcatttcccgagggggacaacatgctccactgggtgggcaccatcgacggctccgccgggacggcctacgagggcacctcctaccgcctcgcgttggccttcaccgccgagtacccgtacaagccgcccaaggtgcggttcgacaccccctgcttccaccccaacgtcgacgtgcacggcaacatctgcctggacatcctccaggacaagtggtcctccgcctacgacgtgcgcaccatcctcctctccatccagagcctgcttggagagccgaacaacgactcgccgctcaacactcaggcggcagcgctctgggcgaaccaggaagagtttaggaagatggtggagaaaatctacaagcccgccgcgtagaggaggatgacagcgcctggtgaagatgtgggttcttcaagcactgatttcgcttggattgatcgacaagagattatatttggatggtttgggttcccagtctggtgctgtagcaggaaggaatatttgggtcgcctagagcctggcgattctgtaattgttctgagttctaaaatgttcagatattcatttttccatgaatcgttttcgtcccttcgcctcttcctaactgcaatctatactactcctataagaggctaaggaaggcgtccacaggataccgtgcccccgcccctatggtcactgcgcgctcgagacaccgcccgcacgtgacaccgtg

SEQ ID NO: 114609 - DNA, 1900 bp, Zea Mays
atagacagttgttgctgctgctcctccgatcttcttccctcttctcctttccttcctcccagccgcgcgtgcggagggaagaggaagaagagattagaagggcgcggaaaggagaagctacattcattagctaataactaggaaaaaaaacaaatttagcgtcggctgggcagacggtggcggcgcgcggggggagcgagcttccacgcgcccttctccctgccttcatctgctccatctgttcaagaacacgccagagaattcaagtgtcgcattgcacttgcactccgtcgagcggtcgagccccgatccatgcctgcgcctgcccctgccatcgccgtcgtcgtgccgccgccgccgtcgccatcgcttacaggttgcgacggctgctactgactgatcgctctggatgtagctataggtacctctcgattggcgtgctgttctgataacttctaacgagcctcgaacacaaaacaaagccgctctgccaccggctgccactggcgctggaggcaacgaccgctcgttagccaggatggcaatcgcggtcggccatttccacgacctcaagccccccgccgtgcgggaccggcactacagcctccactccgtcgcgctgctcgacagcctgctgctcgacagggatcatagggagcacggggatgccgccgccgcggccggagggggccacaccggcctgtccccgcggcgccggagccagtcctccccgtgcttcacgaccgtcgcgcctgccggctcggagcacgcggaccagtccgagaacaagatgccgcgcgtggagatcgtcgtgggccgccacgcccgcggcgtgcgcgagctcatcgcggaggccgcggtcgccatcgcgtccgggacgcggcttgtcccggcgcagagcggcctcggcggggcgctgctgctcaacggcagccgcgctggcgagcacgtcgctgtcatcaagccgctcgacgacactgcggccgcggggtcgtcgccggcgaacggcggcgggtacgcgagcaagaccgtgctgcgagaggtggccgccttcctcctcgaccacgacggtttcgccagcgtggagccgaccgcgttgatcaaaatctcgtcccccgcgatggcgacgaccgtggcatcgatccagcgcttcgtggcgcacgagtacgacgccggcgagctgggcccgtcgcggttctccgtggcttccgtgcaccgcgttggcatcatcgacgtccgcctcctcaacatcgaccgccacgccggcaacatcctggtcaagaacccgccaagctcccagcgcgccgacagcagcccatccgcgccgccgcggctcgacctcgtgccgatcgaccacggcctctgcctgccggagcagctcgaggacccgtacttcgagtggctgcactggccgcagtcctccctccccttctccgacgacgagctggcgtacgtggcgtcgctggacccgttcaaggacgccgagacgctccgtgccgagctgccgtccctgaaggagcccgccatccggatactcaccgtctgcaccatcttcctgaagcgcgcggccgctgcggggctctgcctcgctgacatcggtgacatgatgacccgcgagttcacggctcagcaggatgtgctgagcacactcgaagcgctatgcaagcaagcgcgtgactccatcctcctcctcccacgcctgccctccttccgacacccctcgaccgacggcgacggcgtcgacgagggtacagccgtctccggcgggcggaagcacgtgtcgttcggcgacctgagcttcgcggagtgggtgtcgttcctggagaggttcgagcagctgctgccggcggcgctagaggccaagaagcgcgctgggctacggacgtcgtcgtcgttctga

SEQ ID NO: 114610 - DNA, 1897 bp, Zea Mays
atagacagttgttgctgctgctcctccgatcttcttccctcttctcctttccttcctcccagccgcgcgtgcggagggaagaggaagaagagattagaagggcgcggaaaggagaagctacattcattagctaataactaggaaaaaaaacaaatttagcgtcggctgggcagacggtggcggcgcgcggggggagcgagcttccacgcgcccttctccctgccttcatctgctccatctgttcaagaacacgccagagaattcaagtgtcgcattgcacttgcactccgtcgagcggtcgagccccgatccatgcctgcgcctgcccctgccatcgccgtcgtcgtgccgccgccgccgtcgccatcgcttacaggttgcgacggctgctactgactgatcgctctggatgtagctataggtacctctcgattggcgtgctgttctgataacttctaacgagcctcgaacacaaaacaaagaagccgctctgccaccggctgccactggcgctggaggcaacgaccgctcgttagccaggatggcaatcgcggtcggccatttccacgacctcaagccccccgccgtgcgggaccggcactacagcctccactccgtcgcgctgctcgacagcctgctgctcgacagggatcatagggagcacggggatgccgccgccgcggccggagggggccacaccggcctgtccccgcggcgccggagccagtcctccccgtgcttcacgaccgtcgcgcctgccggctcggagcacgcggaccagtccgagaacaagatgccgcgcgtggagatcgtcgtgggccgccacgcccgcggcgtgcgcgagctcatcgcggaggccgcggtcgccatcgcgtccgggacgcggcttgtcccggcgcagagcggcctcggcggggcgctgctgctcaacggcagccgcgctggcgagcacgtcgctgtcatcaagccgctcgacgacactgcggccgcggggtcgtcgccggcgaacggcggcgggtacgcgagcaagaccgtgctgcgagaggtggccgccttcctcctcgaccacgacggtttcgccagcgtggagccgaccgcgttgatcaaaatctcgtcccccgcgatggcgacgaccgtggcatcgatccagcgcttcgtggcgcacgagtacgacgccggcgagctgggcccgtcgcggttctccgtggcttccgtgcaccgcgttggcatcatcgacgtccgcctcctcaacatcgaccgccacgccggcaacatcctggtcaagaacccgccaagctcccagcgcgccgacagcagcccatccgcgccgccgcggctcgacctcgtgccgatcgaccacggcctctgcctgccggagcagctcgaggacccgtacttcgagtggctgcactggccgcagtcctccctccccttctccgacgacgagctggcgtacgtggcgtcgctggacccgttcaaggacgccgagacgctccgtgccgagctgccgtccctgaaggagcccgccatccggatactcaccgtctgcaccatcttcctgaagcgcgcggccgctgcggggctctgcctcgctgacatcggtgacatgatgacccgcgagttcacggctcagcaggatgtgctgagcacactcgaagcgctatgcaagcaagcgcgtgactccatcctcctcctcccacgcctgccctccttccgacacccctcgaccgacggcgacggcgtcgacgagggtacagccgtctccggcgggcggaagcacgtgtcgttcggcgacctgagcttcgcggagtgggtgtcgttcctggagaggttcgagcagctgctgccggcggcgctagaggccaagaagcgcgctgggctacggacgtcgtcgtcg

SEQ ID NO: 114611 - DNA, 1683 bp, Zea Mays
gcgtgagccatttgcatctgcagtcgcttgacaccatcactttgcgttcgcgcgaagctgccggtaccgggacgcgcaggcacccgacggacggatgggctggggcggctataaaacgcgtcgctccccttaatgacactgtcatcaccaaacgccggtggagtcactcgagcccgcccgggtctcttcctcttccattgattccattcaagatcactactgttaccagccagccagtcgttcgttaagaagagagcgagcgagcaagagagagagagagggagaagggggaagatcagaacgaagagagggagatgagggggcaaacgcagacagcttccgcggggggccggtggcgaggcgacggcgctgcggcgtggtgttggtggtgggtggccgtggtcctcctgcttggccatttaccgagctgcgcgcgcgcggggctgctggagtccaacccgggcctggcctacaacttctacaagaacagctgccccagcgtggactccatcgtccgcagcgtcacctgggcgcaggtcgccgccaaccctgccctcccggctcgcctcctccgcctccacttccatgactgcttcgtcaagggctgcgacgcgtcgatcctgctggacaccgcgcagagcgagaagacggcggcgccgaacctgtcggtgggcgggtacgaggtgatcgacgcgatcaaggcgcagctggagagggcgtgcccgggcgtggtgtcgtgcgccgacatcgtggcgctggcggcgcgcgacgccgtgtcgtaccagttcaaggcgtcgctgtggcaggtggagacggggcggcgcgacggcacggtgtcgctggcgtccaacacgggggcgctgccgtcgcccttcgcgggcttcgcgggcctgctgcagagcttctcggaccgggggctgaacctgacggacctcgtggcgctgtcgggggcgcacaccatcggcgtggcaagctgctccagcgtcaccccgcgcctgtaccaggggaacgccagcagcgtggacccgctgctggactcggcctacgcgcggacgctcatgtcgtcgtgccccaacccgtcgccggcgtcggccaccgtggcgctggacggcggcacgccgttccggttcgacagcgggtactacaccagggtgcagcagaggcagggcacgctggcctccgacgccgcgctggcgcagaacgccgccgccgcgcagatggtggccgacctcaccaaccccatcaagttctacgccgccttctccatgtccatgaagaagatgggccgcgtcgacgtgctcaccggcgcaaacggccagatcaggaagcagtgccgccaggtcaacacctcctgatcaacaaggcgtcacagggaggggccatggtttttccctcttcgttcttctctttttctgcaccgcctggtattattgttccatgcatccggtttcggctcggcttcggctcggcgcgcatcaaatatatttcgcccccgcgccgtgattgagggccctcctccgacgaaagaaatccattgctttctttgttatttatattagtttactcactgtcctgtgttcgattgtcttgccttgcaaaatgtaagaaagattaaagatgtaagcaaaaaaacaatgcggatcatccactctagagattggtgttggagatcggttttttttt

SEQ ID NO: 114612 - DNA, 870 bp, Zea Mays
attccaatccaaatttatgatggaaagcgaaggccagaaccccctattcaggccgcaaagtttgcatcagagggtgggatcatactcaggcaacatattccaatatttccacactggaaggagtacaagaagcaagagaacgagggcaaaattacagactatattggcaagcttgctggtcaattcaccatggatgtggacagtaaggcagtcaaagatgcatgtgttgatatgataaaaggagggcagcgccagatgaggtataggctgaaaaggaagtacttcaccggggttcctgcaaatcaagtgaggactacatcgcctaacaattgtgtcaagaacaaacttaatcgtgagaaggtgcaatttccacagtgcacaggatctcaatcctacattgcaaaatcctatgtagtgaggcaagaaaaatataaagatatggaacctagtgcaattgatcttttcaaggagatgcattgcagcaagaagaaaggatttagtgaggccgttcagaaagctatagtaaaaatggaaaccttaaaggcccagtcacaagcatctgaggcaaccattgctaatcaatcgactgagattgcagatttgaagaagtccttatcagaaaataacagtctccttcgacaaatattaagcatcaatcgtggccagatgactcctccttaagtatgcttgctagggtgttggtgtcaaccatcttgaagatccatctcacaaaactttagacctcattttatccttatgcttgctgtagaaattaataggaactacaacttgttctattgttcacttgttatagaggattatgaatcatgtttaatgttaaaagcttatgtgttggatgcattatgcttg

SEQ ID NO: 114613 - DNA, 211 bp, Zea Mays
cattccacgacatcctctgcacatccttgccggtggcgacttcacctccacatcctgccagcggcgacttcaactccccatcctgccagcggcgactttacctcccctttcttgccggcagcaacttcacatccccttcagcctctctgtcccaagatcaggatggctccagggaggatgggatcacgatgcaaaagggatgccctagcag

SEQ ID NO: 114614 - DNA, 200 bp, Zea Mays
gaaataaagcagaacaaaatttcaacctacatcaattgcaaggtaaagttagaactgacctaggacaactatctgaaaaatcagctctatattgctcagatgattcaattgcaaggtacccgatagcaaggaactgaaacgtaaagaaggctactaaaatgctgaagaaaacctgaaaatggcgttcaaaatataagcta

SEQ ID NO: 114615 - DNA, 1378 bp, Zea Mays
tttttggagttgctctgctcttatccccaccgcggaaccagcaaaacccgctgcagcctttcgaattatggcagctgccgcagccgcgggcggagctgcatcagccgccgtcgccagccaagaacctatgaaggctctcggcacaggcatcctccgccgctccgcgccgcactggtccacagccgccgcttccttcttttccccacccttccgcccccgccgctgccgtcgcgcgcccgctcctgcagccgccgcgcgtaccccgcggtcccgcgcgagtgccaaggcccgggcgaagctcctggcggaggttgaggcccgggacccctggctcgcctccctctcgctgcttccgaccgacgacatccccagtgctgacgccaccaccaacgggtgggtgattggggtggatcctgacattggaggcgccatcgccgtcctctcgcctgacggctcgtctcaggtgtttgacaacccgttcgtgcacattgtggtgtcagaagtcatccgtaagcgactggacaccaagtcaattatccaactgctccgtggccttgatgcgcctcctggaactacggcatacattgagaagtctagcccatttccaactgatggaaagcagggatggtggagcactggtttctcatatggcttgtggattgcttctctagtggcttcggggttttcggttgtcccgattgcatctcagacatggaaggcttactttgggctaatgcgaagtgaaacaccaaaggatgatagcagacaagctgcttcaattttgttccctgacaaagatcagtccttgaagttgaaaaaacaccatgggcgagcagaggctcttctgttagcagcctatgggaaaggccttgtgctgccatcggggaagttcagcaaaacctcagtttgatgtctatggtgattgcagattgacttgccatttttttgggggtaaacagaggctcttctgttagcagcctatgggaaaggccttgtacgatgcctatggtgattgccgactgacttaccatttcctgtattgatggtactgcaaattttcatttcgcttaggaggccccaatcaagacattaaggttgaatctgctgtaagtttgcaaaccgtaatagagatcatagctaacccatcatttttcgtggaatgcattacagcattagacatttcccattgtgtccttagtgtggcaggctacctagatgaaatctggatgttgtaaacatgtaatgatggaaactggaatgaactggtcgtcttttcggtgaaagtggactcgtttgctcattttgctacactgacatggttgggttggcagtgttgtgttttaaggtgtttggtttgaagaatgagttagtccatcat

SEQ ID NO: 114616 - DNA, 777 bp, Zea Mays
agtactacaattgtgaatgcatatatttttctttcctctttggtgtcataaaattcctgcctcttgtacagcttccacaggttatttcatcattttttgcaagatatttcgccccttccccaggaagcacatctcgcccctccaggagtcttgttggaaacacaccgtcccatagaggccgtgctgttcagaatcagccatcaactggatttgcacctatcgtggagcctccagagtcctccgttgctatgctggtctcaatgggctttgatggcaataacgcaaggcaggcactcgtgagggctagaaatgacatcaacgtggcaacgaacatcctactggaagcacagtctcattgaactaacgcactgcaactttctggtggtaaattagagggaagaactggttatattccaagatgaacaaacaatatgagcacattggactacagatcggtagattagtgcctcatttcatctaccttgaactgcaggccgacagtttagtaaatcagcgtatacatttgcggcagttagttttatcgtgtcaatacttagatgccttacatacagagaatgtaatattccaatttcagcttgtaggatagatgatataagcattcatagtgtacaattcatccgatgttttacagctttagaacttgttccagcacgatatgtggatcgtgctgagttccttgatgttgcaaagaaaacgaggaaggacatcagggatcggtaaaatttaagcttgttttagggcgaacaagaaacagaa

SEQ ID NO: 114617 - DNA, 1556 bp, Zea Mays
caaccaaccaggcaccaggcaactaccaccaccgtctcaacacgacaacacccgtctggccgtctcgccacgctcgtccggcagtctcctaccgggctccgtcccgtcccgccgcctgcatcacccaagggaagtacagccgagcccccactcgcgttccctgccgcgcgacctgatcgtacggccggggaggctgccgcgcctcctgacctcgcttccgcctcgcctccccgaccggaccagcggcctccgtctgaagatgcagggcggcgtctccggattccagaacgcgccggtgacgcgggcggtcgtcgtcgcgagcggcctcctgtccgtcgtcttcagcgcgcagcggcgcgcccgcgccctcggcatctcataccaggacactataacgaattttcgtttatggaagatattcccatctgtatttgcttttcagtcaacaccagagttaatgtttggactgtaccttctgtattacttccgtgtgtttgagaggcagataggctctaacaaatactcggttttttgtctcttcactatcacagcatcatcgctcctcgagatcctgtcattggttatcttgaaagatacaaattacatcagcacgcttgcatcagggccttatggtctcatatttgcctcttttgttcccttctttcttgacattccaatcacatcacggttccgtatttttggtctgaatttcagtgacaaatcattcatttacttagctggttttcagcttcttttatcttcttggaagcgctcccttattcctggtatatttggtctggttgctggttctctctatcgtctaaatgtgctcggcatccgcaagatgaagcttccacaggttatttcatcattttttgcaagatatttcgccccttccccaggaagcacatctcgcccctccaggagtcttgttggaaacacaccgtcccatagaggccgtgctgttcagaatcagccatcaactggatttgcacctatcgtggagcctccagagtcctccgttgctatgctggtctcaatgggctttgatggcaataacgcaaggcaggcactcgtgagggctagaaatgacatcaacgtggcaacgaacatcctactggaagcacagtctcattgaactaacgcactgcaactttctggtggtaaattagagggaagaactggttatattccaagatgaacaaacaatatgagcacattggactacagatcggtagattagtgcctcatttcatctaccttgaactgcaggccgacagtttagtaaatcagcgtatacatttgcggcagttagttttatcgtgtcaatacttagatgccttacatacagagaatgtaatattccaatttcagcttgtaggatagatgatataagcattcatagtgtacaattcatccgatgttttacagctttagaacttgttccagcacgatatgtggatcgtgctgagttccttgatgttgcaaagaaaacgaggaaggacatcagggatcggtaaaatttaagcttgttttagggcgaacaagaaacagaa

SEQ ID NO: 114618 - DNA, 793 bp, Zea Mays
ccaggcaccaggcaactaccaccaccgtctcaacacgacaacacccgtctggccgtctcgccacgctcgtccggcagtctcctaccgggctccgtcccgtcccgccgcctgcatcacccaagggaagtacagccgagcccccactcgcgttccctgccgcgcgacctgatcgtacggccggggaggctgccgcgcctcctgacctcgcttccgcctcgcctccccgaccggaccagcggcctccgtctgaagatgcagggcggcgtctccggattccagaacgcgccggtgacgcgggcggtcgtcgtcgcgagcggcctcctgtccgtcgtcttcagcgcgcagcggcgcgcccgcgccctcggcatctcataccaggacactataacgaattttcgtttatggaagatattcccatctgtatttgcttttcagtcaacaccagagttaatgtttggactgtaccttctgtattacttccgtgtgtttgagaggcagataggctctaacaaatactcggttttttgtctcttcactatcacagcatcatcgctcctcgagatcctgtcattggttatcttgaaagatacaaattacatcagcacgcttgcatcagggccttatggtctcatatttgcctcttttgttcccttctttcttgacattccaatcacatcacggttccgtatttttggtctgaatttcagtgacaaatcattcatttacttagctggttttcaggtcagtcccttgtcataatcataactgaatttatttgattttctgttttttt

SEQ ID NO: 114619 - DNA, 695 bp, Zea Mays
caaccaaccaggcaccaggcaactaccaccaccgtctcaacacgacaacacccgtctggccgtctcgccacgctcgtccggcagtctcctaccgggctccgtcccgtcccgccgcctgcatcacccaagggaagtacagccgagcccccactcgcgttccctgccgcgcgacctgatcgtacggccggggaggctgccgcgcctcctgacctcgcttccgcctcgcctccccgaccggaccagcggcctccgtctgaagatgcagggcggcgtctccggattccagaacgcgccggtgacgcgggcggtcgtcgtcgcgagcggcctcctgtccgtcgtcttcagcgcgcagcggcgcgcccgcgccctcggcatctcataccaggttttggatttgttgcgcaactgggagtattggctcttcattattgaaggttacagatgtggaggggtgttggtgggacaacatgacttatgcttgtaggatggtaccagttatgactgcatggactaaagtttttagctgacctgtggaataaggtagtgagatccagggcagtgattttttagatgtttgatatagaaatgatgtatggatttagacatctgttctacagagatgggcaatgctgccattattgtcaacagaaaataaaagtgcgggatcagttggtcaccaccgagttgaatatcca

SEQ ID NO: 114620 - DNA, 2750 bp, Zea Mays
ggcgccataaaccctcggcctcgacctcatccagtacccgcacctccgctcaaaaccccagctctcctgccccggctggtctcagccacaagtaggcggccggcaagccaagaccaaggagcccgcgagcgcgagggctcgccgacgcggatggcgctactcctccggccgattcctccccctccccgcctccgcgcgctcctcggccgcctcctctccactggcgccagtctatttccctcccgcatgctccccgcgccccgctccaccgccgccgtccctcggctcctgtttgggcccagtgctgtggccgcggcagccacgcggcgcaatggggtccgggtgcgtgcgttcatggcgtcaacgacggcgtctgaggcgatgcacgagaagcaggtgtccgcggagtacactgctgccaatgtccaggtcctagaagcattagatggagttcgcacaaggcctggtatgtacattgggagcacaggaccacgcggcttgcatcatctggtttatgaaatcttggataatgctgtggatgaagctcaagcgggccatgcttcgaagattgatgtagttcttcatgatgacaattctgtcagtgtaacagacaacggccgtgggattcctactgatatgcacccccagacgaagaaatcttgtgtggagactgtcttaacattaatgcacgctggtggcaaatttggaggttcaaaaagtggttacagtgtctctggagggcttcatggtgttggcttatcagttgttaatgctttatcagagacacttgaagttactgtttggcgtgatgggaaggaacacagacaaagctattcgcgggggaaaccaaccactaggctaactagtagcacactgactggtgaaacaagctctcgtcaagggacgcgcatcagattttggcctgataaagatatatttaccaccacgatcgattttgacttcaatacaatctccagtcgcatacgggagcttgcctttctaaatcctgagctaacaataatcttgacaaaggaagaagggcacacagttcaacgcaacgaatattgttatgctggtggccttgttgaatatgttaaatggttgaatactgacaagaaacccctgcatgacccgattgcgttcagaaaggagttggatggtataacagtggatgtctcccttcaatggtcctctgattcctactctgatacagtgctaggatacgcaaacagtatccgcactattgatggtggtactcatattgatggtctaaaggcttcattgacgagaaccattaataaccttgcaaagaagtcgaagactattaaggataaggatattaccttgagtggggagcatgtaagagaaggaatgacatgcatcatttcagtgaaggtccctagtccagagtttgagggtcaaacaaagacaaggttgggaaatccagaagtacggagaatagttgagcagtctgttcaagaaaacttaacagagtacttagagcttcatccagatgttctggattcaatcctatcaaagtcccttaatgctctcaaggctgcgttggcagccaagcgtgctagggaactagtcaggacaaagagtgtgttgaaatcttcatcactccctgggaaacttgctgattgtgcatcagctaatcctgaagaatctgaaatctttattgtcgaaggtgattctgcgggcggtagtgcaaagcaaggacgggatagaagattccaggctattttgcctctaagaggtaaaattctcaacattgaaagaagggatgaagcagccatgtacaaaaatgaagagatccaaaaccttattcttgcacttggattaggagtgaagggtgaggattttaagaaggaggctctccggtatcataagatagttatacttactgacgctgatgttgatggagcacatatccggactctcctccttactttcttcttcagatatcaaagagcattatttgatgaaggttgcatctacgttggtgtacctcctctttacaaggttgagcgtggaaaactagcacattactgctatgatgatgccgacctcaaagagatagttaacaccttccctgcaaatgcatcatatcatatccagaggtttaaaggtttgggtgagatgatgcctgcacaattatgggaaacaacgatggatcctgagaggcggctgttgaagcagcttagggttgaagatgctgccgaggccaatgttgtgttctcgtcacttatgggcacccgggttgaatataggaaggaactgatccagaaagctgctagcatgatcaacatagatcaacttgacatttgaaggcattaagtaaggctgtcctttctgtgtatgatatagaaggtccgccacctgctgcttttcttgccactccaacaggattctagcgttgcagacttgatgataccttggcaacatctttttggtgctagagtagcagaaaacgtagggtacaaacattggatccaggatgagagctgggtttcctaacgaaaactctgattcatttgtggcggtgctataaccatttcagcttgacagttcagagctcacgggtgtagttccctgctgacatcgttcctccgatacggtgtaatatgcttttatatctatcgcctaatatttgcttcatgattccgtgtctcctttcttaatctggcagttaagtatctgtatgagctatggattcgtctgatgtttaaattggacggtttgaaccc

SEQ ID NO: 114621 - DNA, 890 bp, Zea Mays
ttcccataggttggaagggatccaagatttgagcctgtttatggatctgttgacaaagaagggtttaggaaaagatacaatttcttatttgatgaagactttcgtgctgaaaaagaaagactccaaaaatgattaagaaatctaaggacctagatgccattggaaaaatgaagagtcatatcacgtggattgataagcagttgaagtctcattctccaaagaacgttgaatcagaaatcttgcttgagcatatcaagaaagagagggaggcagcaaaggctggaaaacgaccatactatctgaagaaatctgaacttcatgaaaggaagctgatgaacaagtacaacgagattaagattaaatgatttttttcaatatgaacttggagctagcagatgaagaaacattagaggatggatcacagtggaagctagcaagtgggtacttgcagatagatgtcggctctatggacgaacactcgaccaagtcagatgaggagtatgagagcctagccatgcgcgacgtgatggcgactagtccgacgatgagccgcaagctatgagcaaaaccaagaactcacctgccctggagagcaacatccataggagtgaggcaaaatggctggtaccaccacaacatggacccgttcctgaagatgtccaaggaggtggtagccggcaccataatgtcttgcgcgtcattgtgtcaccggccggcaacacgctgcactggtaccggcgggtgttgtgtttcttaggcgtctgcttctgtgctttgagctgtgctatagagtggttgtgccaactactggttttaaaagaaaaatgtgagctaagaatcattgttgaaaacaaacatgtaacaattcgttctcatcagttgtgccaact

SEQ ID NO: 114622 - DNA, 2298 bp, Zea Mays
caggcatccaaaagacctactgtccgtcagtagtacatacgtccgtacgtagagtagagaccaaaacaagcaagcgtttattttgtgctcgtttacgtttagttgtgtgtgatcaattagccagccgccgctgccgcggcgtccgcgtcctcctatatcagccccgcctcccttcctttgcagcagcaacctcccttcctttcccttccccacccctcctgctgcagtctctcctcctcagcggacccggtcctggatggccgccttcttcgctgctgctccgccgccggcggcgggtgctctcgcgtcgttccaccacgaggagcagcagcgtcaggacgccgccgaggagctgtaccacgtggacgacgacgtcggcgagggcggctgcggcgcaggacagcaggggaagctgtgcgccaggggccactggcgccccgccgaggacgccaagctcaaggagctcgtcgcgcagtacgggccccagaactggaacctcatcgccgagaggctggacggcagatcagggaagagctgccgcctgcggtggttcaaccagctggacccgcggatcaaccgccgggccttctccggcgaggaggaggagcggctgctggcggcgcaccgcgcgtacggcaacaagtgggcgctcatcgcgcgcctcttccccggccgcaccgacaacgccgtcaagaaccactggcacgtcctcatggcgcgcaagcagcgggagcacaccggcgcgctccgccggcgcaaaccctcgtcctcgccggacccggcgccgccgacgtcgcacttggcgcccgtcgtcgtcctccaccaccaccaccaccagcaccacgccggctcgcctccgcgcaccgtcgccgccgctcacgcgcagtacacggcagcggacacccgcgcgcacagcggcggcgagtccgacgagaccgcgtccacctgcaccaccgacctgtccctcggctccgccgccgccccctgcttctaccagagtggctacgacgcggctccgcgcgccgcggcgttcgcgcccagcgcgcgctccgccttctccgcgccgccggcgtcggcgcgccatggcgagtcacgctccgacgacaaggcgtcgccgcccttcttcgacttcctcggcgtcggcgcggcatgatcggggaggggggccccccgcggcggtgtacaggaggcgggccgaaagacgcgtagtttagctttagggtccagttaatgatcaagaacatggcctgagagaggagaaagaatggtgatggaactgcagagtactaacaaattcctcatcgatttttttttgccgctgacgttgctagtaacagtatggcgatttgactgctcggcttgggttgggacttgggagacgagttgcaagcgctactacaccaagggcaagcgtgggagattgacatggatgaaggaaagaaaccgcttgcgagttgcgacacaaactgcaaggcgaaggcagatcagatcctctgctgccttgcctcttctgttcacaccctctctctctctctctatatatatattcttttcatgcgccgttctgttctggtctaggatatttatttatttctcgcctttctttttcctttctttctttttcctctcacttctcttcccctttgcatgaagaagaagaagaaaccaggaaccagttccctgcattgcagtgccacccgccccgtgcattgcgaattggcaatctcgctctcctgaaacttgcctgcgctagctcttctcttcgcctccccttcctggtttcgcgcgctccgttgctggactgttgcccccgaatctcctgcgagccaacggaaactgctgttgcaacgcgatgcggtcgacgtgtgatgcagaacagattagttggcgtccgtcagcgggggcgcaagcgcaacaaaagcatggctcggtttgcaacagattcggtgcatagtagcagttgcggtgcagcggtggggttttgactagagtcgttgggcatccgtttccgatccatcgtcccaacgcagatcaggtcaggcctgactccagtagcagcagcaggacgggtttatgtgcttagagatcgcacgcacggcacggtgatcaacaagcaaggatgttttttttttttttgcatctcagcttacatctctaacgagaacgggatgacaagtgcatttggttcgaactgaagaaatctggggtagctagcctagccctgctacctttggctcctcgggagtttgtttgtgaacaaaacctagaaccaagtaagaagcttcagcaacaagctgg

SEQ ID NO: 114623 - DNA, 1496 bp, Zea Mays
aaaacaagcaagcgtttattttgtgctcgtttacgtttagttgtgtgtgatcaattagccagccgccgctgccgcggcgtccgcgtcctcctatatcagccccgcctcccttcctttgcagcagcaacctcccttcctttcccttccccacccctcctgctgcagtctctcctcctcagcggacccggtcctggatggccgccttcttcgctgctgctccgccgccggcggcgggtgctctcgcgtcgttccaccacgaggagcagcagcgtcaggacgccgccgaggagctgtaccacgtggacgacgacgtcggcgagggcggctgcggcgcaggacagcaggggaagctgtgcgccaggggccactggcgccccgccgaggacgccaagctcaaggagctcgtcgcgcagtacgggccccagaactggaacctcatcgccgagaggctggacggcagatcagggaagagctgccgcctgcggtggttcaaccagctggacccgcggatcaaccgccgggccttctccggcgaggaggaggagcggctgctggcggcgcaccgcgcgtacggcaacaagtgggcgctcatcgcgcgcctcttccccggccgcaccgacaacgccgtcaagaaccactggcacgtcctcatggcgcgcaagcagcgggagcacaccggcgcgctccgccggcgcaaaccctcgtcctcgccggacccggcgccgccgacgtcgcacttggcgcccgtcgtcgtcctccaccaccaccaccaccagcaccacgccggctcgcctccgcgcaccgtcgccgccgctcacgcgcagtacacggcagcggacacccgcgcgcacagcggcggcgagtccgacgagaccgcgtccacctgcaccaccgacctgtccctcggctccgccgccgccccctgcttctaccagagtggctacgacgcggctccgcgcgccgcggcgttcgcgcccagcgcgcgctccgccttctccgcgccgccggcgtcggcgcgccatggcgagtcacgctccgacgacaaggcgtcgccgcccttcttcgacttcctcggcgtcggcgcggcatgatcggggaggggggccccccgcggcggtgtacaggaggcgggccgaaagacgcgtagtttagctttagggtccagttaatgatcaagaacatggcctgagagaggagaaagaatggtgatggaactgcagagtactaacaaattcctcatcgatttttttttgccgctgacgttgctagtaacagtatggcgatttgactgctcggcttgggttgggacttgggagacgagttgcaagcgctactacaccaagggcaagcgtgggagattgacatggatgaaggaaagaaaccgcttgcgagttgcgacacaaactgcaaggcgaaggcagatcagatcctctgctgccttgcctcttctgttcacaccctctctctctctctctatatatatattcttttcatgc

SEQ ID NO: 114624 - DNA, 1123 bp, Zea Mays
ctaaaaggctaggcactcgtccatccaacacaagctgacagagagagctagcaacgctctgcaagatccgccatctaaactttgcagcactctactccaccactctcctccgtctgcgactgcgactaggtcccaaatggccgctccaccggtggccgccgctctgtctgcgctccatgaggcacaagagacccacggccatgacgacagccgcgctgggcacgcgagaggccactggcggccagccgaggatgccaagctcaaggacctcgtggcgctgtacggccccaagaactggaacctcatcgccagcaaactccacggcagatcagggaaaagctgccggctgcggtggttcaaccagctggacccgcgggtcaaccgccgcccgttctcggcggcggaggagcagcggctggtggcggcgcaccgcgcccacggcaacaagtgggcgctcatcgcgcgcctcttcccaggccgcaccgacaacgccgtcaagaaccactggcacgtcctcacggcgcgcaggcagcgggagcggaccggcgcgccgccgcgccgacgcaagccctcctcgtcgtcacccgccgcccaccaccaccgtgcaccatctcctctgccgttctgcgccggcaaggccacccgaccccgctcgtgcggcgacggcgacggcgacggcggcgggtccgacgagtccgcgtcgtccacctcctccggcaccgacctctcctccctaggctccgtgtgcgccgccgccgtcccctgcttccacttccaccgccggcgccagagccagagctcgtgcgacggcacgacgtgcgcgtgcctcctcggctcctcctcggcctcgccactgctgcgctgcatcatgcttcgctccgttccgtcgcctgcagcggcttccgacggcggcggatgtggaaagctcgccgccctgcccttcttcgacttcctgggcgttggcgcgacgtgatcgatcgtagccccagtgaacactgatcaggatgaactacgaagccaggctcacgttctcgacaaaaaaaaaggagtcttttaccgtccaaagaacagagtagtttacctttttctttacttgaatatggtttgatttgaattttggcat

SEQ ID NO: 114625 - DNA, 1777 bp, Zea Mays
aagaagcaactatgatgcagagcccatgttgaaggcatgcgggattacaattgctagaaatttcacagaagttgatggtagggtattgcagccacctaagcttacagctgggaatggtgaagacatttttacacgcaatggtagatggaacttcaacaataagaggctcattagagcttgtagtgtcgagaaatgggcggtggtaaacttttctgcacgatgcaatgtcagggatcttgtccgggatctcatcaagtgtggaggcatgaagggcattatggttgatgctccttttgctgtatttgatgagaatccttcaatgagacggtcacctgctataagaagggttgaagacatgtttgaacaagtgaaaactaagcttcctggagcaccaaagtttcttttgtgtgttctagctgaaaggaagaattctgatatttatgggccttggaagaagaaatgccttgctgaatttgggatcgttacacaatgtgtggcaccaactagagtgaacgaccagtatcttacaaatgtcctacttaagataaatgcaaagctgggtggcatgaattcgttgctccaaattgaaacatccccagcaattcctcttgtatccaaggtcccaactataatcttgggaatggatgtgtcacacggttctcctggacattctgatgtaccatctattgctgctgttgttagttctcgtgaatggcctcttatctcgaaatacagagcttctgtccgcacccaatcacctaaaatggaaatgattgactcattgtttaagccacgggaagctgaagatgatggtctgatccgggagtgtctgattgacttctacaccagttctgggaagagaaagcctgaccaagttatcatattcagggacggtgttagcgaaagtcagtttaatcaggtgctgaacattgagttgcaacaaatcatcgaggcttgcaaatttcttgatgagaaatggaatcccaagttcacgttgattattgcccagaagaatcatcacactaaatttttcattcctggaaagccagataatgtcccaccaggaactgtggtggacaacaaagtctgccatccaaagaacttcgatttctacatgtgtgcgcatgctggaatgatcgggactacgaggccaactcactaccacatcctgcatgatgagataggcttcagtcctgatgatctgcaggagctggtgcattcgctctcttatgtgtaccaaaggagcacaacagccatatcagtcgttgctcccatctgctacgcacatctggcagctgctcaggttggccagttcataaagttcgatgagatgtcggagacgtcctccagtcatggcgggcatacttcggcgggcagcgttccggtccaggagctgccgcgcctgcatgagaaagtgaggagctcgatgttcttttgctgagccgtggttttacttttttggtggatggtgaacccctctagttatgtcggtagacgctcttggatgacgctctagttgtggtccaggaaggctcgagctggtacgatgttaaatgttagttttttaagcgtcgctgcggctatgttggtgcctcaggaagacttggaacctggttaggatgtcgttaaatctaccccttatcgttcctggttcgttgggctgttgttcttattgtccgtcctggtgtctgatttctgctttgttgcatgcaagtgtgaggcccagcttgatattgaaaagtttggcgtacatgtcgttcatttggcactctggact

SEQ ID NO: 114626 - DNA, 1658 bp, Zea Mays
aagaagcaactatgatgcagagcccatgttgaaggcatgcgggattacaattgctagaaatttcacagaagttgatggtagggtattgcagccacctaagcttacagctgggaatggtgaagacatttttacacgcaatggtagatggaacttcaacaataagaggctcattagagcttgtagtgtcgagaaatgggcggtggtaaacttttctgcacgatgcaatgtcagggatcttgtccgggatctcatcaagtgtggaggcatgaagggcattatggttgatgctccttttgctgtatttgatgagaatccttcaatgagacggtcacctgctataagaagggttgaagacatgtttgaacaagtgaaaactaagcttcctggagcaccaaagtttcttttgtgtgttctagctgaaaggaagaattctgatatttatgggccttggaagaagaaatgccttgctgaatttgggatcgttacacaatgtgtggcaccaactagagtgaacgaccagtatcttacaaatgtcctacttaagataaatgcaaagctgggtggcatgaattcgttgctccaaattgaaacatccccagcaattcctcttgtatccaaggtcccaactataatcttgggaatggatgtgtcacacggttctcctggacattctgatgtaccatctattgctgctgttgttagttctcgtgaatggcctcttatctcgaaatacagagcttctgtccgcacccaatcacctaaaatggaaatgattgactcattgtttaagccacgggaagctgaagatgatggtctgatccgggagtgtctgattgacttctacaccagttctgggaagagaaagcctgaccaagttatcatattcagggacggtgttagcgaaagtcagtttaatcaggtgctgaacattgagttgcaacaaatcatcgaggcttgcaaatttcttgatgagaaatggaatcccaagttcacgttgattattgcccagaagaatcatcacactaaatttttcattcctggaaagccagataatgtcccaccaggaactgtggtggacaacaaagtctgccatccaaagaacttcgatttctacatgtgtgcgcatgctggaatgatcgggactacgaggccaactcactaccacatcctgcatgatgagataggcttcagtcctgatgatctgcaggagctggtgcattcgctctcttatgtgtaccaaaggagcacaacagccatatcagtcgttgctcccatctgctacgcacatctggcagctgctcaggttggccagttcataaagttcgatgagatgtcggagacgtcctccagtcatggcgggcatacttcggcgggcagcgttccggtccaggagctgccgcgcctgcatgagaaagaaggctcgagctggtacgatgttaaatgttagttttttaagcgtcgctgcggctatgttggtgcctcaggaagacttggaacctggttaggatgtcgttaaatctaccccttatcgttcctggttcgttgggctgttgttcttattgtccgtcctggtgtctgatttctgctttgttgcatgcaagtgtgaggcccagcttgatattgaaaagtttggcgtacatgtcgttcatttggcactc

SEQ ID NO: 114627 - DNA, 326 bp, Zea Mays
ttttgcttgcaggggttgcctattagtaaggcaatcattcttccacaacaatccttccaattttgttgacctgggtggtggtgtagtgggctgtagaggttttcattctagttttcgagcaacccagagtggacttttcactcaatatcgatgtgtcgactacaatgatagtgaaacctggtcctgtcattgattttctgcttgacaatcagaaagttggtgatccaagcatgattgattgggctaaggccaagcgtgcaatgaagaacttgaggataaaaataagtccagcgtacctagaacagaagattattctttcaatctaa

SEQ ID NO: 114628 - DNA, 650 bp, Zea Mays
ccgctcccccgctcgctgttggtggaaatctagggtttcggtggggttcttgccgctgcggttgttcgtgcggcgcggatttagggagggttctgaggcgagggcttttgccccctcgagcgatttgcagctttgggtccgatacagtgctcatcaaggctcactaaatggagtctcacaatggcgaggccaatgacttgcctccaccacctcctctgattgctggtgttgaaccacttaaagctgatgaaacaaagatgccattgaaacctaggagtctggtccagagaaatggatttggcagaaaggggcagccaataaagctgataacaaatcacttcaaagtttctcttgtgaatgctgaagaatttttctaccattactatgtcaatttgaagtatgaagatgatacaccggttgatcgcaaagggtcaggaaggaaagtgattgaaaaactgcagcaaacttatgctgctgaacttgcaaataaagattttgcctatgatggtgagaagagcctgttcacaattggtgctcttcctcaagttaaaaatgagtttactgtcgtggttgaagatttttcaactggaaagactcctgcaaacggcagtccaggaaatgacagtcctcccggaagtgaccggaaaagg

SEQ ID NO: 114629 - DNA, 1206 bp, Zea Mays
aaagggtggtaaaaggctaagcttctttttgtgaattctctgcgttcttcactaatccccaccctaatcagtaaccacgcttacgaatcgtttcctaatcgtgtgacagggacaacaatgacctcagggacaacaatgacctccaagacgagcgacagcataaccaccagcctgagcaccaaggggaagctctcctccgtgggcagcagcttcatggcgtctgccggcagccgcaacaccagcggcgggtttgacgagggggccaagtactccgacgaccagatcctcgaggcgcccaacctccgcaccttcacattcatagagctcaagacggccaccaagaacttccgtccggacagcgtcctcggcgaaggagggttcgggagagtctacaaagggtgggtggatgagaagaccatggcgccgaccaagaacgacactggcatggttgttgcggtcaagaagctcaactcggagagcatgcaggggtttgaggaatggcagtcggagataaattttctaggaaggctctcccatccgaacctagtgaagctcttgggctactgttgggaggacaaggaacttcttcttgtgtacgaattcatggccaaaggaagcttggaaaaccacctattcaggagaggatgtgcccccctgtcctgggagctgaggctgaagatagccattggtgcagctcgaggactcgcgttcttgcatgcatcggaaaagcaagtaatctaccgtgatttcaaggcgtctaacatccttttagacgcgaactataacgcaaagctctccgatttcggccctgctaagctggggccaactggtagcaactcgcacatcacaaccagggtgatggggacatatgtgtatgcagctccagagtatgtagccaccatttgttgttgctggtgcataatactaagtaagctcgacttattaaagatcaatcgagttgagtttgttcattccaagtcattcttgcatagagatatcaagcctgataattttctcatgggtctcgggaaaagagaaaaccaggtttatgttatcgattttggacttgcaaagaagtacagagatacatcaacacaccagcacattccatacagagagaacaagaacttgactggaacagcaagatatgcaattgtaaatacccaccttggaattggtaggtttaattcaattggtggtagctag

SEQ ID NO: 114630 - DNA, 911 bp, Zea Mays
aaaaagatgttttccgagctgccccagaggcccagcccacggtgtcagtgtcacctctgctatttcttcacccgtccgttcacttgcgttcatccggcctacgttaaaatctctccatcccggcgacgactggcgacagccgctgccggcctactccaggtccccaggtctacgtcggacccttcgccgcggcgaacaccaccagagatctgtcactgattttgcagtcctcttgtcagatggcgagcacggggcggtcgatgctgctgtcactgctcctcttcgcagtgacgctgtcgctgctggagatgtacagggccaagttcgcctcgtcggagctcatgaccattgccggtggattcgtctgctccctcctattcctgctactcctcacctttattggaaactatcaagaagctagtggagatagaactgggtggggtgcagttgttgtagcacaacttgtagctcttattgtagccggcactgtccaccgtgtctgtatcacaacatgcttcctgttttccgctggactcctttacgaggttgacaagctctctggcatgatccttgcgaggagtgagtctaaggtgaggcggcactaagcacagaagcagcacagagagatgatacatcgatatttttatgtaagatgacatattttgtatgtcaaactggagttttggttcgcgctggccatcaggccttttctgctagccatataggggctctggattctggatactggtgcgtttgcaccgaggtcacactctgatgtttgtctaatcaattgactaggtgatttaccaccttttgccggtttcatgatgtcattttccttcagccatactcgcggtgcgttgcatctgtctgtgcaatatagttttgccatcttttgtcgctcatctgtt

SEQ ID NO: 114631 - DNA, 736 bp, Zea Mays
aaaccgagcacccaaaccctaatttaagctatttgtattcggatctgatctaattactacaagtggatatatggcgagcacggggcggtcgatgctgctgtcactgctcctcttcgcagtgacgctgtcgctgctggagatgtacagggccaagttcgcctcgtcggagctcatgaccattgccggtggattcgtctgctccctcctattcctgctactcctcacctttattggaaactatcaagaagctagtggagatagaactgggtggggtgcagttgttgtagcacaacttgtagctcttattgtagccggcactgtccaccgtgtctgtatcacaacatgcttcctgttttccgctggactcctttacgaggttgacaagctctctggcatgatccttgcgaggagtgagtctaaggtgaggcggcactaagcacagaagcagcacagagagatgatacatcgatatttttatgtaagatgacatattttgtatgtcaaactggagttttggttcgcgctggccatcaggccttttctgctagccatataggggctctggattctggatactggtgcgtttgcaccgaggtcacactctgatgtttgtctaatcaattgactaggtgatttaccaccttttgccggtttcatgatgtcattttccttcagccatactcgcggtgcgttgcatctgtctgtgcaatatagttttgccatcttttgtcgctca

SEQ ID NO: 114632 - DNA, 871 bp, Zea Mays
aaaaagatgttttccgagctgccccagaggcccagcccacggtgtcagtgtcacctctgctatttcttcacccgtccgttcacttgcgttcatccggcctacgttaaaatctctccatcccggcgacgactggcgacagccgctgccggcctactccaggtccccaggtctacgtcggacccttcgccgcggcgaacaccaccagatggcgagcacggggcggtcgatgctgctgtcactgctcctcttcgcagtgacgctgtcgctgctggagatgtacagggccaagttcgcctcgtcggagctcatgaccattgccggtggattcgtctgctccctcctattcctgctactcctcacctttattggaaactatcaagaagctagtggagatagaactgggtggggtgcagttgttgtagcacaacttgtagctcttattgtagccggcactgtccaccgtgtctgtatcacaacatgcttcctgttttccgctggactcctttacgaggttgacaagctctctggcatgatccttgcgaggagtgagtctaaggtgaggcggcactaagcacagaagcagcacagagagatgatacatcgatatttttatgtaagatgacatattttgtatgtcaaactggagttttggttcgcgctggccatcaggccttttctgctagccatataggggctctggattctggatactggtgcgtttgcaccgaggtcacactctgatgtttgtctaatcaattgactaggtgatttaccaccttttgccggtttcatgatgtcattttccttcagccatactcgcggtgcgttgcatctgtctgtgcaatatagttttgccatcttttgtcgctca

SEQ ID NO: 114633 - DNA, 751 bp, Zea Mays
aatcacacaacctacccagacggccagaccccgctccgccaccgcgcccaccccaaattaatcgcacgcgccaccgctgccgccatgggctcctccgtcagtcaggccagtgcccctcctccacctcctccgacatacgcgtcgacccctccttccttcgtgcatgctgccgctgacgtcgctgccccgccgccgaagccccatgaggaggaggcgaccgaggagaaggtggactacctcaacctcccgtgccccgtcccatacgaggagattcagcgcgaggccttcatgacgctgaagcctgacctattcgagggcatgcgcttcgatttcaccaagatgatcaccccgtacttcgctttgactcacagcgttgccatgggatccattgatatcccggcacagaagagtggggtgatcaagattcccacctccaattatgagtttggtgccaactttatcaatcagaagacgatgctcatggggagggtcgcacatgatgggagggagaacatccgtgtcaagcacgatattacggacaacctttctttaaagataaatgctcagttgacaagtgagccccactactccaaggggatgctttattttgattataaggtcagcctcttgttgtaaagatcgatttctgttgtcttggaagcctgcatttggttgtttagtttggttggctgtcccggcaattgtacctgactactttctcttatgttattaagtaaatagctaattgtta

SEQ ID NO: 114634 - DNA, 1903 bp, Zea Mays
agcaatttcgcacaaacgcgtggaccaaaccgaaaaccccaaagcttcgaccctggtcggtctcacgccgaggagcgagagaaattccccatcgatcttggtttcctctttcctccctctccgcggcatggatcccgccggcgcctctccggcgccggctcccgccgtggaagagcccgtaagcgccacctccattttcgacacccttggcgcggaggtgctggcggtcatgtccccggtctccatctgcatggcccttgtcgtgctcctcatctccctactctcgccgccgtcctccgggtccgcgtcgagctcaccccctccagtcacagctgccactctcgtctacctcgagtcccctaacgactccccgggccagaagctcctcggggcgctcctcgacgccgccgtcttcgtcgccctcgttgccgccgtcacctttgtcctcgttgcgctctactacttccgctgcacgggttttctcaagaactacatgcggttctccgccttcttcgtcatcttctccatgggaggcgccatcgtggccgccgtgctccggcgcctcgcggtcccgctcgacgcgcccaccgcgctcctgctcctcttcaacggcgccgctgtcggtgtcctctctgtattcgcctccgccgtccccatcctcgtccgccaggggtacatggtcgcgctcgccgtcatcgtcgccgcctggctctccaggctccccgaatggaccacgtggatcatgctcgtcgcgctcgctctttacgacctcgttgccgtgcttgcaccccggggaccgctcaggatgcttgtggagttggcctcctccagagatgatgagctgccagcactcgtctacgagtctcggcctacagtcggcccagtcacaagttcttcctcttacgcttcagccatggggtctgtggagatgcaaaccatggcagattctggtcagatcggtagcagtcaatatgagcaggaggaagatgccagccctgccttcgtgcaaatgagggatcttgtgagagtccgatcaagcattggtgagatgaaaagatcaagaggttctgtgctccaaatggagaaccttgaaagggaggtaccagtgatttcagcagaactgacagcaaaccaaggtgggagttcacagcatgccatcattcaaattgaacatcctgacgtagaagagacatcacctttggtgtctgcaccctctacctacaatgcagctttggatgaggagcatagacaaagttcatcgtcagagcctctggattttgagatgtttgagtctaccaggggcatcaagttgggccttggcgattttgttttctacagtgtgcttgttgggagagctgccatgtatgatctgatgactgtgtatgcatgctacctcgccatcattgctgggcttggttgcacccttgtcttgctttccatatgccggcatgcgctacctgcactcccaatctctattatgctgggagttacattctacttcttgacacggttgctgatggagccatttgtggttggtgcttcaacaaacttggtgatgttctgactttcactgatctgctgttgtcatttacatgtggatgaagccctcaatcgaaagaaagttgttggttagcaattcagcatcctatgtgagaatgactaataatttgttggtcacttaccgtaaactgtcatttgtatttatttctaggaatgcttaagaccatatactctgaggtagcatcgtaggtagatttagctcatgtcttgttgtaagtctatcaacctgacatgatattcgagaagagctattctacattcgttgttctttggcttattgtgttcttcaaagttggtgttttcaccctaagattagagatcaagtaattggtcatccattacg

SEQ ID NO: 114635 - DNA, 2141 bp, Zea Mays
tttaatatcataaatactatagttttgttaataaaaaccaaaattgagtagtaagacgatgattagcacccagttcacgcaagagcgcggcaagttcatacatttgcccatttctgttcttttttacagccatgatacatatcagagaccattaacatgagccaaactgaaaaaaggctccagatttttacatggcaccaacccggcatgctcctgctccttcctatgtacattgggaccaaccaacgggccaagctttcaagcggcagcaaccatggcaatattgcttagttctcccaatgatgcgaactgctgccgccgctaccggaggactgcgccgacggcgagaacaggctgttgagccactgcaaggatggcggcaaccgcctgccactctcttcagcttcagctagctcggcgttgcccggagagcttgccctaccatcacccccgccgttgtcactgccttcacgatccgcatcgacactgacgaaaccaccgtcgccgccgctgcatgagctcttgtcgtcggtggccggcagctggaaccggcagacagggcaggagctgtgcatctcgagccacggcacgatgcaattgccgtggaacctgtgcctgcagggcatctcgcgggcgcgctcgccgggcgcgtagtcctccaggcagaccgggcagctggccgcgtcgtcgtcatcgttgccgccggcgatttccacggtaggcattgcctccacggcctccttcttggccggcggcgttccgtgccgcgccgcatcgttctcggcgagctgctgtaccaaggcgtcgaggctggggccgaggaagtagtcgcccagcgccacgccatgctcgccgccggctgcgccgatgaagaggctccggccgaacggggtcagctggtcgccttcgagggcgacgccggcagcggactccagccgctgcagctggcggtcccggagctcgtgcaggagccgcaggaacgcggtgacgcgccgccggcgcagcgagaactcggggtcgttccagtcgtagacgtcgctggcggcctcctgctgccgccggttgcggcggcgacgggcggagctgtcgaccgtgctgaggatagcgtgcgcccagatggagctcgggcggtcggcgccggggtgcacctgagccaccgcgccgtcgccgtcaccgtcgtcggtcgcggccccgcgggcggtctccatctcctcgaggaagccgctgtggcagaacgggcacttcatctccacctcgccctccgcggggctaacggccgcggcgcacatgtggcaccagtaccttccgacgcccgcctgctccgccattgctgctgagcttctagcgctttaatttccccgccaatgcagctactctagtaattgtttgttgggggtgggggaactcagctgcgacaaacaaatcgacaaggaaagatcagagtgctgacgctacaatccatcgtggatgtgcatgacgtcccactgaatgcagcaatcatctggtacggcagatcgaaccatttgcgtgctcttgtgatggagcagacagaccagacgcggcttcgtcgaaagctcgtgtaaatcaaaagactaggagcaaggtcaaccaccaggcatccaacacacgattcaatcaggaaaacaacatacagatggatccacagatagcaggcacatacgctcccaatctggcggcgataagatacgagtaggcgcacagaacagatggatccacaagctgagtctcagcttttggatctcagcaaagcaaggggaaagcatgaaacgaagcaagcaagcaaccaaccaaccaaccaatcaatcaatcaccttgggcagggcggggcggggcggaggcagggcatgtgggtggggacggggaggaagggggagcagcgaggccagaggggccggctgtctccgcctgctttatactagtactatcaatctccgcggcagcggcggcatcctcctccctgcatcgaccatggcctcggcccggcacacatgtttaggggcagtgattaggaggggccctgcctgctcaattattgcgctggacttctaattttaagttttcccccacctgatttcctcctcgccctcgaacgctcgctcggctcggctaataaaagtttc

SEQ ID NO: 114636 - DNA, 1994 bp, Zea Mays
cttaattccgtccacagaagaagaatccttctcgacgccgcccccattcattcttggagggcaagaagaacgcgcagtccaaaagcgaaacaaggggaaggggcgaggcagccaaacgaatcccagcacctgcctctcctttgcttgcgcagatctagcgatggcggcgggcggtgagttggcgtggggggaggagcccgtggcgcggcgccggcctaagaccaagatcgtctgcacgctcggcccggcgtcgcgatccgtcgagatgatctcgcgcctgctgcgcgccgggatgtgcgtcgcgcgcttcaacttctcccatggctcccacgagtaccaccaggagacgctcgacaacctgcacgccgccatggagctcaccgggatcctctgcgccgttatgctcgacaccaagggtccagagattagaactggatttttgaaagatgggaagcctattcaattgataaaaggccaagaaatcacaatttctacagactatagcattcagggtgatgagaaaatgatatcaatgagctacaagaagcttgctgttgatctgaagccaggcagtgtcatattgtgtgctgatggtaccatcactcttactgttcttcactgtgataaagaacaaggcttggttcgctgccgctgtgagaacactttcaagcttggcgagaggaagaatgttaatcttccaggagttattgttgatctccccacactcacagacaaggacaaggaggacatccttaaatggggtgttccaaacaagattgacatgattgccttgtcatttgttcggaagggttcggatcttgtggaggttaggaaggtacttggtgagcatgccaagtccataatgctgatgtcaaaggttgagaatcaagagggagtagctaactttgatgatatcctggcaaactctgatgcttttatggtggcaagaggtgatttaggaatggaaattcctatagagaagattttctttgcacagaaggtgatgattttcaagtgcaatattcaaggcaagcctgttgtgactgcaacccagatgttggaatctatgatcaagtctcctcgccctactcgggcagaagcaacggatgttgcaaacgcagttcttgatggcacagactgtgttatgctcagtggtgagactgctgctggggcttatccagagttggcggtgcagactatggctaagatctgcctgcaagcagagtcttgcgtagaccatgctgctattttcaaatcaatcatggcttcagctccaattccaatgagtccattggagagccttgcatcatcagctgttcgcacagcaaactctgccagggcagcacttatcttggtcctgaccaggggaggaactactgctaggcttgtagccaagtataggccatccatgccgattctgtccgttgtggttcctgagctgaagacagactcgttcgactgggcctgcagtgacgagggtccggcaaggcacagcctcattgtgaggggtgtcatcccaatgctgagtgccgccactgccaaggcctttgacaacgaagccactgacgaagctattggttttgccattgaaaatgcgaagacgatggggctatgcaacaccgatcaatccgttgtggccctgcaccgcatcgggatttcatccgtcatcaagcttcttactgtgaagtaggggtccaagggtgagggacaccattttgcttggtgaatttttgtgaggctgcttacgcacatcagcgtatccacagcttttctgttgccaaagatacagactttgcgttctggtacaccttggtgttacaaggttgtgggaatttgtcgtttagatattagcgatttaaacagtttatcaactgctatagctaattaatttgcagctgtgctgcaactttatcgtactgaaaattttatgtttgtttcacatgcttgcttgttgattttatttcgtttggcaaaaaaaaatttcttgtttggtt

SEQ ID NO: 114637 - DNA, 354 bp, Zea Mays
atgttcggctccctcaacttccttgccaccaccaccggagaacaccgcctcaccaaccgcaacgtgcctatcgccacaagcataggacttgcgtgctctgccaggagcaaggcggacaagcaatgcctcaagaggcatgttgccgcccttaagcggtgccttaaccggctcactgccgccatcaagcaacatgcaaggaaagcctccccatcgaccctagtggccatcatcgaccaccaaccaatgttcgtccttgacctgctcacgaacaactcaagccacgcctcgatagagcccaactacgacatagaaaaggcaatgggaagtgcctgtttcatggagactccaccatga

SEQ ID NO: 114638 - DNA, 2224 bp, Zea Mays
gcctgaagaacagtagaactcagactcgagcgctccaaagcgagccaccgccgatctgctcctccctcttgaccctcctccgtgcgctgcgcaggcatgaggcgcctcctcggcggctccctcgtcctttgtatcgccgcggtggtggagtccaagccgcctctcgactctctgggcataccaccgcaagatgaggcgtactacataggcggcgtgatcaaatgcagggacggatcgggcaggttttccagggaccagctcaacgacgacttctgcgactgccccgacggcaccgacgagcccgggacatctgcatgccctgaggcgaaattctactgcaagaatgcaggccacactccagtcacgatcttctcgtcacgagtgaatgacggcatttgtgattgctgtgatgggagtgatgaatatgacagcaatgtcacctgtaagaacacttgctgggaggctggaaaggtggcaagggagaaattgaagaagaaaattgctacatacgaaaatggtgttgttattcggaaacaggaagttgaaagggcaaaagaggcttttgctaaagatgaagcagatttagcaaaattgaagggcgaagagaaaatgctccaaggacttgttgataaactcaaagagcaaaagaaattaatagagaatgcagaggaagaagagcgtttaagaaaagagaaggaagaaaagagaacaaaagaagaagatgaaaagcaagctgctgttgaaaagggagcgcttgatgcctctcgggatgtagattctaaggaaattcatgatcatctgcaagaaggtgaaaacaagcatgatggacatgcaacaggccatgataatcatgtaacagaaagcagggcatctattgagcagcatggttctgtaagcaaagatggtattagcgttgaaggtggaactgtagatgaattgccgcaggagtctgcagcacctaccatagagaaggattctagccctgacaatcctgagggtttatctagggaagagttaggtcgtatggtggcttctcgttggactggggaaagtgtaactgaggttagtaaagatgataagaaggggcatgaagatcagcaagaaataccagaacctgcagaggaagcacttgaagatgaattagaaattccagaacctgccgaagaaaattatggtggttatcattcagaagttgaggatgataggcgtaaatatgaagatgaagagttttatcatgagtcagaagatgaatatgttgacgaccatgatgagcatgttgagtcctacaaatctgatgatgaccaaaaagatttaactgagccaggacatgcatcgtggttggacaaagttcagcagactgtacaaaatgttttccaaaaattcaactcttttaagacccctgtagatttgtcagaggcttctcatgttcgtaaggagtatgatgatgctagctcaaagctttcaaaaattcagtctaagatatccagtctagctgagaagctaaaacatgattttggtaatgacaaggagttctattccttttatgatcagtgttttgagaccaaggaagggaagtatacttacaaggtctgtgcatataagaaagcatcacaggctgaagggcacagttctaccaacctggggcggtgggacaaatttgaagattcgtacagagtgatgcacttttcaagtggagacaaatgctggaatggtcctgaccgaagcctaaaggttaggcttagatgtgggctgagcaatgagcttaatgatgtagatgagcctagcagatgcgagtatgtggctgtattgtcgacccctgcagtttgcgtagaggagaagctgaaggagctgcaaaacaaactggacgccatgtctttgaagcagcccgggcatgacgaactttaaaaactttagaatattccagcgtgaacataaagaagatgtcaccaggaggcatagctctgacagttacatccataacatgataggcatggaagtcaatgaggtatatggacagaaacgggccaagcgcgagaaatgagaatgtagagtttaggtcgcctaccaggctatattagctcgcatagaacattttttttagctgaaatttgatgttgcaattttccagactcatctgatggaatatatagtaagaaacagtacaccttgaatcagcatatactttacccagggtttttacatgaaactatgttcagaacggtca

SEQ ID NO: 114639 - DNA, 3880 bp, Zea Mays
atggcgtccgagcgcccgctcctcatcgccacaaccccgggcgcctcaacccccgacgacgccccctcgccgcatcccccagcggcgtcactgctcccgccggcccagtcggagcctcctctccgcgcagaccgtctcgccttctccgtggagatccccgacccattccgctcctaccgccgtggcgacggacccgccgccgacccatccgcgtcgttggagagggaacgtgatgtcggggatgacgaatcccgagaggtcatcgtgggagagtcctcaccggagttctctgggaacgccatccgaacggcaaagtactcgttcctcacctttctaccgcggaacctcttcgaacagttccggcggctgtcgtacgtctacttcctcgcaatcactgtgcttaaccagctgccccaggtcgctgtcttcggccgcggtgcgtccgtgctaccactcgccttcgtgctcttcgtcactgccgtaaaggacgcctacgaggatttccgccgccaccgttccgaccgccaggagaacaaccgccttgccaccgtgctcgcactgggcacagctggcgagttccagcccaagagatggaagcacatacgcgtcggggacgtggtacggatcgagtccaatgagacactgccggccgatatggtgctgcttgctaccagcgatcccaccggtgttgcgcacgtccagactgtgaatctcgatggggagaccaatcttaagacgaggtatgccaagcaggagacacatgtcatgttctcccagaatggtggtgttggtggcgtcctgcattgcgaacgacccaacaggaacatttacggattccaagcaaatcttgagattgatggcaagcgtgtctcgcttgggccatccaacattgttcttcgtggctgtgaactcaagaacaccacatgggcaataggggttgtggtatatgctgggaaggagaccaaggtgatgctaaatagctcaggggcgccatcgaagcggagtcgcttggaaacacagttgaatcgggagactgtcatattatctattatgcttattgggatgtgcacaactgcatccgtgcttgctgggatttggctgctgaatcaccggagggagctggagttcacccaattcttcagggagaaggactatacaactgggaaaaactacaactattatggtgttgggatgcagatattcatcacattccttatggcagtgatagtgtatcaggttatcattcctatctcattgtatatatcaatggagctggtaaggcttggacaggcatatttcatgggtgctgataaagatctgtatgatgagtcatcaaggtcaaagttccagtgcagagctttgaatataaatgaggatttagggcaaataaggtatgtgttctctgacaagactgggacactaacggagaacaagatggtcttccagtgtgcgtcaattcgtggggttgattacaactctggtaaagatacaggtggatactcggttgtagtcggtgatcatctgtggacaccaaagatgtcagttaaaattgaccctgagctcgtgaaactactcagggatggtggttcaaatgaggaaccaaagcttgttcttgaattcttacttgctcttgcttcctgtaataccatagtgccgcttgtccttgacactagagactcaaaacagaagttgattgactatcagggtgagtcccctgatgaacaggcactagcatatgctgcagcatcttatggcattgtccttgttgagcgaacatctggttacatagtgattgatgtccttggtgacaggcagagatttgatatactgggacttcatgagtttgatagtgatcgtaagagaatgtctgttatcgtgggctgccctgataagactgttaagctgtatgtgaaaggtgcggacagttcagtatttggaattacaaacaattcatctgaattggacattgttcgtgctacagaggcacatctccataagtactcttcacttggactaagaactcttgttgttggtatgcgtaaactgagtcaatctgagtttgaggagtggcaattagcttatgagaatgccagtacagcagtacttggaagaggaaacttactccgatctgttgctgcaaacatagagatcaatgtcaacatattgggggccactgggattgaagataagcttcaagatggggttccagaagcaatagaatctattcggcaagcagacataaaggtttggattttaaccggagacaagcaggagaccgcaatttctattgggtactcctgtaagctgctgaccaatgacatgacacaaatcgttataaataacaattcaaaggagtcatgtcagagaagtcttgtggaggcgcttgctacaactaagaagctcagagccgcttcatcaattggtacacagggtccattgttagcatcagaaacttctaatgtaactcttgctttgattgtagatggtaacagtcttgtttacattctggagacagatttgcaagacgagcttttcaaactagcaactgaatgtagtgttgtcttatgttgccgagtggctccattacagaaggcagggatagttgcccttatcaagaacaggacaaatgatatgaccttagcaattggcgatggcgcaaatgatgtttcaatgattcaaatggctgatgttgggattggcatcagtggccaagaaggtcgacaagctgttatggcatcagatttttctatgggacaatttagatttttggttcctcttttattagttcatggtcactggaattatcaaaggatggcctatatgatcctttacaacttttacaagaatgctatgtttgtcttggttcttttctggtatgtactttatacagcattcactttgacaactgctatcactgagtggagtagtctcctgtatactgtcctgtatacatcccttccaacgattgtcgtcggcattcttgacaaggatcttaataaggcaaccctgatagcttatccaaagctatatggatctggccagagggacgacaagtacaatgtgaatttgtttgtgctcaatatgcttgaagcactctggcagagtttggtcgttttctacttgccgtattttgcatatagacgaagcacaatagatatgtctagtcttggagacttgtgggcacttgcacctgtcattgttgtaaatatgcaattggccatggacattattaggtggaactggataatacatgcgtttgtatggggcacaatagccgcaacaacagtttgtctctttgtgatagattcgatatgggttcttccagggtatggggcaatttttcatataatggggactggtctgttttggtttttgctgcttatcattgttgttacagcaatggtcccacattttgtgttcaaggctttcacagaacactttaggcccagcgatattcaaatcgcccgtgagatggaaaaatttgcaaatgtcaatcaggtgaaccggttggaatttccaacgagaggactttcatgacaatagtagggaaactatagtatttcgttcttttcttattttcacgtctttcccccctactggtgtgaataggagctgattcatttagctgtaaggtgataggtttaatctctaatgtgcatgtatgtattcgtataaaatttacagaaaaggaaatagaagtccacgtacaagttttcatctgtttgttgcagcattattgcaggctaaatttgtggagagtgtattgtaaatatgggatactgatgcttggagattcaattttcaagtttgtagagagaatgtagatttgggaacacacggatgccaggaaatttaagttccagttttgtttcttccgaaa

SEQ ID NO: 114640 - DNA, 387 bp, Zea Mays
caggagcaggggaacccggatatgggcgatagcgcgattaccgaaacctttggtatcggaggtgcggcaatgatcgcagcgcctggcgtaacgcgctttgtcggtgcgggtggcatggaagcggcaagagcggtatctgaagagatggcggaaatttaccttgaacgcaatatgcagttgcagatcccaagctgggattttcagggcgcgtgcctggggctggacattcgtcgcgtggtagaaaccggcattacgccactcatcaataccggtatcgcccataaagaggcggggatcgggcagattggcgcaggcaccgtgcgggcaccgctggcgtgctttgaacaggcgctggaagcactggctgaaagcatgggtattggttga

SEQ ID NO: 114641 - DNA, 237 bp, Zea Mays
atgtgctccaagtatcatttaagaggaaatcctgaggctaagaaccttctaagaggcaaggaggatataggtaatcctgatgatcatggtggagtgaaagagggtgaagacctgaagaggagcacaatgattgcaagaatcatcattgaggaagagttgccaacagcaagaaaaactggaagagttgttgcacaaggtgataatgcaggttcttggagtgtatactgcccaggatga

SEQ ID NO: 114642 - DNA, 1102 bp, Zea Mays
gtcaccccaatccaattccaagctgcgagctgtcgagctgctgcacctcccctctctcgctagtcgcttccattcccttcgtcacatggcggcaaaccgctgcaccggcctcgacccaatctggacccacgccggcgccagccactgctacttctcgtcgccccccggctgcctcacctccgcggccgccttcgagaactcggcgctcacctcggcgctccgcgcctccattgcgcctgcccacgccagctccgccgcggcccggcccttctccccgtccaccccgtcctcctcgacctcgtccgcctccgagctcctgtccagcggccacgacgcagctcccgcgccggtgtccagcaggccgggccagccgcccgccgcccgggccgtggcgggaggacctagagggggccgcgtcgccaagcgcaagccgcgcccgtcgcggcgcccgcagaccacatacatcaccgccgaccccgccaacttccagcgcatggtgcaggagatcaccggcctccccgcccctgggccctcctcctcctcctcccccgctgccgccgtcgccgcgcccagctggacgcccgccgcgcccgcgtgcgtgctcccgacactggacacgtccgctttcttcctgctcgaccgcgccgccgctgcgccagcgccggtggacaggagcccgggcgcgcgcgcgtggaccgcgacgcacacgcacgccgccgtggcagctggggccgacggctcggactcggcggcgctgctagagctggaggcactggtgcgcgccattgagggcgagtgtggcttcccggccctggagagctcggggctcatctgatgagttgggattggagcttttgtccgtccgaatgtccgatggcacatgatcggacggcggatgtcggttgagccgatgcctttgagatgtatactagcaagaagtattaggctgctgcctgcttttagttgagtacatctcttctccatgaggattacatgcatggttccttctattctagtcagttaaggagatgacagtgttaattacttattccgtaatgaaatctgatggctttcttaacgtgaaggcctttgcgtgttccct

SEQ ID NO: 114643 - DNA, 1679 bp, Zea Mays
ctcgcgtctcgttgtcccatctagcccatctgctatcagcgaggacgaaggcacaaacccctcacctccctcaaaccctagccctcgctctcccgcttgttcccgtcaccgccatcatgggctcagatgcggacatggaggactacgggttcgagtactctgacgaagagccggaggagcaggatgtcgacattgagaaccagtattacaactccaaaggtttggtcgagacagacccagagggtgcacttgctggttttgatcaagtggtcagtatggagcctgaaaaggctgaatggggatttaaagctcttaaacaaactgtcaagctttactataagctggggaaatacaaagaaatgatggatgcatatagagagatgttaacatacataaaatctgcggtcacccggaactacagcgagaaatgtataaacaacataatggattttgtttctggatcagctagtcagaattttactcttctgcaagagttctaccagacaacactgaaagcgcttgaagaagcgaaaaatgagagattatggttcaagacaaacttgaagctttgcaaaatttggtttgatataggcgagtacggtcgcatgagcaagatattgaaggaactgcataaatcttgccaaagggaagatggttctgatgatcaaaagaaaggcacacaacttttggaagtctatgctattgaaatacaaatgtacactgaaacaaagaataataaaaagcttaaggaattgtatcaaagggctctttccatcaaatcagcgatacctcatccaagaatcatgggtataattcgcgagtgtggtggaaagatgcatatggctgagaggcagtgggctgaggctgcgactgatttctttgaagctttcaagaactacgatgaagcaggcaatccacggagaatccaatgcctaaaatatcttgtccttgccaatatgttgatggaatctgaagtgaatccttttgatggacaagaggccaagccgtacaagaatgatcctgaaatccttgcaatgacaaacctgattgcagcgtaccagaagaatgacatcatggaatttgaaaagatcctgaagagtaatagaagaacaataatggacgatccttttatccgtaactatattgaggacttattgaagaacatcagaacccaagtgctgctcaagcttattaaaccatatactcgaatcaggataccattcatttcacaggaactcaattttccagaaaaggatgtcgagcagctgttggtgtcactcattctggacaaccgtatccaaggccacatagatcaggttaacaagctgctagaacgtggagaaaggtccaaggggatgaggaagtacaatgctatcgacaagtggaatactcagctgaagtccatttaccaaacattgtccaacagagtttgatgagaaggatcgctgctgctgcgtgcattgcacacctagcattgttgatagcctgttttgcggatttgagggcaactgcaaagaactgtctggtgacgcttgcgatagaatcctggatctgggtaaagttaatattgactacgaggtcgtctctgaattgaatctggtgttttgatagtgcaagactacttgactggtcaaaagccaaatatacgacgatgcccttctggttggtctttgattgca

SEQ ID NO: 114644 - DNA, 966 bp, Zea Mays
cgcaccgcatatacgcctactccccgaacagctcgctccggctgcccagtcctcgccagtcaccaccgcccagctcgtcgccagtcgccaccaatggcctcctccgccatggagctctcgctcgtcaaccccgccgcgacgcaccgccaccgaggcggcctcgtcggcctgcccctcgcccggcgctccgtggtacgcttccgcgtgtccgcggccgccgcgccgcccaagtcctcgggccccaacaagcggggcaagacggagatccaggagacgctgctcactccccgcttctacaccaccgacttcgacgagatggagcgcctcttcaacgccgagatcaacaagcagctcaaccaggcggagttcgacgcgctgctgcaggagttcaagacggactacaaccagacccacttcgtgcgcaaccccgagttcaaggccgccgccgacaagatggagggcccgcaccgccagatcttcgtcgagttcctcgagcgctcctgcaccgctgagttctccggcttcctcctctacaaggagctcggtcgcaggctcaagaaaactaacccggtcgtggcggagatcttctcgctcatgtccagggacgaggcgcgccatgctgggtttttgaacaagggtctgtctgacttcaacttggcgctggacctggggttcctcaccaaggctaggaagtacaccttcttcaagcccaagttcatcttctatgccacctacctgtccgagaagattgggtactggaggtacatcaccatcttcaggcacctcaaggcgaacccagagtaccaggtgtaccccatcttcaagtacttcgagaactggtgccaggacgagaacaggcatggtgacttcttctctgccctgctgaaggctcagccgcagttcctcaatgactggaaggccaagctctggtcacggttcttctgcctctcggtgacgaatctctag

SEQ ID NO: 114645 - DNA, 975 bp, Zea Mays
atgcagctgcgcagctgcgcaaatgccggtcgtagacgatcactggtgcatcttggtcggtggcgccgggtatcccaccggcaggacatagggcgagtgatggcccggcgggaacatgaccggcgtgccgacggccgccggcgccaccatgtgcccggcgaccgggtggcccatgggcgcgtgcccgtacatgcccatcggcggaaccgggtggtggtgcttcatgccgcccggccccatcggcatcgcccccgccgcggtcgggccgccgcccgtgatgggcgcgccggccgtggccacctcgccggcggtcacgctggtgatgtcgtggatgctggagcggcgcctgtcccggttcatcgagttgaggcggatgaagtatttctgcgcgtggctcgccacctgcgtcggcgtccgcgagatgacgaagttgcgcgagatgctccgccagtcgcccttgccgaacttgtccagacccaacaagaacaacctgtgctcctcttccgtccacggcacgcccttgcgccgctcctgctcggccttagagcaactcttccccgcgtcagcgccgacgccgcccttccgttcttcgcgtcggtgcccgctccctcctcctccgtccttgggcgtggaggggccggcggcaccggagccctcgggcgtcgccgcggacgactcctccccagcgtagcgcgggagcgggatgcggccggcctcgatagcggccacgtcctccaccagcgcctcgtagtgccgccgcacctcctccgccgttcgcgccggcacgctcgccaccagcgccgtgaaccagccatcatcaggcggcccgtcggccggcggcgccgcggaggctgccaccgcgttctcgaacgccttgtcctcctcccgtgtccacgccgccgtgtccgtcgccagagtggtcatcgcagatgtctggtccgcgggtggtggggcgctctctctgcgacagtatag

SEQ ID NO: 114646 - DNA, 106 bp, Zea Mays
tccgcgtctaggggcacaccgttcgcggccgtccggtcatgcccagtgccacaaatggtgctcaatagggtcaatgcaagctaaaacgatacgatcaggcaactaa

SEQ ID NO: 114647 - DNA, 2698 bp, Zea Mays
ctaccaccagtgtcccgtccccggtttgactgccgagctgattcgtgtgggcgtcaatggtgaacaccgggcgcttcgtcgtcctcgtcctcgcctaccgcctcctggtacccctcctctcaggctcagctgaaccggaccacaccaccaaagagtcgtatgtcgtatacatggggagcccgtcgggcggcggcgacccggaggcggtgcaggcggctcacctgcagatgctgtcgtccatcgtcccgagcgacgagcaggggagggtggcgctgacgcatagctaccaccacgcgttcgagggcttcgccgccgcgctcaccgacaaggaggccgccgcgctctccgggcacgagagggtggtgtccgtgttcaaggaccgagccctgcagctgcacacgacgcggtcgtgggacttcctggaggtgcagtccgggctccagtccggccgcctcggccgacgggcgtcgggggacgtcatcatgggcatcgtcgacacgggcgtctggccggagtcgccgagcttcaacgacgccgggatgcgggacgtgccggcgcggtggcgcggcgtgtgcatggaaggacccgacttcaagaagagcaactgcaacaagaagctcataggcgcccggttctacggcgtccagcccgagtcgtcggcatcgaacgcctccagcagcgccgtggcgacgccggccgcaaccggatcgccgcgggacaccgtgggccacggcacgcacaccgcgtccacggcggccggcgcggtcgtgtcggacgccgactactacgggctcgcccggggcgcggccaagggcggggcgccgtcgagccgggtggccgtgtaccgcgcgtgctcgctgggcgggtgctccgcgtcggccgtgctcaaggccatcgacgacgcggtgggcgacggcgtggacgtcatctccatctccatcggtatgagctccgtgttccagtcagacttcctcaccgaccccatcgcgctgggcgcgctccacgcgcaccagcgcggcgtgctggtggtctgctccggcggcaacgacgggcccaacccctacaccgtcgtcaactccgcgccgtggatcctcaccgtcgccgcctcatccatcgaccgctccttccagtccaccatcgctctcggcaacggcgacgtcgtgaagggagtggcaataaacttctccaaccacagcctcagcggcgagcagtaccctctggtgttcggggcccaggtggccgcccactacgcgccggtcgccgaggcgagcaactgctaccctggatcattggacgcgcagaaggtggccgggaagatcgtggtgtgcgtaagcacggacccgatggtgtcgcggcgggtgaagaagctggtcgccgaggggtcgggcgccaggggactggtgctcatcgacgacgccgagaaggacgtgcccttcgtcaccggcggcttcgcgctttcccaagtcggcaccgacgccggcgcgcagatccttgagtacatcaactccacaaagaatccgaccgccgtaatcctccagaccgaagacgtcggcgacttcaagccggcgccggtggtggcgtccttctcggcgcgtggccccggcctcaccgagtccatcctcaagcctgatttgatggcgcccggcgtcagcatcctggccgccacgatcccgtccaccgatagcgaggacgtgccgccggggaagaagcagtcggcctacgccatcaagtccggtacatcgatggcctgcccgcacgtcgccggcgccgccgccttcgtgaagtcggcgcacccgggctggacgccgtccatgatcagatcagctctcatgaccacagccacgacgacgaacaacctcgggaaaccactggcgagcagcacgggcgcggcggcgacggggcacgacatgggcgccggggagatgagccccctgcgcgcgctgagcccgggcctggtgttcgacaccagcacgcaggactacctcgacctcctctgctactacggctacaaggagcagcaggtccggaagatctccggcgccgcgcgcttctcctgccccgcgggcgcgccctcgccggacctcatcgcgtcggccgtcaactacccgtccatctccgtgccgcggctgaagagggggagacccgccaccgtggcgcgcaccgccatgaacgtggggccctcgaacgcgacatacgcggccaccgtcgatgcgccccccggcctggcggtgcgggtctcgcccgaccggctcgtgttctcgaggagatggacgacggcgaggtacgaggtgagcttcgacgtggccgccgccgctgccgtgagcaagggctacgtgcacggcgcggtcacctggtccgacggcgcgcactcggtgcggacgccgttcgcggtcaatgtcctctgatctggtggagtcatcggcgtttttgcttctttcataatcatgttcttggttgcatgagtgtttgatttttgtgtcccccctcaatttggtagaaggggaataatttcaaattcagttttgttgtagcacccctgcttcgtgtaggttcatctcacagttaagattgtgatggccaaggctagaaaactagccatcatatttgtttgaaacctcttcttcttgatacaaacatgtgtaatgttcatgcgccttcgaaaaacaaaacatctaaaaaatatatctactgtgagtct

SEQ ID NO: 114648 - DNA, 1426 bp, Zea Mays
ccagctacaaattgcgcccatgctgccggtaccagtccctaccaccagtgtcccgtccccggtttgactgccgagctgattcgtgtgggcgtcaatggtgaacaccgggcgcttcgtcgtcctcgtcctcgcctaccgcctcctggtacccctcctctcaggctcagctgaaccggaccacaccaccaaagagtcgtatgtcgtatacatggggagcccgtcgggcggcggcgacccggaggcggtgcaggcggctcacctgcagatgctgtcgtccatcgtcccgagcgacgagcaggggagggtggcgctgacgcatagctaccaccacgcgttcgagggcttcgccgccgcgctcaccgacaaggaggccgccgcgctctccgggcacgagagggtggtgtccgtgttcaaggaccgagccctgcagctgcacacgacgcggtcgtgggacttcctggaggtgcagtccgggctccagtccggccgcctcggccgacgggcgtcgggggacgtcatcatgggcatcgtcgacacgggcgtctggccggagtcgccgagcttcaacgacgccgggatgcgggacgtgccggcgcggtggcgcggcgtgtgcatggaaggacccgccttcgtgaagtcggcgcacccgggctggacgccgtccatgatcagatcagctctcatgaccacagccacgacgacgaacaacctcgggaaaccactggcgagcagcacgggcgcggcggcgacggggcacgacatgggcgccggggagatgagccccctgcgcgcgctgagcccgggcctggtgttcgacaccagcacgcaggactacctcgacctcctctgctactacggctacaaggagcagcaggtccggaagatctccggcgccgcgcgcttctcctgccccgcgggcgcgccctcgccggacctcatcgcgtcggccgtcaactacccgtccatctccgtgccgcggctgaagagggggagacccgccaccgtggcgcgcaccgccatgaacgtggggccctcgaacgcgacatacgcggccaccgtcgatgcgccccccggcctggcggtgcgggtctcgcccgaccggctcgtgttctcgaggagatggacgacggcgaggtacgaggtgagcttcgacgtggccgccgccgctgccgtgagcaagggctacgtgcacggcgcggtcacctggtccgacggcgcgcactcggtgcggacgccgttcgcggtcaatgtcctctgatctggtggagtcatcggcgtttttgcttctttcataatcatgttcttggttgcatgagtgtttgatttttgtgtcccccctcaatttggtagaaggggaataatttcaaattcagttttgttgtagcacccctgcttcgtgtaggttcatctcacagttaagattgtg

SEQ ID NO: 114649 - DNA, 1300 bp, Zea Mays
ccagctacaaattgcgcccatgctgccggtaccagtccctaccaccagtgtcccgtccccggtttgactgccgagctgattcgtgtgggcgtcaatggtgaacaccgggcgcttcgtcgtcctcgtcctcgcctaccgcctcctggtacccctcctctcaggctcagctgaaccggaccacaccaccaaagagtcgtatgtcgtatacatggggagcccgtcgggcggcggcgacccggaggcggtgcaggcggctcacctgcagatgctgtcgtccatcgtcccgagcgacgagcaggggagggtggcgctgacgcatagctaccaccacgcgttcgagggcttcgccgccgcgctcaccgacaaggaggccgccgcgctctccgggcacgagagggtggtgtccgtgttcaaggaccgagccctgcagctgcacacgacgcggtcgtgggacttcctggaggtgcagtccgggctccagtccggccgcctcggccgacgggcgtcgggggacgtcatcatgggctggacgccgtccatgatcagatcagctctcatgaccacagccacgacgacgaacaacctcgggaaaccactggcgagcagcacgggcgcggcggcgacggggcacgacatgggcgccggggagatgagccccctgcgcgcgctgagcccgggcctggtgttcgacaccagcacgcaggactacctcgacctcctctgctactacggctacaaggagcagcaggtccggaagatctccggcgccgcgcgcttctcctgccccgcgggcgcgccctcgccggacctcatcgcgtcggccgtcaactacccgtccatctccgtgccgcggctgaagagggggagacccgccaccgtggcgcgcaccgccatgaacgtggggccctcgaacgcgacatacgcggccaccgtcgatgcgccccccggcctggcggtgcgggtctcgcccgaccggctcgtgttctcgaggagatggacgacggcgaggtacgaggtgagcttcgacgtggccgccgccgctgccgtgagcaagggctacgtgcacggcgcggtcacctggtccgacggcgcgcactcggtgcggacgccgttcgcggtcaatgtcctctgatctggtggagtcatcggcgtttttgcttctttcataatcatgttcttggttgcatgagtgtttgatttttgtgtcccccctcaatttggtagaaggggaataatttcaaattcagttttgttgtagcacccctgcttcgtgtaggttcatctcacagttaagattgtg

SEQ ID NO: 114650 - DNA, 714 bp, Zea Mays
aaatatgtgaaatttgtgggcacaagatcctattagggcctgttcgtttcgatccatatggattggttgaacggtattagcctcaaggctgcaatgcaagaacctgtcatccctacagagccctctgaacgtgactgctacttgcgcttctttcgccgagaagaggtcggctcctgtccatgccacggctgaggggtctgaggctggtgcggcggagcagccagaagaaccgaaacctgcgaccaagatcgaggaaatgccgctcgagtcgaagcagaagatgatcatggagcagagggcgcggatgaagcttgccaagaaactgagacagcggcgcaagcggctcgtccgcaagaggaagcttaggaagaagggcaggtggccaccgtccaagatgaagaagctcaagaatgtatgaacggcaccgccaccctgccttggctttgtgtcgtgtggtgccccgtttaccaatttcgctgttcagaacctgagacacgatgcctacgaaatataattctgtttccatgtaatcgaatcttcttacagtctagtgtactcaaatgtgtctgaaatttctctccagatgtgctttagctatggctcaggactaagctctattatatttgtctgtgcttcataactacacgttctttcatgaacaaatctggggtagctaatacatgttcatgacacatctggagcatcttttatagc

SEQ ID NO: 114651 - DNA, 753 bp, Zea Mays
ctgagatctgaccgttgagtgccgatcggacgggaaacattttctgccctcgaaggcttatccgattattatccctcgaaggccaaggtcaaacgcacccatggcgctcctcctctccccgccgatcgtatccttcgtctccccgtctgctcctcgctcccgacctatctccgctgtcgccaacgtctcattctctgcctcaaggctgcaatgcaagaacctgtcatccctacagagccctctgaacgtgactgctacttgcgcttctttcgccgagaagaggtcggctcctgtccatgccacggctgaggggtctgaggctggtgcggcggagcagccagaagaaccgaaacctgcgaccaagatcgaggaaatgccgctcgagtcgaagcagaagatgatcatggagcagagggcgcggatgaagcttgccaagaaactgagacagcggcgcaagcggctcgtccgcaagaggaagcttaggaagaagggcaggtggccaccgtccaagatgaagaagctcaagaatgtatgaacggcaccgccaccctgccttggctttgtgtcgtgtggtgccccgtttaccaatttcgctgttcagaacctgagacacgatgcctacgaaatataattctgtttccatgtaatcgaatcttcttacagtctagtgtactcaaatgtgtctgaaatttctctccagatgtgctttagctatggctcaggactaagctctattatatttgtctgtgcttc

SEQ ID NO: 114652 - DNA, 1475 bp, Zea Mays
atatatacttagggcagggggttttgcatctctctattcattcatccggccaccaccgctctaactactcttcaagagacgacgaccaacaggcacgtcgatcgtcttccggcgagggcgacggaaggatgtccggcggcgagagtggtccggcagcggcggcggcggccgttccgttgctgcaggcgccggaggggaggacgacgaagtactacgagggatgccccgggtgccggctggacgaggccaacaagactaggaccggcgtcccctacctcaatttcttctacatctgggtcgtctgcctcgccgccgcactgccggtccagtcactgttcccttatctatacttcatgatcagggacttgaaagtggcgaaagaggagcaagacattgggttttatgctggttttgttggggctacctatttccttggaagggccatcagcgccgtgccatggggcatgttcgctgacaagtatggaaggaagccatgcattgtgatcagcatcctctcagtgattgtgttcaacacactgtttggacttagcacaacttactggatggcaattgtgactaggggattacttgggttgctatgtggcatacttggacccatcaaggcctatgcttcagaagtctgcaggaaagagcaccaagctctgggaatctctcttgttacatcttcacgagccatagctcttgttattgggcctgctattggaggcttccttgcacagcctgcacagaagtacccaaatcttttctctgaagagtccatatttggaaggtttccatacttccttccttgctttgtaatatcgttgctagcagcaggatcatgtattgcatgcatttggcttccggaaacgctacactttcatggtgatgacaaagtagaagctattgaagaactggaggcacaagttcgtggctccgaatctacaaaagatctgcataagaattggcaattgatgtcagcaataatcctctactgtgtcttttctatgcatgacacagcttatcttgaggtattttcactgtgggctgtgagcagtagaaaatttcgggggcttagtttgacatcccaggatgttggtactgtgctagccatctcaggttttggtgtacttgtataccaactcgctatttatccttttcttgcgaagtattttggaccaatcaagacatttcggcctgccgcgatcctgtcgatcattctcctcactacgtaccccttcatggccaatttacatggcctggagcttaaaatactcatcaacattgcatctgttttgaagaacatgtttgcggctaccatcactattgcctgcaacatcctacagaacactgcagtgacgcaagagcagagaggcgttgctaatggcatctctgttaccctgatgtccgtgttcaattctgttcctccagcagcagcaggaattcttaaatatcttccatattcccttcattag

SEQ ID NO: 114653 - DNA, 406 bp, Zea Mays
atatatacttagggcagggggttttgcatctctctattcattcatccggccaccaccgctctaactactcttcaagagacgacgaccaacaggcacgtcgatcgtcttccggcgagggcgacggaaggatgtccggcggcgagagtggtccggcagcggcggcggcggccgttccgttgctgcaggcgccggaggggaggacgacgaagtactacgagggatgccccgggtgccggctggacgaggccaacaagactaggaccggcgtcccctacctcaatttcttctacatctgggtcgtctgcctcgccgccggtacgtatacctccgctccgccgcgatgtacgcgcgcgtgctgcactgcctgccgctacggcctacgggcagggctaataaggcgttacgg

SEQ ID NO: 114654 - DNA, 1245 bp, Zea Mays
aatttgcaaggggtttcatttaatccccagaaaggtagctttgttagaatatacgctgctaagatcgaataaatgtatttagcaccttatatctctactaccatattgtttggttcacgaaatgtaaagtaaataacaatgttaatgattcacactcgagtaccagccgtaacaagtgattttatgtctatttgtcgcatagaataaaaatatcagtaagagctaaacaatccgtagcttttcatgctgaaggtgatgattgttattaacttgtttaccgccgttactccgtctcatgctaatggaacttttgactgcaaaaattccgaaccaggtggatcaacttgagggtaccgttccaggaagtgtacggggacgtccgctgcaacctgaaggaggcagtccagctggccgggctcacatgggaggggcgcgctcactgcgggctcgacgacgcccgcaacaccgctcgcctcctggcacttctgatgcaccggggcttcaagttctccatcaccaactcactggtgtggcaacctgccgccgctccgcagtcaaccgccgccacctgccacttctccccggaccgctctccggacccagtcgtcgtccagctccagcaccagcagcagcagcacaagccgaaggaggcgctggggtctcccgcgtcgctggtgaacccatcgtacgccacccccgcgggagggaaggacagagccatgtactgctactgcggggtgctgagccggtggagcgtcgtgcgcaagccgggacccatgcaggggcgctacttcttcgggtgcgggaactggaccgccacccggcgcgccatctgcccgtacttcgcatgggcctcgtgaatagcaaagcaagcagagatctgggctggtgctttaaccgagggaggcgcgccatgttgctgcggctggctgctgcgcctcccagttccgtatatattattattgttattattatggtataataactttgctcgcgagacaatggaggttatctaggtagtgtctctaacctgtcgtactgacttctgtcgatagaagagaatggggccagatgctgcttaggtgtgatctatcctatccatccatggataataaagaagtttgtggattgctgttttattaacttgatggaactcctccgtaggtgtggtttgtgcaacttggattttgaaggcttgtgcgtctgtgagtgtttgatcaaatcgaaggtggtgtttgtttgctg

SEQ ID NO: 114655 - DNA, 1954 bp, Zea Mays
gagaaaccacgcgtgtcagccagccattggatcaccaccattcgcgctgttcggcgtgcgcacccgatcccgtctccgtgcggctttgtgagtagagaagggaaggggaagcaggagcaggaggggttcgtcatcgcgtggtggccgcgccgctctgttcctccgtcccctcctccttccggctctcgctgtcacatgtcgtgtggtgtgggggcgctctgatccggatggtgcagcgccgcgggatcgcccacggccatgattgatcgcgaacgagcagaggaaatgcaagttaataatgaggcaccactagggtgcctcaagccaaatatttctcagtataactctccagagcagataggtggtgttgaagggtttcctgagaataatgaaaaaaggaatgatattgttgctgcggaaaaaatctgggaggcgactccaaaccaaggccttagcaggcccatctaccgacaagaattttatgcctggccatatatttattcagattatcaaatcgtgcgtcagccactaccttatggttttgacaaccaattttatcagataaatagggaccacggtttccctattgagaacagggttcaatatcttccattcaagatgctccctcaaggtcacccccatgatgcacagcttcaggaatttcagtattttgtggttattgactttgaagcaacctgtgacaaggtgaacaatccatttccacaagaaatcatcgagtttccatctgtcttggttaacagtgcaactggaaaactcgaagaatgcttccaaacatatgttcggccgacgtatcatcaatttttgactgatttttgcaaggagcttactggcatacaacagattcaggtggacagaggtgtgcctctaggtgaagccttactcatgcacgataaatggctagaggacaagggcatcaagaacacaaactttgctattgtgacctggtctaactgggactgccgtataatgctggagtcggaatgcagatttaagagaatcaggaagcccccttattttaacaggtggatcaacttgagggtaccgttccaggaagtgtacggggacgtccgctgcaacctgaaggaggcagtccagctggccgggctcacatgggaggggcgcgctcactgcgggctcgacgacgcccgcaacaccgctcgcctcctggcacttctgatgcaccggggcttcaagttctccatcaccaactcactggtgtggcaacctgccgccgctccgcagtcaaccgccgccacctgccacttctccccggaccgctctccggacccagtcgtcgtccagctccagcaccagcagcagcagcacaagccgaaggaggcgctggggtctcccgcgtcgctggtgaacccatcgtacgccacccccgcgggagggaaggacagagccatgtactgctactgcggggtgctgagccggtggagcgtcgtgcgcaagccgggacccatgcaggggcgctacttcttcgggtgcgggaactggaccgccacccggcgcgccatctgcccgtacttcgcatgggcctcgtgaatagcaaagcaagcagagatctgggctggtgctttaaccgagggaggcgcgccatgttgctgcggctggctgctgcgcctcccagttccgtatatattattattgttattattatggtataataactttgctcgcgagacaatggaggttatctaggtagtgtctctaacctgtcgtactgacttctgtcgatagaagagaatggggccagatgctgcttaggtgtgatctatcctatccatccatggataataaagaagtttgtggattgctgttttattaacttgatggaactcctccgtaggtgtggtttgtgcaacttggattttgaaggcttgtgcgtctgtgagtgtttgatcaaatcgaaggtggtgtttgtttgctg

SEQ ID NO: 114656 - DNA, 2103 bp, Zea Mays
gagaaaccacgcgtgtcagccagccattggatcaccaccattcgcgctgttcggcgtgcgcacccgatcccgtctccgtgcggctttgtgagtagagaagggaaggggaagcaggagcaggaggggttcgtcatcgcgtggtggccgcgccgctctgttcctccgtcccctcctccttccggctctcgctgtcacatgtcgtgtggtgtgggggcgctctgatccggatggtgcagcgccgcgggatcgcccacggccatgattgatcgcgaacgagcagttgcagtaactgcgtgaaatgctataccggagatgccattgtgcacggaggtggtttattttgaggaagagttgggacacagtttggtgaattttgttgtgtgctggtctgagagctagtgctgctgggattggtaatggtaactgatgaggaaatgcaagttaataatgaggcaccactagggtgcctcaagccaaatatttctcagtataactctccagagcagataggtggtgttgaagggtttcctgagaataatgaaaaaaggaatgatattgttgctgcggaaaaaatctgggaggcgactccaaaccaaggccttagcaggcccatctaccgacaagaattttatgcctggccatatatttattcagattatcaaatcgtgcgtcagccactaccttatggttttgacaaccaattttatcagataaatagggaccacggtttccctattgagaacagggttcaatatcttccattcaagatgctccctcaaggtcacccccatgatgcacagcttcaggaatttcagtattttgtggttattgactttgaagcaacctgtgacaaggtgaacaatccatttccacaagaaatcatcgagtttccatctgtcttggttaacagtgcaactggaaaactcgaagaatgcttccaaacatatgttcggccgacgtatcatcaatttttgactgatttttgcaaggagcttactggcatacaacagattcaggtggacagaggtgtgcctctaggtgaagccttactcatgcacgataaatggctagaggacaagggcatcaagaacacaaactttgctattgtgacctggtctaactgggactgccgtataatgctggagtcggaatgcagatttaagagaatcaggaagcccccttattttaacaggtggatcaacttgagggtaccgttccaggaagtgtacggggacgtccgctgcaacctgaaggaggcagtccagctggccgggctcacatgggaggggcgcgctcactgcgggctcgacgacgcccgcaacaccgctcgcctcctggcacttctgatgcaccggggcttcaagttctccatcaccaactcactggtgtggcaacctgccgccgctccgcagtcaaccgccgccacctgccacttctccccggaccgctctccggacccagtcgtcgtccagctccagcaccagcagcagcagcacaagccgaaggaggcgctggggtctcccgcgtcgctggtgaacccatcgtacgccacccccgcgggagggaaggacagagccatgtactgctactgcggggtgctgagccggtggagcgtcgtgcgcaagccgggacccatgcaggggcgctacttcttcgggtgcgggaactggaccgccacccggcgcgccatctgcccgtacttcgcatgggcctcgtgaatagcaaagcaagcagagatctgggctggtgctttaaccgagggaggcgcgccatgttgctgcggctggctgctgcgcctcccagttccgtatatattattattgttattattatggtataataactttgctcgcgagacaatggaggttatctaggtagtgtctctaacctgtcgtactgacttctgtcgatagaagagaatggggccagatgctgcttaggtgtgatctatcctatccatccatggataataaagaagtttgtggattgctgttttattaacttgatggaactcctccgtaggtgtggtttgtgcaacttggattttgaaggcttgtgcgtctgtgagtgtttgatcaaatcgaaggtggtgtttgtttgctg

SEQ ID NO: 114657 - DNA, 1218 bp, Zea Mays
ggccaccgtccccctgcccatctcctcctctctcaattcttgcagccacaccaccaaaccctagccgcccccccccccccaatctcctcctcccaaggtgccaatccttgccgctcggatcatcgtcgtggtgcgagtcttcaatcgttttggtggagggatgaagggaggaaggaaagggggagaatccaaggtggtggactcccagatctttcttagggatttgcccaaacttccggtgaaggcaagtaaaactgtgatggttattccgtctgtcagatgaggagtcttatacttgattatgttgtgctattgtgttcatattcatatttccttttgagtaccatcatttgaaaatgttcatgtttcatggatttcatatgttgagtttgaggtttgattttgttactcaagtggttattatgtggaatgggtggaagtaaatgtctagcacatttttatttgggaagaactcatgatgttgtcatgcataatgcactcatcatccattgcattgaagtttcgtcgcgatcttatggtccgaccgtaccggtacattgagcatcatatgttgcccgagaaggggtatggtgcagcttcatatccttagagatatggaggcagaagtcattattgcatttgtagccatgtgcattcgtgggagaggtgtggaatttattatggggatgtggataatttggacttgtgcatggtgattctacttggcgttgagtttttagttacttgtttacttgctgcaatttactattcaaaagaaaagaaagaggttctgaacacgtggttgtgtaagcacagttgatttacaatgtcctatttgttgttgttatgtttacttggtgagatgtgttatctcacatcttgcattgtttgatgcaggcacctaatttctgctttgggaatagagggatgtagcagcacgaccactacacctttaataaaggaaccaccatttaataatgttgttaatcagagtcggacaagtctagtgaattgctttgttcttggttgagcgtttattttggggtgggctgagtttcttatcccatttgttttacttcagttggggcataaatgagctttaccactttgcatctagtttctactatgtgaatcatatgtctttatatcatgtatgaactttatgtttttccctccttgttatgttagtttcaaaggaggtgctgccgaattttgcta

SEQ ID NO: 114658 - DNA, 1209 bp, Zea Mays
cccccctgcccatctcctcctctctcaattcttgcagccacaccaccaaaccctagccgccccccccccccaatctcctcctcccaaggtgccaatccttgccgctcggatcatcgtcgtggtgcgagtcttcaatcgttttggtggagggaagaagggaggaaggaaaggggaagaatccaaggtggtggactcccagatcgttcttagggatttgcccaaacttccggtgaaggcaagtaaaactgtgatggttattccgtctgtcagatgaggagtcttatacttgattatgttgtgctattgtgttcatattcatatttccttttgagtaccatcatttgaaaatgttcatgtttcatggatttcatatgttgagtttgaggtttgattatgttactcaagtgattattatgtggaatgggtggaagtaaatgtctagcacatttttatttgggaagaactcatgatgttgtcatgcataatgcactcatcatccattgcattgaagtttcgtcgcgatcttatggtccgaccgtaccggtacattgagcatcatatgttgcccgagaaggggtatggtgcagcttcatatccttagagatatggaggcagaagtcattattgcatttgtagccatgtgcattcgtgggagaggtgtggaatttattatggggatgtggataatttggacttgtgcatggtgattctacttggcgttgagtttttagttacttgtttacttgctgcaatttactattcaaaagaaaagaaagaggttctgaacacgtggttgtgtaagcacagttgatttacaatgtcctatttgttgtagttatgtttacttgctgagatgtgttatctcacatcttgcattgtttgatgcaggcacctaatttctgctttgggaatagaaggatgtagcagcacagccactacacctttaataaaggaaccgccatttaataatgttgttaatcagagtcggtcaagtctagtgaattgctttgttcttggttgaacgtttattttggggtgggctgagtttcttatcccatttgttttacttcagttggggcataaatgagctttaccactttgcatctagtttctactatgtgaatcatatgtctttatatcatgtatgaactttatgtttttccctccttgttatgttagtttcaaaggaggtgctgtcggattttgcta

SEQ ID NO: 114659 - DNA, 1073 bp, Zea Mays
gttgcttgcaaaaccatggtttcgacacttactcctggccccaagccaagaataacccccatcccctttctctcttgctggcgccggagctcgtcaagcacgaagatgaccgacggcccagacatgttcccgtactcactcagcacccggcggctcgcttccagcttgtgcggttccaacctgagccccgcctcgacgctgtccaagaaggcgcgcccacccggatggaccgcccagaagaggtcgttccagctgccgccgatgccgagcagcgagagcgcgtcaaccatacactgctctatgttttcacgtaccagggacgggatgtccctggaagggttgaagtggaacccatcctcacagagctggccggcggcgacctgcttgctctccggtatcatggtctgcgaagcggacagcatctcgaagtccggttcttcgacggagacggggtcggcgccgacaatgacggcgcccgcgccgtctccgaacagtgactgcaagatgagcgtgtcgacgtgggcctcgtgtggcgcgcggaaatgggcgagcgtgagctcggcgcaggccacgagcacgcgcgcgccgcggttgttctcggccatgtccttggcgagacggagcgcgacgcagccgctggagcagccgttcatgtagagcatggtgcggcgcacggtggagcgcaggccgagcagtgaggccacgagccagtccacgcccggcatgtgggcgccggagtaggtggtcaccacgaggtgcgtgatctccgtggctggacgcccccattcggcgatagcgtcaactgcggccgcggcagcgagctcgggaacggcactagccatgatgtcctgccgctcatgtaacgatggcatggaccggtcgatgagtgcagggtggccgcgtagcagctcctccgtgtggtggaagtagcgtttcttgattgctgttttgtggcctggagaaaaaaaacgatccattaatgtatattgcaccgactgatgaaggaaagataatagagacaaacacatctagggaccgtctctattaaatggtcacatcggcaatcaagcaaa

SEQ ID NO: 114660 - DNA, 539 bp, Zea Mays
atggctgtccccttgaagttgaagaagcgcggcatgccggcactggggaggtggctcatggctgtcggcagcttgcgctcggccttcacctggtcgtgcttcttcggctccgcgtcgctctgctcagccacctactcgagatacagggttcgttctgctggccttcagatgctgatgctataccctgctatctgttctttcaacttttaaaccatgcagtatgacctgggcttttcagtgaccggcgtgcatgggcgcacggttgcggtgtggacgctgctgtcgtgcacgctctgcttcctgtgcgccttcaacctcagcagcaagccgctgtacgcggccaccttcctgtccatcgtctacgccatcgggcacctgagcgtcgagtgcgtggtttatcacacaatcagtgcagctagtctcgccccattcaccttcatcgcagtcacaaccatggtctggatgctgcttcagtggaactcggatggccacaacccccgtcccggtcggtctacttccaagcagccatgacctgctag

SEQ ID NO: 114661 - DNA, 270 bp, Zea Mays
atgggggcgctgtcggtgcttgagttccatgatgggatgatggagcacggagatgcacacgtaaccattagggaggtccagccgacgatgcccatgaatgagggagggattaggtggcgctggatatgggcctcggtgttgaagccgagcaggggtaaggggcagcactgggcagggagcgcgcgtaagcagggatcagtgcctggcgtatgcgcagaaggagcagagaaggctcacggcattgaggaacctgaaggaggcagtggctag

SEQ ID NO: 114662 - DNA, 265 bp, Zea Mays
gagactatttcttcggtctgtggaggctgtgcagttttcagcttgtttcttcagtcgtttcagactgtgcagacttgtgctcgtctctactttgtcaaaaaaagatagtgttatttagactgcatttttcagcttgtttgttgattaggtttattcaattttcagtttttagatagcgttattcagttttcagttttcagatagcgttattcagttttcagttttcagattgttccatatggaataaacgaacaaatatttgttg

SEQ ID NO: 114663 - DNA, 219 bp, Zea Mays
gttatgttgcatatatggaccttggtggttttctccacgttaggaaagctggaagagtcttttcctactcagttttatgctaacaatggtgttatggtgaaacatagtcttgcatgtatgtaccaacaactaaactgtaaacacaacattatcatagttgagtacatgaatacttatcccttattttttattgtaaaatatgaaacaattgtcttgtag

SEQ ID NO: 114664 - DNA, 213 bp, Zea Mays
atggatatagaggtggatgaggaaaaggtttatgtcggcaatatttttaatccgtcatttgaggttatgtcggatagtggttgttcagcacaaattccaagcaaatgcagtgacaaacatgaattggataataatgagggagagatcaataaggccagtgttgataatgttgtagaacaatcgcttgatgttgtggcagtagcagtgacctag

SEQ ID NO: 114665 - DNA, 1242 bp, Zea Mays
atcatccaccattccatcacaagtacgtagtacgtagtcttagttcagctcgtcatggactcattgcgatgcctagtgttgtcttcgtcatccgatgattcggacgatgagatcgacaacatgttgctttggcaacatgttgaccaccttgtactgggagacacgagcacgcgtcgtcggcgctcctcattgcctcgccgtgttatccatagggaccacgctgctggagaaaatctcatcaagcaccactacttcggacctaatccagtgtatccatcacatgtttttcgtcgaaggtttcggatgcatcgtccgttgtttctacgtatccttcgtgctattcaacgagaagacgattacttcacagtacgatgtgatgcaactggtttagcagggcttggtccattgcaaaaagtgtgtgctgctttgcgtatccttgcgtacgggttaccaagtgatgcggtcgatgagtacatacagattggacagactacggctagggactgccttatccgtttctgtcgcgcaatcatctcttcctttagcgaacgatacctacgtatccctaaccacgacgacattgctcgcatacttagtgtaaacgcggacagggggtttccgggtatgctaggctccatcgattgtatgcattgggaatggcgcagctgtcctactgcatggcgcggacagttttgtggacgcaattcgaggccaacaatgatactagaggcagtcgctgggtatgacctctggatttggcatgcattctttggaatgcctggtactaacaatgatctcaacgtgcttcatcgatcgccagtgtttgatccgttacgtaatgggacgatgccaccagtgcacttcactattaatggtaccacgtacaattttggatactacttagtagatggcatatatccaaattggccaacctttgtaaaagcaattcgtcacgcttttgtggaaaaaaggttcacttcacagccaagcaggagagttgtcgaaaggacatagagcgagcatttggagttttgcaggccaggtgggcagttctacgtggccctgcttatggttgggatcgtaatcacctcgcagagatgatgactgcttgcattattatgcacaacatgattgtcgaggacgaaggagatggtgcagcaaatgtggacttcattggccccactggtcccccagaagtttgtaataatattcctgaggtccgcaacgagtggctaaacaatc

SEQ ID NO: 114666 - DNA, 615 bp, Zea Mays
caattaagcccatgaataagagtaaaactgccgtcttatgatcctgaaggaaactatttattgtaaagagatgatactcagagtaagacatatttgtggcagggagatttgaaatatgaacttgtaaatgtaatgcaaataattgcagctgtgtttgagtaaactgaacacaaaataagcacaaagaaattcagttaagagatgccaacctttgaattttttttggatggaccttggtgctccatactcttgacgatttcagggatgttaagagatgccaacctccttttatttctttcaatattttcttgcttcagctgctcgtattcactacacgatccatctttattgctttctcttgcgcttgccattttttttcctgaaatatcatcaaacatggaatcatcaaacttactcaaacaatgagattagctatttacactcaaacaacaagtgcatgcatatattaaaaaatatcatcaaacatggaatcatcaaacttactttctagattttttttccttgttttactccactaacaatgacaccatctatatctgttctagcacatgggacacatccaacaataagactttcaaatacattagattgcag

SEQ ID NO: 114667 - DNA, 649 bp, Zea Mays
ttttcttcacacacctccatgctttgctcgctgcaggctaggattgctggatatgcactttcaggtggtggccgtggcattgagagagtggatgtatcagctgatgggggtaagacctgggtcgaggctcgtagataccagaaagacaatgtggcgtatgtgtcagatggacctcaaagtgataagtgggcttgggttctctttgaggccacattagacgtaccagcgaatcctgagatcgtagttaaggcggtggactcagctgcaaacgttcagcccgagaaggtagaagacatatggaatctgagaggaatcctcaacacgtcttggcatcggatcaaaatccagagatcttcgtgcgttgaaagatctaagctgtgaaattaagtacgcagctgactacttggagaaagcacactcactttaccattgtccctgaataataattagtcacttcaactttctgcgtctgtggagtaaggttgtacgagtgttggggctgtcattatgggatttgagctcacttggtttctgtttaaatgtcagctgctgtggttttttggtcactggatgactgctgctgttggctggtcaggtttgatatcaagaaatatccattgcattatgcgtttgaaaatactattgcagc

SEQ ID NO: 114668 - DNA, 486 bp, Zea Mays
atggtgatccacccagcgcagcgtgaccgtcttcagtggcagagacgacgcaggagctgctgctcgactgcaaggcgtccctgcaggacccgttggggcgctctctccgcctggtcgcgctccacgtcctactgcatctggccgcacgtcgcctgtgccaccagcaccgccgcgaacacgaccgtctcagtctccatctcgctccagggcctcggcctctcgggcgagctcgccgcctcctccctctaccgcgtgcggggcctggtcgcgctaagcttcgcgtccaacggcttcaaccagaccaccccgctggagctatcatgctgcgccttgctcgcgtcgctcaacctcagcaatggcgccttctggggcccgctccctgagcagcaggccatgctcacctcactcatgtcgctcgaccacagctacaacagcttcgagggccaggtgcccgccggcctcgccgcgctcggcggcctcctctag

SEQ ID NO: 114669 - DNA, 1191 bp, Zea Mays
atgacgtcgctgctgctggtcagccaaatagcggcggtcggcctctgcagcgacagaaggcgagagctgcgtgccgacggcccagccaccgtgctcgccatcgggacggcgaacccgcccaactgcgtgaggcaggaggagtacgcggactactacttccgcgttaccaagagcgagcacctcactagccttaaagacaagctcaagaggatctgccacaaatcggcaatcaagaaacgctacttccaccacacggaggagctgctacgcggccaccctgcattcatcgaccggtccatgccatcgttacatgagcggcaggacatcatggctagtgccgttcccgagctcgctgccgcagccgcagttgacgctatcgccgagtgggggcgtccagccacggagatcacgcacctcgtggtgaccacctactccggcgcccacatgccgggcgtggactggctcgtggcctcactcctcggcctgcgccccaccgtgcgccgcaccatgctctacatgaacggctgctccagcggctgcgccgcgctccgtctcgccaaggacatggccgagaacaaccgcggcgcgcgcgtgctcgtggcctgtgccgaggtcacgctcgccattttccgcgcgccccacgaggcccacgtcgacacgctcatcttgcagtcactgttaggagatggcgcgggcgccgtcatcgtcggcgccgaccccgtctccgtcgaagaaccggacttcgagatgctgtccgcctcgcagaccacgataccggagaccaagcatgtcgccgccggccagctctgtgaggatgggttacacttcaacccttccagggagatcccgtccctggtacgtgaaaacatagagcagtgtatggttgacgctctatcgctgctcggcatcggcggcagctggaacgacctcttctgggcggtccatccgggtggacgcgccgtcttggacagcgtcgaggaggggcttatgttggaaccgcacaagctggaagcgagccgccgggtgctgagtgagtacgggaacatgtctgggccgtcggtcatcttcgtgcttgacgagctccggcgccagcaagagagaaaggggatgggggtgattgttggcttggggccaggagtagttgtcgaaaccatagttttgcaagcaacggatagccaaaagaagatttag

SEQ ID NO: 114670 - DNA, 1998 bp, Zea Mays
atgggccataatgctggtcgcacaccattcatagacatctcgaacacaagcattacaggtgatcaaaatggatcgaactcgcttagaccaatagtcgatgctaatgaacgtaagaggcaaagggataaggaaagatatgccatgatgtccattgaacaaaagaatgagaaaaataggaagcgacgtgaagcacgtcaacgaaataaaggactacccataaagtccgagtcatctagagacattaatacgaatcagacacgtgaggcggtcaacgttgaaataagtcgagatgtgcatcttggttcaggtcctattaaaaacactccatcgactggtaattctatcgaacgaaagaggcaaagggatagagaaaggcgtgcaacaatgtcggctgaacaaaggaatgagtacaataacaagcgtcgtcaaatgcgtcaacgaaataagggacaaaatgtgatgccagctatttcaggagatggcgacaaaaaagtaaatgtggatccagatgatgatagcgactggctgcatcggaacgagacattccagtcaaatgactatgtcgcaacgatagaccttctgccaccaggcagtgtgcatgaatctgttggtaccattggggaatcgggtatcggcgtgagggagtataggcttgaacgccttaggttgtataatcagacaccaaagcggaaagaggcaaagatagagtacatgagaaaacgtagagtgctacaggctgacactttgaatgttgtgtccatcgccatggaagacccaacatatacccctgaggttgtgcaccctgcaacggaaccttcaacagttaccgcctgtgactgggtcatccctgaattcgttaggacacctttcctaccagctcaaacacagaccgaggatgtcggttcatttgatatgtctactgaagcaataaaacgtaaacatcatgtgccgcgtggggaaagacaagctatcttagcccgtcgaaaccagcaatttcaagcatccattgcacggaacgtgactactttgaatggggatactatcggtgacgccaacaacaatgatgatgatgatgaggctgtcatattcggagaagatgacgacgacgacgagagatacatattcgctggccaatatgaggagactgacgaggacattaaaatcgatggtactcaagatgaatctactggcactgatgtgcctgacccgtacgacaaggtatacagtaacctccctgaagaaacgcatatgctgaagccagttcctgactgcggttattgcactgcgaagaagtttgagtacgagccacctgggttttgctgccgtggtgggaaggttgagctagcaccactggatacccctccccagctcaggaggttgtgggatagtgcagactctgatgctaagcactttcgtgataacattaggttttttaatggccatttctctttcacttctctgtactgttgcctcgatagtatgacaactaatgtgcgagattctggtatatacacgttccgagcacaaggcatgatgtaccacaatatcaagtcattcggtaaggaaggtgggtcggagcataaacatctagagctttacttttacgatgatgatcccagtctcgagcatcggtaccctgctgttgctcagctcaaaaacttgaactgtttgctggctgcagaagaccaatctgcagatgaagcagtgaaaaattctagggtgatgctaaatatacttgtatgcataatcaccataatttcaaacttcatgaagttggacataactgttggaaggattccccatattaccgataccacaaagcataccccatcatgcaactatttggctgcagtcacgtctagctctcctgatagaaccatttctaatacacttcgacattggcagcagaaagcaaatgttcttgtgatggaagccagatgtgtcaactggttagtagatcatcattgtgatactcattttttgggtatattgtgctga

SEQ ID NO: 114671 - DNA, 871 bp, Zea Mays
atgggctcctttggcctcattgccacactccatgtggccaccgcgatgctctggctcgatgtcgagctttctatcctatatttgcatgttcttcaaagggatgtatatggaccttccaaatacactagacttttgcaagcaaccaaatatactctcagagaagaaggcataacagtatgttgcatactattcctacatgacaagtgtaggcatgctcctaaccatacgctggggaatgctaccattttgccacaacactgcttttcagctccagtaattaagcccagtgctacaaatgtcgcgaactcgagggcgataggcacaacattatctccaccacctggtgtgatggttccagttcataatgcagtaccatctgacttatcagttaaggatgagagggaattgaagcgcgaaaagaggaagcagtcaaatagggagtctgctagacgatcaaggctgagaaaacaggctgagacagaggagttggctacacaagtggagtctcttgcagcagagaacacgtcccttagatctgaaatcggccggctaacagagagctcagagaagctcagactagagaattcagctctaatggtgaagctgaaggacactgcagaaccgtctccaagcaaagcagccgcatccccgtcctctccccgtgcctccgcagagaacttcctttccatgatcgacagtgccaacgcgccgagcgtcagcaggcacacggagcacgttggtcccaggctccggtagctcctggacttcagtccggcgacagacgtcgccaccgtaagctgataatgaagccggtccggcaaatacgccacagcacatgcatgtggactggggattccgcaggctcatgctg

SEQ ID NO: 114672 - DNA, 674 bp, Zea Mays
ggacgttgttgcccccgtgtacccaaagcctccatggctcatgtccccttgaagttgaagaagcgcggcatgccggcactggggtggtggctcatggctgtcggcagcttgcgctcggccttcacctggtcgtgcttcttcggctccgcgtcgctctgctcagccacctactccgagatacaggtgaccggcgtgcatgggcgcacggttgcggtgtggacgctgctgtcgtgcacgctctgcttcctgtgcgccttcaacctcagcagcaagccgctgtacgcggccaccttcctgtccatcgtctacgccatcgggcacctgagcgtcgagtgcgtggtttatcacacaatcagtgcagctagtctcgccccattcaccttcatcacagtcacaaccatggtctggatgctgcttcagtggaactcggatggccacaaccctcgtcccggtcggtctacttccaagcagccatgacctgctagaccggacttcgcaggttgtgtcaccgttggctactttcttgtcaccgttgtgcagtccatatatgcaagcaacatggaaatctcaaatctgtaatcttttttctcgttatcctcgtctcatttcgatgtcccggaggctactgaatgtaaccagcaagctgtaacacgctttatttattttgtcatcag

SEQ ID NO: 114673 - DNA, 114 bp, Zea Mays
gaatttgttgcttgtacaggactgtagggtacatgagctcgcgggctaaggccttgttcgtttacgtcggattacatccggaatcgttctagctaatcaaagtttatataaatt

SEQ ID NO: 114674 - DNA, 228 bp, Zea Mays
atgacggttctcgatccgaaggcgcaacaacgacggctcctcgatccggtggcatggccactacagttcctcgatctggaggcacagcgacagcgactctccgatctggaggtgcgacgtcgatggcttcccagaggcgtgcgcgttacgtcagcttctcggaggcgcacgctccggagtggcgcacgctggcgtcccatctcccacgaccacattggccttccctag

SEQ ID NO: 114675 - DNA, 459 bp, Zea Mays
cttctaattttaggtcacgtacgccacctgcaaagaggcctacaaaagaggcttttggtatatcttgatgacaagaaagaaggacaagctcaatgtgctcaactatgctgggcccagcttcatcatcttatgagaattgttctggcaggatgtggatcttaactagtacccaataaaattagaaagcaagaacaatgagatttacaatggtagcaaagtgtgttatctttatacataaacttcttaggagatggaatcatggtgtaaagcattttgtattgcagctactgctgacaaggaaaaaaataagccgacatgctaagctgagcgataagttcctcaattctttttgtcagtaccttaaggagtctgtagtcctatttttctttcagggttcgctgcagatttaaggtacacattacttgatctaaaccgtgcgttgcctttttttgagttgtt

SEQ ID NO: 114676 - DNA, 3347 bp, Zea Mays
cgatccgcggctgcctccggcggatccagccgcttcctcccgccgcagatccgccgcggccgccatggagaagccatgctctctcctggtccacttcgacaagggctcggccgcgatggcgaacgagatcaaggcggatctggagggcagcgatggccccgccaaggccgacgccatgcgccgcgccatctcgctcctcctaaacggcgagacgctcccgcagctcttcatcaccatcgtccgctacgtgctcccctccgaggaccacaccgtgcagaagctcctcctcctctacctcgagatcatcgaccgccgggatccggccggccgcgccctgccggagatgatcctcatctgccagaacctccgcaacaacctgcagagtcccaacgagtacatccgcggcgtcacgctgcggttcctctgcaggctctccgagcccgaggtgctcgagccgctcgtgccgtccgtgcttgcgaacctcgagcacaggcaccacttcatcaggagacacgctgtctcctccgtatccgcgatctaccgcctcccgcatggggaccagctcatcccggacgcgccggagctcgtcgagcggttcctcgcatctgagcaggacgcgtccgcgcggaggaacgcattcctcatgctctgtgcatgtgcacaggaccgcgctgtcgcctacctgctctcaaacgccgaccgggttgctgagtggcccgatctactgcagatggccgttgtggatctcatccgcaaggtctgccgatcccagaaccgtgccaacaagggaaggtatatcaccatcattacctcgctgctctccacgcccagcacagcggttgtttatgaatgtgctggcgcgctggtgtcactctcttcagcacccacggcagtgcgagccgctgccaacacctactgccagttgctctcttcgcagagtgacaacaatgtgaagctcattctactggatcgcctcaacgagctgcacactttgcaccgggatgtcatggtgggggtggtaatggatgtgcttcgtgcactggccagccccaacttagatgtcaagagaaaggttcttgatttagttctcgatctgctcaccccgcgtaatgttgaggaggtggtgctttatctcaagaaggaggtggtcaagacgcaagctggagacctcgagaagggtggcgagtaccgtcagatgctggtgcaggccatccatgcctgtgctgttgagtactcagaggtggctgggtctgtagtacacctccttatggacttccttggagacaccaatgttgctgcagctgttgatgttgttctgtttgtacgtgagatcattgagaccaatccaaagctgcgtgtttccatgatccagaggctaattgatacattctaccagattcgagcatcccgggtctgctcatgtgctctctggattcttggggagtactccctctctctatcagaggttgaaagtgccattgctaccattaaacaatgtcttggggatctaccattctacactgtatctgatgaaggggaggcaactgattctgctaagccagccaaggcagtggtgaactctgtcactgtatcttccaggcggcctgttgttcttgcagatggcacttatgccacacaaagcgctgctactgagaccattttgactccatcagttgctcctgggtcattggcatcaaccctgaacctcagatcactcattctatcaggtgatttctttctggctgctgttgttgcatgtaccctggccaagcttgtgctgaggctggaagaagtgcagccatctaaggttgagtcaaacaaggcttgcactggagcattgctgatcatgacatcgattctgcagctgggccagtcttcttaccttccccacccaattgataatgattcatatgataggattgtgctgtgtgtgagattgctttgcaatactggtgatgatgtcaggaagatttggttgcagtcatgcagacagagctttgcgaaaatgcttgctgagaagcagttcagggagacagaggagatgaaggcaaaggcacagatctctcatgcccagccagatgatcttattgatttttaccacctgaagagcaggaagggcatgagccagcttgagttggaagatgaggtgcatgatgatttgaaggctgcaactggtgggtttaccaaggatgcagatgacgcaaacaagctcaaccgcattcttcaattgactgggttcagtgatcctgtgtatgctgaagcatttgtaacagttcaccattatgacattgtacttgatgttactgtaattaatcgcacaaaggagacacttcagaacttgtgcttggaattggctacaatgggagacctcaaacttgttgaccgccctcagaactacaccttggctcctgagtctagcaaacagatccgcgctaatatcaaggtttcatcaacagagactggagttatatttggcaacatagtttacgagacttcaaatgtgatggaacgatcagtggttgtcctaaatgatattcacatcgacatcatggattacatctcacctgctacctgtgctgatgttactttccggaacatgtgggcagaatttgaatgggaaaataaggtggcagtgaatactgtgattcaagacgagaaggaattcttgaatcacattatcaagtcaacaaacatgaagtgtctgacaccaccgtctgcactagacggagaatgtggtttccttgctgctaatctttatgcaaagagtgtgtttggtgaggatgctttggtgaacatcagcattgagaagcaacatgatggcaagctcagtggttacatccgaataaggagcaagacccagggaattgcactcagcttaggtgacaagattactctcaagcagaagggtggcagttaactttgacaagtgctgcagttgtatcatcatttttctcttttaggaaatccacgtgccagagataccagtgccgtggcattgaattgagtataaatgtttttttgtacaaaaggatcaaagaaacagataagacgacagttatgaggaagtcacggtgttagatccctgagcatgaagttctcggtcgaagatccatgttgctgtagtaacgatgctgttccaacttcctttgctgataaaatgacaatgtagaaatagttctgaagttcatgttgatttgtcgacaggtgggtcaattgtgatcctgtactattgttatgaatccctcttgttttgatgttatatttgctcttattttaattttatggtcttgaaactcaaactcggaggttgtcaccttattttattttttattcttagtttattgcta

SEQ ID NO: 114677 - DNA, 1096 bp, Zea Mays
gctaccataccaaagccactttctttctccatcactccagccatccccaaccccaactcccttcactgtatatatgatacatccatccaccattcgtgaggacagcagcatctgtgcgtctcttccacgagaggcaacctaccgtatagtactgccgacatggtgctctccggcggcctagtcgtgccgtggctcgcggcggtggccgcgctggccatcaccgccgccccgctcggcgccgatgcctacaagaactacaccgtcggcgacgacaagggctggtacgacggcctcagcctgcccggggtcgactaccaggcgtgggctgacggcaagaacttcagcctcggggatttcctcatcttcaacacggacaagaaccactcggtggtgcagacacggaacgtgacgctgtacgagagctgcgactacaacgactcggggcccgacgacaccgtcgagtgggccgccgcgccgccggagttcagcaaggacgccgtcaccgtcgccgtgccgctcctcgacgagggccgcgcctacttcttctcgggcaactacgacggcgagcagtgcgagagcggccagcgcttcgccgtcgacgtggcccacggccagggcctgccgcctgacctcaggccgccggtcgccgacgcgccggcgccctcctccgcggggcccgccgacggcgccgccgcgctcgacttcagccaccccaagaacgtcaccacgccgagcgcgacggacgatgacgacgagcaactgggcggtggctcggcctcctccagcctcaggtccgctctgcccgtgaccgcgacgctgctcatcaccttgctcttcgcgttcgcggtgtaggtggcatgcgttagtttcgcttttgtttgtgctgctgctgcttgggcctcataatttgtttgtttaatgcactagtacagttgaagggtttctctgtatagggagagagatgagatatgtttagtgctgtagttgttagtgaaatgctttcacttgtatattctggctgtttatttggtccgtaccgtgctccgtagtaatggatctcgataaaataataattatctcattctttggaacatgc

SEQ ID NO: 114678 - DNA, 193 bp, Zea Mays
atggggtctcaaaacggtcagattcaagagttgcctccacctctacatcctacaaatataggtgatcaacctcctccagttgagaaaacaaagaggcagtgccctgggtgccaactagatgaggtgaacaaggctagcaataaggtcccctacctcaacttctgcttcatctggatcatctgcctcactgcta

SEQ ID NO: 114679 - DNA, 1731 bp, Zea Mays
tctggttctccactcctgtttgggagcaatgtccccatcattttctcgcttctaaccacccttcagctcccctcccacctgcagctaccggccttagatccagccatgagggagattctccacatccagggcggccagtgcggtaaccagatcggttccaagttctgggaggtcgtctgcgacgagcatggtatcgatcccaccggacgctatgtcggcacctccgacctccagctcgagcgcgtcaatgtctactacaacgaggcctcatgcggccgcttcgtgccgcgcgctgtgctcatggacctcgagcctggcaccatggacagcgtccgcaccggaccgtacggccagatcttccgccccgacaactttgtcttcggacagtctggcgcggggaacaactgggccaagggccactacacagagggcgcagagctcattgactccgtgcttgacgttgtcagaaaggaggctgagaactgcgactgcctccaaggcttccaagtctgccattcccttggaggaggcactggatctggaatgggcacgcttctcatttcaaagatcagagaggagtaccctgatcggatgatgctgacattttctgtctttccctcgcccaaggtgtcagacactgttgttgagccatacaatgcaaccctgtctgtccatcagttggttgagaacgctgatgaatgcatggttcttgacaacgaagcactttatgacatttgcttccgaactctgaagctgacgacccctagctttggagacttgaaccacttgatcagtgcaacgatgagtggtgtcacttgctgcctccgcttcccaggacagcttaactctgacctgcgcaagcttgcagtcaacctgatcccgttccctcggctccacttcttcatggttggctttgcgccactcacctcgcgtggctcgcagcagtaccgtgcgctcactgtccctgagctaacccagcagatgtgggatgccaagaacatgatgtgtgctgctgacccacgccatggtcgttatctcacagcctctgccatgttccgtggcaagatgagcactaaggaggttgatgagcaaatgattaatgtccagaacaagaactcgtcctattttgtggagtggatccccaacaacgtcaagtccagtgtttgtgatatccctccgcgtggcctctccatggcctccaccttcattggcaactccacgtccatccaggagatgttccgccgtgtgagcgagcagttcactgctatgttcaggaggaaggctttcttgcattggtacactggtgagggcatggatgagatggagttcaccgaagctgagagcaacatgaacgatctggtgtccgagtaccagcagtaccaggatgccactgctgatgaggaggcggaatacgaggacgaggaggccatccaagacgagtaagggtggtttgggccctgccacatttgtacccttgtttcctttcattccggggcttgcctatggtttgcttgttgtattcgctcaagttatgcggtatgtagtagtactttcgtgcgtagcatgctgtatgctaccacaaagactttgttcacctgcactgcttgatatgccagccatggcatatgtgacgagtatttcattattttatctgcttgcttgctcctgtgatggttccttcctatgacattgaatgcgaatttgcccattgctcacgttggatctgcatgg

SEQ ID NO: 114680 - DNA, 1821 bp, Zea Mays
cccggcggccgacggtgctttggagggaacgcgactgggccgcccgatccggtgccctagcccccccgcgcccactataaaatccgccccctttctgggcactcgctcatttcatttaccacaccaccttcctctcctcgctctccctattctggacggccgactcgcttctgtgagctaccggccttagatccagccatgagggagattctccacatccagggcggccagtgcggtaaccagatcggttccaagttctgggaggtcgtctgcgacgagcatggtatcgatcccaccggacgctatgtcggcacctccgacctccagctcgagcgcgtcaatgtctactacaacgaggcctcatgcggccgcttcgtgccgcgcgctgtgctcatggacctcgagcctggcaccatggacagcgtccgcaccggaccgtacggccagatcttccgccccgacaactttgtcttcggacagtctggcgcggggaacaactgggccaagggccactacacagagggcgcagagctcattgactccgtgcttgacgttgtcagaaaggaggctgagaactgcgactgcctccaaggcttccaagtctgccattcccttggaggaggcactggatctggaatgggcacgcttctcatttcaaagatcagagaggagtaccctgatcggatgatgctgacattttctgtctttccctcgcccaaggtgtcagacactgttgttgagccatacaatgcaaccctgtctgtccatcagttggttgagaacgctgatgaatgcatggttcttgacaacgaagcactttatgacatttgcttccgaactctgaagctgacgacccctagctttggagacttgaaccacttgatcagtgcaacgatgagtggtgtcacttgctgcctccgcttcccaggacagcttaactctgacctgcgcaagcttgcagtcaacctgatcccgttccctcggctccacttcttcatggttggctttgcgccactcacctcgcgtggctcgcagcagtaccgtgcgctcactgtccctgagctaacccagcagatgtgggatgccaagaacatgatgtgtgctgctgacccacgccatggtcgttatctcacagcctctgccatgttccgtggcaagatgagcactaaggaggttgatgagcaaatgattaatgtccagaacaagaactcgtcctattttgtggagtggatccccaacaacgtcaagtccagtgtttgtgatatccctccgcgtggcctctccatggcctccaccttcattggcaactccacgtccatccaggagatgttccgccgtgtgagcgagcagttcactgctatgttcaggaggaaggctttcttgcattggtacactggtgagggcatggatgagatggagttcaccgaagctgagagcaacatgaacgatctggtgtccgagtaccagcagtaccaggatgccactgctgatgaggaggcggaatacgaggacgaggaggccatccaagacgagtaagggtggtttgggccctgccacatttgtacccttgtttcctttcattccggggcttgcctatggtttgcttgttgtattcgctcaagttatgcggtatgtagtagtactttcgtgcgtagcatgctgtatgctaccacaaagactttgttcacctgcactgcttgatatgccagccatggcatatgtgacgagtatttcattattttatctgcttgcttgctcctgtgatggttccttcctatgacattgaatgcgaatttgcccattgctcacgttggatctgca

SEQ ID NO: 114681 - DNA, 1681 bp, Zea Mays
tcatttcatttaccacaccaccttcctctcctcgctctccctattctggacggccgactcgcttctgtgagctcccctcccacctgcagctaccggccttagatccagccatgagggagattctccacatccagggcggccagtgcggtaaccagatcggttccaagttctgggaggtcgtctgcgacgagcatggtatcgatcccaccggacgctatgtcggcacctccgacctccagctcgagcgcgtcaatgtctactacaacgaggcctcatgcggccgcttcgtgccgcgcgctgtgctcatggacctcgagcctggcaccatggacagcgtccgcaccggaccgtacggccagatcttccgccccgacaactttgtcttcggacagtctggcgcggggaacaactgggccaagggccactacacagagggcgcagagctcattgactccgtgcttgacgttgtcagaaaggaggctgagaactgcgactgcctccaaggcttccaagtctgccattcccttggaggaggcactggatctggaatgggcacgcttctcatttcaaagatcagagaggagtaccctgatcggatgatgctgacattttctgtctttccctcgcccaaggtgtcagacactgttgttgagccatacaatgcaaccctgtctgtccatcagttggttgagaacgctgatgaatgcatggttcttgacaacgaagcactttatgacatttgcttccgaactctgaagctgacgacccctagctttggagacttgaaccacttgatcagtgcaacgatgagtggtgtcacttgctgcctccgcttcccaggacagcttaactctgacctgcgcaagcttgcagtcaacctgatcccgttccctcggctccacttcttcatggttggctttgcgccactcacctcgcgtggctcgcagcagtaccgtgcgctcactgtccctgagctaacccagcagatgtgggatgccaagaacatgatgtgtgctgctgacccacgccatggtcgttatctcacagcctctgccatgttccgtggcaagatgagcactaaggaggttgatgagcaaatgattaatgtccagaacaagaactcgtcctattttgtggagtggatccccaacaacgtcaagtccagtgtttgtgatatccctccgcgtggcctctccatggcctccaccttcattggcaactccacgtccatccaggagatgttccgccgtgtgagcgagcagttcactgctatgttcaggaggaaggctttcttgcattggtacactggtgagggcatggatgagatggagttcaccgaagctgagagcaacatgaacgatctggtgtccgagtaccagcagtaccaggatgccactgctgatgaggaggcggaatacgaggacgaggaggccatccaagacgagtaagggtggtttgggccctgccacatttgtacccttgtttcctttcattccggggcttgcctatggtttgcttgttgtattcgctcaagttatgcggtatgtagtagtactttcgtgcgtagcatgctgtatgctaccacaaagactttgttcacctgcactgcttgatatgccagccatggcatatgtgacgagtatttcattattttatctgcttgcttgctcctgtgatggtt

SEQ ID NO: 114682 - DNA, 1479 bp, Zea Mays
cccggcggccgacggtgctttggagggaacgcgactgggccgcccgatccggtgccctagcccccccgcgcccactataaaatccgccccctttctgggcactcgctcatttcatttaccacaccaccttcctctcctcgctctccctattctggacggccgactcgcttctgtgagctaccggccttagatccagccatgagggagattctccacatccagggcggccagtgcggtaaccagatcggttccaagttctgggaggtcgtctgcgacgagcatggtatcgatcccaccggacgctatgtcggcacctccgacctccagctcgagcgcgtcaatgtctactacaacgaggcctcatgcggccgcttcgtgccgcgcgctgtgctcatggacctcgagcctggcaccatggacagcgtccgcaccggaccgtacggccagatcttccgccccgacaactttgtcttcggacagtctggcgcggggaacaactgggccaagggccactacacagagggcgcagagctcattgactccgtgcttgacgttgtcagaaaggaggctgagaactgcgactgcctccaaggcttccaagtctgccattcccttggaggaggcactggatctggaatgggcacgcttctcatttcaaagatcagagaggagtaccctgatcggatgatgctgacattttctgtctttccctcgcccaaggtgtcagacactgttgttgagccatacaatgcaaccctgtctgtccatcagttggttgagaacgctgatgaatgcatggttcttgacaacgaagcactttatgacatttgcttccgaactctgaagctgacgacccctagctttggagacttgaaccacttgatcagtgcaacgatgagtggtgtcacttgctgcctccgcttcccaggacagcttaactctgacctgcgcaagcttgcagtcaacctgatcccgttccctcggctccacttcttcatggttggctttgcgccactcacctcgcgtggctcgcagcagtaccgtgcgctcactgtccctgagctaacccagcagatgtgggatgccaagaacatgatgtgtgctgctgacccacgccatggtcgttatctcacagcctctgccatgttccgtggcaagatgagcactaaggaggttgatgagcaaatgattaatgtccagaacaagaactcgtcctattttgtggagtggatccccaacaacgtcaagtccagtgtttgtgatatccctccgcgtggcctctccatggcctccaccttcattggcaactccacgtccatccaggagatgaggaaggctttcttgcattggtacactggtgagggcatggatgagatggagttcaccgaagctgagagcaacatgaacgatctggtgtccgagtaccagcagtaccaggatgccactgctgatgaggaggcggaatacgaggacgaggag

SEQ ID NO: 114683 - DNA, 3072 bp, Zea Mays
ctcctccctctccagtcccgttgcacttcctcggtcccctccttcactccccccacccccaccaatggcgtctcctcgccgccgctccctcccactccgcttcctcatcttcatccctgcccccctcttcctagtcctcctcttccaccgctcctctcattctaccgccccgcttctccacaccgcaggctctggctccggccccagctctgatccccgccgcttctccctcctcatcaagctcctcgcctacgaccggccggccgcgtttcgccgctgcctccgctctctcgccgcagctgactacgatggggaccgcgtcgcgctccacgtcctcctcgaccaccgcccgcccaactcctcgttgccccccctcgccacgtcgcacgagatccttgacttcgtcgatgcgttcccgtggccgcacggagagaagcgcgtgcactaccgcgcctccaacgcggggctccaggcgcagtggatagaggcatggtggcctggctccgacgacgagttcgccttcgtcgtcgaggacgacctccaggtctcgccgctctactacaagttcctgaagcggctggtcctgaggtactactacgaccgcgagaactacagcccctacctgttcggcgcgtcgctccagcgccctcggttcgtcgcaggtaaacatggaaacaagatacagctggatagcgagactcggcttttcttgtatcagatggtaggcacgtggggtcaacttctctttccaaaaccatggaaagaatttcgattatggtatgatgaccacaaagccaaaggactcaaacctattctccaaggcatgaaaactacagggtggtataagaagatgggtgagagaatatggactccttggttcgttaaattcgtccactcacgtggatacttcaatatatacacaaacttcctgaaggaaagggccctgagcgtctcccatagggatgcaggtgtgaactacgagaaaagtgttgggccagattctactttgttggatgggaagaatcttgatttcaatttatgggaactgcagcctttaaagaagctaaagtggtatgatttctgcttcaatgaagctcttccagggagaattgttagaaaaaatagtgaactcggttctatgctcaaatccctgcaattaaaaagtactgttgttctcgtaactctgtactcaatagaagagagatttgcaagaaacttgatttgccatcttgacaaggcaggcatgaagaatactattttccttggtgacaattcagagtttctggatgaccttgctcatagaggatatcctgtcattgatggcgtcaattttcttcagagtatcagattgagtagtttgcagggctctgacggttttgttcaggaaacattggttatatcttatgtgataaaagcttgcctggacctgggatataatctatggctactaaatggaaatatgatttcacttggcaataagttgatcgagccatcagatcagtctgttgacttctttactgcagatgaagggttgatgtttataaggagctcgctagacatgaaaaacaaatggaatgaacttgccatgtcgagagtgaaagcgatgtgtacatctagtgatctgtctgtttccatcaaacagaagagttttgtccatatgctaactgaagtgatggcgagcagtgctggtgttaggctgggaaagctggatgaggctatgagagttattgagttagggcctaacacctcaaacagatcaatattagaagacaaaagtaatgtgcttttctggtctcgcagtagggcttcagattcagttcaaaagcaacttgaaaatatggatttatggttggttgactcagattcgtcttgtagttctgttgtttgtcaccaaaagcagaagtagccaggttgttttggcacatcacttttgcttcactgagaacaaaaatggtgccatcataggggatccatggtaaccagctaagtggcactaatatattttccaaaaatcatataatgacatgtctttagatgcatgaggggaatcagccatattgtttgatatttgtagattatgcgatgaagctgttcgatcaaatgtctgtttctgaattatgattacagttagctatgccaccacagataaccatcttggagttctgctcttgccatgaatgaattttgtgctgaacacggctatagttttgaggttctgaatacttggatccttttttggtattgtgagggctaacgaagtcttcagttaggtaacctgctaattcaactcacaggagcagttttggatattatatcctgctacgtaccatattgatagcaatgccccaactacaatccaatccctgcagacactcaaatcatgggaggctgaaagcggcatgtttcctttttgttcaatgtacaaagtactcactggtctgtactctcattctgcaccaacgcaatgttgtctgtgttgaaagctgtttaatcatgaacatgtggcacgacaaaatctgccagatatgcgtatagctaactagaatgtgcggtgttcgtttccgtctgtgacttcagttttcctacgttactttattttccctcagaaaaatgtgaattttaacatcatgttcttcgtttggtggcaaccggatcgcggcagcacctcccggcgccccctgtcggacagatgtagaaagcgtgtatctgaagaaaatccggcaggcagatgcggttggtgcgtgcattttcactggcagaagcaacgtccgcaggaaacccagctggaaagtggttcggcgattttgacagatcgatcagagaacccggagatgattgtgcagcagcaactagaaagtagcaagtgtgtgctgccgaagttgccagaagcgatttcccaaccagagttggcgctcaatgttttcttagcagcgccgatttcctccccacctgaacaaggtgtgcttgcggcatcatctgtcgctgtatccaacttggaacacaagcaagcatgtactatattatatatactaagctgcgacagaatggtccgccggaaaatgacgtgcaggt

SEQ ID NO: 114684 - DNA, 555 bp, Zea Mays
cttgttcatggtgatttgaccacgtcaaacatgatgattaagaacagtaacaatcaattggtgggtacaatatccttttcgccaacaccttctgtttaatgcattcactttattaagctatggagtcgagtttatggctgtcaaggtcagcagcaatcgacccatctgagttgcatcgtggctattgatttgcaactaatatatgttaaatcttggcaagttctgtctgagtttcacatcgataattcctgaggacaaagcggtggacttatatgtgctagagagagctttgatttccatgcattcgtcctgtggggatgtgatggagaaaatccttgcggcgtacagaaaggcttcgaagcaatggtgttccacccagaacaagctggctcaaggtatggcatggtcttgttggcccctgtggcagcgcatggccttcgttgctagctgcactgatgtgagtagtgactttttgtctactcttcgcaaaacaatgaggcaacggggcaggaagcgcaccatggtcggatgaacaaagaaggaaaatctgtggca

SEQ ID NO: 114685 - DNA, 949 bp, Zea Mays
caaggcaacaatccatctactagtggttttggatgggattgggagaagaacaagctcaaagttgatagtgacactgtatgggatgagtacgttgagaggaataaggaagcaaaaggatataaacataaggttgtgaagttttgggatctactcagcctagtgtacaataaagaccaagcaaatggagagggtgctaaaacagcagctgaaagttcaaaggaaatggcaaaagagaatgataccggaggcaaggatgctccatattctgtatcttcctcgagtagtttaaaaagacaaagatcagatgattcatttaactctatatggtgtgataagttcgacatgcttacatctgcattgaaagatgacggtccaaagctaccctctttcaccgaagttctcgccgcattacaagaggttgagggacttgatgaagacacagaacttgagctttatgacatcctcacctctaatgcacacaagtttgagtcgatgatggcactcccaatggaaaggaggaagatgtggcttatgatgcagctaaggaagtgaaacaacttaaatgtgaacttagatctctgtgttgaactgattgtgtgaacttgtctttgtgaaacttttgtgtgtgaacttgatggctatgtgaaactgttgtgtgcgaacttgatggctttatgaaactactatgtgaagatttgatgtctttgtagaactttttatgtgcgaatttgatgactttgtgaaaactgttatgtgtgacttgcctttgtggaattgttatttgtgaacttaaaaagtttctgatagttgtaaattgttcatgctcatttttaagcagatgcaaagtcaagagatccttgtttgtattcaaattcaaattccgtgtgcaaagtatccaaacaacatctagaatttaattctaggaattcaattgcttgtacaaccaaac

SEQ ID NO: 114686 - DNA, 154 bp, Zea Mays
cgattattgtgttttatgcctaccgtatgtattatttacgctaaaagatgtacgattctatgcttgaacacggagttcgtatatcagtttgttgcatacatatttttttacatgcatattagaaagacaattccttgatttatgctgtttgtaa

SEQ ID NO: 114687 - DNA, 172 bp, Zea Mays
ccgaagaaattcaaataaacgaactaaatgtactagctatagaaaacacttttataattgtcccaaaatggtacatgtaggtctatatagtgtaggaactgagagcacctagagggggggtgaataggtgatcctgtaaaacttaaaacttaacaccacaaatttgattaag

SEQ ID NO: 114688 - DNA, 101 bp, Zea Mays
gggttctctttgcaaaatgctataacaatacaacttgtttgaaatttttacctagtgaatgcactctaggtgtgtcaaacatatgcaatgccaatgtttat

SEQ ID NO: 114689 - DNA, 2109 bp, Zea Mays
aaagaaggagaagagagtggcccttaaccctaccgttctcttctccctaatcctggtaatcagtagtagccactagcgctgctgccgttctcttcccctacccgacacaagctccaccacctctatctaccacacgccaccactgtaggagctcctccacgatcatcccgccctagagccataataattcgttgaagaggagggggttcttagaaccagagggcggctacctgtgaaggatacccgtgctgctggctgctgctgctgctcctcaagctagagccgtgtgtgggctgtgcagattgcagagcgcagcttccagtctcagcattgctttcaatggggaggcactcctgctgttacaagcagaagctgaggaaggggctctggtctcctgaggaagatgagaagctcatgaaccacataaccaagcacgggcatggctgctggagcactgtccccaagcttgcagggcttcagaggtgtggcaagagctgcaggctgaggtggataaattacctgaggcctgaccttaaaagaggcgcattctctgaggaggaggaagacctcatcgtcgaacttcatgctgtactggggaacaggtggtctcagattgcaacaaggttgcctggaagaactgacaacgagattaagaatctctggaactcgagcatcaagaagaagctccggcagaaaggcattgaccccaacacccacaagccgctccttgtcgaggttgaacgcagcaaagcagctccaacgaccagtaccgagaggacctctgagtccagtgatgttgacccttcaagtggcggcgcacttggcaactcgagccatcttcttctcagcgagacagcacaatcaccacagctgccagcgctcggtaagcatcgcagagaaactactagcctcgcacatctaagggtgccgcccaaggagttgttccttgaccagctggtttctggtcatgagaacctcactggctgccgcacagcaggcccagttccaaatttccctttccaacagctcatgtgctacagcaatgaatttggcaacaagaatggtgctagtaacaattcactctggtttaaccacaatgagacaagtggcagcaccatttccactgtgatgccaccagtttcgccatcaactctctcaacatcaacagggctcaataggtcaccagacaacccacactcgggaggcactggtattcagagcacccagttctactgggacactgctaatcctagcagctgcagcagtagaggaagcagcggaagcaacggcttgggatttgagctgcaaagcacaagctcgcttctggagagtagtgttttcccatggacagaattaacaccagacaaaaatagccaagttcaccttggggaagaactcaagtggcccgacttgctccacggaacattcacggacacacctgcaaccatgcagaatcttagccagtcactgtacgaagatgttatcaaagccgagagccaattcaacatagagggcctctgtgcagcctggtctcaaaatctgcagccacagcaacatctgcaggtatcagatttgtatgacaaggatttgcaaaggatgtccttgtcttttgagaatatctagacagcatgtttcagcatgcagggaacagagaaatagcagaaagctgagtcaatgaagccttaaaaaatacaatatttcttcacagattcatttgaaggctatgtggaggtgtgttttacgtaggtacattcttatgatgaaacagagatcaatactgataactgttcaccagtgtacatgaaaaaagggaaaaaatgaatctatattacagcataatgtatagactagagaaagtacatcctaggagtttacctcctttcatttaaaagttgctgtctttatctgtacatgcatgtagctcggctttttttgtataagtgagtcatggttgatctttgtctacaaaataaatgaggcaagaatgtgaaatactgcacctgtcagtagctcttcggaaccatacaagaaatttcagatttttttagctgttattttgttactgtatatgcttgagatgcaaattaattgttgatgatgcacttttat

SEQ ID NO: 114690 - DNA, 3166 bp, Zea Mays
agtaaaagtaagtaaacaaacaagctagtagtaaatattctactcaatctacaataaaggatgccatggcaggtccttgccaaaaaatataataggataaacaaagatgtcaggttaactaactaactatggatcttcaggtcccccagggcaacaactgtgcaccgctcgctgccttctctaccgtgaccgagagggtgagagctcccagcccttcctcctgtagccaagatatatacctaaaggttgaacaagcagcagcagaggcaaagccgttagccaatctgctgttgcgtgttgcaccgatcaacgtcggttcccagcgcttgctcgtcaagcgtgtcctgctgctgttctctgctcctgcttgccgcgagagctcctctcgctcatctacccaaggtcctctcggcgccgagatgtgagcttatctcttgaccggttcttgcttccttgatacagcgctagcttatgcgtgcatgtgcgcttggtgcaggtccgacagcaacgacttcgtcgagctgctatgggagaacggccaggcggtggtgcacgggaggaggaagcagcatccccaggccgccttcccgcccttcacctgcggcgcggccagcagcagtagagctcaagaaaaccagccgggtactaccgacccggtctcgctgttcaagacgggaggcctcttcgccgacttctcgtccggcctagacgccgcccgtggcaacggtgaccttgacgacaccgtgccctggatccactgccccatcgtcgaggaagacagcgccgcacccgcacctgccctcgcggagggctacagcccagatttcttctcggagctccatgcagcggcgttagcagcggcggcggcagagacgaacctcagccctctgccaccaccggtccagcacaacagaagcaccccggttgccaccaccagcagaggaccagaaccctcgaaggaagccccgcgcataccagtaccaggtccaggcagcaggcccgagccacaatctgagttcgcggccaccaggaaacctcggccggagagcggtggagagggattgatgaacttctccctcttctctaggcctgcagccttggtccgggcaagcctacagaggccaccgccaccgcagacaggcactgacaaggtgtccaatgtcaccacgagcacccgcgtggagtcgacggttctacagtcggctagtgggccaagaatcgcccctgtgttcacggaccagaggacggcgtggtcacaatccaaggaggtgcggttttcatgcgcaccagcgctggcggctggtaacctgcaccaggatatgcctctgggaagacctggcaacaacatgactccccaggggaaaatggagaccaaaaaggcttgtgaggttgcagtcgctactccatcgctctgctccggcaatggcgagtcctggcgcgaacaaaagaggaagagtcaggccgaatgttctgcaagtcaagacgatgatcttgatgatgagtccggtgggatgcgaggatcaggcggcagaggtacgaagcgcagccgcaccgcggaggtgcacaatttgtccgaaaggaggagaagggacaggatcaatgagaaaatgcgcgccctgcaagagctcatccccaactgcaacaaggtacgacgatccatttctaccatcttttaattaggccccgtttgatctgattagtccctctattttagtcacatttagtccataaattaccaaatggtaggacttaaacagagactaaattgttctagtctcttaagaggtgactaaaaaaactaaaccatataaattctaccttttgcccttcctttatttcagttgcactaacgacgggcgaatgctacgaggtattttggttctcttatgattcatttaatctgttttaaatacttttagttactaaaactaaacagtgttgttttaaatacttttagttactaaaactaaacagtgtagagactaaaaatttagtctcctaactaaactttagtccctgtactaaagtaaccaaacaaccccttacttatccgacacttttgaatccctaggcatttggtaaatcggtagcaacagatgcatcacctttcttgcagattgacaaagcctccatgctggatgaagcgatcgagtacctcaaaaccctccagcttcaagttcagatgatggccatgggaagtggactgtgcattcctcccatgctgctgccgcgagccatgcagctgcaaattccttcaattgctcatttccatcatctcggcatgggattgggttatgggatgggtgtcctcgatatgaacagcacagcggcagttccatttcagcccatccctggtgctcactatacttgtccgatgatcccaggcacgccaccacaaggtcttggaattggaatgcctggcacaaacacgatgccagtgtttggactccctgggcaagcaatccatccctcagcgtctagcgtacagccattcccatcgttggcgggtcttcctgttaggccaaacctggcacctcaagtcccagccgtcatggctaacatggtgcaggagcaacagcaaggcgtagcgactcagcagcagcagagtctgaataatgaagctcaacagaaagcaaataccggagatccacaaatactacaaaaatagatgaagagatcttcgccagtaatcagtttctggatggtggtggcaacaggactaatactatagggagaaatgaggctgaaacataaaaacggtcagcaagtgccagtgtgtaacctgactcgagctaaacttgacacaaatcatggaacttggcagagcgttattatcctaatagataacatggctgatgattttcaggtctcgactaacaagctgcaggtgtgaatatcagcaccaactcatcatggaagagcttaacgagtttcatgattcacgaagcagatctatcacttgaaaaaggtccaatcaatcaagatggatttggtggcgggatgtctagcttagcgagctaagatgctccaaagttttgtgtaaaatgtagatggaaccttgttacaagtaacatttcttggcagcgatgccgttttcaggtgttttttttttttgttgcttcactgaagttttcttgagtcaatatatcttattttcccagacctt

SEQ ID NO: 114691 - DNA, 2840 bp, Zea Mays
agtaaaagtaagtaaacaaacaagctagtagtaaatattctactcaatctacaataaaggatgccatggcaggtccttgccaaaaaatataataggataaacaaagatgtcaggttaactaactaactatggatcttcaggttcgtcaagccctaattaatactaacttgtgtagaagtaggaacagaggttattgctaggtggaatccgcgcattgtaaaaatcacctgactcctaactaggaggggaatataaatccaacaagagcacaaggaacacactgtggcaagcacaagcttggggggcgggccggtacagagcactgcctaggccgctgttgcacattttgcacgtctcatctgcttgtccatttccatccaggtcccccagggcaacaactgtgcaccgctcgctgccttctctaccgtgaccgagagggtgagagctcccagcccttcctcctgtagccaagatatatacctaaaggttgaacaagcagcagcagaggcaaagccgttagccaatctgctgttgcgtgttgcaccgatcaacgtcggttcccagcgcttgctcgtcaagcgtgtcctgctgctgttctctgctcctgcttgccgcgagagctcctctcgctcatctacccaaggtccgacagcaacgacttcgtcgagctgctatgggagaacggccaggcggtggtgcacgggaggaggaagcagcatccccaggccgccttcccgcccttcacctgcggcgcggccagcagcagtagagctcaagaaaaccagccgggtactaccgacccggtctcgctgttcaagacgggaggcctcttcgccgacttctcgtccggcctagacgccgcccgtggcaacggtgaccttgacgacaccgtgccctggatccactgccccatcgtcgaggaagacagcgccgcacccgcacctgccctcgcggagggctacagcccagatttcttctcggagctccatgcagcggcgttagcagcggcggcggcagagacgaacctcagccctctgccaccaccggtccagcacaacagaagcaccccggttgccaccaccagcagaggaccagaaccctcgaaggaagccccgcgcataccagtaccaggtccaggcagcaggcccgagccacaatctgagttcgcggccaccaggaaacctcggccggagagcggtggagagggattgatgaacttctccctcttctctaggcctgcagccttggtccgggcaagcctacagaggccaccgccaccgcagacaggcactgacaaggtgtccaatgtcaccacgagcacccgcgtggagtcgacggttctacagtcggctagtgggccaagaatcgcccctgtgttcacggaccagaggacggcgtggtcacaatccaaggaggtgcggttttcatgcgcaccagcgctggcggctggtaacctgcaccaggatatgcctctgggaagacctggcaacaacatgactccccaggggaaaatggagaccaaaaaggcttgtgaggttgcagtcgctactccatcgctctgctccggcaatggcgagtcctggcgcgaacaaaagaggaagagtcaggccgaatgttctgcaagtcaagacgatgatcttgatgatgagtccggtgggatgcgaggatcaggcggcagaggtacgaagcgcagccgcaccgcggaggtgcacaatttgtccgaaaggaggagaagggacaggatcaatgagaaaatgcgcgccctgcaagagctcatccccaactgcaacaagattgacaaagcctccatgctggatgaagcgatcgagtacctcaaaaccctccagcttcaagttcagatgatggccatgggaagtggactgtgcattcctcccatgctgctgccgcgagccatgcagctgcaaattccttcaattgctcatttccatcatctcggcatgggattgggttatgggatgggtgtcctcgatatgaacagcacagcggcagttccatttcagcccatccctggtgctcactatacttgtccgatgatcccaggcacgccaccacaaggtcttggaattggaatgcctggcacaaacacgatgccagtgtttggactccctgggcaagcaatccatccctcagcgtctagcgtacagccattcccatcgttggcgggtcttcctgttaggccaaacctggcacctcaagtcccagccgtcatggctaacatggtgcaggagcaacagcaaggcgtagcgactcagcagcagcagagtctgaataatgaagctcaacagaaagcaaataccggagatccacaaatactacaaaaatagatgaagagatcttcgccagtaatcagtttctggatggtggtggcaacaggactaatactatagggagaaatgaggctgaaacataaaaacggtcagcaagtgccagtgtgtaacctgactcgagctaaacttgacacaaatcatggaacttggcagagcgttattatcctaatagataacatggctgatgattttcaggtctcgactaacaagctgcaggtgtgaatatcagcaccaactcatcatggaagagcttaacgagtttcatgattcacgaagcagatctatcacttgaaaaaggtccaatcaatcaagatggatttggtggcgggatgtctagcttagcgagctaagatgctccaaagttttgtgtaaaatgtagatggaaccttgttacaagtaacatttcttggcagcgatgccgttttcaggtgttttttttttttgttgcttcactgaagttttcttgagtcaatatatcttattttcccagac

SEQ ID NO: 114692 - DNA, 2765 bp, Zea Mays
agtaaaagtaagtaaacaaacaagctagtagtaaatattctactcaatctacaataaaggatgccatggcaggtccttgccaaaaaatataataggataaacaaagatgtcaggttaactaactaactatggatcttcaggttcgtcaagccctaattaatactaacttgtgtagaagtaggaacagaggttattgctaggtggaatccgcgcattgtaaaaatcacctgactcctaactaggaggggaatataaatccaacaagagcacaaggaacacactgtggcaagcacaagcttggggggcgggccggtacagagcactgcctaggccgctgttgcacattttgcacgtctcatctgcttgtccatttccatccaggtcccccagggcaacaactgtgcaccgctcgctgccttctctaccgtgaccgagagggtgagagctcccagcccttcctcctgtagccaagatatatacctaaaggttgaacaagcagcagcagaggcaaagccgttagccaatctgctgttgcgtgttgcaccgatcaacgtcggttcccagcgcttgctcgtcaagcgtgtcctgctgctgttctctgctcctgcttgccgcgagagctcctctcgctcatctacccaaggtcctctcggcgccgagatgtccgacagcaacgacttcgtcgagctgctatgggagaacggccaggcggtggtgcacgggaggaggaagcagcatccccaggccgccttcccgcccttcacctgcggcgcggccagcagcagtagagctcaagaaaaccagccgggtactaccgacccggtctcgctgttcaagacgggaggcctcttcgccgacttctcgtccggcctagacgccgcccgtggcaacggtgaccttgacgacaccgtgccctggatccactgccccatcgtcgaggaagacagcgccgcacccgcacctgccctcgcggagggctacagcccagatttcttctcggagctccatgcagcggcgttagcagcggcggcggcagagacgaacctcagccctctgccaccaccggtccagcacaacagaagcaccccggttgccaccaccagcagaggaccagaaccctcgaaggaagccccgcgcataccagtaccaggtccaggcagcaggcccgagccacaatctgagttcgcggccaccaggaaacctcggccggagagcggtggagagggattgatgaacttctccctcttctctaggcctgcagccttggtccgggcaagcctacagaggccaccgccaccgcagacaggcactgacaaggtgtccaatgtcaccacgagcacccgcgtggagtcgacggttctacagtcggctagtgggccaagaatcgcccctgtgttcacggaccagaggacggcgtggtcacaatccaaggaggtgcggttttcatgcgcaccagcgctggcggctggtaacctgcaccaggatatgcctctgggaagacctggcaacaacatgactccccaggggaaaatggagaccaaaaaggcttgtgaggttgcagtcgctactccatcgctctgctccggcaatggcgagtcctggcgcgaacaaaagaggaagagtcaggccgaatgttctgcaagtcaagacgatgatcttgatgatgagtccggtgggatgcgaggatcaggcggcagaggtacgaagcgcagccgcaccgcggaggtgcacaatttgtccgaaaggaggagaagggacaggatcaatgagaaaatgcgcgccctgcaagagctcatccccaactgcaacaagattgacaaagcctccatgctggatgaagcgatcgagtacctcaaaaccctccagcttcaagttcagatgatggccatgggaagtggactgtgcattcctcccatgctgctgccgcgagccatgcagctgcaaattccttcaattgctcatttccatcatctcggcatgggattgggttatgggatgggtgtcctcgatatgaacagcacagcggcagttccatttcagcccatccctggtgctcactatacttgtccgatgatcccaggcacgccaccacaaggtcttggaattggaatgcctggcacaaacacgatgccagtgtttggactccctgggcaagcaatccatccctcagcgtctagcgtacagccattcccatcgttggcgggtcttcctgttaggccaaacctggcacctcaagtcccagccgtcatggctaacatggtgcaggagcaacagcaaggcgtagcgactcagcagcagcagagtctgaataatgaagctcaacagaaagcaaataccggagatccacaaatactacaaaaatagatgaagagatcttcgccagtaatcagtttctggatggtggtggcaacaggactaatactatagggagaaatgaggctgaaacataaaaacggtcagcaagtgccagtctcgactaacaagctgcaggtgtgaatatcagcaccaactcatcatggaagagcttaacgagtttcatgattcacgaagcagatctatcacttgaaaaaggtccaatcaatcaagatggatttggtggcgggatgtctagcttagcgagctaagatgctccaaagttttgtgtaaaatgtagatggaaccttgttacaagtaacatttcttggcagcgatgccgttttcaggtgttttttttttttgttgcttcactgaagttttcttgagtcaatatatcttattttcccaga

SEQ ID NO: 114693 - DNA, 402 bp, Zea Mays
atgcccagccccggcgcgactcgcggtccggcgcagccagcccctagtggcatcctgcgcggctgggttgcacgaccggcggcctcggacatggtggcgcgcccccggtggctcggtctgcgcgaccagcaagcggcgcggcccgccggcgtggtggcccgcagccagccggcgcgaccagccaacgcgcggcggctcggcgcggccacccggtgcggctcgcctagtgcgtctggcgcggccctcgcgcacgtcggcgcggcccgtgcgtgtgcccccggcgcggcctacgtatggctggcgtgcccgcgactcgctcgtgcgtgcccggcgcaacctcgcgcgcatcctgcgagaccccggcgtgtcgtcgaggtcccgacgacatccgtctacccctag

SEQ ID NO: 114694 - DNA, 2607 bp, Zea Mays
atgttgattgctctattcaatcacaacattataaaattgaaatgcgcaaaatcaattaagctcactgtcagcatatttggatctatctcctgtaatgtgccaaatgaagatcagtttgacacattacaccaacaagtccaacagatagtgacaaaatttgagatgaaaaggatcttgaatagcagggctctaataacatgcaaaaaggtgaggcgactcacagagagaatgtctaatgcctccccactatcattttatctaaaaaaggagcaatgggggaaggcagccgcgagaccaggtggacgatttgtgagcaaagggaatggggggaaggctgccatggatggaagggcgcggagggagcgcggctgccatgaagggggagcggggcgcgacagccatggatggaagctttgtgggcgattcgcggcggatttgggagaactaagctgtcatggatggaagcgtgatttgggaggccgagttccctggcactgctgggggagcggggcgcggctgctggattggaagcgtgagcttgcgacctcgcgtgatttgtgggcgattcacggcggatccatcgcggctaccatggatggaagcgtgatttgggagatcgagttccctggcgccaggatgtgtgatttgggagatcgaattccctggcacgaaggttatttgggaaggaccttccctggcacggctgggggagcggggcacggctgccatggattggaagcgaagcagctcacactgtccaatccaatccagcctacagacgatggtattgggcctccagatacgccttctgatgtcctgggctccaggctcaccaacggtcccgtgacaaacctacaggctacagcattgcggttcgctgcacaccacactgccgctccgtcgccgagccgcatgagcacgggaggcggcaccaccttgcgcgagctgacggccctcctctccacgctgcgccgcgcgcgactccaacaccccgctcacgctgcgcagctccacgcccgcctcctcatctctgctggcgcgcgtcctcacccgcacccggtcctcctcacgcagctcgtctccctctacgccgccgcgggccgcctcgccgacgcgctccgcgccttccgcgcccatctacccagcgccaacctgcacacctatgccgtcctcgtctccgccttcgcgcggccgtacccggacctcgcgttctccctcttctcgggctcgcgccgccagctccgccccagcccccatgtcatctccgccgtgctcgccgcatgcgccggcctccagcctctctgcggacgccaggtccacacgtgcgcggccaaggtcgtaccgcccggcgatgtgttcgtctacaccgggatggtcgacgtgtacgccaagggcggggacatggagtcgtccagaaaggtgttcgatgaaatgctgaaccggggcgcggcgtcgtggaacgcgctcctcgttggttacgccaggaacaagatgtgcctcgaagccctgtcggtgttcagggagttggccgcgcaggggcgggaggtgtctctcgatcaggtgagcgtgtcgagtgtgctcagcgcttgcgctgtggcaggggccctgaactatggtcgccaggtacacgcgtgcgctaccaaggtagggctggagctcagcgcggtttgtgtcagcaacgctcttcttgacatgtacaccaggtgtggatgctcacgagaatcttccgctctgctaaatgctgtgggttgcagggatgttgtcacctggaacatcatcattcgtagctgcattcatgacaatcggttcaaggaagcttgtgtgctgttccggtccatggtcaggaacggtaccttgccggatgatgtagcctttgctactgtgttgcaggcatcagcgtgtatgtcggcatgggctataggagcaagcatgcatgcctccgtcgtgaagacagggttcttatacagtgatggcgtcactagctcgctaatcaccatgtattccaaatgtggctgcttggacgatgcacaccgagcatttgtgggggcaaaagatcatctgcatataatgtcctggacggccatgataactgcactgcagcagcatggacatggcatgcaggcaattgatgtatttgagaatatgctagagaatggcattcctcctgaccacatcacatttgtgagtgttctctcttcctgtagccacagcggacttgttgagcaaggacgcaggtacttcgattcgatgactcgagttcataagatcacaccacagaatgagcactatgcgtgcatggttgacatgtttgggcgagcaggccttctaactgaggcaaagcgattcattcaccagatgggacctaagcaagatgcatcagtccttggggcactcctttgggcttgcatgaactgcagggaccttgagatgggtaaggaggttgccaagaagctttttgtgattgagccaggtaataccgggaactatgtcctgcttgctaatatctatacgtcacatggaagattggaggaggcaaaggaggtgcggaggtggatgatgtttcaggagttaaggaaggaaaagggatgcagtttaatcaacaattga

SEQ ID NO: 114695 - DNA, 898 bp, Zea Mays
tgattaattaggtcgcgcgctagctgtgcggactgctaggagctagctccatcgtcgtccggttgttattcctccttctcaacacacattgcccgttgccaacatcatccttccagcttcctggccgacgagcagtgccttcatatatacaaacgtacaccagctacactacacatctctctagctagctctctctctctctgctccggcagggcttcacctcacctgtgctgttgtgtgcgtgcgtgcttatatgggttcttgggtgcgcaccatcacaacgcccttcaggaaagcatgcaccatcttcggcccgcagaaggacggcggcggcggcggcaagaggtcgcagcaaccaaacccagcgacgatggtacggcacgtcgacgacgccgccgagagggccaagctgcacggggaggtgatggcgtgcgcctacgaagacgtgcaggtcatgtggtccatgctcgaccagacaacaaggattggggatctcagtggcagctcgtgaccgccggcaattgtccgttcatgcattttcctagagccacaaaggtggagatgcagacatggtgtacatagcaaaatatcttctcaccaaacatcccccccccccacccacccacttgctttcttgggccttgaattggaagagctatttgcgccgatcaattgagcccagaaccaagtgcccgttttgtacgtagcaagatttattagcttttcttttggagtttccagctcagttgagagtttgaatcctcagcactcttctctttgaggtactcgattggagtgatgtacattgccacgcaggaaaaactggcatttgtgtcagcccagttaatttttatcggcattcagcacagcccaagaaaattaacgggatatttggttt

SEQ ID NO: 114696 - DNA, 267 bp, Zea Mays
atggggagaggaaagagctccttttttgcgtccctgttcggctgcaagaagcatggctccggcgggaggcaggatcaggtggaagcggcagcggcgacgagaccgccgccgcaggggtactaccacgggacaagggtgcgtcccagcgatgacgacgaatactacggcaagaactggtacgccgaccgcgacatcaaccagaaggcctctgagtacatcgaaaggatgcaccgcgtaatgctgatcagccaacatgacgacgagtag

SEQ ID NO: 114697 - DNA, 684 bp, Zea Mays
cgccatgatataacttgaattttaaacatcttaacaggtatatgcatgtgcataatgtcgaactgaaattgaaaactaaatacttgtagcggctgttctgttcgccttatcactaggaaagtagtacattggatgggagcatgtttctgatagacagctaattatttggcttcattcaagattgtgatgatttgtagtaatgaattggaggcttcgatccactgcaatttatgtggtacaagggttttgtttgagaaggcgaatgagattctaatggaggaaagaaatgttcagtgtgagtatttccaccaccaacacccgcaagttgaaagcctagacgaatgaactattcagacattggcgacaacgctacgagtggtgtgatggcaactcttcttgtattcctgtccgttggtttagttggtgctactgatggtataggcttccatttaactgggaaggtagtaaactagagtggcatgccctttgccattggtatttatggatttttctactctgggcattcagtatttccaaacatctaccagtcaatgtctgatcactctaagttccctgtggcactattcatatggtatgcttggctatattcatgtttcggtttaccttgttactgaataatgaatattttttcgcaaggtgtgatggtattttcgcaaggcttct

SEQ ID NO: 114698 - DNA, 98 bp, Zea Mays
tttaattttagctaggcgtgggatgcacgtgggaatgggaatgagctttgcggggagaggaaatgagaaaaacagtgcggggagggacacaattggga

SEQ ID NO: 114699 - DNA, 1867 bp, Zea Mays
gacgacgcaggcgaacggctgacgaacctgggaggcccaaatccggcccgtcgcggaccgcctcgagtggcgaccctgatccatcctcaacaggcacgcgcactgtctctctcgtatcactctccattctacctctctcttccccaatccaggccagccaaccctagcgcaccggcgatggcgtcggacccggcccctgacgacgcggccgcggccgtgaatgggcacggcaacgacaacggacacggtaacggcccgtccccgtcgaagcgcccccgggcggtgatctcggaagccgagatccgcgtcgagttcgcacaccacgacgcagccgtggcgcgcgtcaacaacggcagcttcggctgctgcccggcctcggtcctcgccgcgcaggcccactggcagcgcctcttcctcgcgcagcccgacgccttctacttccacgttctccagcagggccttctccgctcgcgcgccgccgtcgccgaggtggtgggcgctggcgacgtctccgaggtctccctcgtcgataacgccaccacggccgccgccatcgtcctgcagcacgcagcctggagcttcgccgagggtcacttcgcgcgcggggatgcggtgctgatgctccactacgcctatggtgcggtcaagaagtccatccacgcgtacgtcgcgcgtgcgggggccaccgtcgtcgaggtgcccctcccattccccgtcgcgtccgccgacgcaatcattgccgagttccgtgctgcgctcgcggtcgccaaggaaggagggcgtagggtcaggctcgcagtcatcgaccacattacctccatgcccagtgtcgtcatcccagtcaaggagctcgtcgccatctgtcgagaagagggcgttgacaaggtatttgttgacgctgcccactctattgggcaggtgcctgtggacgtgcgcgacattggagccgatttctatacaagcaaccttcataagtggttcttttgcccccctgctgtggcctttttgcatactcgcaaggatgacccgatagcctcccaactccatcaccctgttgtttcccatgagtatgggaatgggctgcctatggagagcggatggattggaacacgggattacagtgcccagcttgttgtgtccgaggctatagattttgtgaatcgatttgagggtggaattgaggctatacgaaaccggaatcatgagaaagttattgagatgggtaggatgcttgctgaggcatgggggacttttcttggctcacctccggaactgtgtggtagcatggttatggtggggatgcctggttgccttggtgttgagagtgatgatgatgcaatgagagtgaggacaatgttgagaaaggatttccaggtggaggtgccggtatactacaactcaagaagggtggaaggacaggagatgacaaaggataaaaatggtgatccagtgacagggtatgtgaggatctcacaccaggtttacaatgtcacagaggactatgagagactgagggatgttgtcaataaacttgtttctgaagggttcaccagcagcaagttgcggccttctgagaagcaagaagcttaggtgtaatgaccttccagccaggtagcatccacctgaaggcgctgtggccgactacttaggtgtggaccggatcagcgcagccagtacggcttcgtgatcgtgacgttgaagaatgtagtgtaccgccaggaactgacatgtgttgtatttggcgttcagtgtaagtaacaataatgccctggcatgttgtcttctctcacattttgggagctgctgtaacctcagaataatctggaatataaggatatttacagctgctgcaataaataaataaaaa

SEQ ID NO: 114700 - DNA, 1928 bp, Zea Mays
gacgacgcaggcgaacggctgacgaacctgggaggcccaaatccggcccgtcgcggaccgcctcgagtggcgaccctgatccatcctcaacaggcacgcgcactgtctctctcgtatcactctccattctacctctctcttccccaatccaggccagccaaccctagcgcaccggcgatggcgtcggacccggcccctgacgacgcggccgcggccgtgaatgggcacggcaacgacaacggacacggtaacggcccgtccccgtcgaagcgcccccgggcggtgatctcggaagccgagatccgcgtcgagttcgcacaccacgacgcagccgtggcgcgcgtcaacaacggcagcttcggctgctgcccggcctcggtcctcgccgcgcaggcccactggcagcgcctcttcctcgcgcagcccgacgccttctacttccacgttctccagcagggccttctccgctcgcgcgccgccgtcgccgaggtggtgggcgctggcgacgtctccgaggtctccctcgtcgataacgccaccacggccgccgccatcgtcctgcagcacgcagcctggagcttcgccgagggtcacttcgcgcgcggggatgcggtgctgatgctccactacgcctatggtgcggtcaagaagtccatccacgcgtacgtcgcgcgtgcgggggccaccgtcgtcgaggtgcccctcccattccccgtcgcgtccgccgacgcaatcattgccgagttccgtgctgcgctcgcggtcgccaaggaaggagggcgtagggtcaggctcgcagtcatcgaccacattacctccatgcccagtgtcgtcatcccagtcaaggagctcgtcgccatctgtcgagaagagggcgttgacaaggtatttgttgacgctgcccactctattgggcaggtgcctgtggacgtgcgcgacattggagccgatttctatacaagcaaccttcataagtggttcttttgcccccctgctgtggcctttttgcatactcgcaaggatgacccgatagcctcccaactccatcaccctgttgtttcccatgagtatgggaatgggctgcctatggagagcggatggattggaacacgggattacagtgcccagcttgttgtgtccgaggctatagattttgtgaatcgatttgagggtggaattgaggctatacgaaaccggaatcatgagaaagttattgagatgggtaggatgcttgctgaggcatgggggacttttcttggctcacctccggaactgtgtggtagcatggttatggtggggatgcctggttgccttggtgttgagagtgatgatgatgcaatgagagtgaggacaatgttgagaaaggatttccaggtggaggtgccggtatactacaactcaagaagggtggaaggacaggagatgacaaaggataaaaatggtgatccagtgacagggtatgtgaggatctcacaccaggtttacaatgtcacagaggactatgagagactgagggatgttgtcaataaacttgtttctgaagggttcaccagcagcaagttgcggccttctgagaagcaagaagcttaggtgtaatgaccttccagccaggtagcatccacctgaaggcgctgtggccgactacttaggtgtggaccggatcagcgcagccagtacggcttcgtgatcgtgacgttgaagaatgtagtgtaccgccaggaactgacatgtgttgtatttggcgttcagtgtaagtaacaataatgccctggcatgttgtcttctctcacattttgggagctgctgtaacctcagaataatctggaatataaggatatttacagctgctgtagattgattgctggttaccgatcgcattgatcacaaatacatcgaagtggcagtggattactttgggttgtgtcaaa

SEQ ID NO: 114701 - DNA, 1720 bp, Zea Mays
tgaattgaactgccaataaataaattgtcgaactgtatgtacagtaccgtcaaaaagcagtaagtataagtaaacctgggcggtacgttctcaaacagtcaacagggcaaagtaaccaatcaggccgtccaacgggagcaaaatcagttccatcagcatcaccattataaccaatgagttccacacatctccacacagccacgatccaagcacaccataacggatcagttccccatcagcgtagccacgattgaagcgcgccataatttcggttgatgaatagtggaatccatcatactgcagttttacacacgtccgccaattgctatggttcaaacatgctaacagacttacaagaaacaagtatccctattgacaaaacatgataaatacaaatgaaaaatgcttagacgcagatacatatggatatctccaacattagtcccaaagcaattagtccagactgaattgtagaaaatgtaaacaattatctaacattaagtctgaaagcaattaaacgagactgaatattacaaaaatataatatagaatatagaatgaaataaaaaagcagtgaccttttcaaaataggagattcacgggtagctgcgacctaaatataatatagaatatagaatatagaacagcgtgtaaatttgtgtagctgcgacctaaatttttgcacgcttcagactcatggagcgattagtaactctcagttcattggagttctcaattattattacaagactgaaaatcgagctgggtgaagcggacgtcaacggtattaacgtgcgtttcaggatcttcagttcgattggtgtcaggatttcttcgatttattatgcaagcacagaatataaaacgttgctcgtaatagaaggagcgcaggacgacttaaaaattgtttgaacataattacgattgtaccttgggaatcgcgtcgtagctccatgtttttgttgtagatctccgtgctcgatgcaaaaatccggcgtgcgtagcggaccaacaggagcggaagcaacgcatacaggaacacggaacaagatgagggaggagaacccggggccaaaaacatcaacccccgtgcgatctcctcccccggcacgcaataatcatctttttattattgcctggcctgccatgcgagcgcacccatcatggcaaaggcctcctcctctaggatgtcacatcttttttctcttttttacatgctgcagcttacctcgcctcttccaggcggcatatctcatagatctactaataattatcgaaattgatccaataattatcagcgcagagacatcatccatcgaggtggagcaggactgcagaccgagagatcccgccgcctccatctatcgtcgcctcagatccgctccgaaccgaacgacgacgacttcgcgatttctccagatctggatccagaagcagaacatgcgatgctcgaccaccaaaacaaaacaacaagaaccttgcaggcaaggactaaccgatacaggatccaacgcgggtttgccgaatccagcaatcagatatgagcctgcacaacatgaagcaaacggatttcctgataaatcgaaacaaagtagctcaccgagagcactcggggaggcaaggtctcaaggaggacggccatcctggatctggaggacgagatgaggttgcgtgcaggaggggaacgcgtccaacaatggtttgttcttggttatcgaat

SEQ ID NO: 114702 - DNA, 1038 bp, Zea Mays
atggcgtgggagccagatctcctctcccattaccgcgcccgcatgatatggaaggtcccagatattctctccccattaccacgggcggcttcgggttcggcctcagcaacgtggcggtcgacggcggatctgggcgcgcactacgaggcgaacaacaacgtgctggcctccttcgccagccagctcctcgctaacgcccccgcgctgccatgggatgatcgtgccggcgggaggacgccgtcagacgagatggacgacgagctatacggtgtcgccggctgcgacagccacgtcgtggcgagcttgcggtgccccagccaatccagggccatggcggtctggtcgtcatccaagaagtcgtacgatatctgtaccagcgccggcggatcagtaaccgtgccggcccatgacacataccacctcgccggggccgggctctccaacgagggaggcctccactacccgctcgccgcctgcagtggagccaacgcgtccgcggtggcgacgagggagttgtcgctgacgctgtgctccaactccatcgcttcctcgaacagcacgctaaacacgacggagctaagactggaggaagctaagtctcttgcagaaaagctttgtgatggccctctttcaagtgctgcaaatttgtggatcctgagagcttctatggagataaattcgttggcgactgcttctggcagctctccattgaataaggagaacttgagctctctgtttgatctgtttggcacatgtcgacacagattgcttgctttacctcggccaagcctcaagttgatgcaatactgcatagagctggaggtgagccttgcatcgctcggaaaccatggcgccctcacaaatgctcgacgactatatgattcagtggtcgacatgtatccccaggaaagggaagtgtggaggagctactatagcctggagctcaagatgggaacatcagagtctgtcaacgccgtgtacgcgcgtgctcgcaaggtgctcggtgactccactgttcatgcttaccccagagcttaa

SEQ ID NO: 114703 - DNA, 1801 bp, Zea Mays
tttgtaacaaaaagcagcatgatcaattacaaaaagcagcatgaaattgatctccagggtaacacatgctctcgtgcccctagaaattctaaatggacgaattgaactgccaagaaataaattgtcgaacaatatgtacagtaccgtcaaaaagcagcaagtattaagtaaacctgggcagtacgttctcaaacagtcaacagggcaaagtaccagtcaggccgtccaacggtagcgaaaacttaaaccttggtaacaaatcagttccatcagcatcgccatgacccatgattgaagcacactataaccaatgagttccacatctccacagccacgagccataacggatcaattccccatcagcgtagccacgattgaagcgcgccatgatctcggttgatgaatagtggaatccatcatactgcagttttgcaatcttctctacacacgtccaccaattgctatggttcaaacatgctaacatacaagaaacaaatatcccaattgaccaacatggtaaatacaaatgaaaaatgcttagacgtagatacatatggagatctcaacattagtccagactgaaatataatatagaatgaaataaaaacgctgtgaccttaggagattcacgggttgaacagaaccagcatgtaaatttgtgtagctgcgacctaaatttttgcacacttcagactcatggagcgattagtattacaagactgaaaatcgagctgggtgaagcggacgtcaacggtattaacgtgcgtttcaggatcttcagttcgattggtgtcaggatttcttcgattcattatgcaagcacagaatataaaacgttgctcgtaatagaaggagcgcagaacgacttaaaaattgtttgaacataattaccgattgtaccttgggagtcgcgtcgtagctccatgtttttgttgtagatctccgtgctcgatgcaaaaatccggcgtgcgcagcggaccaacaggcgcggaaacaacggatacaggaacacggaacaagatgagggaggagaccccggggccaaaaacatcaacccccgtgcgatctcctcccccggcacacaataatcatctttttattaatacctggcctgccatgcgagcgcacccatcatggcaaaggcctcctctaggatgtcacatctttttttctcttttttgctgtcgacgcacgcagacttttacatgctgcagcttacctcgcctcttccaggcggcatatctcatagatctactaataattatcgaaattgatccaataattatcagcgcagagacatcatccatcgaggtgaagcaggactgcagaccaagagatcccgccgcctccagccatcgtcgcctcagatccgctccgaaccgaacgacgacgacgacgacgacttagaaatttctccagatctggaaccagaagcagaacatgcgatgctcgaccaccaaaacaaaacaacatgaaccttgaaggcaaggactaaccgatacaggatccaacgcgggtttgttgttttctcccagtcctagctctattcaagcccgtaagatgccgaatccagcaatcagatctgagcctgcataacatgaagcaaacggatttcctgataaatcaaaacaaagtagctcaccgagagcactcgcgaggcaaggtatcaaggaggacggccatccaggatctggaggacgagatgaggttgcgtgcaggaggggaacgcgtccaacaatggtttgttcttggttatcgacgaataattggcggaaacaaatgtatttatggtaccctctcc

SEQ ID NO: 114704 - DNA, 549 bp, Zea Mays
atgaatagtggaatccatcatactgcagttttgcaatcttctcttgggagtcgcgtcgtagctccatgtttttgttgtagatctccgtgctcgatgcaaaaatccggcgtgcgcagcggaccaacaggcgcggaaacaacggatacaggaacacggaacaagatgagggaggagaccccggggccaaaaacatcaacccccgtgcgatctcctcccccggcacacaataatcatctttttattaatacctggcctgccatgcgagcgcacccatcatggcaaaggcctcctctaggatgtcacatctttttttctcttttttgctgtcgacgcacgcagacttttacatgctgcagcttacctcgcctcttccaggcggcatatctcatagatctactaataattatcgaaattgatccaataattatcagcgcagagacatcatccatcgaggtgaagcaggactgcagaccaagagatcccgccgcctccagccatcgtcgcctcagatccgctccgaaccgaacgacgacgacgacgacgacttag

SEQ ID NO: 114705 - DNA, 4676 bp, Zea Mays
cgatcgccatctgctcagctgtgatttgtgagcgcaaagcccgacatctataaatatcccgcatccatccatccagccagccattgcaaccaccggccgggctgggagcactcagcactgcgacgaggagagaggagacggagacggatgcttattcctgtgcctgccttggtgagtagtggccttcgccttggcctccgcgagcgcatttttatatgcttgctcgcccgcgatggataccaaaaccaccgcagcggcgccgctgcggtctcccacctttaatcactatacaagcttgcttttttctctttccccggtggtgcgggtgctggactgctggcctctgcgtccgcgtccggcggcaagtgcgaaagctgccaacttttttttttctgctcggtgagtgaggcgctgctggtatgcatgagctaggaggtaaggaacaaccatacgagggcgagcagagcagagagcacacggcgcgccgagctagcagcattgcccaatctcgcggcggggagagattcgtgagcgcggaggcgcgaatcttcgacgcagcgacggcagccatgccggagtcctggagacccgccgaggcgaatgcctcgtcgcagccggcggcaggcacgtccggcccctcggctcagagccctggcaatgacgccaagggacgcgcggcgggggaaacccccggcgcggcggaggcggcggcgacgcgagtgccgttccacaagctgttcgcgttcgccgactccaccgacgtggcgctcatgctcctgggcgcgctcggggccgtggccaacggcgccgcgatgcccttcatgaccgtgctcttcggcaacctcatcgacgccttcggcggcgcgctcagcatccacgacgtcgtcaaccgggtgtccatggtctctctcgatttcgtctacctcgccatcgcctccgccgtcgcttccttcgtccaggtgacctgctggatgatcaccggcgagcgccaggcggcgcggatacggaacctgtacctcaagacgatcctgaggcaagagatcgccttcttcgacaagtacaccagcaccggcgaggtggtgggcaggatgtcgggcgacaccgtgctgatccaggacgccatgggcgagaaggtcggcaagttcatccagctggtggtgaccttcttcggcggcttcatcgtcgccttcgcgcagggctggctgctgaccctggtcatgatggcgaccatcccgccgctcgtcgtggccggcgcggtcatgtccaacgtcgtcaccaagatggcgtccctgggccaggcggcgtacgcggagtcgtcggtggtggtggagcagaccatcggttccatcaggacggttgcgtctttcaccggcgagaaacgggcggtggagaagtacaacaagtccctgaagagcgcgtacaagtccagcgtccgggaggggctcgccactgggcttggcatgggcacggtcatgctgctcctcttctgcggctactcgctggggatttggtctggcgctaagctgatcctggagaaggggtacaccggagccaaggtcatgaacgtgatctttgcggtcctcactggctctctggctctaggtcaagcgtctccaagcatgaaagcgtttgccggcgggcaggccgctgcatacaagatgttcgagacgatcaacagagcgccggaaatcgacgcgtacagcaccacaggaaggaagctggaggacatccggggggaaatcgagttcagggacgtccatttctcctatccgacgaggcctgacgagccgatattcaggggtttctccctcgccatacccagcggcacgacgatcgcgctggtaggccagagcgggagcggtaaatccactgtcatcagcctgatcgagcggttctacgaccctcagctcggcgacgttctgatagatggcgtcaatctcaaggagttccagctgaggtggatcagaagcaaaatcggccttgtcagccaggaaccagtccttttcgctgccagcataaaggagaacatagcctacggcaaagccagcgcgacagatcaggaagtcagagctgccgctgagcttgccaatgctgccaagttcatagataaaatgcctcagggtttcgatacctcggttggcgagcatgggacacagctctctggtggacagaagcagaggatcgccatcgcaagggctattctgaaagatccaagaattctactgttagatgaagctacaagtgcgctggacgccgagtctgaaaggatcgtgcaggaagctcttgacagggtcatgtcgaataggacgactgtcatagtcgcacaccgtctgagcaccgttagaaacgctgacaccattgccgtcattcatcaaggaacactagttgaaaagggcccacacaatgagcttctaagagatccagaaggagcttacagccaactgataaagctacaggaagcaaaccagcagaacaaccggaagggtgatggcaatgctcgtctaggcaaacagatgtcgatgaacaagtcagctagcaggaggttgtcccgtgataacagtagccaccattcgttctcggtgccgttcggtatgcctcttgggattgaaattcaggatggttcatccaacaaactgtgcgacgagatgccacaggaagtgcctctcagccggctcgcgtctcttaacaagccagagatcccggtcctcgtactaggttccattgcctcggtcatcagcggagttatcttcccgatcttcgcgatactcctgtcaaatgtgataaaggcgttctatgagcccccacatctcctaaggagggactcacagttctgggcttccatgttcctggtgtttggtgcggtgtacttcctgtcgctccccgtcagttcctaccttttctccatagcggggtgcaggctgatcagaaggatccggctgatgacgtttgagaaggtggtgaatatggaggtcgaatggtttgatcacccagaaaactcgagcggagcgatcggtgcaaggctgtcagctgatgcggccaaagttagaggacttgtgggagacgcgctccaattggttgtgcagaactcttcgacactagttgctggtttggtaattgcattcgtatcaaactgggagctatctctaatcatcttagctttgataccactcattggcctaaatggatggatccagatgaagtttattcagggcttcagcgcagactcaaagatgatgtatgaggaggcaagccaggtggctaatgatgcagtaagcagcataagaacagtggcctcattctcagctgaagagaaggtcatggatttgtacaagaagaaatgtgaaggtcccctaagaacaggaatcaggacagggattataagtggcatcggttttggagtttcctttttcttgctgtttggggtctatgcagctagcttctatgccggtgctcggcttgtcgaggacaggaagacaacctttcctaaagttttcagggtttttcttgctcttgcaatggcggcaattggagtgtcgcaatcaagtacccttacatcggattcttccaaagcaaaatcagcggcgtcctctatatttgcaatcgtagaccgaaaatcaaggatagacccaagtgaggatgcaggggtgactgctgagacactacgaggaaatatcgaattccagcacgttagcttcaggtatcctaccaggccagatgtccagatcttccgggacctttgcctgacaattcatgctggaaagactgttgcgcttgttggggagagtgggagtggcaaatcaacggcaatttcattgctccagaggttctatgacccagatgtaggccacatactactagatggcgtggacatacgcaagttccagcttcggtggttaaggcagcaaatgggcctggtcagtcaagaaccggccttgtttaacgacacgataagggcaaacattgcctatggaaaagatggacaggcaacagaatctgagatcgtatctgccgcacaactggcaaacgctcacaagttcatcagctcggcgctccagggatatgacacaatggttggagagcgtggagctcagctgtcaggagggcagaagcagcgcgtggccatcgcccgtgcgatcgtgaaggaccctcggatcctgcttctggacgaagcgaccagcgcactggatgccgagtccgagcggatcgtccaggacgcgctggacagggtgatggtgaaccggacaacagtggtcgtcgcccaccgtctgtcgacgatacagaatgcggatctgatcgccgtcgtcaggaacggggttatcatcgagaagggaaagcacgacgccttggtcaacgtcaaggatggcgcgtacgcgtccctcgtcgcccttcactcggcagcctcttcatagctgcaggtggtaggtagcatgggatcctgcaaacgtctgctgaaacatatatatatatatggacagaggcacagagctgccacaacctgtgtagcaagtcaggtgctagtatctgttcctctatttgatgacacacataattgcttattatacctaagcggggaaatggtacaaatagcaagggccaaatgtaaatgcaaggagctggtccttaagatagttaatatatatatatatatatatataatttatattattatttttgaa

SEQ ID NO: 114706 - DNA, 4467 bp, Zea Mays
cgatcgccatctgctcagctgtgatttgtgagcgcaaagcccgacatctataaatatcccgcatccatccatccagccagccattgcaaccaccggccgggctgggagcactcagcactgcgacgaggagagaggagacggagacggatgcttattcctgtgcctgccttggtgagtgaggcgctgctggtatgcatgagctaggaggtaaggaacaaccatacgagggcgagcagagcagagagcacacggcgcgccgagctagcagcattgcccaatctcgcggcggggagagattcgtgagcgcggaggcgcgaatcttcgacgcagcgacggcagccatgccggagtcctggagacccgccgaggcgaatgcctcgtcgcagccggcggcaggcacgtccggcccctcggctcagagccctggcaatgacgccaagggacgcgcggcgggggaaacccccggcgcggcggaggcggcggcgacgcgagtgccgttccacaagctgttcgcgttcgccgactccaccgacgtggcgctcatgctcctgggcgcgctcggggccgtggccaacggcgccgcgatgcccttcatgaccgtgctcttcggcaacctcatcgacgccttcggcggcgcgctcagcatccacgacgtcgtcaaccgggtgtccatggtctctctcgatttcgtctacctcgccatcgcctccgccgtcgcttccttcgtccctgttttccgtccgaccagaggtgacctgctggatgatcaccggcgagcgccaggcggcgcggatacggaacctgtacctcaagacgatcctgaggcaagagatcgccttcttcgacaagtacaccagcaccggcgaggtggtgggcaggatgtcgggcgacaccgtgctgatccaggacgccatgggcgagaaggtcggcaagttcatccagctggtggtgaccttcttcggcggcttcatcgtcgccttcgcgcagggctggctgctgaccctggtcatgatggcgaccatcccgccgctcgtcgtggccggcgcggtcatgtccaacgtcgtcaccaagatggcgtccctgggccaggcggcgtacgcggagtcgtcggtggtggtggagcagaccatcggttccatcaggacggttgcgtctttcaccggcgagaaacgggcggtggagaagtacaacaagtccctgaagagcgcgtacaagtccagcgtccgggaggggctcgccactgggcttggcatgggcacggtcatgctgctcctcttctgcggctactcgctggggatttggtctggcgctaagctgatcctggagaaggggtacaccggagccaaggtcatgaacgtgatctttgcggtcctcactggctctctggctctaggtcaagcgtctccaagcatgaaagcgtttgccggcgggcaggccgctgcatacaagatgttcgagacgatcaacagagcgccggaaatcgacgcgtacagcaccacaggaaggaagctggaggacatccggggggaaatcgagttcagggacgtccatttctcctatccgacgaggcctgacgagccgatattcaggggtttctccctcgccatacccagcggcacgacgatcgcgctggtaggccagagcgggagcggtaaatccactgtcatcagcctgatcgagcggttctacgaccctcagctcggcgacgttctgatagatggcgtcaatctcaaggagttccagctgaggtggatcagaagcaaaatcggccttgtcagccaggaaccagtccttttcgctgccagcataaaggagaacatagcctacggcaaagccagcgcgacagatcaggaagtcagagctgccgctgagcttgccaatgctgccaagttcatagataaaatgcctcagggtttcgatacctcggttggcgagcatgggacacagctctctggtggacagaagcagaggatcgccatcgcaagggctattctgaaagatccaagaattctactgttagatgaagctacaagtgcgctggacgccgagtctgaaaggatcgtgcaggaagctcttgacagggtcatgtcgaataggacgactgtcatagtcgcacaccgtctgagcaccgttagaaacgctgacaccattgccgtcattcatcaaggaacactagttgaaaagggcccacacaatgagcttctaagagatccagaaggagcttacagccaactgataaagctacaggaagcaaaccagcagaacaaccggaagggtgatggcaatgctcgtctaggcaaacagatgtcgatgaacaagtcagctagcaggaggttgtcccgtgataacagtagccaccattcgttctcggtgccgttcggtatgcctcttgggattgaaattcaggatggttcatccaacaaactgtgcgacgagatgccacaggaagtgcctctcagccggctcgcgtctcttaacaagccagagatcccggtcctcgtactaggttccattgcctcggtcatcagcggagttatcttcccgatcttcgcgatactcctgtcaaatgtgataaaggcgttctatgagcccccacatctcctaaggagggactcacagttctgggcttccatgttcctggtgtttggtgcggtgtacttcctgtcgctccccgtcagttcctaccttttctccatagcggggtgcaggctgatcagaaggatccggctgatgacgtttgagaaggtggtgaatatggaggtcgaatggtttgatcacccagaaaactcgagcggagcgatcggtgcaaggctgtcagctgatgcggccaaagttagaggacttgtgggagacgcgctccaattggttgtgcagaactcttcgacactagttgctggtttggtaattgcattcgtatcaaactgggagctatctctaatcatcttagctttgataccactcattggcctaaatggatggatccagatgaagtttattcagggcttcagcgcagactcaaagatgatgtatgaggaggcaagccaggtggctaatgatgcagtaagcagcataagaacagtggcctcattctcagctgaagagaaggtcatggatttgtacaagaagaaatgtgaaggtcccctaagaacaggaatcaggacagggattataagtggcatcggttttggagtttcctttttcttgctgtttggggtctatgcagctagcttctatgccggtgctcggcttgtcgaggacaggaagacaacctttcctaaagttttcagggtttttcttgctcttgcaatggcggcaattggagtgtcgcaatcaagtacccttacatcggattcttccaaagcaaaatcagcggcgtcctctatatttgcaatcgtagaccgaaaatcaaggatagacccaagtgaggatgcaggggtgactgctgagacactacgaggaaatatcgaattccagcacgttagcttcaggtatcctaccaggccagatgtccagatcttccgggacctttgcctgacaattcatgctggaaagactgttgcgcttgttggggagagtgggagtggcaaatcaacggcaatttcattgctccagaggttctatgacccagatgtaggccacatactactagatggcgtggacatacgcaagttccagcttcggtggttaaggcagcaaatgggcctggtcagtcaagaaccggccttgtttaacgacacgataagggcaaacattgcctatggaaaagatggacaggcaacagaatctgagatcgtatctgccgcacaactggcaaacgctcacaagttcatcagctcggcgctccagggatatgacacaatggttggagagcgtggagctcagctgtcaggagggcagaagcagcgcgtggccatcgcccgtgcgatcgtgaaggaccctcggatcctgcttctggacgaagcgaccagcgcactggatgccgagtccgagcggatcgtccaggacgcgctggacagggtgatggtgaaccggacaacagtggtcgtcgcccaccgtctgtcgacgatacagaatgcggatctgatcgccgtcgtcaggaacggggttatcatcgagaagggaaagcacgacgccttggtcaacgtcaaggatggcgcgtacgcgtccctcgtcgcccttcactcggcagcctcttcatagctgcaggtggtaggtagcatgggatcctgcaaacgtctgctgaaacatatatatatatatggacagaggcacagagctgccacaacctgtgtagcaagtcaggtgctagtatctgttcctctatttgatgacacacataattgcttattatacctaagcggggaaatggtacaaatagcaagggccaaatgtaaatgcaaggagctggtccttaagatagttaatatatatatatatatatatataatttatattattatttttgaa

SEQ ID NO: 114707 - DNA, 4547 bp, Zea Mays
cgatcgccatctgctcagctgtgatttgtgagcgcaaagcccgacatctataaatatcccgcatccatccatccagccagccattgcaaccaccggccgggctgggagcactcagcactgcgacgaggagagaggagacggagacggatgcttattcctgtgcctgccttggtgagtagtggccttcgccttggcctccgcgagcgcatttttatatgcttgctcgcccgcgatggataccaaaaccaccgcagcggcgccgctgcggtctcccacctttaatcactatacaagcttgcttttttctctttccccggtggtgcgggtgctggactgctggcctctgcgtccgcgtccggcggcaagtgcgaaagctgccaacttttttttttctgctcggtgagtgaggcgctgctggtatgcatgagctaggaggtaaggaacaaccatacgagggcgagcagagcagagagcacacggcgcgccgagctagcagcattgcccaatctcgcggcggggagagattcgtgagcgcggaggcgcgaatcttcgacgcagcgacggcagccatgccggagtcctggagacccgccgaggcgaatgcctcgtcgcagccggcggcaggcacgtccggcccctcggctcagagccctggcaatgacgccaagggacgcgcggcgggggaaacccccggcgcggcggaggcggcggcgacgcgagtgccgttccacaagctgttcgcgttcgccgactccaccgacgtggcgctcatgctcctgggcgcgctcggggccgtggccaacggcgccgcgatgcccttcatgaccgtgctcttcggcaacctcatcgacgccttcggcggcgcgctcagcatccacgacgtcgtcaaccgggtgtccatggtctctctcgatttcgtctacctcgccatcgcctccgccgtcgcttccttcgtccaggtgacctgctggatgatcaccggcgagcgccaggcggcgcggatacggaacctgtacctcaagacgatcctgaggcaagagatcgccttcttcgacaagtacaccagcaccggcgaggtggtgggcaggatgtcgggcgacaccgtgctgatccaggacgccatgggcgagaaggtcggcaagttcatccagctggtggtgaccttcttcggcggcttcatcgtcgccttcgcgcagggctggctgctgaccctggtcatgatggcgaccatcccgccgctcgtcgtggccggcgcggtcatgtccaacgtcgtcaccaagatggcgtccctgggccaggcggcgtacgcggagtcgtcggtggtggtggagcagaccatcggttccatcaggacggttgcgtctttcaccggcgagaaacgggcggtggagaagtacaacaagtccctgaagagcgcgtacaagtccagcgtccgggaggggctcgccactgggcttggcatgggcacggtcatgctgctcctcttctgcggctactcgctggggatttggtctggcgctaagctgatcctggagaaggggtacaccggagccaaggtcatgaacgtgatctttgcggtcctcactggctctctggctctaggtcaagcgtctccaagcatgaaagcgtttgccggcgggcaggccgctgcatacaagatgttcgagacgatcaacagagcgccggaaatcgacgcgtacagcaccacaggaaggaagctggaggacatccggggggaaatcgagttcagggacgtccatttctcctatccgacgaggcctgacgagccgatattcaggggtttctccctcgccatacccagcggcacgacgatcgcgctggtaggccagagcgggagcggtaaatccactgtcatcagcctgatcgagcggttctacgaccctcagctcggcgacgttctgatagatggcgtcaatctcaaggagttccagctgaggtggatcagaagcaaaatcggccttgtcagccaggaaccagtccttttcgctgccagcataaaggagaacatagcctacggcaaagccagcgcgacagatcaggaagtcagagctgccgctgagcttgccaatgctgccaagttcatagataaaatgcctcagggtttcgatacctcggttggcgagcatgggacacagctctctggtggacagaagcagaggatcgccatcgcaagggctattctgaaagatccaagaattctactgttagatgaagctacaagtgcgctggacgccgagtctgaaaggatcgtgcaggaagctcttgacagggtcatgtcgaataggacgactgtcatagtcgcacaccgtctgagcaccgttagaaacgctgacaccattgccgtcattcatcaaggaacactagttgaaaagggcccacacaatgagcttctaagagatccagaaggagcttacagccaactgataaagctacaggaagcaaaccagcagaacaaccggaagggtgatggcaatgctcgtctaggcaaacagatgtcgatgaacaagtcagctagcaggaggttgtcccgtgataacagtagccaccattcgttctcggtgccgttcggtatgcctcttgggattgaaattcaggatggttcatccaacaaactgtgcgacgagatgccacaggaagtgcctctcagccggctcgcgtctcttaacaagccagagatcccggtcctcgtactaggttccattgcctcggtcatcagcggagttatcttcccgatcttcgcgatactcctgtcaaatgtgataaaggcgttctatgagcccccacatctcctaaggagggactcacagttctgggcttccatgttcctggtgtttggtgcggtgtacttcctgtcgctccccgtcagttcctaccttttctccatagcggggtgcaggctgatcagaaggatccggctgatgacgtttgagaaggtggtgaatatggaggtcgaatggtttgatcacccagaaaactcgagcggagcgatcggtgcaaggctgtcagctgatgcggccaaagttagaggacttgtgggagacgcgctccaattggttgtgcagaactcttcgacactagttgctggtttggtaattgcattcgtatcaaactgggagctatctctaatcatcttagctttgataccactcattggcctaaatggatggatccagatgaagtttattcagggcttcagcgcagactcaaagatgatgtatgaggaggcaagccaggtggctaatgatgcagtaagcagcataagaacagtggcctcattctcagctgaagagaaggtcatggatttgtacaagaagaaatgtgaaggtcccctaagaacaggaatcaggacagggattataagtggcatcggttttggagtttcctttttcttgctgtttggggtctatgcagctagcttctatgccggtgctcggcttgtcgaggacaggaagacaacctttcctaaagttttcagggtttttcttgctcttgcaatggcggcaattggagtgtcgcaatcaagtacccttacatcggattcttccaaagcaaaatcagcggcgtcctctatatttgcaatcgtagaccgaaaatcaaggatagacccaagtgaggatgcaggggtgactgctgagacactacgaggaaatatcgaattccagcacgttagcttcaggtatcctaccaggccagatgtccagatcttccgggacctttgcctgacaattcatgctggaaagactgttgcgcttgttggggagagtgggagtggcaaatcaacggcaatttcattgctccagaggttctatgacccagatgtaggccacatactactagatggcgtggacatacgcaagttccagcttcggtggttaaggcagcaaatgggcctggtcagtcaagaaccggccttgtttaacgacacgataagggcaaacattgcctatggaaaagatggacaggcaacagaatctgagatcgtatctgccgcacaactggcaaacgctcacaagttcatcagctcggcgctccagggatatgacacaatggttggagagcgtggagctcagctgtcaggagggcagaagcagcgcgtggccatcgcccgtgcgatcgtgaaggaccctcggatcctgcttctggacgaagcgaccagcgcactggatgccgagtccgagcggatcgtccaggacgcgctggacagggtgatggtgaaccggacaacagtggtcgtcgcccaccgtctgtcgacgatacagaatgcggatctgatcgccgtcgtcaggaacggggttatcatcgagaagggaaagcacgacgccttggtcaacgtcaaggatggcgcgtacgcgtccctcgtcgcccttcactcggcagcctcttcatagctgcaggtggtagcaagtcaggtgctagtatctgttcctctatttgatgacacacataattgcttattatacctaagcggggaaatggtacaaatagcaagggccaaatgtaaatgcaaggagctggtccttaagata

SEQ ID NO: 114708 - DNA, 339 bp, Zea Mays
atgcctcggtttcgtcgcgcaagggagcacgaaatgaaatggtggtggggctttggttgcgtagaaggggcaccagagcgggcttcggcgccgaacaacaacaaatggcaacgaacagggacgaactccggtgcaaacgattccggtgagatgagctcgacgctgtcgacggcggcgagcaacaagcgacagtggaggatggtcagacaattgcatggcgtcgatcttcagcacgacgaggctgagcagtggcgtgggcgaactccggcgagcatggacgatgtcgacttcgacgttgtgtggcaagcggcgtacgacactggcgagcggcaacggtag

SEQ ID NO: 114709 - DNA, 854 bp, Zea Mays
cgccacggtaccacccgccgctaacctctatcgcgttcaccatcagggcaccaccgcctccattacccccgccccctgctgccacgtccaccaccacggcaccaccgccgcccccagcgcgcgcggcccaccactaacagccagcttgggtggccgctccttccctcccttgcctcaaaggacttcttcccacgcgatgttaggagcagacatgaggcggcgagagtccagcatcggagatctccgccgccatgtaggcactgcccagcaccttgcggcccgaaaaccgtcgatctaatgccctgccctccttctccgatgccttcgccctcgcctcaggcagggtccctctcccgccttgcctggctctacgtggtcggtcggttgtggcgggatgtgcagacaggacgatcgtgtccggcctcctcgagaagagctccagcaacgtgcaaatctctaatcccctgctcacccctacttgcatttttaattcttctcttgatttggtctgacggtgacacctaattgcagatctagaaggtgctcttgatggaggacaagcttaggaaccttggatgcaaggtgattggaaagaaaactattgaggtggagatggacctgaccaaggccaagagcgagaggtacctatgggggaacaacactgcagctatgaactccgacaagaagcagcagtttacactgggtttggctccagtctcaaaagaaacgtctgtttcagtaagctgatggtcggtcacccaaaggacccattatctatttttattaatgttaatatattaaaaactggttagagtaaacatacatattatgctatcatgtacatatatgcctct

SEQ ID NO: 114710 - DNA, 187 bp, Zea Mays
tttttttctctcttttttgtgattttttttcaaatattttttttatatttttctcttttgcagcagcacataagaagaaaacacaccaagtttcagatttttttgtgcaatgacgcgtcctctgaaatttctacaagtttgccctaaaatcggaataaatgtttggaaaatgagaagtcctatttcc

SEQ ID NO: 114711 - DNA, 3978 bp, Zea Mays
ttgacctggctgctacgcggaggcctggtggacgtagcagcagcaaggccgcgtggatttgtcccatttgttttgtttaatagtaatataatcgtggacagagcagaggcttttgcgtgtgcgtttaccagttgcccatccgggttacatctcacggaatctgaggctgaggcgacggagcgcaagcaagcaagcaagcgaaagggcagggctgcctgccacacaagagacaagggaagaggagaagggtagacgagtagacgactgtgatgaggctagaagaagagcaggcaggagctataagtaccccgcccccttccaccctctccttccacctccctcccttgctgcctcatccattccagagctgcgaagacagacagacagagagaaagagggatcgacggagcaaggcggggccgtgtccggtcacacacgagcgagccctctcggccgcgcgtttgtgaatggtgaacggcgagcggcgggcggacgcggagtgcacgcgggcgtcgctgctggggaggtatgagatcgggcggaccctcggcgagggcaacttcggcaaggtgaagtacgcgcgccacatcgccagcggcggccacttcgccatcaagatcctcgaccgcagcaagatcctctccctccgcatcgacgaccaggttgggcatgccacacacgtgtttcgccgccgcgcgctagccgtttcagattccagtccggtccggtccgccgagcatgctgacggcggcttcttcgtccatttcgctttgcgctggcgctgtttgcagatcaggagggagatcgggacgctcaagctgctcaagcacccgaatgtcgtccgcttgcacgaggtgcgtggcacaccgaacttgcttcaaacctcccctttcgtatcgttccttcatttcttcttggattggatccttctcctcctcgctccttccagctccagctggaccaattccccttgtctgctggactggtaagataggatccgatcccgtatacttccattccatgacgctagaaaatgaacttgctgtgctccgtaagggattattaggctagctgtccagttgtactgtcctgcaagtaacggaccatctggcttttacttggaaccaaaggattagcggtttttgcttgcgcggccgggatgagactctttcgtcacacacacacacaaacacaaaacaaaggatctcttttctctctgctagctctcgtcgcttgcttctcaacgctgttcacgcggaaaacaccggcgggagctttggctgacgtccggtccttcgatccacgccgcacggcatctccgccggagtttttactccggccgctaccggaatatgagcccctgtcctgggcataaagcggtttcgcctcgccacgccacatgcacctgcaagtagagagagaggcctgtcgagactcgagagtctatagttcacgggctcttcgcctctcggggttccaaagccaaagggggaaaaaaaaaggaaggaagaaggctcacgggctcctggaattacgctcaggaaaaaaaatcgcgagaaaacgatacgatttttcgccaggttttttgtgaaattgcttgtagtaataataacaaggaaaaaaaagtcatgtcctttgattctgtgacgaaaaccacatgcattccaagcgagacatctcaggccacagtttcacacagtcgcagtgtgccggatacgaaagcgatcccatccggagcgtcaggtccgtgaccgtctcgtctccacttgtacaaatgaaaccgaccaccggccgggacggttcccgtttcggcacagtagagcaacacggcacacgaagggggcgggcccaccgcgcgcggtacgcatgcctcttgggctacccgtcgagccatgtggccggcttcctggtggccccgccacgtcggcctcacacggtcccggtacatctggccaggcaggtactgctggagtattatgcatgcatcgtcgtgagctgggtgcaccaagtcaccccacaccgcgtgggcctgcccgcgacgcaacacttgtcgcacgggccccgcacacgtgttccgcggggcccccttggctgctcctctatcctcccccccgggccgctggccgcggccaccaactctgtgcgccttggtgtgaccggtggtctctgtgctcccaagctgagcagcagcaatcgccgttccggaggccggagcacagagacgagacccgccgagcagtttgggttttttttttttttgatgatttggtgcacctacctaaagaagcctttggcatcgagtacgcctagtaccaccaccaccaccaaagaagccttgagcatgcagggtaataattgtgacgagggccggggaaagaaaaaggatgcagggaaagattactgttgtacccgtatctcattcaggccctagttgctgaaaataacagtaaataggaatcgtgtttgtttgcaactggaagcaaaaaaaaaaaaaaaaaaagaggtgtgggtgactgatattgagaccaacctttttctctgcaggttgctgccagtaaaacgaagatctacatggtgcttgagtttgtcaacggcggcgagctcttcgacaagatcgctatcaaggggaaactgtccgaacacgagggcaggaggctcttccagcagctaatcgacggcgtcagctattgccatgacagaggtgtctaccaccgagacctcaagccagagaatgtccttgttgatcggaagggcaccatcaagatctctgacttcggcctcagcgctctacctcaacatctcgggagtgacggacttctgcacacaacatgtggcagccccaactacatagctcctgaggttctgcaaaacagaggctatgacggctccttgtcagatctctggtcgtgtggggtgatcctctacgtgatgcttgttggctgccttcccttcgacgacaggaacctcgtcgttctttatcagaagattttcaagggagactgtcagatccccaagtggctttcgcctgccgcgcaggaccttctcaagaggatcctccaaccgaatccgatgaagaggatcaacgtcgcggggatcagggagcacgagtggttcaagaaggactacgtgcctgctgttccgcacgatgatgacgaagacgtccttcctagtccagctccctcgataaagccaatcgatgagccggcgcaagagaagtgttctcctatcaacgcttttcagttgatcgggatggcctcttcccttgacctttctggtttcttcgaggaagaggatgcagcgcaaagaaagattcggttcacttcgacgcacccacccaaggatctatttgacaagatcgagagcgttgtcatggagatgggattcaaagtccataggggggcaggcaagctcaaggtcttgaagaatagcaagtgttccaggaacccgtcatcattgttggtgtgcaccgaggtgtttgagctcggtccatcattatatgtcgtagagcttaggaaatcccacggagactctacgttgtatagacagctgtgcgaaaggctctccgatgagctaggtgcctgcaagacagaccagatcgcgaggactgaatcatcgagtgacgacctctcgagcgtcgatggcgaagcgttccctctatctgggttctgatcatattgctttccctgtgttgttttgggaacaggggatgaggaacatgctcgttcctgatgcaattctagattaggatcatgaatatagtgtacaaagccagcggcggcggcggtgcaaattagccaccgggttgaatataaataatatatatatatgatatgttgcatcttctaatcctcggattctcgttctgatccataactaactgctccatccgtcctaaaatagtatttattttagagtttttatatctatattcaactacatgatgataatagacacatatatatagaacacatacatcaa

SEQ ID NO: 114712 - DNA, 2338 bp, Zea Mays
agcaatgaacatagagctagctaagaggatcaaactgaggggagcgttcattgacctggctgctacgcggaggcctggtggacgtagcagcagcaaggccgcgtggatttgtcccatttgttttgtttaatagtaatataatcgtggacagagcagaggcttttgcgtgtgcgtttaccagttgcccatccgggttacatctcacggaatctgaggctgaggcgacggagcgcaagcaagcaagcaagcgaaagggcagggctgcctgccacacaagagacaagggaagaggagaagggtagacgagtagacgactgtgatgaggctagaagaagagcaggcaggagctataagtaccccgcccccttccaccctctccttccacctccctcccttgctgcctcatccattccagagctgcgaagacagacagacagagagaaagagggatcgacggagcaaggcggggccgtgtccggtcacacacgagcgagccctctcggccgcgcgtttgtgaatggtgaacggcgagcggcgggcggacgcggagtgcacgcgggcgtcgctgctggggaggtatgagatcgggcggaccctcggcgagggcaacttcggcaaggtgaagtacgcgcgccacatcgccagcggcggccacttcgccatcaagatcctcgaccgcagcaagatcctctccctccgcatcgacgaccaggttgggcatgccacacacgtgtttcgccgccgcgcgctagccgtttcagattccagtccggtccggtccgccgagcatgctgacggcggcttcttcgtccatttcgctttgcgctggcgctgtttgcagatcaggagggagatcgggacgctcaagctgctcaagcacccgaatgtcgtccgcttgcacgaggttgctgccagtaaaacgaagatctacatggtgcttgagtttgtcaacggcggcgagctcttcgacaagatcgctatcaaggggaaactgtccgaacacgagggcaggaggctcttccagcagctaatcgacggcgtcagctattgccatgacagaggtgtctaccaccgagacctcaagccagagaatgtccttgttgatcggaagggcaccatcaagatctctgacttcggcctcagcgctctacctcaacatctcgggagtgacggacttctgcacacaacatgtggcagccccaactacatagctcctgaggttctgcaaaacagaggctatgacggctccttgtcagatctctggtcgtgtggggtgatcctctacgtgatgcttgttggctgccttcccttcgacgacaggaacctcgtcgttctttatcagaagattttcaagggagactgtcagatccccaagtggctttcgcctgccgcgcaggaccttctcaagaggatcctccaaccgaatccgatgaagaggatcaacgtcgcggggatcagggagcacgagtggttcaagaaggactacgtgcctgctgttccgcacgatgatgacgaagacgtccttcctagtccagctccctcgataaagccaatcgatgagccggcgcaagagaagtgttctcctatcaacgcttttcagttgatcgggatggcctcttcccttgacctttctggtttcttcgaggaagaggatgcagcgcaaagaaagattcggttcacttcgacgcacccacccaaggatctatttgacaagatcgagagcgttgtcatggagatgggattcaaagtccataggggggcaggcaagctcaaggtcttgaagaatagcaagtgttccaggaacccgtcatcattgttggtgtgcaccgaggtgtttgagctcggtccatcattatatgtcgtagagcttaggaaatcccacggagactctacgttgtatagacagctgtgcgaaaggctctccgatgagctaggtgcctgcaagacagaccagatcgcgaggactgaatcatcgagtgacgacctctcgagcgtcgatggcgaagcgttccctctatctgggttctgatcatattgctttccctgtgttgttttgggaacaggggatgaggaacatgctcgttcctgatgcaattctagattaggatcatgaatatagtgtacaaagccagcggcggcggcggtgcaaattagccaccgggttgaatataaataatatatatatatgatatgttgcatcttctaatcctcggattctcgttctgatccataactaactgctccatccgtcctaaaatagtatttattttagagtttttatatctatattcaactacatgatgataatagacacatatatatagaacacatacatcaa

SEQ ID NO: 114713 - DNA, 2209 bp, Zea Mays
agcaatgaacatagagctagctaagaggatcaaactgaggggagcgttcattgacctggctgctacgcggaggcctggtggacgtagcagcagcaaggccgcgtggatttgtcccatttgttttgtttaatagtaatataatcgtggacagagcagaggcttttgcgtgtgcgtttaccagttgcccatccgggttacatctcacggaatctgaggctgaggcgacggagcgcaagcaagcaagcaagcgaaagggcagggctgcctgccacacaagagacaagggaagaggagaagggtagacgagtagacgactgtgatgaggctagaagaagagcaggcaggagctataagtaccccgcccccttccaccctctccttccacctccctcccttgctgcctcatccattccagagctgcgaagacagacagacagagagaaagagggatcgacggagcaaggcggggccgtgtccggtcacacacgagcgagccctctcggccgcgcgtttgtgaatggtgaacggcgagcggcgggcggacgcggagtgcacgcgggcgtcgctgctggggaggtatgagatcgggcggaccctcggcgagggcaacttcggcaaggtgaagtacgcgcgccacatcgccagcggcggccacttcgccatcaagatcctcgaccgcagcaagatcctctccctccgcatcgacgaccagatcaggagggagatcgggacgctcaagctgctcaagcacccgaatgtcgtccgcttgcacgaggttgctgccagtaaaacgaagatctacatggtgcttgagtttgtcaacggcggcgagctcttcgacaagatcgctatcaaggggaaactgtccgaacacgagggcaggaggctcttccagcagctaatcgacggcgtcagctattgccatgacagaggtgtctaccaccgagacctcaagccagagaatgtccttgttgatcggaagggcaccatcaagatctctgacttcggcctcagcgctctacctcaacatctcgggagtgacggacttctgcacacaacatgtggcagccccaactacatagctcctgaggttctgcaaaacagaggctatgacggctccttgtcagatctctggtcgtgtggggtgatcctctacgtgatgcttgttggctgccttcccttcgacgacaggaacctcgtcgttctttatcagaagattttcaagggagactgtcagatccccaagtggctttcgcctgccgcgcaggaccttctcaagaggatcctccaaccgaatccgatgaagaggatcaacgtcgcggggatcagggagcacgagtggttcaagaaggactacgtgcctgctgttccgcacgatgatgacgaagacgtccttcctagtccagctccctcgataaagccaatcgatgagccggcgcaagagaagtgttctcctatcaacgcttttcagttgatcgggatggcctcttcccttgacctttctggtttcttcgaggaagaggatgcagcgcaaagaaagattcggttcacttcgacgcacccacccaaggatctatttgacaagatcgagagcgttgtcatggagatgggattcaaagtccataggggggcaggcaagctcaaggtcttgaagaatagcaagtgttccaggaacccgtcatcattgttggtgtgcaccgaggtgtttgagctcggtccatcattatatgtcgtagagcttaggaaatcccacggagactctacgttgtatagacagctgtgcgaaaggctctccgatgagctaggtgcctgcaagacagaccagatcgcgaggactgaatcatcgagtgacgacctctcgagcgtcgatggcgaagcgttccctctatctgggttctgatcatattgctttccctgtgttgttttgggaacaggggatgaggaacatgctcgttcctgatgcaattctagattaggatcatgaatatagtgtacaaagccagcggcggcggcggtgcaaattagccaccgggttgaatataaataatatatatatatgatatgttgcatcttctaatcctcggattctcgttctgatccataactaactgctccatccgtcctaaaatagtatttattttagagtttttatatctatattcaactacatgatgataatagacacatatatatagaacacatacatcaa

SEQ ID NO: 114714 - DNA, 2310 bp, Zea Mays
agcaatgaacatagagctagctaagaggatcaaactgaggggagcgttcattgacctggctgctacgcggaggcctggtggacgtagcagcagcaaggccgcgtggatttgtcccatttgttttgtttaatagtaatataatcgtggacagagcagaggcttttgcgtgtgcgtttaccagttgcccatccgggttacatctcacggaatctgaggctgaggcgacggagcgcaagcaagcaagcaagcgaaagggcagggctgcctgccacacaagagacaagggaagaggagaagggtagacgagtagacgactgtgatgaggctagaagaagagcaggcaggagctataagtaccccgcccccttccaccctctccttccacctccctcccttgctgcctcatccattccagagctgcgaagacagacagacagagagaaagagggatcgacggagcaaggcggggccgtgtccggtcacacacgagcgagccctctcggccgcgcgtttgtgaatggtgaacggcgagcggcgggcggacgcggagtgcacgcgggcgtcgctgctggggaggtatgagatcgggcggaccctcggcgagggcaacttcggcaaggtgaagtacgcgcgccacatcgccagcggcggccacttcgccatcaagatcctcgaccgcagcaagatcctctccctccgcatcgacgaccagatcaggagggagatcgggacgctcaagctgctcaagcacccgaatgtcgtccgcttgcacgaggttgctgccagtaaaacgaagatctacatggtgcttgagtttgtcaacggcggcgagctcttcgacaagatcgctatcaaggggaaactgtccgaacacgagggcaggaggctcttccagcagctaatcgacggcgtcagctattgccatgacagaggtgtctaccaccgagacctcaagccagagaatgtccttgttgatcggaagggcaccatcaagatctctgacttcggcctcagcgctctacctcaacatctcgggagtgacggacttctgcacacaacatgtggcagccccaactacatagctcctgaggttctgcaaaacagaggctatgacggctccttgtcagatctctggtcgtgtggggtgatcctctacgtgatgcttgttggctgccttcccttcgacgacaggaacctcgtcgttctttatcagaagattttcaagggagactgtcagatccccaagtggctttcgcctgccgcgcaggaccttctcaagaggatcctccaaccgaatccgatgaagaggatcaacgtcgcggggatcagggagcacgagtggttcaagaaggactacgtgcctgctgttccgcacgatgatgacgaagacgtccttcctagtccagctccctcgataaagccaatcgatgagccggcgcaagagaagtgttctcctatcaacgcttttcagttgatcgggatggcctcttcccttgacctttctggtttcttcgaggaagaggtttgtgttttgtttgtacagttcattgaatgttcataaaaagcgagacatgcatgaaaagtcacctcacttctattctatggttcctggatccattgcaggatgcagcgcaaagaaagattcggttcacttcgacgcacccacccaaggatctatttgacaagatcgagagcgttgtcatggagatgggattcaaagtccataggggggcaggcaagctcaaggtcttgaagaatagcaagtgttccaggaacccgtcatcattgttggtgtgcaccgaggtgtttgagctcggtccatcattatatgtcgtagagcttaggaaatcccacggagactctacgttgtatagacagctgtgcgaaaggctctccgatgagctaggtgcctgcaagacagaccagatcgcgaggactgaatcatcgagtgacgacctctcgagcgtcgatggcgaagcgttccctctatctgggttctgatcatattgctttccctgtgttgttttgggaacaggggatgaggaacatgctcgttcctgatgcaattctagattaggatcatgaatatagtgtacaaagccagcggcggcggcggtgcaaattagccaccgggttgaatataaataatatatatatatgatatgttgcatcttctaatcctcggattctcgttctgatccataactaactgctccatccgtcctaaaatagtatttattttagagtttttatatctatattcaactacatgatgataatagacacatatatatagaacacatacatcaa

SEQ ID NO: 114715 - DNA, 1616 bp, Zea Mays
aactctgtgcgccttggtgtgaccggtggtctctgtgctcccaagctgagcagcagcaatcgccgttccggaggccggagcacagagacgagacccgccgagcagtttgggttttttttttttttgatgatttggtgcacctacctaaagaagcctttggcatcgagtacgcctagtaccaccaccaccaccaaagaagccttgagcatgcagggttgctgccagtaaaacgaagatctacatggtgcttgagtttgtcaacggcggcgagctcttcgacaagatcgctatcaaggggaaactgtccgaacacgagggcaggaggctcttccagcagctaatcgacggcgtcagctattgccatgacagaggtgtctaccaccgagacctcaagccagagaatgtccttgttgatcggaagggcaccatcaagatctctgacttcggcctcagcgctctacctcaacatctcgggagtgacggacttctgcacacaacatgtggcagccccaactacatagctcctgaggttctgcaaaacagaggctatgacggctccttgtcagatctctggtcgtgtggggtgatcctctacgtgatgcttgttggctgccttcccttcgacgacaggaacctcgtcgttctttatcagaagattttcaagggagactgtcagatccccaagtggctttcgcctgccgcgcaggaccttctcaagaggatcctccaaccgaatccgatgaagaggatcaacgtcgcggggatcagggagcacgagtggttcaagaaggactacgtgcctgctgttccgcacgatgatgacgaagacgtccttcctagtccagctccctcgataaagccaatcgatgagccggcgcaagagaagtgttctcctatcaacgcttttcagttgatcgggatggcctcttcccttgacctttctggtttcttcgaggaagaggatgcagcgcaaagaaagattcggttcacttcgacgcacccacccaaggatctatttgacaagatcgagagcgttgtcatggagatgggattcaaagtccataggggggcaggcaagctcaaggtcttgaagaatagcaagtgttccaggaacccgtcatcattgttggtgtgcaccgaggtgtttgagctcggtccatcattatatgtcgtagagcttaggaaatcccacggagactctacgttgtatagacagctgtgcgaaaggctctccgatgagctaggtgcctgcaagacagaccagatcgcgaggactgaatcatcgagtgacgacctctcgagcgtcgatggcgaagcgttccctctatctgggttctgatcatattgctttccctgtgttgttttgggaacaggggatgaggaacatgctcgttcctgatgcaattctagattaggatcatgaatatagtgtacaaagccagcggcggcggcggtgcaaattagccaccgggttgaatataaataatatatatatatgatatgttgcatcttctaatcctcggattctcgttctgatccataactaactgctccatccgtcctaaaatagtatttattttagagtttttatatctatattcaactacatgatgata

SEQ ID NO: 114716 - DNA, 1595 bp, Zea Mays
gatcgggcggaccctcggcgagggcaacttcggcaaggtgaagtacgcgcgccacatcgccagcggcggccacttcgccatcaagatcctcgaccgcagcaagatcctctccctccgcatcgacgaccagatcaggagggagatcgggacgctcaagctgctcaagcacccgaatgtcgtccgcttgcacgaggttgctgccagtaaaacgaagatctacatggtgcttgagtttgtcaacggcggcgagctcttcgacaagatcgctatcaaggggaaactgtccgaacacgagggcaggaggctcttccagcagctaatcgacggcgtcagctattgccatgacagaggtgtctaccaccgagacctcaagccagagaatgtccttgttgatcggaagggcaccatcaagatctctgacttcggcctcagcgctctacctcaacatctcgggagtgacggacttctgcacacaacatgtggcagccccaactacatagctcctgaggttctgcaaaacagaggctatgacggctccttgtcagatctctggtcgtgtggggtgatcctctacgtgatgcttgttggctgccttcccttcgacgacaggaacctcgtcgttctttatcagaagattttcaagggagactgtcagatccccaagtggctttcgcctgccgcgcaggaccttctcaagaggatcctccaaccgaatccgatgaagaggatcaacgtcgcggggatcagggagcacgagtggttcaagaaggactacgtgcctgctgttccgcacgatgatgacgaagacgtccttcctagtccagctccctcgataaagccaatcgatgagccggcgcaagagaagtgttctcctatcaacgcttttcagttgatcgggatggcctcttcccttgacctttctggtttcttcgaggaagaggatgcagcgcaaagaaagattcggttcacttcgacgcacccacccaaggatctatttgacaagatcgagagcgttgtcatggagatgggattcaaagtccataggggggcaggcaagctcaaggtcttgaagaatagcaagtgttccaggaacccgtcatcattgttggtgtgcaccgaggtgtttgagctcggtccatcattatatgtcgtagagcttaggaaatcccacggagactctacgttgtatagacagctgtgcgaaaggctctccgatgagctaggtgcctgcaagacagaccagatcgcgaggactgaatcatcgagtgacgacctctcgagcgtcgatggcgaagcgttccctctatctgggttctgatcatattgctttccctgtgttgttttgggaacaggggatgaggaacatgctcgttcctgatgcaattctagattaggatcatgaatatagtgtacaaagccagcggcggcggcggtgcaaattagccaccgggttgaatataaataatatatatatatgatatgttgcatcttctaatcctcggattctcgttctgatccataactaactgctccatccgtcctaaaatagtatttattttagagtttttatatctatattcaactacatgatgata

SEQ ID NO: 114717 - DNA, 1684 bp, Zea Mays
atggcgcaggctgcggctggtggcaaagatcgtgatggtgttggcggcggtcggggaggactacactactggatatcgttctttgataaagtaaactcaaaatccttgaacaaggaaatactgaaagccacatatgagaactgcaagttccgaggagcgctccttgctaaaaacctaggcagttggttgggaaagttcaccattggtaggaatcaggcactaagggctaaggagattgatccaaaatctcttatcgtggaggcatatgagaaaggattgatgattgtggtcataccattcacttcaaagatccttgaaccttgccagtcaagtatcgcatatcgacctccaaatccctggaccatgggaattctaagtctacttgctgaaatttataatcttccaaacctcaagatgaatctgaaatttgatattgaggtcctcaacattcctttttttgatagtttctttattgactttgtatctgccctagctacccatggccatgctaaatgttcttttgggatttcagcccatgtatgccactggtgtggtacctggaaaggtgataaaatatgtagtagttgtaagaaagcaagatactgttctgagaaacatcaggcactgcattggcgtactggtcataaaaatgattgcctccagataataagttcttccgctgcttcaaattcagttttgccaactattggaaaagttcctgctaacacttcttggccagaatttgagataaaaatagactatgaaggtatatttgattccaatagtggtgatgagaataactcgaagttgttggtgatgcaaagacatgggaaacctgatgctatgatgcagtcatggatggatcaatttgaggccgattctgacaacaaatgtgggacatcttttcaagagcgggtctcaagagcaccaaatcaagtgttgaggtattgtcgagaaccaaatgctaaacctctctgagcgttatcttctgggtgtccatcaaatgctgatatcccatcatgtagctactgtaaagatacattatgctatgaatttcaggttggccaaagttcatagaaaagagtattaagtattagtggcattgaggagatcaactataaaaatatatttcataaatgtatgagttgaaaatgatgttcatctattattgtaaatattattattctctataagtttgccaaatttaggatagtttgacgtagagcaactcaaaaacattatatttcaggatgggtctatttattattaacatcttctgtctgatcaccattggaagtagatctggcttggggtatagtagattgaatacagaggtacatggggtgtacaatatataggcaaggatcatcaagtttgacgtcggcaacgtggtcatggtgactggcgggaggaacaccgggcgtgtaggagtcatcaagaacagggagaagcacaagggcagctttgagaccatccacgtgctgcttggagctttttgctatgtctagttttctcctatttgttgtataggaaaacatagaatagaattcaaatttggtggtcgcaaaagtgtggagactttaatttatataaagttaggcttaacattagtgcaaacagttgtattttagtttagatttagagtacacttatgtatgcgttgtttgacaatgcttatgatata

SEQ ID NO: 114718 - DNA, 996 bp, Zea Mays
cagtggccactggatgagaaaactaagatgagttccttgcagacccaacatgcagcgagtgaagacgcatccgtttgatcaaagcagagttcaattctctgctgtctttatattaagtcttgctgccatgatgctgagacttgttacttccgagagcagtctttgtgtttgatatccttcctgttgggtctgcaaaagtccagcctttgggtgatgctagtttcagagagtacagcaattccttcatcgttgtcatgctcacttgagttggatccactactgagggatcttgttgagaagaaactaagcctgaagaggaatgtgactgcaatggctaccgagctcagggatgccaggaacaggcttgcttcacaggaactgttgctggctcaggagatagaagccagaaagttccgcaatgagttggatggtttcagatcacaacttccagtgatgacaacgctgctgcactgctcatatttgttaggaaagctgaatgataggaacaattcgatgagtgagggtgaatttccggtgaacaatttagcagaacagctcaatcatcttgaaaagtgcctcgagagcagggatcccacactaagacaattcaaagattgttactctttgagaaccgagtctgacatcacggatgcctttgccagagttgcatttgataacgatgatggtgtggccaagccgggagaggatataagggcgctatctgctcactgggtaaacagaagcaaggaactggaatcacagttggatcagcatcggaggacagcccaggagctgaagaggaggctaagaaatcagatggccgtgcagcagcccacttgtagtggctcaggcgagaagcgcaatctctgggagagctcagccttcaagctcatagcatccgtgtcaatgttggtcctatttacacttgcaaaccgatgagctctcacggtctcgcttttgcgtacagaaaatataaacgttcatgtttgaatgttt

SEQ ID NO: 114719 - DNA, 1221 bp, Zea Mays
cagtggccactggatgagaaaactaagatgagttccttgcagacccaacatgcagcgagtgaagacgcatccgtttgatcaaagcagagttcaattctctgctgtctttatattaagtcttgctgccatgatgctgagacttgttacttccgagagcagtctttgtgtttgatatccttcctgttgggtctgcaaaagtccagcctttgggtgatgctagtttcagagagtacagcaattccttcatcgttgtcatgctcacttgagttggatccactactgagggatcttgttgagaagaaactaagcctgaagaggaatgtgactgcaatggctaccgagctcagggatgccaggaacaggcttgcttcacaggaactgttgctggctcaggagatagaagccagaaaggttgctgagctaaagacgagaaatttggaggatgaggtgagcaagctgcagaaatgcttaggggacaaagatgagcagttgcgtgcatcgctatgtagcgcagatcagttccgcaatgagttggatggtttcagatcacaacttccagtgatgacaacgctgctgcactgctcatatttgttaggaaagctgaatgataggaacaattcgatgagtgagggtgaatttccggtgaacaatttagcagaacagctcaatcatcttgaaaagtgcctcgagagcagggatcccacactaagacaattcaaagattgttactctttgagaaccgagtctgacatcacggatgcctttgccagagttgcatttgataacgtaaacgaattctgaagatccattctgatgtccgatcgaaggaacagcgagaacattgacgaggatttgatttttcaggatgatggtgtggccaagccgggagaggatataagggcgctatctgctcactgggtaaacagaagcaaggaactggaatcacagttggatcagcatcggaggacagcccaggagctgaagaggagggtaatgagacttgaactctgcatcctagaaccatcctcactctgtcgagtggcacaacagttggagcggcgcaggcggcgctgtcctcttgtcaggccgctaagaaatcagatggccgtgcagcagcccacttgtagtggctcaggcgagaagcgcaatctctgggagagctcagccttcaagctcatagcatccgtgtcaatgttggtcctatttacacttgcaaaccga

SEQ ID NO: 114720 - DNA, 484 bp, Zea Mays
cggagagttcttggcgaagagaccttaggataagttgctaaaacaaacggaggggaggatcgacccgttcagtagaattccgaagaaagactgttggcagcaggtggagacatttctttggcccccttccaaataaatgcgggcagggtagagctcggcagagggttcgagaatagggtagggttttttacggtcgggtcccctaccactagtctggctagccttcttcgggcaggaagcaggccgggcccgacgggcgggcatctcccacaacgcaagctacattgttcgccaccacccgagaagcaaaagattcgagagtcaaggcagaaaagacaagcatagtggtctaatgacaagggccgacgacggaagctcgggacggagccgtatgatgcggaagtctcacgtacggttccctgagaagggagtggctacccactggagcttcgaccaaccaccaccggtcaattccgctttgggg

SEQ ID NO: 114721 - DNA, 558 bp, Zea Mays
atggcgcgcgggcaacacgcgcggacgcgcaggcttccttctacgcgcggcttcctcccccaccaacggcgccgcaatccaagccgacgccacgccctcaccccctccccactggtaagcaaccgccctcggcccctcctcgctagtacgtacagtgggctccttgcgacaccacaccctcaccccctccccgcacccactgtacctcgcgcacagtccttggcgctgctcacctcgcccctgacgcccgacgcccccgacgctgctcaccctgcccccgatgccttcgacaccctcgcatacttagcgttgctcaccctcgccctcgatgcccgatttggatgtgtgcgctaccctaacgcccgaatccccgctcccccgaccccctcggtggcggagaaggttttggcgtcccttggcgacgagaggacgacgatgtcccccgtcctcacccccacgaccagatcccacgagaccaccggtggcggagatgtttttggcgtccctaggtggcgagaaggtgacgaggcatgtccagcaccatgttgctcaccgtga

SEQ ID NO: 114722 - DNA, 694 bp, Zea Mays
accgggcagagcggaggggtgccggtgtccggactccggagagaatggcggccactcttctcccgaccttatcgccgcccgtttcgcgcgccgccgccgctttcctcctccgacgagccccactgaagccctcccattatgtgcacccaccttctactctccgccgcttactcatctcctcctatccagcaatccctgccatgtgccccctctccaccatgtcgtccaccactgccgctcgcgccgtcccggtccgccgtgacctcctcatgctcggcatcgagaccagctgcgacgacactgcggctgctgtggtgagaggtgatggcgagatccttagtcaagtagtatcttcccaagcggatttgctcgcgaggtatggtggtgttgcccctaagatggccgaggaagcacacgcccttgtgattgaccaggttgttcaaaaggctcttgacgatgcaaaattgtcagaaagtgatctttctgcagtcgctgtgaccattggaccaggacttagtctatgccttagagttggtgttcataaagctagacaggtagcaaaagcatttggcttgcctattgttggagttcatcatatggaagcacacgcattagtttccaggtatttaactcatatggccctttgctgttcaattaaccgtgatcttaaattgtattgactttgatttctttt

SEQ ID NO: 114723 - DNA, 1326 bp, Zea Mays
cgcggcgtgctacggttccggccagggggccacgccggggccgggcgagcgccggcagccgagctggacgaggcgccgtgggagggctgctgggcgcagttgcctctcgatcttctgcgtatgattaataccatgggagtgatatagagatggttctaccaatcatggttggaggttacacagacttcttttgttctatgctccatacaaggaattgtggattcatcttccgagggtcgtagactccgatcaatccaaattgatatgtgttttcttggtcaatcatggttggattcatcttccgaggatctagactccactaagactgtcctttgacaagctggagggtgttgaggttgcatggagtcagtcaaggatcaacgactctgtcatggtttgctcatagaatatggagcagctaagcacagagatccaactgctgaggaccttcaggcacaagaacattgtcaagctgtttgcctcttggatcgatgaggacaaggacattgtaaatatcatcatagagtacttcacatcaggcagcttgagacagtacatgttgtttctttcgttcgttccacttctgaatgttcataccaaacatctctctgtgtttctattctcaaccaaattggtgacatcatgcaagctgtggcatcaagtaggagagtcattcaaacctccaaagacatgcacaaccgtttcatggactttctataacttctatgagaagagagagcaagattgataaaaagacttgccaaaatcaaagaggagcagggacagattgatgaggctgttggtttgatgtaagaagttgtaagtttgcaccatactgaatttggaccagcgtaccggatttgtcaaggctacgctttgattgaatacgagaagtttgaagaagttcaggctgcaataaaagatctggatggagctgacctttataaacaaataatgagtgttgattgggcatttagcagtggccctgctaaacgcaaacatactcggaaatggtcaccaccaagagctcgttcaaggaccccacctaggagaaggcactgatgttttcccagcacctcgtgaactacttgctatgtgtgatgtacaataagaagtctaaggattcgaaatattaccttggtgtatgtggatcacctgatttcgatggtggttattaaattgcctgatgtttccttatttgggactccaaatattagctttgaactctggtttaagttgatgagacatggaggtgcacttagacgcttaccattatgtttggcatgttagttggagacgattgtaagtcagtccacgtcacgtccg

SEQ ID NO: 114724 - DNA, 1814 bp, Zea Mays
accattccggggcctcccatcattttgcccgcaatccagagtttagctcctcctcagcagcttaattgaacggcctctagtaatacatacaatggagttcaccgccaggaccgccattgctctgcttctctcgctcgccgtctcctccagcttcctctgtggcagcgtccagggcggccgccaccaccaccacgggaagcacgcaaagcatagctccgcgcacccgccgtccgcccacgctccgggcccggcgagcgggaggcggcacgcgcggcccgtctctcccccggccccgccgccgtcgtctgggtcgggcggctacccgacgcccggcggcgcggcgccggagccagcaccagcccccgcggctgcagcggcgggcggcaccgtgtacgacgtcgtcaaggacttcggcgccgtcggggacggcgtgacggacgacaccggcgccatcaagaccgcgtgggacacggcgtgccaggacgacggggccagcgtcgtgctggccgccgccgggtactcgttcctcgtgcacaccaccgtcttcaccggcccgtgccaggggagcgtcacgattcagctcgacgggacgatcgtggcgccgagcgaccccgacatgtggccggccaacagcaagcgcaactggctgctgttctatcaggcccacggcatgtcgctgcgaggtgccggcctcatcgacggcaagggccagaagtggtgggatctcccctgcaagtctcacaagggccagggaggatcaagcggccacggtgcatcctgtgacagcccagtggcgctgaggtttttcatgaccaacaacgtgacggtgcaagggctcaaggtgcagaacagccccgagttccacatccggttcgacagctgccgcggcgtggtggccagcggcctctccatcagctccccggcgctgagccccaacacggacggcatccacgtcgagaacacccaggacgtcctcatcaccaacaccgccgtctccaacggcgacgactgcgtctccatcggcgcaggcaccctcaacatgcacgtcgagaacgtcacctgcgggcccggcggccacggcatcagcattgggagcctgggcaagcagggctcgcgggcgtgcgtggccaacgtcacggtgcgcaacgccgtgatccgccactccgacaacggcgtccggatcaagacgtggcagggcggctccggcgccgtctcctccgtgtccttccagaacgtgcgcatggacgcggtgcggaaccccatcatcatcgaccagtactactgcctctccaagagctgcgagaacgccacctcggccgtcttcgtctccggcgtctcctacgccggcatccggggcacctacgacccgcgcaccccgcccatccacttcgggtgcagcgacgccgtgccgtgcaccaacatcacgctctccgacgtcgagctgctccccgcgtccggcgagaccatcgacgaccccttctgctggaacgtgtacggcagcaccgccacgcctacggtgccgccggtgccgtgcctcatagaaggcgtgcccaggaacctcgacgataacagcagcctcaaatgctactagcagcctcaaatgctaccttcctgctacttgttcattatattagaagaaggaagaaggcaaaccaacagagaaaagtaatcaagattagtgcagataaaacggagtttaacgcgtgattacttatgtatatatagaaaaagatgatagtactagtaacaagtgatttgtgtgacaattatacatatagtattaccagaatatatacatggttttcaactttaat

SEQ ID NO: 114725 - DNA, 441 bp, Zea Mays
atgcctcctggctcgccgtcgtcgcccacagaccccacctcttccaaggtggttcctccgcctagttactgtagtcatggctcccctgccatcattctctccttcctctattgtctccttcctccagacagagaggcggcactggtacaggtgctaccgggcgaggtggagcctaatcgcatcccatggaggaccaccctccaatggatccaggacgtgaggcaccaaatcaatggagagaggtggcacagccgcgcaggtggtaccagcgaggtggagcccggtcgcatcccatggaggacaaccttccaattgatccagggcgtgaggcaccaattcagtggagagaaaaacaagaatcgtgactgcaatggcaaatggaaggtgaaggcccttttgattgacaacttaggaaaagatggaatggaactcaaattttga

SEQ ID NO: 114726 - DNA, 1647 bp, Zea Mays
agctctaataaattgtaaagaagcaaatcacgccgattctgttgccgcatctgaaatggaaactgtcaactggccactataatctctcagatcgtcaatggcgcacgcgaaagccggagcgtctctgccggtgcccaacgtgcaggcactagctcagacttggcatggatcaggcgagccggtgcctttccggtacgtcaggacagaagagatcgtcgccggcgaagtcgtcgccggctgcgccatcccggtcgtggatctcagcaggttgcttgacccgcggtcgtccgaagaggagctcgcaaacctcggctctgcctgtcagcactggggtttctttcagcttatcaaccatggggtgccggacgaggtgatccaggacacgaagaaagacatggtggagttcttcaagctccctgtggaagccaagaaggtgcacgcgcaggtaccgggcggcatcgagggctacggccaggccttcgtcttctccgagacccagaagctggattgggcggacatgatctacctcatgattagccccaaggagtcgcgggacctgaggttctggcccacccggcctccctccttcagggactctatcgaaaggtactcggccgagacggcgaaggtgacggcgtgcctgctgcggttcatggccaaggacttgggcgtggagccggagcgcctcctggaggagttccggggattgccgcagagcatgcggacgacctactacccgccgtgcaggctggccgccgatgtgcttggcctgtcgccgcacaccgacgccaccggcctgacgctgctgctccacgtcaacgacgtgcagggcctgcagatcaggagggacggcaagtggctcgccgttgaccctctggacggtgctttagtcgtcagcatcggcgacatactggagattctaagcaatgggaggtacagaagcattgagcacagagccattgtacacccggacaaagaacgcatctcggcggcgatgttccatcagacatgccccaacacgacggtcggccctctgcaggagctcgtggaaagagacagtggcggggcacggtacagatccatggactacatggatttcatgaagggcttcttcgcggccaagctcgatgggcgaaggagccacatggacgctttgaggatatactagtccaaatgctggatgaatcatgttcctgtcttcataatgaattggacaactagtagtaaaatatctaaggctatccccaatagttcctctatctttatcctctatcacatcccgtattttaggtagtgtttggttgaggagccgagtagaacggaaccgttccatccccgattctaggaacggagccgctctgttctgtgtttggtaatctggaacggagcggttctgttttttgtttggttgcagagtgaatggaacggagcgtgactgtgagagcgggattggaacggaacggctccgtcccattgattttttggagcggaatggttccggatctgaggagaatattctctaattagagtcattccgttctagttactttgtaaccaaacaacaacaaaactgggacagaacggttccgttctacttagctcttcaaccaaacactaccttaatcttcactctacaaacactgcaaa

SEQ ID NO: 114727 - DNA, 135 bp, Zea Mays
taataataataacaataaaagtatattaatgatgaaaatgaggattaacctaattggaaacctgagaattcaaaacggggtcttgaaatcagtttgaacatttgaaaaattggaaaacaaaaagaataaaaaaaa

SEQ ID NO: 114728 - DNA, 113 bp, Zea Mays
gttacaaccaggtagcagtgtacttccaagtttgttctttgtatatcaccaccttggatgcttgctacctctgttttacagaatttaaaggagtcctagcggacattgtcgca

SEQ ID NO: 114729 - DNA, 198 bp, Zea Mays
tgagctaacatacataatattattttttaataagatacatcatatgtctatgacatatgcatattgtcatgcaatattgtcagttatgttgagagggttatgatgatttactcttatgacgattcatatattgtcatagaaaattgtcacaaatatgatgctagagtatgttatgattgttttaatgacggaagttaa

SEQ ID NO: 114730 - DNA, 795 bp, Zea Mays
gcggcgtagggcgggcggggtgcgtgggtagatgggcagtgcatcgctcgcccgcctactggctactcctcaccggccccattcctccacccgccactataaatctctctgcttccgaccagccttgcttcgcccgttccagcgacgcactactgcggcgaaatcccgctcccgcgttccccatcctccggccgcctcgcttcggcctccctccggaaggtgtcttaaatcatggcgactggccaacttttctcaaaaactacccaagcattattctacaattacaagcaacttcccatccaacggatgcttgattttgacttcctctgtgggagagaaacaccttctgttgctggaataatcaatcctggttctgatggttttcagaaacttttctttggacaagaggaaattgctattccggttcatcccacagttgaagctgcatgcagtgcacacccaacagctgatgtatttatcaactttgcatccttccggagtgctgctgcttcttcaatgtcagctttgaagcagccaacaataagggttgtagccattatcgctgagggtgttcctgaatcagatgccaagcagctaattagttatgcacgtgctaataacaaagtcatcattggacctgcaacagttggaggaattcaagctggtgctttcaagattggtgataccgctggaaccattgataacataattcagtgcaagctttacaggcctggatctgttggttttgtgtctaaatcgcaagagcagcaacaaacatttttcgccctcaagtaa

SEQ ID NO: 114731 - DNA, 285 bp, Zea Mays
tcaagcgattctcctgcctcggccacacgagaagctgggattacaggcgcctgccaccacctttgactaattttatatttttaatagagacggtgtttcaccatgttaaccaggctgatctcaaactcccgacctcaggtgatccacccgccttggcctcccagagtgctgggattacagacattgtcacggattctgcctctgtggagcgtttactggggaagacggacgtccagcggccccaggtggtagagtactgtgtggtctgtggcgacaaagcctccg

SEQ ID NO: 114732 - DNA, 286 bp, Zea Mays
tgattgattggatggtcagtgcgaggggtatgaacatgtcacacactaaccatgcaatacgtctggatctcaagtgtggccttgaggcagctgagaattattttgctaacctcccttatcagccaagaatcatcgaacttacggcgcctttcatatttgttatttctcaggaacaaggaagacaaagcaacagatctctacagccagatggatgaacatagaccaacaataatctgatgcctctttacatgaagtcagaccagcataggaaggttgatagtctctt

SEQ ID NO: 114733 - DNA, 112 bp, Zea Mays
ccctttcaggtggagtgggctaaggatctttttaaatctcaagatccatagaacaagacttttcaatttagacattgttggctgttattgagaaatcaatcaaaatggtacg

SEQ ID NO: 114734 - DNA, 111 bp, Zea Mays
ggttactttattattattattttatttaagaaatatttccaataaaatgcacacacacatcatttatttcaagagaatattattctagatgtgtagtcaaattaaacgtac

SEQ ID NO: 114735 - DNA, 663 bp, Zea Mays
tgtctccatgaattttcattttatttgtaatctgataatctggactcttatctcggtgtgatgtaaaaaatgcccctattggcggaacacgaaacacattcaggccatgttcgttttttccaaatccatggggattgaggggagaataaatccacaactaatcaaagtccagctcactccacccaaataccactcaatccacataatttatgtacaaaacgaacaaggcctcaaggtgaacttgggctgtcccaataatgcgaaacgcccaaaaagcaacattcagggatgcagtttctcccggcgagttactgccctaaatttggcacaaagtctgacaaataaaagtgtcagcttgaagaagtgtacttacatacgatgcagtaaacaagcttcaaaacgcgcatcccagttaaccaggagcatctgattaattcctgtgaaagaactcagttatagtgaacaaagcatcagcccgctattgtgttcttctaagaatcagacaatacttttgaataaccccaactaatgaaatttcatcggccaacttgtagaaattggagcataattaacccctcatagtaatgttgatgaagcagttgatgcctcagatataagccacagaggctgacgtgcttgaaggcatgcagcaatatcaaaggg

SEQ ID NO: 114736 - DNA, 974 bp, Zea Mays
tgccggtgtccacgcgcgccccggtgcggccgccacgaccgcggacacgtgccgggcctcgcacacgcgtcccccacggccccctcgcatcattaaaaccgcggtgcccgcgccacggatccccggcacttcattccggtttccggatagcttacctcccatcgacggtcggtgagccgttggtgagtggcgagacagcgggtgcgctgggcaagaacaggcgacgaagaagatgagcacgctggacacgcggacgctcaaggacgagctgacgagcatggacaggaagtgcctcgtggacctcggccacccgctgctcaaccgcgtcgccgacagcttcatccgcgccgctggggtcggggcggccagggccgtctccagggaggcctacgtcgtcaccgtcgaagggctttcaggagactcgtccgggctagacgccgacggcggcaagcggagccatttctccagcatcagaggtgacgacggccagaggtcgctcgacgcagtggtaaaaacggccggcaaggaggccttccagtgggggttggcagccggagtctactcagggctcacgtacgcgctgcgggaggccaggggatgccacgactggaagaacagcgccatcgcaggcgccatcgctggggcggcggtggcgctcacgggtgacgccggcggccactccgacaagctcgtcaacttcgccatcaccggcgccgcgctctccagcgccgggagcttgctctccggcatattctgattggcccccagggctgcacccgcctgacacgggttcgctgcccggttgagcccttcatccgaggggttttagcatgaaaggttgatttcaggccagcaatgaaatatgtattcctagggccctgccggtctagcactgtgcgcttccagtgtaatcgttgcttcgtgtacgagtttcagacatttcgaaatatcttctccgagttccggtggtttga

SEQ ID NO: 114737 - DNA, 722 bp, Zea Mays
tgccggtgtccacgcgcgccccggtgcggccgccacgaccgcggacacgtgccgggcctcgcacacgcgtcccccacggccccctcgcatcattaaaaccgcggtgcccgcgccacggatccccggcacttcattccggtttccggatagcttacctcccatcgacggtcggtgagccgttggtgagtggcgagacagcgggtgcgctgggcaagaacaggcgacgaagaagatgagcacgctggacacgcggacgctcaaggacgagctgacgagcatggacaggaagtgcctcgtggacctcggccacccgctgctcaaccgcgtcgccgacagcttcatccgcgccgctggggtcggggcggccagggccgtctccagggaggcctacgtcgtcaccgtcgaagggctttcaggagactcgtccgggctagacgccgacggcggcaagcggagccatttctccagcatcagaggtgacgacggccagaggtcgctcgacgcagtggtaaaaacggccggcaaggaggccttccagtggggttagtggtgtgattagtctgttcagatctaacagtacgttggaggtccacaagtagtataaccctgtttctctcgacctcgacatgcagggttggcagccggagtctactcagggctcacgtacgcgctgcgggaggccaggggatgccacgactgggtcagtgccatttcctagcttt

SEQ ID NO: 114738 - DNA, 1210 bp, Zea Mays
cagacgcatgcatgatgcatcgagcccccccagctcgcagtcgcaccggaggaatgctaactggagagccacgcctgccgcggaggaccgggactaactacgagctgccgcggccgttcctggtgcaggtccagggtagagagagagagaggggatggtgtgagggagggaagggagcaaaggcaaagcagccaacgaccagagagacacggaggctcagagagagagagcgaggaagaagaagagaagaagaagatggagcaagaggaagcgtgctcctcctcgctgcggcagtgcaggatttgccacgacgaggaggacgagcggcgctccgccatggagtcgccctgcgcctgctccggctccctcaagtacgctcacaggggatgcgtgcagaggtggtgcgacgagaagggaagcgccgtctgcgagatttgcctccagaactttgagccaggctacaccgttcctcccaagaaaacccaacctgctgatgtcgcggtgaccatcagagacagcgtgggggtgcccaggccgcagcacgagcctgaagaggaggaggagcaggagctggtggacgtggcgttgatcggagccagcgacccggagtacgccgagtgcgcgcgcgccgccggcaggagcgcgtcctggtgccgctcggtggccgtcacgttcacggtcgtcctgctgctgaggcacctggtcaccgtggtcacggtcggggcggccaaccagttcgccttcggcctcctcacggtatacttgctgcgggcgagcgggatcctgcttccgttctacctcgtcatgaggctcatctccgtgatacagcaggggcagaggcagtaccgcctccggctgctccaggagcagaggagacacgcgttgaggtcgggccggctgcacggccaggaacagcaacaacagcatgtcatcctggttcgctgaggaacgagccattcattcaccttgccttggtgtccatacattccattcatccgtcgtacgcgtacaaggttgtaagatgtaccgctccatttttttctttttgttcaggcctttacaagcctaaaaaaagcttatatgtaccaccacttcatttgtaaaccctcaaaatttgttgctgagaagatcgacatatcatgtatagaattgtaaaaagaaacaaacaaaaaaaaaggggaaaagagaactggcgcaatgttcgattacc

SEQ ID NO: 114739 - DNA, 642 bp, Zea Mays
caggtaatttagcacatgccctatctcccttacataatcctgccccctcgccagtcgcgaaaaccctagccgccgccagaccattcgtttctcgcgagccatcgcttcggcatccggaagaaatggccaagtcgaagaaccacacggcgcacaaccagtcgttcaaggcgcacaagaacggcattaagaaacccaagcgccaccgccagacctccaccaaggggatggaccccaagttcctgaggaacctgaggtattctaggaagggcaacaaaaagagtggtgaggctgaagctgaggagtaggaaggaaagcatggctttgtttcctctgtttttagctcagttccacctttaggacctggggttttgctaaagatggaacttaagttggtgttactgtatgatggcaaggaccttttgctgccgaaggttatgttttgaagttcatgctaccttttaaattacggattaccttgtgctatgttcattatttttgcctttggcagcgaaatttggatttctagactgcgtctgtttttagacaagttgcgttgcagggtaacctttttgagatgtggcttaatgttttatattgtggggattgagtgcaattgaagttaggtttgtacagtttcgcact

SEQ ID NO: 114740 - DNA, 627 bp, Zea Mays
caggtaatttagcacatgccctatctcccttacataatcctgccccctcgccagtcgcgaaaaccctagccgccgccagaccattcgtttctcgcgagccatcgcttcggtaattctcaggcaccccgctcgatctcatcctaatcggcatccggaagaaatggccaagtcgaagaaccacacggcgcacaaccagtcgttcaaggcgcacaagaacggcattaagaaacccaagcgccaccgccagacctccaccaaggggatggaccccaagttcctgaggaacctgaggtattctaggaagggcaacaaaaagagtggtgaggctgaagctgaggagtaggaaggaaagcatggctttgtttcctctgtttttagctcagttccacctttaggacctggggttttgctaaagatggaacttaagttggtgttactgtatgatggcaaggaccttttgctgccgaaggttatgttttgaagttcatgctaccttttaaattacggattaccttgtgctatgttcattatttttgcctttggcagcgaaatttggatttctagactgcgtctgtttttagacaagttgcgttgcagggtaacctttttgagatgtggcttaatgtt

SEQ ID NO: 114741 - DNA, 600 bp, Zea Mays
caggtaatttagcacatgccctatctcccttacataatcctgccccctcgccagtcgcgaaaaccctagccgccgccagaccattcgtttctcgcgagccatcgcttcggtaattctcaggcatccggaagaaatggccaagtcgaagaaccacacggcgcacaaccagtcgttcaaggcgcacaagaacggcattaagaaacccaagcgccaccgccagacctccaccaaggggatggaccccaagttcctgaggaacctgaggtattctaggaagggcaacaaaaagagtggtgaggctgaagctgaggagtaggaaggaaagcatggctttgtttcctctgtttttagctcagttccacctttaggacctggggttttgctaaagatggaacttaagttggtgttactgtatgatggcaaggaccttttgctgccgaaggttatgttttgaagttcatgctaccttttaaattacggattaccttgtgctatgttcattatttttgcctttggcagcgaaatttggatttctagactgcgtctgtttttagacaagttgcgttgcagggtaacctttttgagatgtggcttaatgtt

SEQ ID NO: 114742 - DNA, 456 bp, Zea Mays
gccaagagaaaacagagcgtgctggattctttgctagcttgatgtcatcattacatcaaggtgatgtcatccgcggcaagagaataaaaaaaatgcgggctatggtttttctttttccaagggagtgggacggttgtaggaaaatgggtttaggttgagatcgtatgaaagtttttttttcactttttttcctttatcatttttcctttctttctcttgttttcttacgtattttctgttattcaataacgtttcaagttttactttcaaatccaagctttgtagtcaagtgcaacaataaaacaaatatccaacatgaatgcaaatattttatatttattcactccttagttaatttgctcaaataattatttgtatgtatgaaattcaatatgcaaggagtccatataattatataacccaataggaataatttaggtaaaaataataattcac

SEQ ID NO: 114743 - DNA, 366 bp, Zea Mays
gtgttccttgcacaaaagaccgagtatgccattgactcggcgtgtgggagcacctccactcaccacagtcgaccagttactgcccaggtgattaagaaaattattagtttctattttgaatttgaacatataatatcaagattatatgaagtagtagtgataacatctaaagttactcacctttcaccctcgggttgaatcaccggacgtctctcaagaggtatctgtcgcttagggaggcttgtgggacctcgcaagtagacgttcgacgaaccagaggcagtagaatctcctgctgtcgccccctcgacgtcttgttgcatttcctcagtgtcaccatgtgcctcctcggcattgttccgcgcc

SEQ ID NO: 114744 - DNA, 1640 bp, Zea Mays
ttttatttttagctcctagaaccaaatatgttagggactaaactttagtcccctaactaaactttagtccctatactaaagaaaccaaacatggcctaaagtggagtaacgagcagcgttgtggaattgggatctgatcgcaagtcttagtgcatagcaaagattttatttaaatcgtggtttgttagagttttttataaactttctttttttctaacagctagaaacaaagattttatttaaaaagtattgccgaacagtttctttaaatgctaattaaatgaaaatattattttaaattcctcgctaatatgtgtaaaaaatctatataaaatatattttttgcaaatgacttcacaataataaattaataataatttagtgtggaattttaaaacgtccgacgcacagcgcggccgtgcagttaccgaccgtttcaagccgggccccaccacccgcaccccatttcaaaacttgaaacagccgactcgctcggatttgagaggaaaagaaagcgatggagaacatgagcagcgactgcggtggctccaagcgagggatccgattcggcttctcctgggctgacgaggtcgagcgtgaggagctggagcaggaggaggaggagcggcggcggtgggacacggagagggagcagatcaaggcggacccgttcggcggagcgcggccgctgggggtggagcaccggcggtcggaaatggagagggagaaggtcaaggcggacccgttcggcgcggcgcggccgcgggaggtggtgttggccgagaagggcgtcgactggcgcgcgcgcgactgcgagctggatctccgcctccgaaccgccccgcgcccgcgccgcagccagaagcacgcggccgctacggccacgagcaaggggaccgtcgcggcgcacggggcgacgcccgcgcgtggtgctccgcgggaccaggatgccgcgggcgccggacgaacgccgcacccgagggggcagcgcgctgccttctccacgccgttgccgccgacggttagccacagcgcttggggcggaagcaagaggaagtgtgccggggaagggcctgggccgtcgcggcgagtccagacggtggacaaccagaggaaggtcttcggcgagctcaacgtgggagagggctgcggctcctcgatcagaacctccaacaataagagctgtgactccggtggaagtcaagccgagggaatcaaatcaaatatgcccgcggttgcggacggtgagaacagatgttgcagggtgacgaccacgatggtaaccgcaaccgaggttgctcaatctgctgttgcccagaagagaaagggagggaagaggaggaacggaaaaagatccaagaagactccgaaccagcaacaaacaccgggtcatgttcttggttgtaatcaggaattcaggataccacagttctcccagattcaacaacgataatggcttcaccctattttgtaggcggtgatcgaaaatgagtaattccacctattatatttccaaattcttcccttctcaactttttgagcaattggaatctaagctatttttttagaatgtgacattgcacgtctttctaaggtttatatataagtctatctcaaattcaaagggtgagagatgaaaa

SEQ ID NO: 114745 - DNA, 1248 bp, Zea Mays
atggagaacatgagcagcgactgcggtggctccaagcgagggatccgattcggcttctcctgggctgacgaggtcgagcgtgaggagctggagcaggaggaggaggagcggcggcggtgggacacggagagggagcagatcaaggcggacccgttcggcggagcgcggccgctgggggtggagcaccggcggtcggaaatggagagggagaaggtcaaggcggacccgttcggcgcggcgcggccgcgggaggtggtgttggccgagaagggcgtcgactggcgcgcgcgcgactgcgagctggatctccgcctccgaaccgccccgcgcccgcgccgcagccagaagcacgcggccgctacggccacgagcaaggggaccgtcgcggcgcacggggcgacgcccgcgcgtggtgctccgcgggaccaggatgccgcgggcgccggacgaacgccgcacccgagggggcagcgcgctgccttctccacgccgttgccgccgacggttagccacagcgcttggggcggaagcaagaggaagtgtgccggggaagggcctgggccgtcgcggcgagtccagacggtggacaaccagaggaaggtcttcggcgagctcaacgtgggagagggctgcggctcctcgatcagaacctccaacaataagagctgtgactccggtggaagtcaagccgagggaatcaaatcaaatatgcccgcggttgcggacggtgagaacagatgttgcagggtgacgaccacgatggtaaccgcaaccgaggttgctcaatctgctgttgcccagaagagaaagggagggaagaggaggaacggaaaaagatccaagaagactccgaaccagcaacaaacaccggtacgctaagttatcgaaaccgcacttattactaaataatgactactgaactaaactagatgacgtgtcaagtggtgtagtttgaactatttgctgcaacattcatccagcattagtagtaaactacattgtgttgttatttgagctgattaaggtgccagacacattccgtgctgaattcttacaaattaaactgtgtggtgtgctgatgaaactgctttagccttcgtgaaatcttgtgtgaaaagttcagccaatgaacatggcttaggcggctgatgtgctgaaaactttgaagtgaaattgcatttgcctcaacaatttcagatgtattttctaatacatatgtgttcatgtgttgtcatttttaacctgaag

SEQ ID NO: 114746 - DNA, 927 bp, Zea Mays
acgcgacggactgcaagccctcagccctccacgtcccgtcctcgcttccaccttattctctatggccatcctccttcctccaccgccaatcccgtggcgatctctttcggccatccaccgcacccgatccttccacctcctttcccgagaggctcttcccccgcgagatttgcactaccgcgtcggtgccaccgccgccacagcacccgtggcagcagcttgccatggcgctgccggccccctccgccccgccgcaggtcaccgcaagacggcgctgcggagtgcctggggtgcgcacgggttgttttggcgaccccgagatgaagcggcggcggcgggtggcgggctacaaggcgtacgcggtggggggcaaggtgaaggcgtccctccgccgggggcctcaggtggttcaagcgcaaatgctcccgcatcttgaatatctgaccaccgtgcggcggcgcgcggcggcgttctcccactcttcttggaccgcaaggccgctcttttaccgcaacaattatggcatgcactcggcggtgcattgccaatttatgcattgatcaagaattcgcgtgattgaatgtacctctctgttcggaaagatcttgtttgtgcttccaagatttttatttccagaggctgcagatttcaacggttatcaataatccttgtttccagactacatgcttcctagtcttctagaatgcgtaccatttcggtcattgaagttcataattcaaacgcttgccctcattgaatttgtaatcacaatcaacagttgaagacaataatgttgtcttgtttttcccttatatatatatatattcagattcgattgatcgtggatgatcttgcatcagtattattgttagggcattgtacctaagtataagggacagctaatagacaattttgagcccctatcat

SEQ ID NO: 114747 - DNA, 171 bp, Zea Mays
atgtcgcctccgtctctgcagatgggaggtgctgcagaccatgcccccgacggtgtagtgaaactatggttccagggtggaggagccgagcactccgatgtccgttgcttttgtcctactggagtagaagcataccctcttgctggagtagaagcaacatcacttctatag

SEQ ID NO: 114748 - DNA, 1855 bp, Zea Mays
ctcctctcccgacttcccgagtcccgctacgcagccgtcgcctcctactccctttgcgactcctcgcccacatccagcacttgcacatcagcaacctcaaccgcaagggaggtggcgaggctgagcgccagccgccatgtctgtccccggcgtcgcctccccgatcgccgaccgcttctactgccccccaccgcaccgccacctccttgacaagcaacacagacagcatccgccactaactgcctcggcggccgaggagccggcgaagccgacgccggagctcgggcgagacccttccccgtcgccttcgccggctaccaacctcgagagtttcatcgcctccaccgccgtccgcgttcccgcgcggtgctctcctcgaacgccggggtgccgggcaggagcgccgtactacgagctcgcggatctgtgggaggcgttcggggagtggagcgcgtacggcgccggcgtgccgctgctgctcaatggcacggatggcgtcgtgcagtactacgtgccattcctgtccgctatccagctctatgggtcgcggctgccgtcgaagagcaagaccaagaggttgtgattgaactgaccagatgaacgattcatcgtctgaactgttctgactgtgttcactaatgctgcagataccttaatgaaggcagtgatggtgacaatgctccagaaacaagcagtgatgtaagcaatgagagtgacaatgacaatgacaatgaaaggtctattggaagaacaacccaatgtttagtagaaaatatttgcaccgatcaagaaaggttgtccagtgatgactgtgattccagtaaccaggaacctccccctgttttccaatatatggagcatgatgcaccatatggaagacaaccattagcagatatgatttcagtatttgcatgtaagtttcctgatctaaatacatacaagagctgtgatcttctcccgtccagttggatctctgtagcctggtatcccatataccggataccaacaggacctacgctacaagatctagatgcttgctttttaacattccattcattgtcaacaacacctgatggtacgataagcggttgtcctgagacaaataacttacataacagtaaagttgcttctgttcctgggaagatcacactgcctctgatcggcctagcatcttacaaattaaatggttccttgtggacgtcaaatcagcaccatgagcagcagttgactacgtcgcttctgaaagctgctgatgactggctttgccagcggcaagtagatcacccagattaccgcttcttcctcacacactaaattggatgtccatccaaactacctacctactgaacatcacagctcgatgcccactattttattcaatgaacttacattatcactttatatagtccacaatcacaagtaccagtatgctctgtaatatcatttttggggcttagtttatgttagtcccatattggtatctaggcaggattagttggtgactgttttggggttgtactgtaggaaccaattagacatagatcacctatattacgttcagtaccaattgcgggtgtgggtgatctgcaatcgggctaagtaggagattgattggcaatatacatttggcgtacttcaaaggcggttctaggatatattgatgatggcgataaaaatatttttctacttccctctgtgtgtttgatatattgtaacccatgtagtgctgctgctggattgttattatatgtattaccccgagaacgtatcatgtgttaccacaggttaggctgtgtgacatcatgtgatgaaattttggtttgaaatgaaattggcactaaggtggttggacttt

SEQ ID NO: 114749 - DNA, 1790 bp, Zea Mays
ctcctctcccgacttcccgagtcccgctacgcagccgtcgcctcctactccctttgcgactcctcgcccacatccagcacttgcacatcagcaacctcaaccgcaagggaggtggcgaggctgagcgccagccgccatgtctgtccccggcgtcgcctccccgatcgccgaccgcttctactgccccccaccgcaccgccacctccttgacaagcaacacagacagcatccgccactaactgcctcggcggccgaggagccggcgaagccgacgccggagctcgggcgagacccttccccgtcgccttcgccggctaccaacctcgagagtttcatcgcctccaccgccgtccgcgttcccgcgcggtgctctcctcgaacgccggggtgccgggcaggagcgccgtactacgagctcgcggatctgtgggaggcgttcggggagtggagcgcgtacggcgccggcgtgccgctgctgctcaatggcacggatggcgtcgtgcagtactacgtgccattcctgtccgctatccagctctatgggtcgcggctgccgtcgaagagcaagaccaagagctgcagataccttaatgaaggcagtgatggtgacaatgctccagaaacaagcagtgatgtaagcaatgagagtgacaatgacaatgacaatgaaaggtctattggaagaacaacccaatgtttagtagaaaatatttgcaccgatcaagaaaggttgtccagtgatgactgtgattccagtaaccaggaacctccccctgttttccaatatatggagcatgatgcaccatatggaagacaaccattagcagatatgatttcagtatttgcatgtaagtttcctgatctaaatacatacaagagctgtgatcttctcccgtccagttggatctctgtagcctggtatcccatataccggataccaacaggacctacgctacaagatctagatgcttgctttttaacattccattcattgtcaacaacacctgatggtacgataagcggttgtcctgagacaaataacttacataacagtaaagttgcttctgttcctgggaagatcacactgcctctgatcggcctagcatcttacaaattaaatggttccttgtggacgtcaaatcagcaccatgagcagcagttgactacgtcgcttctgaaagctgctgatgactggctttgccagcggcaagtagatcacccagattaccgcttcttcctcacacactaaattggatgtccatccaaactacctacctactgaacatcacagctcgatgcccactattttattcaatgaacttacattatcactttatatagtccacaatcacaagtaccagtatgctctgtaatatcatttttggggcttagtttatgttagtcccatattggtatctaggcaggattagttggtgactgttttggggttgtactgtaggaaccaattagacatagatcacctatattacgttcagtaccaattgcgggtgtgggtgatctgcaatcgggctaagtaggagattgattggcaatatacatttggcgtacttcaaaggcggttctaggatatattgatgatggcgataaaaatatttttctacttccctctgtgtgtttgatatattgtaacccatgtagtgctgctgctggattgttattatatgtattaccccgagaacgtatcatgtgttaccacaggttaggctgtgtgacatcatgtgatgaaattttggtttgaaatgaaattggcactaaggtggttggacttt

SEQ ID NO: 114750 - DNA, 1560 bp, Zea Mays
cacctggtgctgttccatgtgcacccgttctggatccaagtcctgtacttccttttgatctccgttttgggtttcttgatgctgagagtcctgcccatgaagtccagctccgtgcctaggccctcggctctggacctactcttcacgtcggtgtcggcgacgacagtctccagcatgatcgccgtcgagatggaatccttctctaacgcgcagctcctcctcatgaccctccttatgctcctcgggggcgaggtgttcacaagcatgcttggtctccacttcacctgcaccaagctcagaaacaagagagaaacacctcataataatctccatggtaatagcttagagcagagtcgtcgtcgtcaccgtcccatggagatggaagcccaggccgccgccgtccaaatggagcttgcagggttcaacaaggacggccatggcgatttcgcatccatggctaggttgctaatgtttatcgtgctgggctacatcttggtcgtgcacatcgccggctacgcgctcattctaatctaccttagcgtggtcggcagcgcgagagcagtgcttgttaggaagaggatcagcctgagcaccttctccgtcttcacggtcgtctcgtcgttcgcaaactgtggcttcgtgccaaccaacgaggggatggtgtccttcaagtccttcccgggcatgctcctcctggtcatgccacacatcctgctcgggaacacgctcttccccatcttcctcaggctctccattacggcgctcgagagggtcacaaggtggcgagacctctgcgagctgctgagagacagaggacccggcggcgggccagctgcggctgccgccgccgccgctataggctacgaccacctgctcccgggaccgcgcacatggttccttgctctcaccgtggcggtgttcctggcggtgcagctggtgctctactgcgccatggagtggggctccggtggccttggagggctcaacgcgttccagaagctcgttgcagcggtcttcatgtccgtcaactccaggcactccggcgagatggtcgtcgacctcgccaccgtctcctccgccgtcgtcgtgctgtatgtgctcatgatgtatctaccgccttacactacatttttaccggtagcagtggaagacgaccagcagcagcaaaatgaggcacaaccccacgacaatagcacgagcaagagcagcacaagtattagcatctggcacaatctgctcatgtcgccgctctcgtgcctaaccatcttcatcgtcgtcatctgcatcaccgagaggcggcagattgctcgtgacccaatcaacttcagcgtcctcaacatcgtcgtcgaggtcatcagtgcgtatggcaacgtgggattcagcaccgggtacagctgcagcaggcaggtgacgcccggcggcggctgctgcaaggacgcgtgggttagcttgtccggcaagtggagtgtggaagggaagctcacgctcatggccatcatgttctatggcaggctcaagaagttcagcatgcttgggggtcaggcatggaggctgaactga

SEQ ID NO: 114751 - DNA, 1210 bp, Zea Mays
tcatggaatgcccataaaggcccatacttcatagcaaatgcaaatacaacagattcaatacattgtgttcttcaacacacaacttcaacagaaatgcccatacttcatcagccttgcctacttgagcactacaactacaagcaaaacgatggccaacaacaggaatagtgttacattcacacatccgcacacaagacaaatgcagcttcccattccttccctgttgttgccaactttgtccttcacctcattcagatttttctctaagctaacaattcttctcacaatcttaggaacttctattgtcgaagctgctgcaacgatcgaggaagtcattggtagatatccgttataatgaaagaacaccacatattcttcctcgaaccaatacctagtacatgttccctgcatccaatttacaaccaaaaggcaatgaaatctaggcaaaacaataatgaaattaagcaatgcaaattcatcaacttcactaacatgtccataagtcttcctaggacacttgaaatatctctttccctcattagacccaaacttggtagtggcagcaaacaccctcacgtccctacaatctgggcagattatcaacgacaacccagtgtctatatcgatcgtcgcctccagatcgacaccagtgggcagagtgcctacaacaacaacatcaagatgtttggatgcagggcattcctagctgcggttgaacgccgagtgagaccggtagatgatgaggccagcgacatcatctctaaattgacacacatacatcaattggggaacatgaggctgggagggggatgagggcgccactacacaacaaatggaggtggccaggagtgggatgagggtggcactgctgaccatgagcacctagggagagggtcagggggagagtccaccgcactgtcacttggggagagggaagctggctcagcccagagatcgcttggggcccgcgccatccactggccgcatcgcccaaacaccgtcgcgccgtcgatggggaagagccggacctgccgccgtcgagcttgcccagagggggagccgtcgcaccgtgctacgccatcagcccgtaggtagtcccttgccgtcgtttgcttcgctccgccagcaccgtgctcgccgtcgttcgctctactagcgcagtgcttgccctctaattcagttagggttggggtgatggggaaagtgcaag

SEQ ID NO: 114752 - DNA, 1525 bp, Zea Mays
ctgtctggcccggtcaccgtccgatccagatcgcacgccacgcccccgcctcctagctcccctcatcagacatcacccccgcaaggccgcaacggcccagcgccgaccaaacagggtcctcgtcacagaacacgcgccccacccgtctcgtcgcgccgatccagcccggcgctcggccccgcggcgtgtgcaatggccctcgacaccgccgacgccgacgcgccgcgcttgcgcctcgatgccagcgccgccgtgcacccgctcctctccgacgacggctccacggccgcgggggagacagcggagcagctggacgccaggtacgcgccctacgcgcgccgggacgcgtacggaaccatgggccgcggcccgctgcccgcggcgcaggcggtgcggctggcgctggccgccgccgtgctcctcccgctccgcttcgtcgcggggatgctcgtgctcctgctctactacttggtgtgccgcgcgtgcacgctgttcgtggatgcagatggggggcggccgaggttggcggggtggaggaggaaggccgtgctgcgatcggggtgcgcgctctcacgggcgatgctcttcgtcttcgggttctactggatccgcgagacccgcaggaggtcccctaatgctaagggtttaaatcaggaccaatttgaagaatcacaaaggccaggggcaattgtatctaatcatgtctcttatgtggatattctttatcacatgtcagcatcctttccaagttttgttgctaaggagtcagtgtccaggttgccacttattggtctcataagcaattgtcttggatgcatttttgttcaacgagaatcaaagtcttcagaagctaaaggtgtctcaggtgctgtagctgaaaggatccaagaggtttgtcaagataagaataccccaatgatgttgttgtttcccgagggaactactacaaatggggattaccttcttccatttaagactggagcctttcttgcaggtgcaccagtgcagccagtcattttgaaatacccttacaggagatttagtccagcatgggattcaatggatggagcacgtcatgtgttattgctgctctgtcaatttataaatcacatggaggtggtccggttgcctgtatactatccttctcaactagaaaaggaagatccgaagctctacgcaaataatgtcagaaaactaatagcaatggagggcaatttagttctttctaatattgggctggcagagaagcgcgtgtaccatgcagcactgactggaagtagtctacctggcgctagacatgagaaagatgattgaaagacgttgcgtcgctttttctgtaatagacagacgaggagcacttaaaaatgtaactgtgtgcgtgtttttttatatctgtaatgtggcactttctttgtttgaggaggttgttgagtacccttctcatactacattgtacaaaaacgatgtccattatagttagatgaggttcgtgctctcgtacgcggtccttcagatttcgatttcg

SEQ ID NO: 114753 - DNA, 1513 bp, Zea Mays
ctgtctggcccggtcaccgtccgatccagatcgcacgccacgcccccgcctcctagctcccctcatcagacatcacccccgcaaggccgcaacggcccagcgccgaccaaacagggtcctcgtcacagaacacgcgccccacccgtctcgtcgcgccgatccagcccggcgctcggccccgcggcgtgtgcaatggccctcgacaccgccgacgccgacgcgccgcgcttgcgcctcgatgccagcgccgccgtgcacccgctcctctccgacgacggctccacggccgcgggggagacagcggagcagctggacgccaggtacgcgccctacgcgcgccgggacgcgtacggaaccatgggccgcggcccgctgcccgcggcgcaggcggtgcggctggcgctggccgccgccgtgctcctcccgctccgcttcgtcgcggggatgctcgtgctcctgctctactacttggtgtgccgcgcgtgcacgctgttcgtggatgcagatggggggcggccgaggttggcggggtggaggaggaaggccgtgctgcgatcggggtgcgcgctctcacgggcgatgctcttcgtcttcgggttctactggatccgcgagacccgcaggaggtcccctaatgctaaggaccaatttgaagaatcacaaaggccaggggcaattgtatctaatcatgtctcttatgtggatattctttatcacatgtcagcatcctttccaagttttgttgctaaggagtcagtgtccaggttgccacttattggtctcataagcaattgtcttggatgcatttttgttcaacgagaatcaaagtcttcagaagctaaaggtgtctcaggtgctgtagctgaaaggatccaagaggtttgtcaagataagaataccccaatgatgttgttgtttcccgagggaactactacaaatggggattaccttcttccatttaagactggagcctttcttgcaggtgcaccagtgcagccagtcattttgaaatacccttacaggagatttagtccagcatgggattcaatggatggagcacgtcatgtgttattgctgctctgtcaatttataaatcacatggaggtggtccggttgcctgtatactatccttctcaactagaaaaggaagatccgaagctctacgcaaataatgtcagaaaactaatagcaatggagggcaatttagttctttctaatattgggctggcagagaagcgcgtgtaccatgcagcactgactggaagtagtctacctggcgctagacatgagaaagatgattgaaagacgttgcgtcgctttttctgtaatagacagacgaggagcacttaaaaatgtaactgtgtgcgtgtttttttatatctgtaatgtggcactttctttgtttgaggaggttgttgagtacccttctcatactacattgtacaaaaacgatgtccattatagttagatgaggttcgtgctctcgtacgcggtccttcagatttcgatttcg

SEQ ID NO: 114754 - DNA, 1698 bp, Zea Mays
ctgtctggcccggtcaccgtccgatccagatcgcacgccacgcccccgcctcctagctcccctcatcagacatcacccccgcaaggccgcaacggcccagcgccgaccaaacagggtcctcgtcacagaacacgcgccccacccgtctcgtcgcgccgatccagcccggcgctcggccccgcggcgtgtgcaatggccctcgacaccgccgacgccgacgcgccgcgcttgcgcctcgatgccagcgccgccgtgcacccgctcctctccgacgacggctccacggccgcgggggagacagcggagcagctggacgccaggtacgcgccctacgcgcgccgggacgcgtacggaaccatgggccgcggcccgctgcccgcggcgcaggcggtgcggctggcgctggccgccgccgtgctcctcccgctccgcttcgtcgcggggatgctcgtgctcctgctctactacttggtgtgccgcgcgtgcacgctgttcgtggatgcagatggggggcggccgaggttggcggggtggaggaggaaggccgtgctgcgatcggggtgcgcgctctcacgggcgatgctcttcgtcttcgggttctactggatccgcgagacccgcaggaggtcccctaatgctaaggaccaatttgaagaatcacaaaggccaggggcaattgtatctaatcatgtctcttatgtggatattctttatcacatgtcagcatcctttccaagttttgttgctaaggagtcagtgtccaggttgccacttattggtctcataagcaattgtcttggatgcatttttgttcaacgagaatcaaagtcttcagaagctaaaggtgtctcaggtgctgtagctgaaaggatccaagaggtttgtcaagataagaataccccaatgatgttgttgtttcccgagggaactactacaaatggggattaccttcttccatttaagactggagcctttcttgcaggtgcaccagtgcagccagtcattttgaaatacccttacaggagatttagtccagcatgggattcaatggatggagcacgtcatgtgttattgctgctctgtcaatttataaatcacatggaggtggtccggttgcctgtatactatccttctcaactagaaaaggaagatccgaagctctacgcaaataatgtcagaaaactaatagcaatggaggtaggctaaacccaaaactgagtcaaacaaccatgcaaagatcaaacaacctcttcgtaatatatgtatccaccgagggttggagagtatgattggcctcccacctgtaaaggccccaagagctcgagaaggctcgattctaatccctatggatggctctgctgtcggaaaaaatattgccaagtatggggacgaaggggcaatttagttctttctaatattgggctggcagagaagcgcgtgtaccatgcagcactgactggaagtagtctacctggcgctagacatgagaaagatgattgaaagacgttgcgtcgctttttctgtaatagacagacgaggagcacttaaaaatgtaactgtgtgcgtgtttttttatatctgtaatgtggcactttctttgtttgaggaggttgttgagtacccttctcatactacattgtacaaaaacgatgtccattatagttagatgaggttcgtgctctcgtacgcggtccttca

SEQ ID NO: 114755 - DNA, 325 bp, Zea Mays
cctatcgagaatggagacgctctcggcgaagcaggaggacatggtggatgtgatcctgaagccgacttctaaccaatccaactcgtaggcgggtggggagtggatgcaccaactagaagagtgctatctctccgcgcttccttgacaaacttgtgttattaaccgttgtatataatgttattaattaatgtcctttattccctgatgcttctgttgtggctcatgttctcaattttgtatcttatggtaaaagacaagatgttttcttgcagttttcgaaaaaatcttctaaagacaacttaattttgattaacaacacaacaca

SEQ ID NO: 114756 - DNA, 525 bp, Zea Mays
atgccggcccccgtctcctccaccgcgtacaaccggctccgcaatcctcggccccgcgctcccagagtgggcgcagatctctcgaagcacccggtggatgggttctctactgggctggtcgacgacagcaatgtcttcgagtggcaggtcaccatcatcggaccgcctgacaccctatatgatggagggtacttcaatgcaataatgagcttcccacaaaattacccaaacaacccgccatcagtcagatttacctctgaaatgtggcatccaaatgggtactttcaccacttctggtatggttctgtctttaatgtgccagggattattatattgtttttggtttggatttggaatggtttggggtccacaacgatgatgcgtcagagctgttccaaggattggatgatttccattcccccgctgccaattcgactaggctcgccgtctccactctgcccaactggcaccaagcagccaatggaacttgaggaggttcatcgaccgtcgaggcttgatgcctaa

SEQ ID NO: 114757 - DNA, 863 bp, Zea Mays
aaaaacatatccacgctcacattctgctatcgtacaaacaccgtttctatacaggccaaggcgacaagcttcgtccagctctgcatcaaagaaggaaggaagttatggaccgcacctactacaagggcggcatcaaggcgtactggaagcgccggggctactaccgcatcgacgccgccgctgcgcagcgccggccgccgctccccaccgcggagctcggaggtggcgtgggtgtcgcccaggcccagccgccggcgccgacgctggagggtgcctcggggcggcgccgatgccgcgggtggcgcgtgcgccgcggccagctgcggcggcggctgctccgcgcgctgtcgccgcgccggtggctcatgcggctccgcgacgcgtacgtgtccgccatgctgcggctggcgtcctcccccgccgtcgggtacggcgccggccagccctactgcggcacggcggccttcgcgcggccggcgcagctcaaggagtacgaagataaggtgctggtggagatctacaggtccatactcgcgggcggcgggcctggccccatcgccgtcactaccggcagcaacggcgccggtgcgcctgccgccgccacactacggctaccgacggctgctgcttgagcttgagcggcagatgaagcatgtatttattcttcttgcttttactctttatgtcgcgacgttgtaacttcggtgcgcctcacaagcatttcatttcttcttcgtaaactagttaaatgtccatgcgttacaacgggaatatataatacacgataacctatgttcaaatgtgtattatattgtcatgtaaaaaggtttcgtaatcaatttgtgatccaaactatacataaa

SEQ ID NO: 114758 - DNA, 1116 bp, Zea Mays
agtagctccacctattcaaatttattacaactatcaatcattaatgttgtgaagcaaatagcatccaagcagtttacatgtctcgagtcaacgtcgagacagatatgtccatgagttcgtccgcaaaaaatcgtactacaaatcatggcaaaacacagctggcatcaccaacaaatctatgtacagtctaatggcagaacgctccgaaacaatcgaggtgtccatgtgcgaaaatcagaggaagcttccgaggtcctgtagtctgtggctgtgggagccaatggagccctgtcagaaggaagagaatcgggtggaagcaaagacccgcctggctttctcaagatcccggccgctatgcaacctccccatcaccggcactaccgtggatccattgggcgtcgcggcgacggcgtccccggccacgtctatccgcacctcctccgacagcgccccgccctcggctggcacgatagcgcccggcgccacgacgacgacgtcggcgcggcagagcgggcacgtggcgttcccccggaaccaggcgccaatgcactcgatgtggaagcggtggccgcaccgcggcagcgcgcgggccttctccccgggctcgagctccgcgaggcagaccgcgcagtccccgccccccgcatccgcgcccgcttcgatcagcacgaccggtatcgcggcgagcacagcggaatcgaggccgcgatgggggggaggcgctccctctccgtcaccgtcgcggcggtcctcgtcgccaccggcgatggccaggctccggaacagccgccgctggttgccgccgaggcgccgccgccgtgtgctgttgtagaggtgcagcgcgacgagcgccaggagcacgcccgcgaacgcccccgccgcggcgagcaggatcttgccagtcatggcgtagttcgtcgggtcggtcacctgcggtgggctggggacgtgcggcttggagaacggcaacctatactcgggactcccttcgcacgagaccgcctcctcgctcgccttggggccgttgccgttgccgtcgccgtcgctgacgcccatgtctgatggtcgagcgctgcgctcaccgaactgagctgtggtttcgcggatgatttgggt

SEQ ID NO: 114759 - DNA, 275 bp, Zea Mays
tcgaagaggtaggatctggccaagaccccccacgcgtggagctagaacacaaagaaagatgaagttggccgtcacaccttggatcggccatgccactgctacaaccttagaaatccggtcaggagggatcgctggtgcacttcgaacgcgtgagtgccttcgatgtgcgatggaaaccttagggtccccgcgatttcacgctggacttggaagccgccgtcgtacgctagacttggaagccgtcgtcgtgtcgtggcctcgtgggtagccggtga

SEQ ID NO: 114760 - DNA, 87 bp, Zea Mays
gtacaatatgtgaacaggtaccctcagactaaaatcggcattgcagcagaccggaataatacgaagcttgatacagagccgaaggtg

SEQ ID NO: 114761 - DNA, 143 bp, Zea Mays
atggcttgaactcagatgacagatggtcaatctgaaactgcaagtgcaccggagggagttagtggccttagaagaaattcagatgatgtgggatgaaagtatggggttcttgttgatataaactttttattttctgtaataaa

SEQ ID NO: 114762 - DNA, 1077 bp, Zea Mays
ttaaaaaaaaaactgcaaagcttgtttacatgcctcaactcgcgagccacagatacaaaagagataacaacacaggcacggcaaaccgcgttcattattcagtgaagagcgacagtgacggcgggtagtagtagtcctcgaagctccacagcccggctggcgctggcgccggcacctgcgcttcttcggggacggcggcagcggcagcggcagcggtggtggcacttacagctgcattcccgccctccatgtacgggacgccgaggaagttcatgtagttctcgtaggccattagctcctcggacagctccttgacctcgtcggacacctgtgcgcgcgcctctaccttgggcgccgggagaaaaacggccggggcctgtgccgccaccccagatgccgccgtcggcgcggtgacgctggaggaggaggcgtcgttggggaagttgaccttggctttggcgcccctgatgcgcctggcagcgcggtcgtacgcgcgcgcggcggcctcggcggtggggtaggtgccgagccagacgcgcacgcccttcacggggtcgcggatctctgccgcccacttgccccacggccgctgccggatgccgcggtactggttcttgcgcccacgcttcgccttcccgcgcgggcgcggcactgcacgggacgggacagtcggcagcggagctgcgtcagtcacacacacacacacaccactgaccgtttggagtcggaggctcggagctcgccgggagaaaatgaagagactgagcaagacggaaacggagcttagacttagagcttacctctctcagggtcaggggcgtgcgagtcggagtcctcggcgtcggcttcggagtcaggccagaagtcagcggcggacacccggcgccgcgccgggatgtagtcgaagatgattgcaccgccgcacatggattcctccgagtaacttggactattattggagggggaaaaggttcttggtggagtgtttggggaggatacgataggatcgaagtggagtggaaactatgggaagtcgacgcctcctcctcgacgggagtttggtttctgcggacgttg

SEQ ID NO: 114763 - DNA, 480 bp, Zea Mays
atgggagggagcacggtgtgtgatggagagccagggcagcgctgttcggcgaggtcagtcgtggcgatttggagaccagagccgacggcgaggtgggtggaaaggaaggggcgctcgcgagatccgggacggcttggctgggcgactgcatgggcggacaaagagatgggcaccgagcagggggagcagagaagggagcgggcgccgcagaaaaatccagtgacgggagctccgagcagggcgagcaggaaacctgcatgcggtttgggggagcaggggacgcgccatgggaggaggaccgagcttgaagacgcggctgcgcgcagggaaggagtagaggctgagctcagcggccatggcgaggtcggtggcggccggcaccagagcccacgagcaggcaacccgttcctgggagccgagcaggaaggaagcgctgccatggctgggactcggcaagctggagggaggagcgcggcgtga

SEQ ID NO: 114764 - DNA, 1113 bp, Zea Mays
atgaagcggcggggcttgctcttggtgaccatcctcctggccgcctgcaccaccgccacggctgggaagaaaaccgccatccgtcggacgcacgagcagctgcagccccaggcgcgcggctcgtcgtgcgacgtgtacaggggcagctgggtagtggacgcgtcgtacccgctgtacgacgcggcgagctgccccttcgtccgcaaggagttcgactgccgccgcatgggccgccccgactcgacgtacctcaagtaccggtggcagcccgacccgccgtgctccttgccgaggttcgacggggtgaagcttctgaacctgtggcgcgggaagaaggtcatgttcgttggcgactccttagtggtgaaccagtacgagtcgctgctgtgtatgctgcacgccgccgcgcccggcgcacggaccaaccagtcgtgggcgtcgtcgtcgggggagaacccgtcgaccacggtgcgtttcgaggactacggtgtgactctggtgtactacttgtcgcattacctggtcgacctcaccaacgacacagccgggcgtaccgtccttaggctcgacgggatggacgagggacgcgcgtggatcggcgccgacgtgctcgtctttggctcgtggcgctggtggtggcgcaagagttgggactacatccaaggcgacagcacggtggtgcaggacatggaccggacccaggctttcaccaaggggctgcaaacctgggctagatgggtcgacgccaacctcgcccagaccagcaccaaagtcttcttccagggctactcgcccaatcacctcgatggccgacaatggggagcggcggcgggtaagacgtgcatcggggagacgcagccgttgaacaacgcggcagcgtaccatggccagcccaacccgcaggacacgatcgtgaggagcgtcctggcgggcatggcgaagccggtgctcctgctcgatatcacctccatgtcgcagctgaggaaggacggccacaccaccaggtacaacggcgacagccttggccgtgactgcacgcattggtgcgtcgctggcgtccctgacacctggaacaccgtcctgtacgccgcccttgcaggaggggattcatga

SEQ ID NO: 114765 - DNA, 546 bp, Zea Mays
atgagccttccctacccagccgtcatgtccctccgttccctgatctatctaaacaaatgaagaagaagagaaggggcctgctcctgtcgctagatctggtctgcccaacaaaaaccgaagtctggaggagtggccaaccctcatattgctgctccttgttcttatattcgaattgtgctgcagcttggctttggaaaagctaggtgaaaataaggagagaagggaggaggtcgtggtctccttgaggtgtgctaattggatatgtctgctcgagggatgggagtagctgcacttcacacacatagatgacactttaaccgacgtttggcttgctactaatttaagtgaatggaagagaagtctttaactagcttgttttaccttttttttaattagtgcttttgctttgtcttagaggtgatgtgtcaaaattcaatctattttggcataacagtgtagttctagtagcaccctagagttgttttcttaataactgtggggagttttcatcttctcaatatagtatgaattttcggggtgttataa

SEQ ID NO: 114766 - DNA, 339 bp, Zea Mays
atggctccatctgcaacctacaaggatgtttatcaaccttgtagggctggctctgctcaaactatagacaaggtttatgtcaaggctcttcctaagtcagctttggcaatagatattgtctgctgctccatggcctcgggaatcgcaactctggaattgcataagaaaacagagactgggttaacaaggtttcgacagggcatagcaagaaagaagatttactatgtctattctagtttcaccaaacatataaactggcgccatgtctttaggtcgcatcttatcaaattcatcgatacaaaccactccaccatcaacaccagtctgagcagtgcatag

SEQ ID NO: 114767 - DNA, 1701 bp, Zea Mays
cgagatctcgatcaaacagcttctctgatctcgctcagaagcgaggacatcagacattattgcaattgtatttgcacagcagcgagatctcgctcagaagagactctgaagagataacgagctgcgcttcttcgtcctcgatcaactagcttctctggtcgcttccatatggagagagctgcgtcaagctgcgctagcctcctagcacaaaggaggtgctactccgtggccgcggtcgtggtgaagggatgcgggcggaaggccgtggagaaggtggccaagcgcatcatgggcaaggaggtgaacaccgcggctgcctccggggagaagacgccgtgggtgccggacccagtcactggctactaccgcccggcgggtggcgccaaggaggtggacgcggcggagcttcgcgccaggctgctcaccaagaggatcgccaactgaatcaatctagctgcagagcagtgcggctgagattatttagcgccagttcatctcttgggcctagagcatgacggtgctgtatctttttgaggcataactaggtgagtgcccgtgcgttgcaacggaaacacataataacctaacgtagtctgaaacaaatattatggtctgaaacatatatagagttgcaaagatgggtccaggaattgaggcgaacacagatccgaatttcccaggatagtgaaaatgacccatgattattatagaaaacataagtattcacattctgagatataaaatagcataagagtggaacgagggcgtccacattgttcgtggccccgcccctgctccatctcatgggcctcgctcctgccactcaagcacgaaagaagccccgacgtcgcattctggccctcgacgccatccgcgatatgaccttccgcttcctctgtcgagcgtgcttgttcctagcttccctcccgcctctgcatcggattcccgtgatgaggctggaaagttataccgtgagcttagcttccccatcgacgtaccatccgcgtcctccgatcggtcgcgcgtggagcttctggaacctcaggtgcatctggcttccgcgcaggccacatcccgtccgcccaaggttcgtaaggcttcaacctagaaagcaagcaaaaaaacccaataccttacatttttggaaatagaatggaatagaatgaccaaatttataccttattcatgaagtgtgcttcagctctagcgtactaacctcctgcataaagctaccgttgtagaaaccaccacatctatttccgttctgcatgggggagttcctttatacatttcaaatctaggtagtgtgccaattatgttgctgaaaccttcacaagttcacatgcatgcagcttcaagttcggaccgtctgaataaagttatccctgcataaacagggggttagagaagtggactcacatatccagtttctgtattgaagcaaacaatattctggtgaccttgagcatatgcaaagcactgtagcaaagtgagcactgaaacagaaatgaatagcaaaatattatcacatcaagcaaccttccatgggggtgctctgcaagcgcctgcttaaagtggttccagaaaatgacttagtaaaacaattaaatatgcctacttgatggcattgctcaacattgtttatataccattctccaacaaaacgcttgacgtacttgagcgtgtcgggatgactgattg

SEQ ID NO: 114768 - DNA, 779 bp, Zea Mays
ctctcacatcacatctgaaacagaaacagctagaagacatattcaacagattcagagaaagcacatatatatagatatatatagagagagagaggcaaaaaaagagcgagagagagctgccgattaattaccaacccggccagcttccatggagagagttgcatcaagctactgcgtcagcctcctagcacaaagcaggagggcctacactgtggccgcggccatggctaagaagggagccgccgcacggagggtcgacgagaagaaggcggcggccgcgctgaccaagcgcgtgatgggcaagaaggaagtgaacacggctgccgctgcggcagctgaggagaaggcgtgggtgccggaccctgtcaccggctactatcgcccagcaggtagcgccaaggaggttgacgcggcggagctacgcgccaagctgctgacggaggctgcggccaactgattaatcaagcagtcactttgtcgagctacagcatgagttggctcacttggctgtccacctagcttctcctgctttaatattcgcgctcgttgatccccgagctcgttggcctagagccttttatacactgaatgatacatatataatatataacaggaacatatccaatacacatgagtttttgatacacatatggtgcatataaattaacaaagtccacacaaaattcatacttattctttctatcttactctaattatatacaaaagtttaaatttaaattcattatactttagttgtagctgtaataaaaaagataaaa

SEQ ID NO: 114769 - DNA, 2732 bp, Zea Mays
cgtcggggtagcttttttgccgggctacctttaattctcttcgcaaacacacaattgcctttttatttaagcaagcgtgtatgatggtgcgtgtctgatgactaacgatgtatgacggaacttctaccggcaggtgtgacacgtgctctccaatgatgagaccatgcaaattgtgacatatatcaaagtctgatggttgcaatgtagtagtgaaacaactaaattaaaataacaaaatttatgtatagctaggatcacaaatggattatgaaacattttcttataacaatataagacacatcttgtatatatgttatcatggtattatatgtttccgttgcaattcacagctactcaccctcgcctagtaataacatgaaaacatccgtgattctcgcacagcaagtttggccgtttggttagtcgaaatccaacttcaattctttggcaactctgtttccttgttggtgaggtcgtgactcgtgaaggtgaggtggaaagccggtggaggttgacagcaccgtcagatcaacgggtctaccgttcatcactgatccaacgtctcatatcatttcaacgaacaggtcgttcgtctcacgcatgacacacgatataaaccatctcgtcaatgccgactcctccctccatactactacttcacgatctggtccaaagccccaactcaaatttacatccaggccattcgccggagatggcgtcggagctgacgtaccgcggcggcagcgtggcgccaggctccgcctccaacggtggggaatactccccgaagtcctccaagccgctctcctggctcgcccgcgccgcgcgctacgccgccgccgagcaccgccccgtcttcgccctcgccggcatgctcttcgctgccgctatcttcaccttctcttccccctccactttatctccgtccgaacccgccgcgtcggtcggcttcaaccaccttgccgtcagcgggcacccgtccttccgcgagtccgtcggcgggaaggttcccctggggctgcgtcggcgcgcgctgcgggtgctcgtgacgggcggcgccgggttcgtggggagccacctggtggaccggctgttggagcgcggcgacagcgtgattgtggtggataacttcttcacggggcgcaagggcaacgtggcgcaccatctccagaaccccaggttcgaggtgatccgccacgacgtcgtcgagcccatactgctcgaggtcgaccagatctaccaccttgcctgtccagccagccccgtgcactacaaatggcacaagacaaatgttgttgggacactgaacatgcttggattggccaagaggattggggcaaggttcctacttacaagcaccagtgaggtttatggtgatcccctccagcaccctcaggtggaaacctattggggcaatgtcaaccctataggtgtcaggagctgctatgatgagggaaagcgtacagctgaaacattaaccatggactaccatcgtggtgccaaccttgaggtaaggattgcccggatctttaacacatatggtcctcgcatgtgcattgatgacggccgtgttgtcagtaatttcgttgctcaggcgctgaggaaggagcctttgacagtctatggtgatggcaagcagactaggagctttcaatatgtctcagatttggtggaagggctgatgaagctcatggaaggggagcacattgggccgttcaacctcggcaaccctggagaattcagcatgctggagctggctaaggtggtccaggacaccatcgacccagaggcgcacatcgagttccgtccgaacaccgcagatgatccgcacaagcgcaagcctgacatcagccgcgcgaaagagctcctcggctgggagcccaaggttcccctccgtgagggccttccccgcatggtcactgacttccgcaaacgtatcttcggggaccaggaagggtccaccgagtcagctggtggcctttcttaagtgctcaaaacttgttgaagtgacacgtttgtatggtatatgacttgatacagttttggcgctgtgctctatacgtagttgttatatagggatataaatgtttgttaaagtacggaaaatagcctggcacgctatactatgtaacgacgtaccattttgtaatgtcattgttaacgggttatccagaatgctaatagcgttataatcttacattacatatatctgagcatgagtttgaatctgcaccagactgggaatgattggtcatacataactttgacaagcataataagacctctatattataaaccgcaggtcatcattcctttatttgccatggttgaagaaagcaggcgcccatctgatccgggaccgagacggcgattctatctttcacatctccgcgtggtgatgcgtccggccggcaagcccgcagaggaagccctggcgccgccgagggcgcccttgttgtgtgtgcactttgccgtccacggtgccgtggccttcgatggacttggccggagctggcgccagcttcctggtcatatggcgttcctccacggcccagctccggctgcggtggttgagccaggacacgatgtcggagaagatggcctccacgttctcgtcgggctccccggcggtgaggccgtgccacatccccgggtacagcttgatggtcttgtcggcgctggccgaacgctcgtacagcgcgcggctcacctccgggtccgtcaccgtgtcg

SEQ ID NO: 114770 - DNA, 2220 bp, Zea Mays
cgtcggggtagcttttttgccgggctacctttaattctcttcgcaaacacacaattgcctttttatttaagcaagcgtgtatgatggtgcgtgtctgatgactaacgatgtatgacggaacttctaccggcaggtgtgacacgtgctctccaatgatgagaccatgcaaattgtgacatatatcaaagtctgatggttgcaatgtagtagtgaaacaactaaattaaaataacaaaatttatgtatagctaggatcacaaatggattatgaaacattttcttataacaatataagacacatcttgtatatatgttatcatggtattatatgtttccgttgcaattcacagctactcaccctcgcctagtaataacatgaaaacatccgtgattctcgcacagcaagtttggccgtttggttagtcgaaatccaacttcaattctttggcaactctgtttccttgttggtgaggtcgtgactcgtgaaggtgaggtggaaagccggtggaggttgacagcaccgtcagatcaacgggtctaccgttcatcactgatccaacgtctcatatcatttcaacgaacaggtcgttcgtctcacgcatgacacacgatataaaccatctcgtcaatgccgactcctccctccatactactacttcacgatctggtccaaagccccaactcaaatttacatccaggccattcgccggagatggcgtcggagctgacgtaccgcggcggcagcgtggcgccaggctccgcctccaacggtggggaatactccccgaagtcctccaagccgctctcctggctcgcccgcgccgcgcgctacgccgccgccgagcaccgccccgtcttcgccctcgccggcatgctcttcgctgccgctatcttcaccttctcttccccctccactttatctccgtccgaacccgccgcgtcggtcggcttcaaccaccttgccgtcagcgggcacccgtccttccgcgagtccgtcggcgggaaggttcccctggggctgcgtcggcgcgcgctgcgggtgctcgtgacgggcggcgccgggttcgtggggagccacctggtggaccggctgttggagcgcggcgacagcgtgattgtggtggataacttcttcacggggcgcaagggcaacgtggcgcaccatctccagaaccccaggttcgaggtgatccgccacgacgtcgtcgagcccatactgctcgaggtcgaccagatctaccaccttgcctgtccagccagccccgtgcactacaagtacaaccccatcaagaccatcaagacaaatgttgttgggacactgaacatgcttggattggccaagaggattggggcaaggttcctacttacaagcaccagtgaggtttatggtgatcccctccagcaccctcaggtggaaacctattggggcaatgtcaaccctataggtgtcaggagctgctatgatgagggaaagcgtacagctgaaacattaaccatggactaccatcgtggtgccaaccttgaggtaaggattgcccggatctttaacacatatggtcctcgcatgtgcattgatgacggccgtgttgtcagtaatttcgttgctcaggcgctgaggaaggagcctttgacagtctatggtgatggcaagcagactaggagctttcaatatgtctcagatttggtggaagggctgatgaagctcatggaaggggagcacattgggccgttcaacctcggcaaccctggagaattcagcatgctggagctggctaaggtggtccaggacaccatcgacccagaggcgcacatcgagttccgtccgaacaccgcagatgatccgcacaagcgcaagcctgacatcagccgcgcgaaagagctcctcggctgggagcccaaggttcccctccgtgagggccttccccgcatggtcactgacttccgcaaacgtatcttcggggaccaggaagggtccaccgagtcagctggtggcctttcttaagtgctcaaaacttgttgaagtgacacgtttgtatggtatatgacttgatacagttttggcgctgtgctctatacgtagttgttatatagggatataaatgtttgttaaagtacggaaaatagcctggcacgctatactatgtaacgacgtaccattttgtaatgtcattgttaacgggttatccagaatgctaatagcgttataatcttacattacat

SEQ ID NO: 114771 - DNA, 89 bp, Zea Mays
tctttttataagacacgacttgataagatacggtttctcaaattacatacgttgcaacggcacaatcaatttatttggggaagagctac

SEQ ID NO: 114772 - DNA, 985 bp, Zea Mays
aaaataactcccaatttatttccactgtttccaggcagagaagccacgttggttatttatttgaatacatggatttatttttttatgccaaaatgcctccgtttcaggtcgtagtatgtaccggtacattactgggtcatcgcatatgcaacaagagcagctctggcttctccacgaggctcttccattcattacagaatcttgcaaccgtggccccgtcaacaactcggtgatcggctccaacacatacattgattatggatgaagggtaaacgttttcgtcatcatcgaagcgaggaagcttttgaatccgcccaagggcaatgatggcaacttcaggtaggttcagaagtggagagccaaacttgccaccaatggcacctatgttactaagtgttatagtgccaccttcaatatctgcagcgcttagcctgttttgtgatgccatctcatgcaatcgcgccaattccttcgtgatctggtgcaatgaaactcaagataatcagaatattaggcagaagaggcacacaaccatgactgctgaaggtctcactggacagtcttcaaattctctggtctcaatacatataagatttactaagttgcatgttgtgcaaatgactacctagattgaatgagggttattctcaacggaagtattcttcagaggtttggctagaagataagttatttatctccaaagcttgagtacaagaatttattttcatttctgctgaagaaagaaataacttctgaaactatccaaacttactgtagttcattgttcgaactattaggacctagcaacaaaatcacagggataaatcttatagatcaaagcaacaaaaattatcatggattccgtagaaaaaagaagttgctactaacctccaatattgatagcgactgcactttcttgatgtttggcacgactaatccatgtgttgtagccatcgccaccccaatgttgtgaggccctaacaaa

SEQ ID NO: 114773 - DNA, 1343 bp, Zea Mays
aggttccagtattccaccacgcggcgtcgcctgccgaaccccgaaccttctcgaggtcgaggcccctcccctttcgccaggagaaaacaatgagcaggcgcaacagccgtaccatctatgtaggcaatctccctggggacatccgtgagagggaggttgaggatctcttctacaagtatggccgtattttggatattgacttgaaaatacctccgagacctcctggatacgcattcgttgagtttgaggatccacgtgatgctgatgatgcaatttatggccgtgatgggtataactttgatggctacaggttgagggttgaattagctcatggtggcagaggccagtcttattcttatgatcgttcaagcagctatagcagtgcatgccgtggaggtgtttctaggcgctctgatttccgtgttatggtcactggtttaccctcatcggcatcgtggcaagatctgaaggaccacatgcggcgcgctggtgatgtctgtttctctgatgtataccgtgaggctggagaaactattggaattgtggattatacaaattatgacgatatgaaatacgcgattaggaagcttgatgactcacagttcaggaatgcattttcaagagcatatatcagggtgagggagtatgatgctagatcacgaagcagaagccgtagccactcgtactctagaagccccagctacagcaggagcaggagtccaaaatctgtttctcagtcaccctcatctgtggatgaaagatcgctatcaagatctcgatccccaatttcttctccttctcatgcaagatatgcgacaagccctaggagcagaagcgcatcccgttctcggtctcctgtgagatccgattgaactttgagagcccttgaagcagtgagcagccccagggagaagaaaggaacttgagagtatgccgtgccatcacaatggtccgagtgattatgctgttgccactgctccctcacatttaagaggtttcctcttatttagacggagcatttaattaacattatcttgctaaagagagacttatgcgtagtctacttgtgtactcgttcgtttgtcctcatgttcttggcttcaggaactctggttttttatcattgtacccatagtaaaacctagatgtagttggggtatgccgtatgcgtctatattcggttggtcgaatgtaaatctggatgcatatatgcatctgtttggtttcatttaggcctttccttggtttcgtgattaatgacaacataagcttattgctgtgatcaaagtatattttgtagaggtaattaaagctagtcacacaataatggagattgcttagac

SEQ ID NO: 114774 - DNA, 1596 bp, Zea Mays
gcaggttccagtattccaccacgcggcgtcgcctgccgaaccccgaaccttctcgaggtcgaggcccctcccctttcgccaggaggtgcgcacggcacgactaatctccacactccccactagcttttcttcccagtttgctccgattttgattccatgaaaacaatgagcaggcgcaacagccgtaccatctatgtaggcaatctccctggggacatccgtgagagggaggttgaggatctcttctacaagtatggccgtattttggatattgacttgaaaatacctccgagacctcctggatacgcattcgttgagtttgaggatccacgtgatgctgatgatgcaatttatggccgtgatgggtataactttgatggctacaggttgagggttgaattagctcatggtggcagaggccagtcttattcttatgatcgttcaagcagctatagcagtgcatgccgtggaggtgtttctaggcgctctgatttccgtgttatggtcactggtttaccctcatcggcatcgtggcaagatctgaaggaccacatgcggcgcgctggtgatgtctgtttctctgatgtataccgtgaggctggagaaactattggaattgtggattatacaaattatgacgatatgaaatacgcgattaggaagcttgatgactcacagttcaggaatgcattttcaagagcatatatcagggtgagggagtatgatgctagatcacgaagcagaagccgtagccactcgtactctagaagccccagctacagcaggagcaggagtccaaaatctgtttctcagtcaccctcatctgtggatgaaaggtttgcttttgtttttcctagatttggccatgcggcgatctgggggctgcattgatataatactggatgttttgagaatcggagtggatggtttgggacttcggatagtagagatggattgtgatgcatgtatgacaagtgggctacaatcagtcctaggagcaagataggctgacaatcgctatcaagatctcgatccccaatttcttctccttctcatgcaagatatgcgacaagccctaggagcagaagcgcatcccgttctcggtctcctgtgagatccgattgaactttgagagcccttgaagcagtgagcagccccagggagaagaaaggaacttgagagtatgccgtgccatcacaatggtccgagtgattatgctgttgccactgctccctcacatttaagaggtttcctcttatttagacggagcatttaattaacattatcttgctaaagagagacttatgcgtagtctacttgtgtactcgttcgtttgtcctcatgttcttggcttcaggaactctggttttttatcattgtacccatagtaaaacctagatgtagttggggtatgccgtatgcgtctatattcggttggtcgaatgtaaatctggatgcatatatgcatctgtttggtttcatttaggcctttccttggtttcgtgattaatgacaacataagcttattgctgtgatcaaagtatattttgtagaggtaattaaagctagtcacacaataatggagattgcttagac

SEQ ID NO: 114775 - DNA, 1445 bp, Zea Mays
atcaccacgaccacgggactcctgtcgcaggttccagtattccaccacgcggcgtcgcctgccgaaccccgaaccttctcgaggtcgaggcccctcccctttcgccaggaggtgcgcacggcacgactaatctccacactccccactagcttttcttcccagtttgctccgattttgattccatgaaaacaatgagcaggcgcaacagccgtaccatctatgtaggcaatctccctggggacatccgtgagagggaggttgaggatctcttctacaagtatggccgtattttggatattgacttgaaaatacctccgagacctcctggatacgcattcgttgagtttgaggatccacgtgatgctgatgatgcaatttatggccgtgatgggtataactttgatggctacaggttgagggttgaattagctcatggtggcagaggccagtcttattcttatgatcgttcaagcagctatagcagtgcatgccgtggaggtgtttctaggcgctctgatttccgtgttatggtcactggtttaccctcatcggcatcgtggcaagatctgaaggaccacatgcggcgcgctggtgatgtctgtttctctgatgtataccgtgaggctggagaaactattggaattgtggattatacaaattatgacgatatgaaatacgcgattaggaagcttgatgactcacagttcaggaatgcattttcaagagcatatatcagggtgagggagtatgatgctagatcacgaagcagaagccgtagccactcgtactctagaagccccagctacagcaggagcaggagtccaaaatctgtttctcagtcaccctcatctgtggatgaaagatcgctatcaagatctcgatccccaatttcttctccttctcatgcaagatatgcgacaagccctaggagcagaagcgcatcccgttctcggtctcctgtgagatccgattgaactttgagagcccttgaagcagtgagcagccccagggagaagaaaggaacttgagagtatgccgtgccatcacaatggtccgagtgattatgctgttgccactgctccctcacatttaagaggtttcctcttatttagacggagcatttaattaacattatcttgctaaagagagacttatgcgtagtctacttgtgtactcgttcgtttgtcctcatgttcttggcttcaggaactctggttttttatcattgtacccatagtaaaacctagatgtagttggggtatgccgtatgcgtctatattcggttggtcgaatgtaaatctggatgcatatatgcatctgtttggtttcatttaggcctttccttggtttcgtgattaatgacaacataagcttattgctgtgatcaaagtatattttgtagaggtaattaaagctagtcacacaataatggagattgcttagac

SEQ ID NO: 114776 - DNA, 1377 bp, Zea Mays
aggttccagtattccaccacgcggcgtcgcctgccgaaccccgaaccttctcgaggtcgaggcccctcccctttcgccaggagaaaacaatgagcaggcgcaacagccgtaccatctatgtaggcaatctccctggggacatccgtgagagggaggttgaggatctcttctacaagtatggccgtattttggatattgacttgaaaatacctccgagacctcctggatacgcattcgttgagtttgaggatccacgtgatgctgatgatgcaatttatggccgtgatgggtataactttgatggctacaggttgagggttgaattagctcatggtggcagaggccagtcttattcttatgatcgttcaagcagctatagcagtgcatgccgtggaggtgtttctaggcgctctgatttccgtgttatggtcactggtttaccctcatcggcatcgtggcaagatctgaaggaccacatgcggcgcgctggtgatgtctgtttctctgatgtataccgtgaggctggagaaactattggaattgtggattatacaaattatgacgatatgaaatacgcgattaggaagcttgatgactcacagttcaggaatgcattttcaagagcatatatcagggtgagggagtatgatgctagatcacgaagcagaagccgtagccactcgtactctagaagccccagctacagcaggagcaggagtccaaaatctgtttctcagtcaccctcatctgtggatgaaagatttggccatgcggcgatctgggggctgcattgatataatactggatgttttgagaatcggagtggatggtttgggacttcggatagtagagatggattgtgatgcatgtatgacaagtgggctacaatcagtcctaggagcaagataggctgacaatcgctatcaagatctcgatccccaatttcttctccttctcatgcaagatatgcgacaagccctaggagcagaagcgcatcccgttctcggtctcctgtgagatccgattgaactttgagagcccttgaagcagtgagcagccccagggagaagaaaggaacttgagagtatgccgtgccatcacaatggtccgagtgattatgctgttgccactgctccctcacatttaagaggtttcctcttatttagacggagcatttaattaacattatcttgctaaagagagacttatgcgtagtctacttgtgtactcgttcgtttgtcctcatgttcttggcttcaggaactctggttttttatcattgtacccatagtaaaacctagatgtagttggggtatgccgtatgcgtctatattcggttggtcgaatgtaaatctggatgcatatatgcatctgttt

SEQ ID NO: 114777 - DNA, 1007 bp, Zea Mays
atcaccacgaccacgggactcctgtcgcaggttccagtattccaccacgcggcgtcgcctgccgaaccccgaaccttctcgaggtcgaggcccctcccctttcgccaggaggtgcgcacggcacgactaatctccacactccccactagcttttcttcccagtttgctccgattttgattccatgaaaacaatgagcaggcgcaacagccgtaccatctatgtaggcaatctccctggggacatccgtgagagggaggttgaggatctcttctacaagtatggccgtattttggatattgacttgaaaatacctccgagacctcctggatacgcattcgttgagtttgaggatccacgtgatgctgatgatgcaatttatggccgtgatgggtataactttgatggctacaggttgagggttgaattagctcatggtggcagaggccagtcttattcttatgatcgttcaagcagctatagcagtgcatgccgtggaggtgtttctaggcgctctgatttccgtgttatggtcactggtttaccctcatcggcatcgtggcaagatctgaaggaccacatgcggcgcgctggtgatgtctgtttctctgatgtataccgtgaggctggagaaactattggaattgtggattatacaaattatgacgatatgaaatacgcgattaggaagcttgatgactcacagttcaggaatgcattttcaagagcatatatcagggtgagggagtatgatgctagatcacgaagcagaagccgtagccactcgtactctagaagccccagctacagcaggagcaggagtccaaaatctgtttctcagtcaccctcatctgtggatgaaagatcgctatcaagatctcgatccccaatttcttctccttctcatgcaagatatgcgacaagccctaggagcagaagcgcatcccgttctcggtctcctgtaattgcaagcttccaaaacaaccatttattatgttgctaggaactt

SEQ ID NO: 114778 - DNA, 2094 bp, Zea Mays
atggcggcccacgaggccacagcacgcctgcagcctgcaggctgcaacgtcgcggtctaccgcacgaatctcgaagcgtcccgcacccacatttgcccatcgccagctatatcaccacgaccacgggactcctgtcgcaggttccagtattccaccacgcggcgtcgcctgccgaaccccgaaccttctcgaggtcgaggcccctcccctttcgccaggaggtgcgcacggcacgactaatctccacactccccactagcttttcttcccagtttgctccgattttgattccatgaaaacaatgagcaggcgcaacagccgtaccatctatgtaggcaatctccctggggacatccgtgagagggaggttgaggatctcttctacaagtatggccgtattttggatattgacttgaaaatacctccgagacctcctggatacgcattcgttgagtttgaggatccacgtgatgctgatgatgcaatttatggccgtgatgggtataactttgatggctacaggttgagggttgaattagctcatggtggcagaggccagtcttattcttatgatcgttcaagcagctatagcagtgcatgccgtggaggtgtttctaggcgctctgatttccgtgttatggtcactggtttaccctcatcggcatcgtggcaagatctgaaggaccacatgcggcgcgctggtgatgtctgtttctctgatgtataccgtgaggctggagaaactattggaattgtggattatacaaattatgacgatatgaaatacgcgattaggaagcttgatgactcacagttcaggaatgcattttcaagagcatatatcagggtgagggagtatgatgctagatcacgaagcagaagccgtagccactcgtactctagaagccccagctacagcaggagcaggagtccaaaatctgtttctcagtcaccctcatctgtggatgaaaggtatgtgaatctatgtcatttagaaatgtacatttgtgaaactgagagtgctaatattgttcgaaggaacccgattgtcaaataaatggtgaaagcaatcagatcttgttgtgaatcatcattgatgtattctgcactacacctatggcgctaaaaatatttgaatatgacatgtcatcattttgtatacaagcttaaagcagggccatggtggatgtaacaactgataggagattgcacattaacttaattatttcctactatctgatacactttcgtcaaacaacgaaatgcctttccagagctgagactgccttatacaaacttctacaaatacagcttaagtttttaagtgtgtgctctaccctaaccttatagaacatgctgaaggtttggctcacaaacttctagataaatctttcaatgtcgtagcagggagtattagatccatcagaagcttgccaaattgagagggtatataaagaggtgttaccagaactttccttctttcaaaacaatagttttgtcgccttttcctgtcgtatcagtcgtctacatagcatgccaaaacccctctgtttctttttcctcatggaaaagcttcagtccccttcttatttatcaacttcatacaacattaacccatagttatcatggcagcgcgtaggcgctgactaggcatccaagcggtcggcagtggatgccatgcctcgtcgcctcgcctgaacccagttaggcgatggtaagacatctcctagaagcccacctagctgttgaactaggctttaatgggtctgccttgtgcactatacgcccagtttcctcttctttcctctgctgccaccaccgttagagccgctagatcgctcacgccggctgcctgccgcgtgcctgtgccgcgcgcccgcgtggcctacacagtgcaccgcccacaagtcgcctacaccagcgttgctcgtgcgtcgtgccgcctgagctcgaccatggatgcttgctacttgctggatttatatttatttgctagtttttcatatatcatgtgatatatgactatatgttgcatttttgctgctggagaaaagggcgtcttggcagcacctaggcggttgtctagaacctagg

SEQ ID NO: 114779 - DNA, 877 bp, Zea Mays
caccagcagtcaaccatatacatggaatctgtagtatagctatttgtcactaccttgtcacttgggagcattgaattaaataccagtgttttatatatcaggttctgttcttcaaccttgggcatgcccacccatccatactgagtactgacaccgcttgcatttggtctagatatgtgtggaagttcttgatccctcacccccttctatttttatttttttctttccagactttctatgctacaagatctgaacaatataaagtaccaccttaagaaaacaagtatattattttgattttgcataccagattttttgtgctgcaagattgtacatttgttaattctgaatgtgttgcctgcaggaggacccgactatgattgaatcctacaataacaagagaacatctggctgatctggtggtgaaggagttacatctacgctaaccatggaggaaccgactatgattgaatcctacaataacaagagaacagttggctgatctggtggcgaaggagttacatctacgctaaccatgctcaaggtcattggtgatggtggttatccaaacgaccactatgacaaggatgatcatcaatgaggccttgtgtcgataattataataacaactttgtgaaacatggttttgccccatctttgcagcatcatattgtcctatagtattgtaattgataagtgtttgagcatgaagcaggttaggtggtgttctacacctacgaattacgcaatcacatatagattgtttctatgggtttttagccatgtactgtagtgaatctttattactggcatacaacatctcacaacagttctaataatgagcaataaactgatatgtatttactggtttggtggt

SEQ ID NO: 114780 - DNA, 1227 bp, Zea Mays
atgttctgcttccgcgtccgattcccccgacctcgcctcacccgcaatctccgctgccgcgcccacgcccgcgacatccaccaccccgacctcgccccccacccgcggaaatttcgcccgcgagatccctctgcccatcgatggaaggcgccattaacgacgtgcgaaactcgctaccgcccccacgacgccataccatgccctcgcccccaccctccgcacagatctacgaagaggccgccaccccgcccccgttcttgcccctcgtcggcgtcgacctcaccgcggcacgggctgcactcctccgccccgctcgcggccgcggtgctgggccacctccgggcctctggggtggccgtgctcccgggcctgacggagttggagctggcgggcgccgaggccgagatggggtttgcgttcccgctcgacctccgcgccgtcctcgccacgggcctgccgttggggcccaagttcccagacacgcggtcgcgcgtggggctacggtccgcattcgacctgcccatcgcggcggcggcgctgcagatcacgcggggcacgctgtggctgcgctgctggggcgcacgccccgccgaccttgactgcgtgttgcggcccgcgcgctccgccatctgccgcgcaggagaagcatcgatcccgcgcaggagaagatccggtccctgccgctcaaggctatccacgcgtctcatccacgcgctatggaagaagcgcgccaggagtcgcgtcactgacttccgggaaactttttttacagcagcccccaatataaagtttttggaaacaatttttaagcagtctgttggagttgctcttaagcgtggtgatgtcgagcgtgtccaggtggtgtgcaaacctggtagtctgaagacatacaaaaagttcgaggcggaaatatatgtcctcacaaaggatgaaggtggctggcacactgcctttgtcacaaattacagcccccaattctacttcaggacaactgatgtcactggaagagttgagttgcttggggagatgaagatggttttgcccggtgataatgtaactacgaattttgagttgatatcacttgttcctcttgaacctggtaacgactgcattctcaatttctttcgacagtatagaactatagatcaggtttctgaaagccaggaagttcgattccaacaagacaatgcaaatgtggtcagagatgttgaaagccaggaagtttga

SEQ ID NO: 114781 - DNA, 358 bp, Zea Mays
gtattatttatgtaaatacctgaccattatagagaccttgcatagtaatataaactggttcaggttaagaaatgtatctgtatcattgctctaagtagatcttgtccaatgaagtccaagacatcttattatcaaatcatgtgagcttcagaatccatgaaccacattaatgagtaaatgttgcaagaactgtatgtgtgtttatggttattgtgttctaaattttgctaatggtttgactaactggattgttatggtgatcctgaatttcttggtatggctaatgcatttatctatttcagtaacttgaactcaacatctttgtcatacctattgtttcctcttagctattgtgatt

SEQ ID NO: 114782 - DNA, 154 bp, Zea Mays
tcttttttttctatcttctatttcctatttctatttcttatctctatttcttttatctctttttcttttgaacaaataattagctaaataatcttaggtgctaaaaaatattctatgtgaggtgcttctaacaatcatagtgtatgcaaatgat

SEQ ID NO: 114783 - DNA, 633 bp, Zea Mays
atgggagaagatggggaggagagaggagggacgggtgggctggacgagcaccaaaggcgaggaaaaatctggacgcgagtattaggagggcgcaggggagcaagctggagatggaacacgcagaagctcggtggagcagagggcaagcagggacggcacgctagtgaagaagatgcgttgggggaaaggagcggcgttgggatcaggcgccatgggagccgctcggctgggagcatccatgggaggggtctcgggcgccgagcagggggcttcagggtgcggcgtaggggcacacgcggtcaagcgaacttgagttggagtcagggagcaggaaatcagggcgacggcgcgtgcacagagaggcgaccgcgccatgggcgttcgcgggcggacgaactaagaagcttgagggagctcgaccaccaggagaaaaatgtcgggctggggcagagaaaatcgtgcgtcatgaagcttgacgagagaggcgcggctgggggcgggtccgagctagacgacggcacccagggcgagcgccagggagggtgccgtgagggagatagagaaatccagggcggtggagagctcgctgcaagcagccgagcagaggaagggcgtagctgccatgggaactaa

SEQ ID NO: 114784 - DNA, 714 bp, Zea Mays
aacctcggatttcaccaccaccacgctgttttggttcttggagccaccgtcgccctcgtccttagtatccatggctgtaggtagagctggaacggaagccggagccatggctcgccgctgatgcgtcaggccaggtcgtcaggggccctacgcgcccacacgaaccccaccagaattccccccaatcttcctccagaagaagaccatgcgggcggacagatgacgttcagcaacgaaattcgcaggggtagaagagaatcaaaggagcgcactagagtggtcgaagacttcgcaagaaaaaagatcaattctgcaatagaaaacccacggattggtaacagaaccctatagaaccgaaggagtcttaagaatcgtcgcgaatgggccaatggaaaatacaaatactcgaccaggcaacgagggaatccgcggaacactcatacgcaagacgaatctgcaaccacaacaaaaagacgcaaaagaacccgcaagaacctgacaagccatgtcaatcacgcaggatcaaaccagcggggggcgaaggcttaccgaggatcgtcagatggagaatcgggcatcagtccgggcggatcgccatggcggaaatttgtgggaatcaggatcgggggccggggcacgatcgctcgggtctgtggctcaaaagtggaggcgagggcgaggagagaatttgtcaaaatgggtctcctcgttgcc

SEQ ID NO: 114785 - DNA, 1508 bp, Zea Mays
attctctcccatggccacccctccctcagccatggcgggtgcagccgccactgcccactgctcactcagccgtccgccctagccgctaggtcagccgtccgcccgtcgcatgtatagcgccgccactcaccgcaggcacatcggcacaacgcctccgaccaaatccagtggcttcacggcgccacggcctccaggctccacgcacgggcacgacctccacgggaccacgcacgggcacggcttccaggcttcaacggaatctcgtccccggtcactgcacggcttcaacggaatccagcccgccactgcgccacgcctccggccaaatccagcggcgcctctgcacggcgccacggcctccaggcttccacgcacgggcagcacggcttccaggcttcgcagcagggaagttccctaaggcaagcagttgaagtttactgtctttttacactcactggcttaagtctcccgcggcacatgcacggtcttatgacacaaccactgcctttttaatataaaatggtcattagctgttaaagtttactgtgatgcccttagtctagtgataaaatggagttcagctgatcaggtacaaaggagcccctgaagtggaaagtcaggttcaaaattgcacttggaattgctgaagggctgctttatctacatgaaggctgccatcgccgcataattcacagggacgtcaaggcatctaatatccttctaactgaagactaccaacctcagatatcagattttgggcttgcaaagtggctccttgacaaattgacccatcatgttgtgtatcccattgaaggcacattcggcgagcgtctatgcgttcgggttactaggacatgggacttctatgatcctggagatgataaaaaacttctgcattctgatcttgtactgctcgatgaggaggttcataaagcatggttaccaccttggctagcggcacaatatgctcattacgtggattgagggagaggaagcaaaaatgactgtatgggagaatatgcagaaagctgaagcagaagcagccatacaaaagcttgtgataaaacttgaaaagaaaaggccatactcgctggagaggattttcaacacccttaggtctggctctcggaagacacaggtggtacgcagtacatcaaccgcaaatcagaatcagcatatttccagaactatcaaaacggcgccaaacctcagcaagaacggtcaaatgagttcattgagtggatgcttcagacaggatctatagcatggatcataatctggattgtccttaagtttttattgtgctaggggaacataagaaagtatgtagagcaaaatgagaggagctgttgttaccctcaattctttgtgattattgtgctagagtgatgtagttgttggcttttgaacaatagctggagtgatatgaaacattagtggtctagttgtgaatgatattataattgtgatgcttttgtgaatatataattgtggtgcttttgtgttta

SEQ ID NO: 114786 - DNA, 321 bp, Zea Mays
atggccgtgactaccctaggcatgagaggcggtggtcgcgtctgcccgaggcgcgagtggtgtcggcaaccgcgagctcccgaggcgcgatcagtggcggtggcaatgaccttcggaggcgtgagcggtgttggctgtggtgactgtccatggtggaatatgaagacaatgatctccttcgatacagcgcatctcggacgtcctgctcctgctccgatgaccaccttcgatctaatggcatctaagacgtcctttgatctagcggcctcgggatcgtcctccggcgacgaactatccaatccatgtttatgtcatcgatga

SEQ ID NO: 114787 - DNA, 400 bp, Zea Mays
cttggaacgggatctcactggagataatcatctacaaagcgttttggaaaaccacggcttgctccaatgtcaatcagactgaattttccttgtagcatcatcgtacagaaaatcactccattttggatcagtctgcaccgaagcagtagtaattaaagatcaacataaaagatcagtttaaatgaaaggttttcagtgttgacaatgagcaccacaaattataaactgatggaaatttaccatgatgctaattatacaaccagaaaactctaactaccagttatttaggaatttagcggacggatgggagctggcacatgcctgcctgaatctgaagacaaaccagtcctttgttgtaagtcaagcagtttacaaccaacataattgcggtttcttggct

SEQ ID NO: 114788 - DNA, 707 bp, Zea Mays
gaaattgtggagaagcaagctcctggattgatgaaggaagctgagcggtttctaattctcagcaatattgataggctgtggaaagagcatctgcaggcactaaagtttgtccaacaagctgttggtttaaggggttatgcccaacgagatccccttattgagtataaacttgagggatataatcttttcttagacatgatggctcaaatcaggaggaatgttatttattctgtatatcagttcaaaccagtagtgaagaaccaagaaggggaagcatcccaaaaggtgtcaaaaaagaaactggacaaaggagctaacaaacttggtgctgcccaagctgcgtcatgatcttcctgtgagaaacgttgctggtgcttttagttgcagtggctgcagtctccacgtgtacaaagatggtctatactcgataccgtatgagaaatgtacttcatgcatggtatgagtaagctgattttggtagcttcatacaggggcagccttccagtatatatatatatatatatatatatatatatgctttcttgagctattgatgttatcagcagatcctgtgcctcagcagattgttgttcatagtgcatagcatcgattttactagttgtacagaaatagaacacggtcaatgaaagagtctttgctcctcaacccacacttttttgtataataatgtaattcattcttatcgg

SEQ ID NO: 114789 - DNA, 1874 bp, Zea Mays
agcagccgctcccgacttttaccttcctacctggtgctgtagcatccgccgcctcccgcagaacccgaagatggcgtcgtcggcgtcgaccctcgaaatcgaggcccgcgacgtggttaagatagtgctgcagttctgcaaggagaattcgctgcagcagacgttccagacgctgcaaaacgagtgccaggtctccctcaacactgttgacagcatcgacaccttcattgccgacatcaatgccgggcgttgggatgctgtgcttccccaggtcgcacagctcaagctgccacgcaagaagctcgaggacctctatgagcagattgtgttggagatggctgagctccgtgagcttgacacggcccgtgccatcctccgtcagacgcaggtcatgggtgttatgaagcaggagcagcctgagcggtacctccgccttgagcacctccttgtccgcacatactttgaccccaatgaggcctaccaagaatccaccaaggagaagcggcgagcactgattgctcaagctgttgcttcagaagtctcagtagtaccgccatctcgtcttatggcactgattggtcaggctttgaagtggcaacagcaccaaggattgttgcctcctggcacacagtttgatttatttagaggaactgctgcaatgaagcaggatgaagaagaaacataccctacttccttatctcatcaaataaagtttgggaagaaaactcatcctgaatgtgctcgattttcacctgatggtcagtaccttgtttcatgctcagttgatggaataattgaagtctgggattatcttagtggaaagcttaaaaaggatcttcaatatcaagccgatgaaagctttatgatgcacgaggaacctgtgctgtgtgttgattttagtagggattctgaaatgctggcatctggatcacaggatggaaagattaaggtttggcgtatacgaactggtcagtgcttgcgacgccttgagcgtgcacattcgaaaggtgttacaagtgttacattttcacgtgatggaacccaaatattgagtacatcctttgacactaccgcgagggtacatggcctcaagtctggaaagatgctgaaagaatttcgaggtcattcttcatatgtaaattatgccatcttcactactgacggtagccgtgtcattacagcttccagtgattgtactgttaaggtctgggatactaaaacaacagattgcttgcatactttcaagccaccacctcctttgaggggaggagatgcatctgttaattctgtccatttatttccaaaaaatactgatcacattgttgtctgcaataagacttcatcaatattcatcatgactttacaaggacaggttgtgaagagtttctcatcaggtaagcgagaagggggagattttgttgcagcttcagtttcaccaaaaggagaatggatatattgtgttggtgaagacatgaacatgtattgctttagctaccaatctggtaaactggagcatctgatgaaggtgcatgagaaggatgtcataggcattacgcaccatcctcacaggaacttagtagccaccattgctgaggattgtatgatgaagatatggaagccttgactttttttctttttaaaaaaaccttgaaccgatgattaaataggatgtattttgttttgtaatttagataactggtaggcgctacagctatggactcgttggtgcttatgttgccccatgtcttactaccattgtatcctgtactagatttagggacctttcaatggtgtaaacacagcttactacgactcctcgctacaagttcattatggttaatttggttatagcacgctggatgctgattgtgtcc

SEQ ID NO: 114790 - DNA, 450 bp, Zea Mays
atggtaggagggcaccgagccgccgtggtcttcctccccatgctgtcgccgacctcaccgccagtgccgccgccggaggccgaagcgaagaacgccctcgtggccaccgccagcctctccatcaccactgttgccttctcatcggtggattcagccttctcatcggcggattcggcctcgacccctccgagttgttgccggaggggtcgggagtgcgctggatgtgcgagcgcatcgctcgtggtggtgacggggaagtgggggaatcgcgggccggggcggcggcgcgcgggcagcgggggtggagcgtggagggacgcggagggagcgctagatttgaggatggagccgcgggattcgaggatcgagcacggaggacggatggagtgcggagggagcgcgacggcagaacccgtgcaccatcctcaaatgtggacgcctatgatatag

SEQ ID NO: 114791 - DNA, 2058 bp, Zea Mays
atggaggtagaacttcggtggagacaatggagttggctgcgtgagaggtggtgcgatttgaaggtacatgagagagagttcctcacgatggcaaggtcagatactgctgcacatgacatgttcgatgaaacgtctgctgagaaggtggtttgggatgaagaagtgttacttggctccgattcacttgatttttggcagcggctggcccatggggtggggaaccagatgcacaacgattgcaagcaggatgttgtgtctgatgccccatggatgtttgttggaatgtcacagcaagcaagcacacaaccaatgttcagtgagataggtcttaaagtggcatgggacgaggagatgcaatttgaatctcacacgcatgaagggttactgcagcagcttgctcaaggtggagaagtcttagacgaatcggctgagaatgagggtgaggtggtagaagagaccaccagcatggaggagcttcttcctactagtgctagcagtgtgatagaggagaagtgtggcaatgaagatgcatcaaaatcacagacttccaactctgatagggaagtgggcagcaatgagaaggccatcgaggaggatggttttgttaccacggttgaggctgatcctacttccaaggagattcttctgactactgcgggagaaaatgaggaatgggcttcagatgatgataagaacagtgaggagattggctgtattgacgagattgatgaagatgcagatgagaccaaggagcagagttacacctctaacgaagtccaaactttgcgacacactgggacagtagaagaggtaaacgaagatgcctccgttaaaacgaagagtggcatttatcttttagtgcccggggaacaccaggttgttgatgcatttgcaaccaaaactgcaaagtcattggatgatgctataaatataggccaagaggaggagggtcgtgaggtggctgatgctactaaaaatgcaatgaaagatattgacaatgatatgaagtacagggacggggaaggagaattaaaggagagattagctcaaaatcgagatcactgtgatgcgctcaatcaggacagtgacactactctcttgagactcgatcttgatcactgggaagagacgtcggtcagctcgtccagccttgccatgagtgaggacttgttgtctgtatttggggcccaagactcattactgcagcaagaagcatgggagcccatacctcacatggacctactgatcgcgaaggagttgcgtcccatggcagactcgaccttagatcttgcagttgatgttggagcaagatcaggcgggccaacagacaaaatgactgtctctacgatcttcgagtcggctagcagcacatctagcaggtcaggaacgggaaccacacccatgctgactacactcttgcagatggttcgcattgacaagttccagatagcccagtttgcattgagtgcgatgaatgagctggtccaaatggcgcagcggaatagaccattgtgggtttcaaccgttccctcacttggttcgctaatcatggagactctgaactataaggagcatttggtggcattttcaccatgtgttggagtaaagcctactgggtttatgtctgaggtttcaagggagttgggcattgttaccattggcagtagcgctgctcttgtgaagaccttcatggatcagagacggtggttggacatattctgctgcagggttgccactacagcagccgttgagaagatcttacctgttgcaggaagcagaaatggtgcattgctgcttatgcatgcagaactacaagtgttttcacctcttgtcaagttactcaccgattttttttggagggagctgaagcacacggaagcataccattctatgtgccaatgggatccacgagttgatcagtttcattggaatgatgatggcagcaaggagacacaatctctcctttggataattagaccatgggatcctgctttgtattatgttcaacggtcactggacgatcctgttgagctaattcgctcaatagtgtcaatatag

SEQ ID NO: 114792 - DNA, 181 bp, Zea Mays
tttggatcaagctcagcaagcacaacggcgtcaaattcacattttgccgaaggcgacaatggaatgccaaaaaagtggcgccagcaagaaggcagttttacagacatgtaatcggcccctagaactaatccaaatccccgcatgtaatcagacaaattaagcgcctaaacctaaacctaat

SEQ ID NO: 114793 - DNA, 432 bp, Zea Mays
atgcatcaccaccatctataccatccaacaaagcatccttggaacttttcaggttctgtatgcgtgacttgcatagcgaaattgcttttgcacagtatgaaattgcatctccgatcttggaaaatcaataggaagtccagcaatccggattccatctatatgttggacctgggatccatgctgtcttcgacatatcaaggcactaagaccagtaaaccaagcctccgcctcgactttattcttgcagaccttcctttcttcattcatctccatcggggagccggcaagtgcgggagccgggcatgggcggaggcgctgagggagcggacgccagccatccagagcgaggggaggaagaagagtgtatgcgtactgtcgtgtggcggtggcagcgtggagtcccgggtggagggaggggtggtaggagcctag

SEQ ID NO: 114794 - DNA, 2476 bp, Zea Mays
aagccaggccaggcaacccacaacacaaggagaaggggaagggcggcgagggaagggctccgcgtcgtgtcccttctcttcctcctcctcctcctcctctctccaacaccccatccatcagcgctgccctccgcattgctcttgatcccatccagtacatcgattctccccccaagatcaaaggccggaggaggaagaaaggttagggagtcggccatgggatgcttttcatgctgctgtgtggcagatgacgacaacgttggcaggaggaagaagcatgacgatccctatgttcctatccctgctcatgtttataattttggacctagccggttcccagccccaacccctgtcatctccactggcagagctcagccaattgcagtaccggccattcatctggaagagctgaaggaaattacaaaaaacttcagcagtgatgccctcattggcgagggctcgtatgccagagtctattttggtgtgctgaaagatgggacgaaatctgcagtgaagaagcttgactccagcaaacagcctgatcaagaattccttgtgcaggtttcagctgtctcaagattgaagcatgagaatgttgtccaactcgtcggatactgcgccgaagggagcacccgcgtccttgcttatgagtatgcaactaggggatcattgcatgatatcctccatggtaaaaagggtgtcaaaggagcccagccagggccagtcctgtcatggatgcagcgagctaggattgccgtatgtgctgctcggggtctcgagttcctccacgagaaggccgatcctcgagtggtccaccgcgacatcaagtcaagcaacatactgctctttgaccatgatgttgcgaagatcggggacttcgacatctcaaaccaggcccctgacatggctgcgcgcctccactctactcgcgttcttggcacctttggctaccatgcaccagaatatgccatgactggacagcttagcacgaagagtgatgtctacagctttggagttgtgctgctggagcttttaaccggtcgcaagccagttgaccacacactgccccgtggccagcagagccttgtgacatgggctacaccgaggcttagtgaagacaaggtgaggcaatgcgtcgatccaaggctcggagacgaataccctccaaaggctgtagccaagatggctgctgtggccgccctctgcgtgcaatacgagggtgaattccgtcccaacatgagcatcgtcgtcaaggctctgaaccccttgctgcacagccggtctggcaaccgccctactgcctcgtcggcctcccacgctgccgagcgatccggactgtgatttctcatcgctgcgacaactttgggttcacgaaaaaggaccgtcttgtggagcgttggtgttgctgtgtcgtgactgccaaagccttggcgcagagaagagctttgccatgcagctgtgtattgtaaattgttttgtaagcgatgcgcctcctggtttgtgtgccctgtcatcatcctattctattctagaaaatggtgtacgatggatcatggatgataccaactatttggtctcttttggaatgcgaaaatgcagcacttggcttcctatgtgtgtagatcagctttgttgttctattgctacaaaccaggaatactacagtatgaatattacaactactggcagccggcatatgtaacagagaagcatgcacaacagggcaggacaggaaccgctcctggactgttgtcctagtcctaattgtgattgaaccaaaattgaattctatttcgattattagctagctagcgtatctatggttcaaaatgttttctcagacagcagccacgagacgagcgcagcacctcgatctccaactagggaagctgcatatctatggttcaacatcagcttcttcatcggagtcggcggctaggacatcggcagccgtcgtctgctccctgttagcttgttcaccagagtcggcagctgggacatcgacagccatcgtctgctctctgttagcttgttcaccgaaatcggcagctcggatatcttgttcatcggagtaggcagctaggacatcttgttcaccggagtcggcaggtgggacatcgacagtcgtggtctgctccctgttagcttgttcaccggagtcggcagctaggatatcttgttcaccggagtcggcagctgggatatcggcagccgtggtctgctccctgttagcttgttcaccggagacggcagctgggaagcctgggatatcttgttcaccggagtcggcagctgggacatcggcagccgtggtttgctccatgttagcttgttcaccggagtcggcagctgggacatcatgttcaccggagtcgacatctgggacatcggcagccgtggtctgctccctcttagcttgttcaccggaatcgggagctgggacatcttgttcaccagagtcggcagcagggatatc

SEQ ID NO: 114795 - DNA, 1185 bp, Zea Mays
atggcggccgagagcttccttttcacctcggagtccgtgaacgaggggcaccccgacaagctgtgcgaccaggtgtcggacgccgtgcttgacgcatgcctcgcgcaggaccccgacagcaaggtggcctgcgagacctgcaccaagaccaacatggtgatggtgttcggcgagatcacgaccaaggcgaccgtggactacgagaagatcgtgcgcgacacctgccgcgagatcgggttcacctccgacgacgtgggcctcgacgccgaccgctgcaaggtgctggtgaacatcgagcagcagtcccccgacatcgcgcagggcgtgcacgggcacttcacgaagcggcccgaggagatcggcgcgggcgaccagggccacatgttcgggtacgccaccgacgagacccccgagctgatgccgctgagccacgtgctggccaccaagctgggcgcgcgcctcaccgaggtgcgcaagaacggcacctgcgcctggctgaggcccgacggcaagacccaggtgacggtggagtacgtgaacgagggcggcgccatggtgcccgtccgcgtgcacaccgtgctcatctccacccagcacgacgagaccgtcaccaacgacgagatcgccgccgacctcaaggagcacgtcatcaagcccgtgatccctgagaagtacctcgacgagaagaccatcttccacctcaacccgtccgggcgcttcgtcatcggcgggccccacggtgacgccggcctcaccggccgcaagatcatcatcgacacgtacggcggctggggagcccacggcggtggcgccttctccggcaaggaccccaccaaggtggaccgcagcggcgcctacgtggccaggcaggccgccaagagcatcgtggccagcggcctcgcccgccgctgcctcgtgcaggtgtcgtacgccatcggcgtgccggagcccctgtccgtgttcgtcaactcgtacggcaccggcacgatccccgacaaggagatcctcaagatcgtgaaggagaacttcgacttcaggcccgggatgatcagcatcaacctcgacctgaagaagggcggcaacaggttcatcaagaccgccgcctacggccacttcggccgtgacgacgccgacttcacctgggaggtggtgaagcccctcaagttcgacaaggcatcggcttaa

SEQ ID NO: 114796 - DNA, 471 bp, Zea Mays
atggaaacagaggaggaggtgaaagatcgggatgtggcaggtggtgagcaagccaggattctgagcgccatggccaccaagatcggcatggccatgcctggtgcaaacagtgacgacagccatggcggcagcggggacgacgctaagtcgagcaatggcgaagcggcccgtggtggcagtaacggtggagagaagcagggggatgaatccaacagtggcgggatacttagcgctgtggcttccaggatcggcgtggccgtgtccggcgccaacggggaccgcagcggcagcgctgaggatggtgccaagacgagcgctggcaacgctggtcacggtagcaagggcgaggagaaggggcgtggtgtgaacggtggtagaatagtcgagcagatcatttccaatctgccctcagatgatcaggcgcctgatgccgatgaagcttccttgctcatcgccattatcgaagattag

SEQ ID NO: 114797 - DNA, 344 bp, Zea Mays
taaggtacgagggcttcttattccacaagaacgaaagcacctttacattctttcatatactaggggtttttacttggaaaagaaaatgttccatactaaaggattcgggtccataaccacgagttccagtgcactagatcttgaaagttcaaatttaccaggggttgaaatggaataaaaatgaattgataaaacagtcctagaaaaaattctaccactgaaactttatgatattctaaaaagattggatagcaaagatttctcgttgtatctcctttctatgaaaggggtaaagccataagaatttataagcactagaaagtttgactttagttcgatttaga

SEQ ID NO: 114798 - DNA, 393 bp, Zea Mays
atggagcgaaggtggagggggagcagtgcatcgagcagaaggttcgcgacgcaccaggatctgttgggggcgggcgttgctggcgcggtagggactgcggccacagcagctttgcgggggcgcggcgaattcggggacagcagggacgagcacggcggcggggactgcgggcgttgcagctttgcgggcggattcggcgtgcacatcagctttgcaggggcgcggcggtatcggggacagcgggcgcgaggagggcggcagggactacgggggcgcggcggatttggggacagcgggcgtgaggacggcggtggggactgcggcggcgaggagtcacgagcgcgggtaattgcgggcgtggcagaacagaggagatgtgcatgcctacactaa

SEQ ID NO: 114799 - DNA, 315 bp, Zea Mays
atggcgggactcgtcgggaattcgtcaccgaacttggggacgccacagcagagccacctgtaccgtgggcaggatatgtgggcgtactatatccaggtaaaaagtcccctggcaccttcgctttgtcctccatacgattttgcggcattcagttttgaacttgaagcaccatggcgcgggacagccatggccggccatggctccgccatggtgggggctatccgtgccgccgcgttttccgtctggggaggtgaagaaggggggtttgaacagccgccgttggatcttatgctagcgcgccagattagaagctaa

SEQ ID NO: 114800 - DNA, 810 bp, Zea Mays
aaatgtgggtggcgagaaacgacgaggtcttggtgcgtgacccaatccgatcaatataatcagagtcagtgtgactgtgagcagagcaagcagtatagggcgagcttcagccatggaaaagagaagcaatggtagtgccagcctcgtcctcggccttctgatggccgcctccctgtcgtgccagtgccacggcgcgcgcgacgtccccgcggagaagcccctccggccacagaacgtgttcgggttcggcggcttctacccgggccccaccgtcaactgggtgttcccgggccccaacggcgtcaccccgcaggtcggcttcggcgggatgccgggctctagcgccttcccgggcggcggtggcgtggtcggcatccacggtggtgctggtgctggtgccggtgccggtgccgtggcgaagaagccgtgagaggaggtggccgtgtgtctgtgagcttgcgatgctttgtgagagtgttgtcagtacgtggcataagcgaagtctgtgtcttgttcttgctgcggctggctgtcgagacttcactctcgtacgtgtctcgtgtccctttttatcctgtagtatttgtgtgcgaaggacttctttctcatcatatggtagccggctgctagtgtacatctcgaaccccttttcttctcggcgtgtgtttattcagttctgtattgtatccccctatgttagcatggatgctgattagtacgtgtccttcagtaattcgctataatcaacacggtacatcattgttgcgcttacaagaacgtacagatttacatcgtactaatggtttttgc

SEQ ID NO: 114801 - DNA, 1179 bp, Zea Mays
atggctgggtctgaggcgtttgacctcttggaggacagcagacagctcacttcggcttcctcgctccatcccctgctcaagaacattgaagggggctccatgcgtgtggcttcccaagatgaggctgcccaacgtgcccccatccccaattggcgctcgctcgggtggttcgaagatggcgtcatgtgtgtgggttcccaagaacagagcgggcgcccccttcgccccattactgaagcgttgagtccccaaatgagtgatatcctggagattcgtctgtcccccaaggttgctgaggtccctatgatggagccttgtgatggggatgaagtggtccagactgctatgtcttatgagtttgggaacgtatcagataggagaattgaggggaaggatcatgtaggctcttttcagctgactttttctcagtcagagatacatggtagcctgatttccccttcagacctaagcttgagggccccttctgaagcattctcacctactgatgacacagctttgcacgtctatactagaagagtttgcaacaacagggagaatgcggatatgcctgcggatactgatgatgatccttcagctatttcacctaccctgataaaacggttcaagaagaataactcagataacagggcagatgaactgaacggccctcgatccccgggtacaactgtgatggtgggtacagatttaaatgatctagtctccagccttcttgtaacacctgatggcctctccttcatgctgcagagtgcccaggcttctgctggtgccccacaccatagtcgtcaccttgcgggggtagggattgaatatgacaaacaagagttatgttcaaggtccacaaaacaagcaatgaaggccctgaaagtgattggggaaatggagggaatcagccagcaagcaaaagaagactatctgaaagttttctctgaaaacttacctcttgctcatgttgaagcgccggcagctttttttggatgggaagtgccagatgaatttaagttgctgtcaaaaatgttaaatggatccaaagaaaaaattatttggaatgtaaggggtcttaattccgcatcaagacagagttctgttagaacattttttaatcttatggtgagatgcagggaatcaatcaaggaaaatgttggccatactaggagctga

SEQ ID NO: 114802 - DNA, 210 bp, Zea Mays
atggccacaggggagaacaaggcaggccttgcgcttgctcttgcccttgccctgctgctgacgctgctcgccttcccctcccatcttcgcctcatccaccaccggctgctgctgacgcacagcaccttgctctgcgatagcctcagggccagcgacggagaggacgggacgaccgcctcgaggctcaccttcccggcgcctgggtggtag

SEQ ID NO: 114803 - DNA, 1704 bp, Zea Mays
ggccgcagacggcggcgggggcggccgtgtccgcctggagggcgtacgcggcggcgggcgaggagagcgacgtggtggtggtgggcggcgggcccggagggtacgtggcggcgatcaaggccgcgcagctggggctcaagaccacctgcatcgagaagaggggcactctcggcgggacctgcctcaacgtcggatgcatcccatccaaggctcttttgcattcatcacatatgtatcatgaagcaaagagttcttttgcacaccatggagttaagttttcaaatctggaagtggacctcccagccatgatggctcagaaagacaaagctgtggcaggactaacaaagggaattgaagggctctttaaaaagaacaaggtgacttatgttaaaggctttggaaaactgtcatccccctcagaagtgtcagttgatttgattgatggtggtagcaccattgtcaaaggcaaaaacataataattgcaactgggtctgatgtaaaatcacttccaggaataacaattgatgagaagaaagttgtttcatctactggtgcactgtgcttgtcagagatcccgaaaaaactggtggtaatcggagcaggttatattggccttgagatgggttcagtctggaaccgccttggttcagaggtcactgttgttgaatttgccccggatatagtaccatcaatggatggcgaggtcaggaagcagttccaacgcatgctagaaaaacagaaattcaagttcatgctcaagacaaaggttgttgggtgtgataccagtggagatggcgtaaagctgacactggagcctgcagctggtggtgagcagaccatccttgaagcagatgttgttcttgtctctgctggcagaagcccatttacttctgggattgggcttgaaactcttggtgttgagacagacaaggctggcaggatccttgttgataagcgcttcatgaccaatgtgaagggagtctatgcaatcggggatgccatccctggtcccatgcttgcccataaagctgaagaggatggtgtcgcatgcgtagaattcattgctggaaaagaaggccatgttgactatggcacagttcctggtgtggtctatacacatccagaagttgcatctgttggcaagactgaggagcaggtgaaggctctaggaattgcctataatgtggggaagtttccacttttggctaacagtcgtgcgaaggccattgatgacgctgaaggggtagttaaggtgatcgcagagaaggaaacagataagattctgggcgtgcacattatggcacccaatgctggtgagatcatccacgaagctgtcgtcgccttgcagtatggagcatccagtgaggacgttgctcgaacatgccacgcacaccctaccgtgagtgaagccctcaaggaggcttgcttgcaaaccttcgataaagcaatccacatataatttctcattttttgtgtccaaactccaaagtttgtggtaattttgggtctgttggaaaaaaggcccctgattgtccttttgtttttgtcggcaatactgtgaattgaccctttgagttgtccatcttagcggggttttgtgcttccttggcttggtttatccatccaaataataacctgatactatgttttacattttatgcccatgaaccattgatggatatacatttctaaggttccagtaa

SEQ ID NO: 114804 - DNA, 441 bp, Zea Mays
atgggagaggtggcgctggaaggtggagcttgggcgagcaaaagggaaggagcgagctcgccacctagggacgaggcaatgggaggccatggagcttgcttgcttgttgcatacatgctgccaagtacagtggcacaaccacacagtgcacactcgcataggccacagtgtcacagactcacagttacaggctcacagccacacagattacctagagagagcacgccgattgcagagttagagtatcagctcagagagcaggccagcacgagtacaatagggggctaccgcgtgcaggcagcaggacgcagccggaggtgccagcgcccaccagagcgccaagctgtggagcggttaagcgcgggaggtgcgaccgtccaccatcgtgtgctcgtgcgcgtgcaggtcccgatgcgggactggatggaggagcgattgtga

SEQ ID NO: 114805 - DNA, 2167 bp, Zea Mays
cttgaccgacgctcgagaagtcgagatagagacaaccggcacccgccgatcgctcgctggtgggatgaagaaatgctccggcgtgctcttcatcctcacactcgccgtcgtgctcttcctcctctcgccgtcgccctcccccactccaccccccaacaccgcacccaatggcccgatcaccgacctcctccccaccctccccggcctttcggacctctaccctcccgctcccaactccactgcacatctctcctggggcctcctccgcccgctcctctgccgctccgacgcgctcccgggaacctctgcaggcgtcctcgaggcagccgaagcctggcggaatctcaccctggctgtcaccgccgcggcaagcgaggaggaggcgcgtctccaaggactccgctgctcatcgtccgtgggaggggatctacgcacgggacgtgccacactcccctgcgggctctcggagggcgcggcattgacggtggtcgggattctcagggagggggcggccaagttctgggtggaaatgctgggtgcgaacggtgaggttgtgctgcacgtcaatgtgagcctgggagccgcgggggtgttggtggagcagaattcctggacgccagaggaggggtggggggagtgggagcggtgcccgcctgttggtgatgtgggcagcagcaatagcagcttgcagctaagtccagtggacggccttgttcattgcaatgagaaagtgggtgcaaggatcgtccaggagagtaataatactgtggtaaatattactgggaaccaacctgaagattggcagagtcaaacaggacatggtcagttaagtggacgtttctcaattgttgaaggagagccttttacagtaacactgtgggctggtgtagaggggttccatatgacagtaaatgggcggcatgagacatcatttgcctatagagagaggtcagagccatggttggtagcagaagtcatgttttctggtgatttggagctcttgtcattcttggctaatgagttaccagtatcagaagatatagacatggaaaatgttgcagttttgaaggccccacctctgccaaagaagcaaacttttctgctggttggtgttttctctactggaaacaacttcaagcggcggatggctttgaggcgaacatggatgcaatatgaggctgttcgctcaggcgatgtagtagtccgttttttcactggtcttcacaagaatgagcaagtcaatatggagttatggagagaggctcaattatatggtgatatccaattgatgcccttcgttgactactatactttgatcactttgaagaccatatcaatttgcattttcggaacaaaaattgttcctgcaaagtacatcatgaaaacggatgacgatgcttttgttaggatcgatgaagtgatctcgagcctaaagaagagcaattccaatggccttctttatggtctcatttctttccaatcttccccccacagagacaagggtagcaaatggttcatcagtcggaaggaatggcccttcgacatgtacccgccatgggctcatggccctggatacgtaatctcacgtgacatcgctaagtttgtagtccaaggccaccaggaactgactcttcagcttttcaaacttgaagacgtggcaatgggtatttggatccaacagtacaagaacagtgggcagcaagtaaacattgtgactgatgaccggttctacaatgaaggatgcgaagctgactacgtccttgcccactaccagaccccgaggcttatgatgtgtctgtgggagaagctgaagacggaatatcatgctatatgctgtgaatagcatccgaattgcaagtaggaggcgatagaggaatggatagatagaggaatggataggttagccttggttttgaagaagacatttgctccgattttgacgctgtgtggaaaattgttgggactatgcgcaaaaagcctgtaacattgggttctcacttctgttctgtggcctgtgggttcatgttctttgtttttgggtagaaaatgttaatccgtgcaacttgatggatgttgtaaaaagagtgttgtaggacatttgagagagtttatctggcacaacctctcaagttattggatccatatacacctgcactcgtcctataga

SEQ ID NO: 114806 - DNA, 1736 bp, Zea Mays
atctccgacccggccccactgacgggacccactcctcggtttcactacgaccctcgcccaatccaggccccgcaagtcagtgaggcgaggccggacgaatggcaagttgggcagcgcggtccgaggggcgccgccgacccgaccgtgctggaaacttctaaccaaaacccctaatgtctcgaggtggcgcaccccaacaaactggctccgcctccttcctcctcccctccggcctccgccgctgccttcttttccccgtgcgcatagtcgctcgcagaggcgccgacatcacttcgtccggaccggaaacacgcacgaagtgaggaccagcaccaaacaccgcgccgcttctcctatatttgttcctctcccggagccgcatcgtgtgtaagcgtgtggcggatccatggcagcggcggcggatacctcggaggcgtccgcggcaggaatcgcgctcgcagaggccaatatcaactgggagaggttggacaagacgaggtttcatgtgattggagctatcctgttcacggcccagcaaggtgctctgcacccaacagctgttgtgaagactaggatgcaggttgctgaaggtgggcttgcacatatgtctgggtttgctgtttttaggaggatattgagaagcgatggcatccctggcattttcagaggatttggcaccgctgctgttggagctctgcctgggcgagtgctagctctaacatcactggagatctctaaagaaatgacatttaagtattgtgaacattttgatctgtcagaggcgtcacaaattgctatagcaaatggcattgcaggtctaatgtcgagtatctgttcatgctcatactttgtgcctctagatgtgatttgccaaaggctcatggttcaaggattgccagggatggcaacatacaggggcccattcgatgtgataaataaggttgtcagaacagaagggatccgggggctttatcgaggttttggtatcactatgttgactcagtcgccagcttcagccctttggtggagtgcatatggtggtgctcaacatgctatttggaggagtttgggttatggaaatgactcacaaacaaaaccatctcaatcagaacttgttgttgtccaagcaacagcaggaacaattgctggtgcttgctcgtcgattatcaccactccagtagataccatcaagactcggcttcaggttatggacaactatggtaaaggcaggccttcagtcatgaaaactaccaggctgctgcttgatgaagatggctggaggggattctatagaggttttggaccgaggtttcttaacatgtctgtctggggcacatcaatgatcgtgacatatgagctcataaaaaggctatccgtgaagtctgaatgacacattttggtggattctcaactaaggtgatttactgttcaaaatcatctatacagatataggcaatcaagtcagtttgcctcgcgaagagtataggcgagtattatgatcgggtgggatgcagaattatggtttagttgcataggataacatgcttctgtatgacacttgcgatgtatatatttttgctaaagagccctcctttcaggatgtttgtagccagcttcttttggatgtaacagatggaggccaagacgcctgttctgtctaatgaggcacattatatgtagctgtactattcgtggtccaacaaaattttggcaaagaactctgcatccttttcgtt

SEQ ID NO: 114807 - DNA, 1689 bp, Zea Mays
atctccgacccggccccactgacgggacccactcctcggtttcactacgaccctcgcccaatccaggccccgcaagtcagtgaggcgaggccggacgaatggcaagttgggcagcgcggtccgaggggcgccgccgacccgaccgtgctggaaacttctaaccaaaacccctaatgtctcgaggtggcgcaccccaacaaactggctccgcctccttcctcctcccctccggcctccgccgctgccttcttttccccgtgcgcatagtcgctcgcagaggcgccgacatcacttcgtccggaccggaaacacgcacgaagtgaggaccagcaccaaacaccgcgccgcttctcctatatttgttcctctcccggagccgcatcgtgtgtaagcgtgtggcggatccatggcagcggcggcggatacctcggaggcgtccgcggcaggaatcgcgctcgcagaggccaatatcaactgggagaggttggacaagacgaggtttcatgtgattggagctatcctgttcacggcccagcaaggtgctctgcacccaacagctgttgtgaagactaggatgcaggttgctgaaggtgggcttgcacatatgtctgggtttgctgtttttaggaggatattgagaagcgatggcatccctggcattttcagaggatttggcaccgctgctgttggagctctgcctgggcgagtgctagctctaacatcactggagatctctaaagaaatgacatttaagtattgtgaacattttgatctgtcagaggcgtcacaaattgctatagcaaatggcattgcaggtctaatgtcgagtatctgttcatgctcatactttgtgcctctagatgtgatttgccaaaggctcatggttcaaggattgccagggatggcaacatacaggggcccattcgatgtgataaataaggttgtcagaacagaagggatccgggggctttatcgaggttttggtatcactatgttgactcagtcgccagcttcagccctttggtggagtgcatatggtggtgctcaacatgctatttggagaacttgttgttgtccaagcaacagcaggaacaattgctggtgcttgctcgtcgattatcaccactccagtagataccatcaagactcggcttcaggttatggacaactatggtaaaggcaggccttcagtcatgaaaactaccaggctgctgcttgatgaagatggctggaggggattctatagaggttttggaccgaggtttcttaacatgtctgtctggggcacatcaatgatcgtgacatatgagctcataaaaaggctatccgtgaagtctgaatgacacattttggtggattctcaactaaggtgatttactgttcaaaatcatctatacagatataggcaatcaagtcagtttgcctcgcgaagagtataggcgagtattatgatcgggtgggatgcagaattatggtttagttgcataggataacatgcttctgtatgacacttgcgatgtatatatttttgctaaagagccctcctttcaggatgtttgtagccagcttcttttggatgtaacagatggaggccaagacgcctgttctgtctaatgaggcacattatatgtagctgtactattcgtggtccaacaaaattttggcaaagaactctgcatccttttcgtt

SEQ ID NO: 114808 - DNA, 1340 bp, Zea Mays
cggacgaatggcaagttgggcagcgcggtccgaggggcgccgccgacccgaccgtgctggaaacttctaaccaaaacccctaatgtctcgaggtggcgcaccccaacaaactggctccgcctccttcctcctcccctccggcctccgccgctgccttcttttccccgtgcgcatagtcgctcgcagaggcgccgacatcacttcgtccggaccggaaacacgcacgaagtgaggaccagcaccaaacaccgcgccgcttctcctatatttgttcctctcccggagccgcatcgtgtgtaagcgtgtggcggatccatggcagcggcggcggatacctcggaggcgtccgcggcaggaatcgcgctcgcagaggccaatatcaactgggagaggttggacaagacgaggtttcatgtgattggagctatcctgttcacggcccagcaaggtgctctgcacccaacagctgttgtgaagactaggatgcaggttgctgaaggtgggcttgcacatatgtctgggtttgctgtttttaggaggatattgagaagcgatggcatccctggcattttcagaggatttggcaccgctgctgttggagctctgcctgggcgagtgctagctctaacatcactggagatctctaaagaaatgacatttaagtattgtgaacattttgatctgtcagaggcgtcacaaattgctatagcaaatggcattgcaggtctaatgtcgagtatctgttcatgctcatactttgtgcctctagatgtgatttgccaaaggctcatggttcaaggattgccagggatggcaacatacaggggcccattcgatgtgataaataaggttgtcagaacagaagggatccgggggctttatcgaggttttggtatcactatgttgactcagtcgccagcttcagccctttggtggagtgcatatggtggtgctcaacatgctatttggagcaggaacaattgctggtgcttgctcgtcgattatcaccactccagtagataccatcaagactcggcttcaggttatggacaactatggtaaaggcaggccttcagtcatgaaaactaccaggctgctgcttgatgaagatggctggaggggattctatagaggttttggaccgaggtttcttaacatgtctgtctggggcacatcaatgatcgtgacatatgagctcataagtaggtcatttttcagtaaatctattatctatatatttcagtctggaaggtctactaacttttttctttcatattccgaacctgcagaaaggctatccgtgaagtctgaatgacacattttggtggattctcaactaa

SEQ ID NO: 114809 - DNA, 157 bp, Zea Mays
agaagtctttgttaagaaaacaactgccagaaatattggtacgaacttggcagttcgcaatatctttttatttttaccactacccatcagttgtagttatattttaactagagaaatacttctcttatgtttgtgatgcaaaatttgcttatttttt

SEQ ID NO: 114810 - DNA, 271 bp, Zea Mays
agaatggtgtcgtgccctgggtccaagaaggggcagggtgctggaggagtgatgagctgctcgatggcgatgcgcggacgacgaggaagggcccctgatgcagcgagaacgagaaggtcgtgttcatcagcatcgtggtccatgcgtggttattgtgtggaaattttcatgacaagaaagctaatataaaggggatttacttgcctagtccagatctgccagctttccttgatatggtttactgaaagatctgacgtgccttgtcaaacat

SEQ ID NO: 114811 - DNA, 126 bp, Zea Mays
tatggaagcttcaattggtttttcttttctgcccttcagttcatctctattacaagctatttatgccaaatcattgggccggctaaacctaggcccaaaccaacaatatcactgctaatgtcttag

SEQ ID NO: 114812 - DNA, 2657 bp, Zea Mays
aaaaaatattacgcgcaccccgacaccattcctaggacgaggcggtgaagacttgggtgctctgcaagtccacgcccatcctcggctcggcggcgacacgcgcaaatcgagatctagaacataccgatccagccggcgagatggacatcgtggtgggtgcgctgtcgggcatagtggacgcgttgccggggaagctcggcgagctgctggagcaggagtatgcgctgctctccggcgtccgcggggatgtcatcttcctcaaggatgagctatcaagcatgcgcgccgccatccactactgcgagtccctcgaccaccacgactcccagaccactggatggatcagcctcgtccgcgaggtcgcctacgacatcgaggactgggttgacctcttcagcatccgcgtccacggcggtgcccaatccacttccgggtttcgtgcctggcttagccgcagcgtggacaagttaacggcgctccccgctcgccacaccatcgcgagcgagctccagggactcaaggagcgcgttcttgagattagccggcagcggaaccgctacaggctgggccaaatggttggcaccacctcgcaacatccccatgatcccagactttctgcgctcttcgtcgaccccggccgcctcgtcggcttcgatgggaaggtggaggacgtgtccaagactgtcatggacgccggaggtagtaatgggctgagaatcgtctccattgtcgggatggccggctcagggaagacgacgctcgcaaatgctgtgtaccggcgtctccaagcagacaacaccttccagtgctctgctttcgtctccatcggaccgaagccggacatggtgaagacagtcaaggatatgctctcaagactcggcgacggccaccgaggaggcgaggacattagccaactcatcccgagggtcagaggaatactggagaagaaaaggtacctcgcttggatcgatgatatatggagtagtgaacaatggggagtaataaggtgttgttttccagacaacagtcttggtagtaggataatcaccacatcaaggaatgatgcgttgcccaccaatcatcattacggttcaagcaaatttgtctacaagatcggcctccttactgacaatgaagccagggagttgtttctgaagaaagctttcagcagccggaatgactgtccacaacatctggtggatgcttttaccaaggttctgagaaggtgtgctggcttgccacttgctgtggttagcgtagctgccaagttagcacacaagcaatcaagagaagaatgggagaagcatggattgaacttgctatacagctcacattcagatgggtcagatgggctgaagcaaatactccatcttagctacagcgatctacagccacaactcaggtcatgtttgctgtacctgagcatatttcctgagaactcagaggttgagacagatcgcctagtgaggcgatggattgccgaaggactcatcgctgcaagcaatgaggatacggcaatcagttccctcaatgagctaattgggagaaacttggtacaaccgttggatctgaaccatgatagtatcccaaggtgttgcagagtccacccagtgatatatgatttcattgtttgcatgtcgatgcaagacaactttgccactgtaacggatgctcaacatgtcccaatcaacaacaaaactgtccgtcggctgtccctgaatttgaagagcaacagcaagcaagatcagcctgcagcacgaaatgagactactgatttgtctcatgctcgctcagtcactgtcttcggtcacgctagtgccacccctcatctgactgatctgaaagtggtgcgtgtgctggatctcgaaggctgcaaaggtcctgtgtgcttggatggcctatgcaagctggtgctgctgaggtacctgagcctcagaggcactgatgtcagtgaactgccagcggcaattggggatctaaggtgcttggagacacttgatgtgaggtcaacgaaggtggaagagcttcctcccagtattgtaaggctgcaaaagctaatgcatttgcttgctgggagtgccaagctgcctgacgggatggataagatgaaagccctgcggtcattgtcatgcgctgctaccacaaagagctctgccaacgtcgtggaagagctcagcaagcaccataacttgagacaactggaactgtattactatgctactgaaacgcctgggaatgagaagcaaatcaagttccccgctgatgggctccagactgtgaaacaactgtgcatccggtgcacatcaccatcggtgacatttgagccccgtgtactgccaaaggtccaagcacttgtcctgagattcgagaaaggccgtgctgatgacacgattggcgtgtctggcttagagcatctgtcgagcctcaagcatttggtacttgagtttgagcagcatgatgcgggtgccatggcgacagttactgcagtgaggatggctgctgaggggctccatctagatcatcaatatataactctaaaggtggatgggaaaaagtactgaggctatcttcagcaaaggcgtgtatataaacgtagaaagcactgttttacaatatatattacacggtttacaaagtagaatatgaaatagtgagtc

SEQ ID NO: 114813 - DNA, 1233 bp, Zea Mays
gggattgttacatcagaaggtgatgacttaatatctgatgcaaataagctgcctctccgaactcaagaagtgctttctagttgacatgcattggtatttgttgacaacaagctggttggtgatcccctagaaaaggctgctataaagggcttagactggatctacacatctgatgagaaggccatgtccaaaaagcctggtggtcaacctgttcaaattgtgcacagataccattttgcttctcacttgaagagaatgtctattatcgtctgtattcagcagaaattttatgctttcattaagggtgcaccagagaccatccaagagaaatttagttgatttacctgctgcatatgtggagacatataagaaatacacacgacaaaggttctcgggtcttggctcttgcatataaattgcttcctgagatgcctgtaaagtttctgttgatatttaatcatgtttgcctatagccattcttatctagtatttctgttattcttttgtcagtgtacttccataaaagcccttttgccaaaacaaagcaaaaaacttctagattctttgatgtaaagggactatacaaattctaactgtccatcattgtggttgtgaagataatagctttcaaaagataatagctttcactttaagatatgtattgattttaaacactgatgtgaatgagttcgacaaatttgtagcaactagcacaggcccaagggatacacgtcccagtgccccccacctcctgttcattatccttggtcttcacctccacctatacctacatctccatctatcgaacatcagacccctccagctaccttgccgacgcatgaacaagaagacgggttagactttgtcgaaaccctcttcacaagtggaggtatcgaccatcactcgtcacgataacccgatggtgatcggcgaccgtgagcttccatgttattgcgttctgatacttgagacttttattatgactatgtatgagatattgtctcttattagtactggatgatgagatgtgtcttattatgactatggatgagacttttgtgatataattgatgagactatggatgagacttttgtgatgtaattgatgagactatggatttaaatattgttatgtgattgtgtgtgagatgttttatgtgacaatatgttgtgctatatagctgttgatatatttattatgttgtggaatgtggtgtaaaataaaaataaaca

SEQ ID NO: 114814 - DNA, 722 bp, Zea Mays
cccctcgcgtaatagctgacgggcaggtatgcactcctttttatattgattgaataacttgtagattggtatattttcaaaaaagtaaattggtatgatgtttgatgtatatcaatgtatgactattctattttctctttgtatttcattttgataagaaacatcaatattcatgttgtagcaacaaacgaaataatgtacaaaagcacaagattctcacttcagggttaattcacagtattacacatcggaatgatcctctacttttgttaaggccattttttcttgtattgatctaggtcccaacgttttctagtcctccttatgtgagcaacttggaataagcaagatcagaaaactacctagaagaaaggattattcaggctctcatacatgccagtgatttccccctgtcgattgtgcttgttggagtaggcgatggaccatgggataatttgattcatttcaacgttaatcgatggtggtttgataagtttcaggtgcatgccaattaggatatgtcagtttcaataagaggatgtttcagtcttgagcttaatttgatgtatcctccttttgtgcccatgtgttccttgcggtttgtggatttcactgacattatgccaagggaaatgtcacaattcgataaggaggacgaattcacatgggaagcactaatgaagatactagcccaacatgatgcaataatcagccagaatgtt

SEQ ID NO: 114815 - DNA, 537 bp, Zea Mays
ggttttatgggggattgaggcgggagattcaggatattgttgactataaagaatatcattctatacaacgcttgttccatatttctatgttggcagaaaaaattgcagggtcgtcaacagcggaggagcagcaccttcgcgccacgacagccaccggtgccagccaaggcgtcatcctcttctggcgtacggacgtccacaccttcctccacggtgccttcgggtgttacagcaaaacctgctacgaccacctcttccacaggccgctcctccgacatcaagtgccaccgctgccagggactttgccatatttagcgagattgccccagcaaacgggcatacattgctactggtgatggtgggtatgttagtgcttctgatgttgaagatgaagatattgttggagctaacattgtagagacttatcatggtgatgaagaggttcttggtacaacagcgaccgagacctataaggccttgattgtgcaacgagctttgagtgccacagctagtgatgacgacaacagacaatgccac

SEQ ID NO: 114816 - DNA, 152 bp, Zea Mays
tgctagtggccacctcatgcgaggcgtgaccggggggggcgcgacgaatcgctcgccggtgagaagaccacggagaatccgtacgcgcgctcggaccgtggagactggcaccagaacggcgggaactgctcgccggccgtcaccctccgccg

SEQ ID NO: 114817 - DNA, 2725 bp, Zea Mays
tatattgtccaacaagaaggaaattctcttctaggacttctggttaaaggcatggtaactgacttcagtgaggaaatgcactgccagtttctagaaattctacgcatattgatggattcttttactacgtctggagcacatagagacgtagttattgagattttctacgaaagacatcttgactatttggttgatgtaatagcatcctcttgtcccccgaggagcttgtctcgatcatcatctaactcggtacatgttggtggaaatgctgaaggacactgtatcaagcctgagattttgttaaatgtttgtgaactgctgtgcttttgtgttgttcatcatccctacagaattaagtgtaattttcttatgaacaatgctatcgagaaaatccttacattgactcaacgaagggagaagtttttggttgtagcagctgttagatttatgcgtactattatatccagaaatgatgaccatctcattcgccatgttgtgaagttcaacttgctgaaaccaataattgatgtctttgttgacaatggggagagatataacatgctacattcaggagtactcgaattgttggaatacatacggaaggaaaatataaaaactctcattatctatgctattgagtctttctgggatgaacttgccatctttgaacactttggaagtattcaggccttcaaactcaagtatcaacagtacctggagagcgctgaaccaaggttgaatgctagtgtgcctgacatgagaaagaaggcagaacaaagaggtcttgagaaggaagaggaagactacttcaatgaggacagtgatgaagaagattcaggctccggccggcgggctaaacatgcacagaaccaaaataacaagcctaagtccaaggtccccaatggaagtgaagctgatgacactgatggcgcctctaggcctaaatctgctggacttgtggactatgacgatgatgacgatgaggacttcaatccaccaccaaaggagccttctaggcctgcagaggatgatgtgcccttaaacatatccccgttgaagcggaagccagtgaatgcagtggatgggaaacattcagacggagagggtcgcaggaggcaaaaaatagaaactagaattagttgtgctaaaattgctgctgttactagtacagctattaagcacacagatctacaaaacaagtatgcttcccacttgcttacgtcagccacaccaagtactgaagccaatggtatttttagtgaacatggtactaactatgaggagcaacaacatcctatggagaacacagaaacttcacgacaaactggtggtgattgtataaaagatgtgggcagtatgtctcccgagaaggccgtaaatactaccaatacaagcgattcggagccttattcagtaagatgactactacacagctggttggtccatgtacccatcctgtgctgtggtcaacaggaaggaatcagaatgtgtttggctccaagcgctgaatgcatcgatatcatgctggaaacatgattggaggtgacatagattgcagctacctttacatctcaagtaaaattccagttacccctttttgcgcctgtaaagttaattttccgcaaggacagatctgacaaacatgataataggaatgactgtagattcgaacattggatgggccttgctcctgctgctgcgctcgctattgtatcggtttatgagccaacgtagtagtgaatatgtgccttcaactttatttttctccacaattattgatactgttgtaaaacaagtaggaaggcatagtttatgttgaatagcgtttttgcaagactttgtgctaactcacctatatgattgtaatttgttggttaatagttttggtcggacatgttacgttggataattaatctggtcttgtgatagaataatttatgcagaattttttctttgttaagccaaatatgttgtgcacatttgacacaaactactacggtagaatttcagaagtgaataatgttcgatgtattgagatctgggttatggagtttatgttgaatagcgtttttgcaagactttgtgctaactcacctatatgattgtaatttgttggttcatagttttggtcggacatgttaccttggataattaatctagtcttgtgatagaataatttatggataattttttctttgttaagccaaatatgttgtgcacatttgacacaaactactaaggtagaatttcagaagtgaataatgttcgatgtattgagatctgggttatggatgacaggtgtacttgcgagaattgcaatggtatcctactgctccagaacaggtaaacatggtcactccatccgcaaagaagaatcatgtgttcaaccagtgtcaattcaacagaataaagaagaatcatgtgttcaaccagtgtcaattcaacagaataatctgttcagcagtttgctttatccgtgctcattgtactacgaacctccgccgtctacttgaatatcaagcctccacgggcagcaaagaatggcgcaaattattgagactcgacagcaatgagcttgatcagtatgttcagggacggtccggaggtgtccttgagggggtcgccgatgacggcagctttctgagcgtgcgacccaaccgaggctatatctaacaaactgcactatgtaaacagtctacattgtaaaataatattttacacggtt

SEQ ID NO: 114818 - DNA, 586 bp, Zea Mays
atggcagaggagaggtgggccttggttggaggacaaggccttgatggggagaagcagacagaggcaggagaaaaaatgagtgcagggtggaaaaaggcgcgtgtcaaagtataccgtttggctgatggtgggaagtgggacgatcaaggaacaggttatgtttctattgattacattgagggttcaaaagaactaggtttgactgttttagatgaagatgacaatgatacactacttatgcacaacatcacatctgacgatatttacagaaaacaagaagaaacaatcatttcatggagagatcgtgaagcagcaacagacttagcgttaagctttcaggaagctgctggatgctcctacatatggtgatggatgcaagagctatggtgcagttaccaagtttttgttcaattactcccttttgatttatttttgtgttctttgttggtgctgtgcagggaacacatatgcgatattcagagaaaccttcagttcagtaaccttggtggtgagttttttaaaatcagcggtggctgtttattcataccacacatatttgcatgctcttttcatcttaagcatgtcc

SEQ ID NO: 114819 - DNA, 225 bp, Zea Mays
tttacaagacattgtcatagtaccactctacatgaactatgaaggtgcatttgtgatgttgataaattccagcctttgcttagccacgggtgtgattttattaatggatgcttttttatgtttgcattgatttatctattggaacttgtctattataattttggtcattggacatgtaaattttgtaaaatatgtcatgtgaacatctgtatggttgaatgagat

SEQ ID NO: 114820 - DNA, 270 bp, Zea Mays
atgagctcgtggtgtcgagagccggcagctgagcagagtttaacacaagtgagggagatagctgcgttcagcggtagcgcgtcaactgaggacaagtacgtagtgatgcacaacggtaaagcatcgcgaaaaaatgacgttcttgagctggagcaagatcaggacagggaggcgctggtcgagttcgagcacaaggatgagacagaaacaaagagacacgccggcgtgaaggagctgggagacgtcaatttaagcacgacggcgaggtga

SEQ ID NO: 114821 - DNA, 267 bp, Zea Mays
gtgctcgctgagtgttgtcggttgtaccttagcactcgtgcttgccgctggctcgcgttaacgctcgcgcgcctgcttgttgtcactgcgtcgcactcgctcttcgtccatcgggcttcacacgtgttaacgtttgtcgtggagctgttgaatccatcctcccttgctcgtgacttcgtcgtcgccagagccctcactggattcgtgtcctcgccagctcactctagacacaatctcgtcgtcgttccgtgcgtcatcaagaaatcc

SEQ ID NO: 114822 - DNA, 267 bp, Zea Mays
gtgctcaccgagtgttttcggttgtatctcagcactcgtgcttgctgttggctcgcgttaacgctcgcgcgcctgctcgttgtcactgcgtcgcactcgctcttcgtccatcggacttcacgcgtgttcgcgtttgtcatcgagctgttgaacccgtcatccctttctcgtgacttcgtcgtggctagagccctcactagattcgtgtcctcaccagctcgctctagacacaatctcgtcgtcgttctatgcgtcatcaagaaatcc

SEQ ID NO: 114823 - DNA, 132 bp, Zea Mays
ttccgaaaaatttaccaaatcaaatcctgtcaaattgttgttatcaatcctaattattcgatccatttttcgctaaaatctggagttagaaatatctgcaaaattctaaaaacaaaaaaagataaaagaaaa

SEQ ID NO: 114824 - DNA, 124 bp, Zea Mays
gttgttcttctttggcgctcatatgagacgcatctgggtttaccccttaaatccgggtgtaacaatatttgcatttgaattcaaaggataaaataaaaaggaaaagggaagcataatttagaaa

SEQ ID NO: 114825 - DNA, 87 bp, Zea Mays
aaaaaaaactgtgcatttttacattgcgaatgtgtggaaccagctgacttcttcactcagcagggcatacagccattaacgcagtaa

SEQ ID NO: 114826 - DNA, 144 bp, Zea Mays
atggcgatggcaagttggaacagggagagacggcgtgctcatctactggaaggggagaagctcggctgggagaggcaagatgtaaacggactgaaccagactacatcggattcgacattttactctgcggctgatccctattga

SEQ ID NO: 114827 - DNA, 1224 bp, Zea Mays
atggttcagcctcccggaagaaggtccctacctgactggagatccggcctgccagaggatctcctcgagtccatcgggaagcgtctcgcgtcaggccacgacgcggcggccttccgatccgcttgctccccatggcgcgccgccgtcccgttcgcgatcttcgggccgctcctgctactcccgttcgacgccgactcggaccgcgttggcttctattgcgtctcggagaaaaaggtcttctccaagacgctgcccgacgtgcgcggcaaggtcccgtgcggctcgtcgtgtgggtggctggcgctcatggacgaggctgcggccgtcacgctgctgaatccattcgctggtgctggtgccggtgccggcgcgggtgcccgccgcattgagctcccgccagcaggtgaacatgtcgcggcggcgtcctcatcggaacccgtgtataaggtccacggccggtgggtcctccgttccaccgacgactacggaggagacatagatgcaggcagagtcatcaagctacaagacatgagggacgtgtttttccgtgagatcgtgctctccgcgccgcctgacgccggcagcgagtgcgtggccatggccatgctcgggtgctccacggaggtcgcgttctgccgggttggagtcgacaacgcatggacgctgctcgacaccaaactggacttctccgtggcctccatcgtccactgccaagacaagttcttggctatcgactacactggagagatctccgtcttcagcagcaacgccggcgcatggacgctgttgccatcgctgtcgccacctgcggggctctgtcaccggagctacctggagtcaaacggcgagctgcacattgtgggtgccatggtgagcacgtcccacgagacgcagacgttcacttacagcagcgcgatctacgcttgcaacctccacgaccgtacgccggagtggtccagggtgaaggacatcggtgatcagacactgttcgtgtctaagcatttcaacggaagcttcagcggaacaagtgtatcggagtacaaggagaacacaatctacttctctgaacccttgtatggggatccgtacgacatggtgcatcgtttggagatcgttgatgttgttaccggcagatctgaagtgaagcctgtgcacgagaagatgcagggttccgagattctaggttggattcgacccaatctgtggaagggaggtacgtgttga

SEQ ID NO: 114828 - DNA, 1572 bp, Zea Mays
atggatgctttcatggggtcagtgctgggtgccctcctggccgtgctcgcctccacgctgctgatcggagcgctgttctttctggtgtggaagccctacgtcgtcacccggtggtttcggggccagggcatcgggggcccaagctacaggttcctcgtcggctccctgccggagatcaagcggatgaaagccgccggcagcaagatcacactcgacgtcggctcccatgacttcgtccccatcgtgcagccgcagtaccgtagatgggtatccgattacgggaagacatttctgtactggttcggcgcggtgccgaccatctgcgtcgccgaggtgggcctggtgaagcaggtgctcgcggagaggacaggcctgttccccaaggactacatgaacgacagcatggaggtactccttggcaagggtctcgttctcgccaacggcgaagactggaaacgccaccgcgaggtggtgcacccggccttcaagcccgacaagctcaagacgatgtcggtggtcatggccgacctggtgcagcggatgatgcagcaatggcgatctcagatacagcgggccagcaaccatgaggctgaaattgaactcagcagcgagttctcggagctgacttcagatgtcatcgcgcacacggccttcggtaccagctacaaggagggtaaggaggtgttcgtcgcgcagaaggagctccaagaactcacattctcgacatggcttgatatccctgctcctgcttgtctaaggaaactgaaattgccaactagcaagagcagccgacgagttgaagagctggacaagaaggtgaggagcatgctcatggcgataatcgaagggcgccttgccgcgaggggcaccagtggatacggcaacgatctgctcggcctgatgctccaagcgcgcgctctggagcaagaagggcaccagatgctcaccacggaggagatcgtggacgagtgcaagaccttcatcttcgctgggcaggacaccacctcgcacctcctcacctggaccatgttcctgcttagcaggtactctgagtggcaacacaggctgagggaggaggtgctgagagagtgtggcgatgcagtgccaaatccggacacagtcaccaagctcaaactggttaacatggttcttctcgagtcattgaggctctacagccccgtggtgttcataagaagggccgtaggctcagacatcctgctccgcagcacgagggtgcccaagggaacaatgctgtcgataccaattgcattgctgcacagggacaaggatgtctggggccaagatgctgacgagttcaaccctgacaggttcgagcatggcgtgtccaatgccgctgccaaacaccccaatgccctgctgtccttctcccaggggcctagggcttgcatcggccagaacttcgcgatgcttgaggcccgtatcgggatcgccatgatccttcagaggttctcgtttgagctctcgccaaactatgtccatgcacccaaggaagcggtcacccttatgcccaggttcgggcttcccatcatcctgaggaaccttcacgattga

SEQ ID NO: 114829 - DNA, 207 bp, Zea Mays
atgggcgaggaactccaccacgccactgcaaccacgcgctgcgccgccgccataggttttcacgtgcgggctcgctcgagacagtggatccagcgcgggattctgttggaattcggtcggttcatcgcggagcatcgaaggagagggcatcgtcgcaattcaccccgtgtcgtggccaaagacctccaagccattattcctgggtaa

SEQ ID NO: 114830 - DNA, 322 bp, Zea Mays
tgtcactttgtgtctgtgtgtcttcttttgtgtgagacctgaactaagaactatgtgcttgtgctgtcctttatttataaattgtgttctgcacttgtattactgtcctatctacttgtgttgtaattaccagctgctgcctgctgatatggtgtgctcaactgctcatgaatgggaggctgctgaaatcatccagataagtcacaatttagtgttttctatttttttgatgaacagctagctgtctattgactaatttactaactactagctgtcaaaatgtgttacagccttgcaggagctaggaacatgcaagagtaag

SEQ ID NO: 114831 - DNA, 2181 bp, Zea Mays
atgatagcctgcggtgtacaagtgaaaggattaaggatgtcatcagaaactgcagctgcaccttctgaaactgaagcagctagagcgaatctcctaaaaagaaattcagatgatgttggatgggaatatggtgttctggttgatgctaacaacaaagacaaggtgaagtgtaagttctgtgacaaggagatgaggggagggatttataggttgaaggagcatcttgcccatgttggaaagaatgtgaagaaatgcacgtctgcaacaccgcaagctctagaggctaaagagaagtgcaagaaagcaatagaggctgcaaaaaaggaagagggaggagaagactgttcggttggagaggagttagaagaagtcacttgtgttggaagctcacaacctcacaaattagggccaattgacaaatggacacgtgctattgatcctactaaggctgattctttcaaacaacagcagctgaacaaggaactgtggaaagaaagagagcatgaggtgtacaagtttattgcaagatgggcctataatcgtggaatacctttcaatgcatgtgacaatgatgagttcaagcaaatgtgtgaagcaattggacaatttggaccaggacttacacctccaactcaagatgcctttcgaggtagtttgctggaagaagaatatgaaagaaccaagtgtttgctgcaggaacgtgaagccgagaagatgaaaaatgggtgctctattatgaccgatgcttggtcagataggaagaggagaagcataatgaatatatgcactaattgtgctgatggaacctccttcattagctcaaaagagatgtcagatgtgtcacacacaagtgaagtcatttttgaattagtggacaaagcaattgaagacattggtgaagaaaatgtggtgcaagtagtcactgacaatgcctctaacaacatgggagcaaagaagctattgcttgtgaaaagaccacaaatattttggacctcttgtgcagctcacacaatcaacttgatgctccaaggaattggcaacttgcctcggttcaggaaagtgattgaccaaacaaagtcatttaccatatttgtgtatgaccacacaagaacattggagtgcttgagatacttcacagaggggaaagagctagtgaggccaggagtgactaggtttgcttcatactttctcactttgaacagcatgcaagagaagaaggaccaattaaggaagatggtggttcatagcaggtgggactcattaaaggatgtgaaatcaaagaaaggaaaaaaggccacagctactatattgagtccagccttttggaaggatgtgaagctaatgttggctgtttttgagccattggtcaaagtcctccgtttggttgatggggatgtgaagccatccatgggtttcttttatggagagctactaaaggcaaagagagagctttttttgctgaatccacactatagttatgctaacccatcaatctttgatgagcccaaaatgaatgaagccttcatatcttgtgttgagcaattttattatcatgatgaggaccaacaagaacaggctgccaactttgaattgaaaaaaattcagaatagagaaggaccatttagcaagaagcttgcaagaacttttcaaaactatgattacaatccagcatcatggtggcggttatatggaactgaaacaccagctttacagaagatggctacaaggatattatctttgacatcaagctcttctggttgtgaaagaaattggagtgggtttgaagggatacacactaagaagagaaataggctgactacaacccgcctcaacaagttggtctatattcagttcaataacaggctgatgaataagagagaaaagatcaagtcaaagaaaatcactgatgttctcttgtctagtgatacaactgaagctcaaggttttctccaagagggtggagatgattgtgcacaagttgtctttagagatggggaggaagatgagatggaaggtacagggataccttggtctgttattggagagacagtgggagcagaagaacaacttgagcctcgtagaagtgcaagagtgagagagctctatgaaggagaagagtttgagtctgaagaagaagagtatgaagatgaagatttgtgctacagtgaagatgaaatatga

SEQ ID NO: 114832 - DNA, 1758 bp, Zea Mays
tgtgcagccaatgggcatggttttgcctggtgtggttggattcaagttgagtgggaagttataggatggtgtcactactactgacattgttcttactatgacccaaatgctaaggaagcacggtgctattggcaaattcgttgaattctatggtgttggtgtgggcgagctatctttgcctgctagggccacaattgccaacatgtctccagaatatggagctaccatgggcttcttccctgtagacaagtagcattggactatctcaaattgacaggccgaagcgatgaaactgtgtcgatgattgaagcatacctgcgagctaacaaaatgtttgtggacaagcatgagcctgagacggaacgagttttctcttcatatctggagctggaccttagtgaggtggagccttgcgtttcaggccccaaaaggcctcatgatcgtgtccctttgaaggaaatgaagtcagactggcatgcttgcctggacaacgaagttggtttcaagggctatgcggtgccaaaggaacagcaaggcaaagttgtgaaattcaacttccatggaaggccagctgaaatcaagcatggcagtgttgttcttgcagcaatatgcagctccacaaacacatcaaatcccagcttcatgattggtgctggtcttgtggaagaaagcatgcgaattgggccttgaggtgaagccatgggtaaagacaagccttacccctggatctgtggttgctactgagtacttgaaacatagtggccttcaagattatctgaaccagcaagggttccatgtcgctgcgcatggctgcgccacttgtgtgggcaactctggtgacctggatggatctgtatccgctgctatcatagaaaatgatatcattgctgctgcggtgctgtatcctactacctgctcaaccttggggacagcatcaccacggaccacatctcctactcggggaagatccccgagggcacacctgcggccaagtatctgctcgagtatggcgtggagcccaagaacttcagctcctatggtggccgccgcgggaacaatgaggtggtgatgaggggagcgtttgccaatatgaggatcgtgaataagcttcttaatggcgaggctggtccctggacaatccatgttcctaccggggagaagctctacgtttacgatgcggcaatgaaatggaaggagatgctgtcagttttacccaattatcgagtgaaggagtatatgaagaaactttacaagacatctgtacaaccctagatgagttgcagtagattccacccattaaggacaaatggacaataatccatcatcgaagccaaatcataagctaaaaggttgagaagatggtgcttctggcatgtggatggcgctatacgattactgttcgtgactcaagtaatctatacacttatggttggcgcaaatacgttcaactaggacatattgattttgaagatgatttagttccacataaactagaagcattgaaagatagcactatatctcaggaaaagatagaatggaactcaaattttggtggttgcactagtgtggagacttgaattcatgtatacacttagttagactcaatgttagtgcaaacagttgatgaccaagttttttaattagtattttagtttggatgtatagtacacttatgtatgagttatttgacaatgcttatttatgagatattgaatggcacttgtctatgttatattaattataatgttattaaatata

SEQ ID NO: 114833 - DNA, 526 bp, Zea Mays
gccgcctgtaccaccattgttggaatccggaacatgactacgccatcggtggtctcgcttccccctatgcttgcggtaaccatcccctatcctattcgattttatctccacccctatctcgtgctgcagcagtcggattgggggccagggtcgccggcgggctgggcgttggtgtgctcgccgcgtcggggaagaaacagccaaagccgctaggtcgtcttcgtcgtcctcggcctccgcatcgtcgctctccgcgtcgctctctgtgctcgcacctagccgccggcgtgggattaggcaggggtgtgaggaagatgaacgtgcctggtctattgatgctttaccggatggtggagatcatgctgggaatacctcgtcgttctgttgaatcggaaccgtgggatgcggagtgaacgactgagatcatattgccagataccccttcgcgaataaatgtgagtcgtcgatccatgatcatgtgaatcccattagatctctgttattttaaatccatacccttgatatc

SEQ ID NO: 114834 - DNA, 918 bp, Zea Mays
atgtgtggggaagtgagatcaacaggacctcttgttatggagcctaccacaactcacatagcagatacatcaaggtctacaggtaggacggaaacagagaagaagacgatcaatggagtgattaggttggcactaatcatccacccctatcagaagatcacacaatcccgagataggccccctccttccctatctcagactggtgtgagaaacatgtacgatttggactggaatcgttggatggtgactgtgcaaggggtagaggaaatttcgctggatagatcctcaaaaggcatgcttgtctcaagagtggcagctctccgtgatggtactgtcgacctgttgcgtaaggaattcaaaaactggaagaccttgggcgcacagcacagacagaaacaactagtatttgcaggactatcggagtcgcgtgtgtatgtagataggttgatcaaggtcagcagccaatccagccaccaggaatccccaatctactggtgccttatccggacgaacagtatatggagcctcgaaaacaagaggagggagggcgatcatgagcttaccctgggcccggtggggccgctgcgccacatgggcgtggtggtggcgcggcattcgacgcagctcctggcgcctttctccggcaccacgatcccgtcgatctgcagcgacgggtcgcagaagcaaaggagagaggtcgatcagtccgagatcacagagcttggcggcaaagcagagagaacggggacgagagccggatgtaccttactgcgatcggcggagcccatcggcgtcggcgccagcgccggcggcaacagacggcagccccgatccgtggccgggttggcgataggattgcttggagaattctggtttttctctgccggcgtgcgtggtctggtctgttctcttagatag

SEQ ID NO: 114835 - DNA, 510 bp, Zea Mays
agaatattagaacttgtgtatataattgtctctagtacaagtggaagattattggagatatacccaagtgataattataaataattcggattatagtcctactaagtctttttctgctgtgctacgtgtctaaatagatgtgtcatgccactgaaagactggcctcatattggtttgctacatgaattcctctctggcatgtggcttgccggctcgctcactacctgctctgcgaacacagagcagacgctccgcattccgcagcttctccagagcagagcgctgggcaacggagacgatcaatgcgggaagcaatcggcggtcctcaacggtcggtcagtacagctaacagtggtccgtacgccaactgtggcgcgcaaggaacacgtgcttgctttggttccgctacctgtttgtgcagttatgccacagccgcgacggtgaatcgaatgaatgagccctcctgacattccaatcgaaacaatggtagccatgccctgacgctcaagt

SEQ ID NO: 114836 - DNA, 645 bp, Zea Mays
atggtgtacattggcatacttcatatgattagcagtgttatgctgttggtcctcggccagcgatcgacgttgaacgcgacgagctgcagcggtggaggagcgcggtctgcgtggctgcttctcaggttgtttccagctgaacctgaagctgatgttgaatgctgcacctatggagtcagtggatctgtttatacgggagttgacttttgcatgaagctctttgcagtgtctattgttcaaagagctgatgaactgcaaacagtgcttatggagatggtaaagcaagacagtaggcaccaattaagtgcaaagtttaccaacgcttatttatatgatttaccaacgtgccacacgaacttcacgctgttagcttcgtcttcgtccaattcttgggatttctttacgacacacggaacgacgatgagatcgagtctggagctagctggcgaaatccgagccggggaaaacagcgtgcgcaggaaaactctggtcggacgatctgggaacactgacgagcacgcgcgcagcagggacagagcagagatcgagctgggcgactgcgcgcgaccacgcatgggcatgggagcgacgccgagggagcttgacatgggcgagctcggactaaagcacacgcggcaaggatag

SEQ ID NO: 114837 - DNA, 530 bp, Zea Mays
actaagatggtataaacagccattttaagactacaccacattgcttaagataagcagtagagcttaaagtaagatctaggagaaggtagcagcgttaaactgaagaggataacaatatataatctttataataattctttactctaaagttatttaaaaggccattaagatattgcttcatgtggtttgcactaacctctgcagcttctcaaaagttaaggaattactaccacgtgaaatgctatggtttttataaatcctttgactagactttattttaataaaacacaaaaatatggttgtcctattgttcaaaaatcaatgacaagtcaggaactcaagttctgaaattgccaagtgcggaccatccggccccttctggcggatcgtccgcgacaccgctatgacttcgaccaggaactataaatcgtggatagttcggctataaaccgcggaccgtccagctatacagtgcggacctttcggctataattcatggatcgtccgcacgtgaagatctagtttagctc

SEQ ID NO: 114838 - DNA, 1506 bp, Zea Mays
ctgcaaggctatagtttaaacagccaacattcgagcagaagagacgcagctccattccaggccccgcagcttctccgttctctgtctgcgtgtggtcgtcagttgcggaggtaccacgacctcgccaagttaagctttgatggctgccagagatcccatggatgcatggatgaaccgttaccgtgctttcgcggaaggagtggtggtgatggtctgcccggtgcttcttgcgatagcgctgaagaaggttgacctgaagagcgaagagcatggtggtgccgtcccgaccaccatgctcgtggtagcagcggttactctagtcgccggtatttgcccctacctcgtctgctgtctctccaagagattcttcaataataatgggagctcctcaggttccccacacgctgctaccatgttgctggcacccttatccagcacatgtttagtggcacttgcctgttggatcgtacatctcatcctagacagctgggcgttccctgcggtcggcgccctcgtcggactctgctccgcgattcgtaccgtcatgcacttcacaacccgtgcgggacaaggagatgctgaaatggagtactgcgatagactggagagctcgcttgatttcttggttggtataactgcgcttctgtttctgggactggaaggcctcgctctggagggtcagattaacagctccagcggtcgtcttaccacgccgatcggcacaagcttcgttgtctgtgtttttgctgcgagcttaatgctcgtggagacgatgcctccacgcagactcgtgaggtatctgacagagaccattgatatcctcacgggttttgccgtctccctggctatgttcttcatcatgtatccactcatgggactacgagcattgcttctgctagcagctccgttcctgatcctcatggcgtatgtcttctacgtcgctatcggcaaggatgatggcaacaacaaccaccaggttgctagcgcgaacggcgatgaagaatcgtcaggtgttagcagcagccgcaggagtggtgcggcggcggacggtgataataaaccagcgtcgcttgaactgacaaaagtaacattcgcagggttcctggcggtgtcgataccaagcatcagcaaaggttcagtcaccatttattccgaatgtttcttgcaccttgcagcagcagctgttgtctcaggcctcgtgtggaggctcctaacgcattacaaaaagtcacagaccaccgtcgcaactgttgcagatattgcttccttctgcacccatctctgtgttgcagttgcggtaattccgtttacgataatggccgggaatgcactctcatgattttgtagtactagtctgtcgagtcctgctctcattttgactaataaacattttttatgttaagatgaatgtgttttcttctccttgtcattttctattacaatagggcataatatgtgctcgctctgtagttcctttccaactatgaaaagctatttgtcagtaac

SEQ ID NO: 114839 - DNA, 1151 bp, Zea Mays
ccccaatagccaacaagaggagaggatccaaacacgcagctctagtgagctccgtcccacacacagactccggctccctgtggcccgcggcgtgagcgtgtcgtgtcccgcagggccacctttgctctctaaccccttccaccacacgcgaccgccgtccccgcgcgagttgccgaacccacgtctcccctcgccccgcgccgaccctaccaaccctcgggcccgcccatggagatctccgcctccgctgcgccggccgcctcctccccgcccgccaggccgctggtcctgcgcccgttcgcctcgtcatcgccccacccggctacgtcctcctcgaccaccatccgccgccgcccatcctcatcggccactgccacggtccgccgccgcgcgcgcacccgcccccgtacagggcggtccaagccccccgccgactcgggcgactacttctccggcaacgacggccccggtctcggtggttccggcggcggtgacggaggaggacggtggagctggaacagcgggttcggctctggatcagacggccccgacgactgggagcccgatgtgccggcgccccggaggtcagcggcggatgcggcgctcggggtcgtctacgagctcatgtgcctcatcgcgctctccaactgcacccagttcgccgtccgcaggctcgcgggcctcctctccgcccgcgtcgccgcattgcgattcgtccccaccgtctgctgatcatccgtgggggtttgttttacttcctcttcctcctgcccgtctacctgaaatcgcttctgtacatatatcagcctgcaactgcggttttaggggattggggccttgggggaatcaggacctctgcctgttgttcctcggtgcgtgcctcaagcattataccgttgaacagtagcaaaattcgtcgaatccaattggagaaacacaaaaataagatcaacttgtttatcctttgttgttgtactcaagattgattgatgcctattgtgttaggatgcatcattatctgttccatgtgtatataaatgtgctgttattaagtttcttggtacttcatggaatgtcaagggcagtgcgtttggggaattctcatagatccggttagttgaatggaagctcaattaactagctatatggct

SEQ ID NO: 114840 - DNA, 560 bp, Zea Mays
catccatcatcgcacctgcaagcatcatcttcgagcagatcgaacgaaccccaagacacaaccggccgtcgactaccgcatctcgcgttcgcgatccaaacaatggcgcatcacttcctcggcaacaagcaccatggaggagaggcggcgaaggtgaccgactggcgcaaggaggagaagcaccacaagcacatggagcagctcggccagctcggcgccatcactgcaggagcctacgctatgcacgagaagcacaaggcgaagaagcaaggaccccgagcacgcgcactcgcacaagatcaaggaaggggtcgccgctgcagccgccgtgggcagcgccggctttgccttccacgagcaccaccagaagaaagacgccaagaagcaccgccaccatggacaccaccactagctagttactgacggcttccattttcatttgcagggcgcgcctggcaatctcgttcatacatatgcaccgaccgtcgatataattatctagcacttttagtatacaaataaatgaggtctccaatatgtatgcatatatcatcgtaacg

SEQ ID NO: 114841 - DNA, 276 bp, Zea Mays
atggagtctacatgctttgacccggggtcctggcctggtgatgtgctagggaacatcttgggtgaaagcctcggcgaagaaactgcacgggaaaatctccatggaatggtaacgcaagaggccttcaactgcaatgaaggtgtgtcccatctcatctgtggcaagaatgctggtctcagcagcagctcactgaagctccacttgcagaaggcgcacaagaagatatcatctgggaagactgggagcgtagacagtgcccattgccatcctcattga

SEQ ID NO: 114842 - DNA, 145 bp, Zea Mays
gatttttgttttattagcttttcaaatgtgttgttaattattttaggacaattttatagcaattttgtaatctccaaaatgttagttaattctagattttttgtagtgactaaaagtatgttttcccggttaaagtttttaaaag

SEQ ID NO: 114843 - DNA, 531 bp, Zea Mays
ggtcaagaatctgcaaaaaatgaaatgaaggctgcactagtggaagcaaggcagctagtgaatcttcttatgagcaatagtccagagaatttcctaaatccagtgatccgtgagaagagctataacaagctagattatagaaaggttgcaatcatctcagagaagtttagagatacctcagagagttatttctcaacatttgggacaaggggtgccaggcagaacccaaagaagaaatctctggataccctgatcaagaggctcagagaagccagttagatatcctcccagctgttgaccggtaaattactggattgtgggaaccataaagatgacaatgtcttttcaaccctttagctcactgttggctatcttttacaatttctgaaagataattgaacatgttagaatgtattgtgtgagttcttgttagggttatgtatagaccccttttgtattgggccttggcccacctaactctattattaatttatcaccaaccctagttagtgttagggtttcagtttttcc

SEQ ID NO: 114844 - DNA, 3140 bp, Zea Mays
acaactcggcaactacggagctgcctccatctcatttgcttaccatccctaccgcctggctcagatctcgatgcggcgcaagcttcccggcgacgcgccgctgtcggcggcggggcctggtcatgcgttgtccgcatccgcgccgtccgaggtggacctcgctcagctctccgccgccatcgcggccggggaggaccttggccccttcgtgcgccgggccttcgcgtgcggccgccccgagccgctgctcgcctcgctccgcggcgcggcgcgggaccgcgaggcggagatcgaggagctctgccgcgcacacttccacgattttatccgcgccgtcgacgacctccggtccctccttgccgacgccgacgcgctcaagggctccctctcggcgtcccactccgcgcttctctcctcggcggccccgttgctcgcctcgcttgaatccttcctcgccgcgcgctcgctcgcggggaatctctcctccgcgctagcctcctcccgacgctgcgtacggctgctcgcgctcgcggcgcgggcgaacgcgcacttacaggccggcaatcatgggctctacctcgccctgcgcgccgtcgacgccatcgaccgtgatctcgcctcgggacccgagcctctgccgctacccacgctccgccgcatgctgctcagcgtcgtccctgcggtgcgtgcgcatgccgagcgcgagatctcccgggagttctcagactggatggttagcattcgcgctgcttcgaggcacctcggccaggtggccatcagccggtcggctgccgcgaggcagcgccaggaggagctccgctccaagcaccgcccgctggaggagtgcatcaccttggatgacgatggtgttggtgacctcgacgattttgcggcagccgcggcaacagctgaagcagcagatggtgccgctgcagcctcttttgaccttacgccgctctatcgagcgatgcatatacaccagacgctggcgctaggtgagcggttcaagaagtactacctggaaaacaggaagctgcagctgacatcggactttgatgtcattgcggcgacgccattcctcgagtcccaccaggtgtttttctcgcagattgctgggttctttattgttgaagaccgggtgtttagaacagggggtgggctcacatctcggccagatgtagatgcactttgggatgccgctgtggggaagatggtctctgtcatggaagataacttctccaggatgcagacagcaaaccacttgcttctcatcactgattatgctgctttgctttctgccacaatgcggcggtatggttatccagtagggatgctactcgatgtgctggctaagcacagggacaagtaccatgatttgctgcttgcagattgccgtaggcaggtggctgaggcactgacagcagataagtttgatcagatgctcatgagaaaggagtatgagtactcaatgaatgtccttgcatttggaattcagagctcagacattaccccagctttcccatatgttgcaccgttttcatgcaccgtcccagacatttgccgtattgttcgttcgttcattgaagattctgtgagcttcatggcacatgggggaggtggggatacctatgcagcagtgaagaagtaccttggtcggatcctatctgaggtggtggatgcttcgattaaaaaacttttggattcaggcagtggtctaagtgtgtcccaggcaatgcaggttgctgctaacatgtctgtgatggagcgggcatgcgagttctttacacgccatgctgcacaactgtgtggtgtgccgctgcgtgctgtggagcgtggtcggcgggacttcccacttcgcaggtcacgtgatgctgcggaggcgctcctgctgcggcttctgcgtgccaaggttgatgagtttatgagacaatctgatggtatcaactggatggctgatgactctcctcctggcggcaatgagtatgcgaatgaggtcatcatctaccttgagacgctcacatcaacggcacagcagatccttccccttcctgtgctacaccgtgtacttgtggcagtgcttgcccacatctctgaaaggatcatcgagctcttcttgaacgattcagtaaagcggttcaatgccaatgcggtcactggtatagatactgatctcaaaatgtttgagacgtttgcagagggcatgtctagcctgtttgtggactcaggtcaagaatctgcaaaaaatgaaatgaaggctgcactagtggaagcaaggcagctagtgaatcttcttatgagcaatagtccagagaatttcctaaatccagtgatccgtgagaagagctataacaagctagattatagaaaggttgcaatcatctcagagaagtttagagatacctcagagagttatttctcaacatttgggacaaggggtgccaggcagaacccaaagaagaaatctctggataccctgatcaagaggctcagagaagccagttagatatcctcccagctgtaagataatacatgcaactggcttctcacatcctcatattttcgtgaaataatctgtatctggtttgtgttatgcctgtttcagtcgttaaccttatgctgtaattgctgttagattctatgtttcatatgtgtggaaatcatcttgttgattcttttgccatttactatatgatcgaggtatagtatattagtatgtcataatggttaattttgcctgtgaggagaaattgctcgctaagaccaatattttatatttttcttcaggagatagggatgcttttatttcccccctccagttccttactcttggtaacaaacgatttaatgttatatatatttgaatgttataaaggtaaacttcggtaagagatcaacaaatccttgtaacttgatattgctaagaagtgatcaccccataagtagcaatgccttaggattaaatttgggaactgaacctacctgagttggtgaagggtgtggatgcacacctagaagatctaagttctagtccttgtgatagcatgcctagtttgtccaaagtccgtaatataaagcttcctttcttttgagttggtttatttattttaaaagtagttatgaattgtttattctattagaag

SEQ ID NO: 114845 - DNA, 2751 bp, Zea Mays
tcccgactccggcgcatccattcggtcgctgccggatgcgtgcttgacccggccatggatgactctgtccctttcaatgacctcggtccctccaagcccccgtcggcctctttctacgacgatatgttcgagtcctacttcaatcgcgcggccgaggcccccgagcccgcgcctaaggcttcttcctcgccgtcgacgccgccgcccgtgttcgacaagccagtcttcgacgacgatccttacacggccgatccattcgacgcgatccccttgtttggaggcggtggtggaggggaagaggaagacttgcacggtggcgtccggagtgcggcaaagccggagaggacggagttggaggtggtgggttttgatgaagatttgttccctgggttggctgggagcaccaattttcccatggagaagccggccagggaggtggagcgggaccgtcaaccagtggggttcgacgacgagttgatccctggattcgatggaagcatgaagccagcgccgcaaatggagcctgagacagtggcgtttgatgatgatgtgatccctgactgcagtggaggcacgagctatccctcttcggcaagggaggaacctataacgagacaagaaagtgaatcaatttcctctagcaaaattagcatgagcatgccagaagatcctttcgttactttaggtggtacacacaaatcgggatattcatctttagggttgttttcaaatcttctgaataacattggcatgcctagaaaggaagcggacacaacgcctgataataccagtgggatatttcagggttctgatatctttactgagtttccaaaagccatgccacccttttcgtttacatctgaaaaccagagtgatagaactgaaaggagatatactgaaaacataatcagcacgagtcactccgatcggctgcctcaggagaagacagtccaacaagcatcaacagaagcacctgccaatacattgactgagatgaacttccctgaagcatctgttgtccatgaagtacctgttaccactagttttcagacattgaacccatttgttgaggaagacgatttgttagaggtgaatcaatcttcacaaacgactaatgatgtgtggctaactgttttagatattgctttagtgacactacctacaagtgcgccacctccttcaaggcctccacctccacttgctgctaagaaaccacctactgaatctgtaactagtgaagcatatgcccatcattgtaatcaacgctaccatcactccatatgttcttcaaacacctctaaaacatcccaaattgatgaattggaagattttttcttgacaaagcctgcaaattctgccattggtcatccacaagttctaaagcatgaaggaaatgggcattatccatctgcagctactgcaagtttcatggactggactgagatgggacactgtaaaagggggaaccaaggggcatttgattctatgttcactagcagtcaatatcgacagccagaaatagatgagaaagcagaggtatgtgctcatgaaacagaaagtacagatgaagaaaagagattagagaatgaacaaatacaaagagaacataaagaagagcaaataagagcagaaagggagatggaagaagagcttgagagggaaagagaaaatgtgagacaaagggaacaagaggagcagaggaggcgtgaaaaagaaagagtggccaggcaggctgtagataaggctatacgggaggcacgcgaaagatcagctgctgaagcacgcatgcaagctgagaaggaggctcgtcaaagagcagagcgagctgcagtatggaaagcagcaacagaagctcgtgagagagctgcagtggaggcaaaggaaagagctgcgaaggctgctgcagaagctaaggaaagagaagcagcagaggctagagaaagggctgcaacagaatcaagggaaagggatgccaaagttgccgcagatgcaagggaaagagctgctagggctgctgctgaagctagggaaaaggaaacagcagaatttcaggagaaagctactgcagaagctcgggcaaaggctgagcgagctgctgttgagaaagctgcagcagaagcacggtggagggctgaaagagcagctttcgagagggttgctactgaagttaagcaaagggcttttaatgatgctagagaaagggctgccgctgcagctgcagctgaagcactggcaagagaaaatcagcaaaggagagcaacaacagaacctgaccttgagtcattctttggcatgccttctcgatcaagtagtctaccgagatcatacaacaacacaacaacgaatcctttcgatgttcaacctggcaatgctggttctggtggtgtaaggaggacaccttctggttcaggttttccctttactcagccttcatcaagcaatcttatggatggcctatcttctatatttggagcacctttaccatctgctgtatttcaagaagtggatggagagagtgaagagagaaggaaggcaagattggaacgacaccaaagaacaatggagcgtgcggcaaaagctcttgctgagaagaatgagcgtgacttgcaagctcagcaggagcaagaagagcgacatagaattggtgaatcacttgattttgagataaagaggtgggctgctggcaaagaaggcaacctacgggccttgctaacaacgttgcaatatgttagtactccgtttccagtgtag

SEQ ID NO: 114846 - DNA, 2419 bp, Zea Mays
ctctcctccttcctcgaaaggccgccaactgcgcaactggccctcgctagctgtagctggggcgctctctaccgccgctagggtttccaccgccgccgtcgatgggcgccctcaccgacagccggaagcgtctctcggcggaccactgcctctcggccgaccaccgcctcccctacccctccttgtccccgccgtcccttatccctcccttcaagcgggccaagctctccccaattcctgaacacgatccctccacctccgatttcccgcctatccgtccctctccccaaatcatccactccgctgcggcggcatccacctcctccacgccgggcccatccccctcttctatcaccgcttccaccccgcttccgcacaggcgccgactcccaccgccgccattccagcgctcgatccacggcccccagcggatcctccgcgtcttccagcttggaggggccgcacgggcctacgccaccggccactcatggttctccccgcaatcacccccgcctcgtcctctcggactccagcagtacgttgagctcgtcaacagcgtcacccacccttcgccgcccactcccgccgccattaccaatgctacgaggcaggcggaggtggcgcccttcgaggtggtcgccatcgaggaggatgaggacgagaggaagcagcagaacgaggaggaggtgatggggagcgtggtagtgagaagggtgccaccatacaaggagctgtacgaggcgtcgcgacagaagcgggatgctaagctcaagacgctcgagtttgaggtgcggctcactgagcagggccgtcttagccttgagcggcttgccgaggccctcccgcgaattacgccaaagaaggaggaggtgcctgaaccttttgttcctcttactgatgaggatgaagaaatggttcgtcaggctcttcatggcaagaacagacatgagaggttagcagtacatgaaccttcaaatattgtgataacgagggagatcatgcagtgcttgaataaccaggagtggctaaatgatgaggctatcaatttgtatcttgatcttcttaaagaaagggaactaagagaaccttgcaggttcttaaaatgtcatttcttcaacacctttttctacaagaagctgatttccagtgggtatgattataaagctgttagaagatggacaacaaaaaggaagttagggtacagtctaattgattgtgacaagatatttgttcccatacacaaggaagtccattggtgtttagcagtcatcaacatcagggacaaaaagtttcagtatctagactcacttggtggcatggacatgaaggtcttgaatgtcttggccaagtatattgtggatgaggtcaaagacaaaagtggccaacagatggatgtgctctcatggaagcaggaaggtgtcaaaaaccttcctttgcaggagaatggatgggactgcggcatgtttatgctcaaatacattgacttctacagcagagatatggacctcattttcggacagaagcaaatgcattacttccgcaggaggacagcgaaggaaatactgagtttgagagctgaataaaccttggaggacatcataagtcattttggctatgttcagaattgttggaatatgtacttaacaaatgggtgcagcggcttaaaggtatagcactgagtgcaaggaatttggaagttctccagttgcacaacggcaccaagcgatggccaagcaaccggttggaattttgcatgagcacagtggtgcctttaagttttgccagtgagcatttgcaggtcataaatgggtggaatgaggcttctcctggcattagattgcaatgagattcctcagagacagctggattatggatgacttagaaactatatatagcagtgatcttgagcttcctgtgaggtgtgagctgaccaagtgagcaatcaccggtttaggctgtatgcccagcttcggtgcagagttttgtataatgttcaaatcccttttgttctttatgtttgtatttattttttaaatagtgctaattcccttagccgattatgagtgtatctggaatggctgatccgttacctgtagttttaggtcttctttggcatggctctatctccttgcacagttaaccgaggagcatgttgggcagagcatttgcacccccaattctggcacaaggtgtaagcataataacaaatgaatatcatacagcacgagcacaataagcagaagaccaaatatactaaataaaaaataccttgtttgtttgtcattatctgttgtatcagcatcacgctcacttccagcaagatcagtagatgacattttctctacaagctttgtattctttgcttcaataccatctcggtctttctgtctccgggtttcagaaaattgttttttgtcag

SEQ ID NO: 114847 - DNA, 765 bp, Zea Mays
aagcatagttgtacttttgtttctgtttgtgcagttaatgaaattctttggaaaaaaactgcatgtaattgccaacctgagaacatttagtttcttacagcactattcctacttgttcttaagtttacctaatgtactgagtcttctgtcaccctagatgggactgcggcatgtttatgctcaaatacattgacttctacagcagagatatggacctcattttcggacagaagcaaatgcattacttccgcaggaggacagcgaaggaaatactgagtttgagagctgaataaaccttggaggacatcataagtcattttggctatgttcagaattgttggaatatgtacttaacaaatgggtgcagcggcttaaaggtatagcactgagtgcaaggaatttggaagttctccagttgcacaacggcaccaagcgatggccaagcaaccggttggaattttgcatgagcacagtggtgcctttaagttttgccagtgagcatttgcaggtcataaatgggtggaatgaggcttctcctggcattagattgcaatgagattcctcagagacagctggattatggatgacttagaaactatatatagcagtgatcttgagcttcctgtgaggtgtgagctgaccaagtgagcaatcaccggtttaggctgtatgcccagcttcggtgcagagttttgtataatgttcaaatcccttttgttctttatgtttgtatttattttttaaatagtgctaattcccttagcc

SEQ ID NO: 114848 - DNA, 1993 bp, Zea Mays
tcctcgaaaggccgccaactgcgcaactggccctcgctagctgtagctggggcgctctctaccgccgctagggtttccaccgccgccgtcgatgggcgccctcaccgacagccggaagcgtctctcggcggaccactgcctctcggccgaccaccgcctcccctacccctccttgtccccgccgtcccttatccctcccttcaagcgggccaagctctccccaattcctgaacacgatccctccacctccgatttcccgcctatccgtccctctccccaaatcatccactccgctgcggcggcatccacctcctccacgccgggcccatccccctcttctatcaccgcttccaccccgcttccgcacaggcgccgactcccaccgccgccattccagcgctcgatccacggcccccagcggatcctccgcgtcttccagcttggaggggccgcacgggcctacgccaccggccactcatggttctccccgcaatcacccccgcctcgtcctctcggactccagcagtacgttgagctcgtcaacagcgtcacccacccttcgccgcccactcccgccgccattaccaatgctacgaggcaggcggaggtggcgcccttcgaggtggtcgccatcgaggaggatgaggacgagaggaagcagcagaacgaggaggaggtgatggggagcgtggtagtgagaagggtgccaccatacaaggagctgtacgaggcgtcgcgacagaagcgggatgctaagctcaagacgctcgagtttgaggtgcggctcactgagcagggccgtcttagccttgagcggcttgccgaggccctcccgcgaattacgccaaagaaggaggaggtgcctgaaccttttgttcctcttactgatgaggatgaagaaatggttcgtcaggctcttcatggcaagaacagacatgagaggttagcagtacatgaaccttcaaatattgtgataacgagggagatcatgcagtgcttgaataaccaggagtggctaaatgatgaggctatcaatttgtatcttgatcttcttaaagaaagggaactaagagaaccttgcaggttcttaaaatgtcatttcttcaacacctttttctacaagaagtgggtatgattataaagctgttagaagatggacaacaaaaaggaagttagggtacagtctaattgattgtgacaagatatttgttcccatacacaaggaagtccattggtgtttagcagtcatcaacatcagggacaaaaagtttcagtatctagactcacttggtggcatggacatgaaggtcttgaatgtcttggccaagtatattgtggatgaggtcaaagacaaaagtggccaacagatggatgtgctctcatggaagcaggaaggtgtcaaaaaccttcctttgcaggagaatggatgggactgcggcatgtttatgctcaaatacattgacttctacagcagagatatggacctcattttcggacagaagcaaatgcattacttccgcaggaggacagcgaaggaaatactgagtttgagagctgaataaaccttggaggacatcataagtcattttggctatgttcagaattgttggaatatgtacttaacaaatgggtgcagcggcttaaaggtatagcactgagtgcaaggaatttggaagttctccagttgcacaacggcaccaagcgatggccaagcaaccggttggaattttgcatgagcacagtggtgcctttaagttttgccagtgagcatttgcaggtcataaatgggtggaatgaggcttctcctggcattagattgcaatgagattcctcagagacagctggattatggatgacttagaaactatatatagcagtgatcttgagcttcctgtgaggtgtgagctgaccaagtgagcaatcaccggtttaggctgtatgcccagcttcggtgcagagttttgtataatgttcaaatcccttttgttcttta

SEQ ID NO: 114849 - DNA, 1450 bp, Zea Mays
ctgtgatgtcgcacgtgagctctctccattcttttccttctcggagttggttctgttgccccttgtgtttctctcggttctgggttccgaagcgtgactccagtccttgccaatcgattttagtgccttccagggttacggctgcttagtcaaatcgatctcaccgggattgcgtagttccaggcatatggtgtcgactttgggaggggaggtgcagaatttcaggtattggcagcataaagtgttagatttgtccttgattgaggtaccccttcaaaggtcaagatgttgtggcgcgcagtacgcagtatggatgtaataatgcattcttcgagtttccttcttccgaaactgtatcaacctgtcaacaaaccagtcaagaactatgctttagttgttctaaaccagcatcttccacgattcatgcctcgactctgggatcatgcaaacttgaggatctgcgctgatggaggagctaatcatatttttgatgagatgtatcagataaccaatgatgaagacaaaaaaagcaccagaaataagtatgttccagaaataattgaaggggacatggattctataagacctgaagtaaaactgttctactctagtcagggatccaaaatttctgataagtcacataaccaggagacaacagatctacacaaatgtatttctcgaatccatcattgtacgcctgatgatgaaaaaccaaatctctgtgtacttgttactggagcactaggtggaaggtttgatcacgaggcggcaaatatcaatgttctgtatctgttttcggacatgaggattgtcctcctatcagacgattgcttgatccgacttcttccaagaacacatcgccatgagctttatattgagtcgtctgttgaaggaccccattgtgggcttttccctgttggagcaccatcaacaagcacaacaactactggcctgaaatggaatctaagtgaatcaaagatgagatttgggagcatgataagcacatccaacattgtgcagtcggagaaagtaactgtagaatctgatgcagatctcttgtggacaatttctctgcgaaatctgacataagcagttcctagtttgttatcttttttcttctctttcctgtcaagtggcaaccaagctcttgtacagccacttttgtgtttatgagttgtgtgtctggtaaataaataccatctgatgacaaatcgatgaggtctcatcattagacaggatgtctaccacgatcttgaactgctgatgaattatgtgaataacacgagcaggcatgatggttgtatcctctctagttgtataactgtattgttgtacttgcaacggggtttcttgtataaaattgttctcaacagttcacactgtatggttggattttgtaatgagtctggcaattgggtacagtgatatatgctaatccatctgttctaat

SEQ ID NO: 114850 - DNA, 1042 bp, Zea Mays
acaccgtcataccgacagcgaagacctttgccgtttttattcttcctccgtctctgcctgtacagcggcggcttggccacctctgagcctcaagccctcaacctccctcttcggcgcgtaacgtcagtcctcaggtatgttccagaaataattgaaggggacatggattctataagacctgaagtaaaactgttctactctagtcagggatccaaaatttctgataagtcacataaccaggagacaacagatctacacaaatgtatttctcgaatccatcattgtacgcctgatgatgaaaaaccaaatctctgtgtacttgttactggagcactaggtggaaggtttgatcacgaggcggcaaatatcaatgttctgtatctgttttcggacatgaggattgtcctcctatcagacgattgcttgatccgacttcttccaagaacacatcgccatgagctttatattgagtcgtctgttgaaggaccccattgtgggcttttccctgttggagcaccatcaacaagcacaacaactactggcctgaaatggaatctaagtgaatcaaagatgagatttgggagcatgataagcacatccaacattgtgcagtcggagaaagtaactgtagaatctgatgcagatctcttgtggacaatttctctgcgaaatctgacataagcagttcctagtttgttatcttttttcttctctttcctgtcaagtggcaaccaagctcttgtacagccacttttgtgtttatgagttgtgtgtctggtaaataaataccatctgatgacaaatcgatgaggtctcatcattagacaggatgtctaccacgatcttgaactgctgatgaattatgtgaataacacgagcaggcatgatggttgtatcctctctagttgtataactgtattgttgtacttgcaacggggtttcttgtataaaattgttctcaacagttcacactgtatggttggattttgtaatgagtctggcaattgggtacagtgatatatgctaatccatctgttctaat

SEQ ID NO: 114851 - DNA, 1450 bp, Zea Mays
gtggtcccgtttgacggcgctcgtgagaacagtccatgtccgtcgcagcacatcgagcggctacaaccaacttcagaattctgaaagggacacaccgtcataccgacagcgaagacctttgccgtttttattcttcctccgtctctgcctgtacagcggcggcttggccacctctgagcctcaagccctcaacctccctcttcggcgcgtaacgtcagtcctcaggtattggcagcataaagtgttagatttgtccttgattgaggtaccccttcaaaggtcaagatgttgtggcgcgcagtacgcagtatggatgtaataatgcattcttcgagtttccttcttccgaaactgtatcaacctgtcaacaaaccagtcaagaactatgctttagttgttctaaaccagcatcttccacgattcatgcctcgactctgggatcatgcaaacttgaggatctgcgctgatggaggagctaatcatatttttgatgagatgtatcagataaccaatgatgaagacaaaaaaagcaccagaaataagtatgttccagaaataattgaaggggacatggattctataagacctgaagtaaaactgttctactctagtcagggatccaaaatttctgataagtcacataaccaggagacaacagatctacacaaatgtatttctcgaatccatcattgtacgcctgatgatgaaaaaccaaatctctgtgtacttgttactggagcactaggtggaaggtttgatcacgaggcggcaaatatcaatgttctgtatctgttttcggacatgaggattgtcctcctatcagacgattgcttgatccgacttcttccaagaacacatcgccatgagctttatattgagtcgtctgttgaaggaccccattgtgggcttttccctgttggagcaccatcaacaagcacaacaactactggcctgaaatggaatctaagtgaatcaaagatgagatttgggagcatgataagcacatccaacattgtgcagtcggagaaagtaactgtagaatctgatgcagatctcttgtggacaatttctctgcgaaatctgacataagcagttcctagtttgttatcttttttcttctctttcctgtcaagtggcaaccaagctcttgtacagccacttttgtgtttatgagttgtgtgtctggtaaataaataccatctgatgacaaatcgatgaggtctcatcattagacaggatgtctaccacgatcttgaactgctgatgaattatgtgaataacacgagcaggcatgatggttgtatcctctctagttgtataactgtattgttgtacttgcaacggggtttcttgtataaaattgttctcaacagttcacactgtatggttggattttgtaatgagtctggcaattgggtacagtgatatatgctaatccatctgttctaat

SEQ ID NO: 114852 - DNA, 443 bp, Zea Mays
accttagaggttgtgtagctatttaccgaccaatgcagctgaatccccggcagactgcgagccaggcggcgaagaggattgtgaggaggaggagatccgcaaggatgaccatccagagctgccgcctccacgtccagctgggtccggcccgcccccggtgcgaggctcgatccctcttgggcgtggtccgcgcggctaggtcagcgtccctccgcgcggcctcctcctccgcgtgggcctccgcggcggcgacctcgttcgcctcgcgcgcgtcgtcgcccggcgggagtggcaagcgcagcgctaggcgcggcatctcgtcccgcatccgggcctgcggggcggcgagccgggacgggatttggcgggctggcggcggcgaccgaccttgggcggtgtagcgttcggcggggcggcgcgcggtctgtgtttaggcggcggcg

SEQ ID NO: 114853 - DNA, 85 bp, Zea Mays
atttagcacttcaagagcaagcgcagctctggtaggaagtgcagctccagcagccaggagaatacaagtcatgatgcgttcatcg

SEQ ID NO: 114854 - DNA, 294 bp, Zea Mays
gagaacagttcttgggcatatttctttctttctttctttttttcccattcttgcctctcgaggtgaacaagttttcttgttcgagactggtaccaaaaccccaaagattttgcaagcatatcttccgatcacaggcagcaagcagcctttgttcaggacaagtgagataggttctatggtttggttgctgtggcaacacaataatcttctgccctgtctagcaatatactacctctgtactatggcaattggcaatgcacgggatggacaactgttgcgtgtttaatggaagaa

SEQ ID NO: 114855 - DNA, 1078 bp, Zea Mays
acacgcagggtgcccggaccggccgcggccgcggccgtgcagagcaggtcacgcacacacccgcatttgcattccattccacgattccatccctgatccctccgctcctctctactcctctagcggtccagcccctctcccctttctctctcctctataaacccaaccacgggaagggaaccaagagagagaagagaagcatcccttcgccatagcagccagcggagtaccaaaccccacacgagcaaaagcagagcacacagcacaaacctctttcccctcccctgccccgcctcctcctcctccattccccatcccccatcccccatccaccgccgtcgatggcgaggccgacgcgcgcgctgctgctcccgctcctcctcctggtcctcgcgctggcggcgctggcccgcgcgtcggggtcgggcgacgttccggcgtcgtctctgagctgggacctcggcgtggtgggcgcgggggaggacgaggagttcggcttccccggcggcgactccgtagcgcgccgggtgctgcagggcggcggctacctcagctacggcgcgctgcgcagggacaacgtgccctgctccgtccggggcgcctcctactacaactgccgccccggcgggcaggccaacccctactcgcgcggctgtaccgccatcacacgctgccgcggctgatctcgccgcctacgcgtccaccgacggaaaacaggaggttcatatctgtcaatcccacgccgttgttgatttgagacacaccaaaaaaaatgttcatctccctccctgtccctttaatcaattatcagtacctgtatgctattgcttgttttctcctgtcgtttgaatttaacgagaatgattggtggtggttgtgggttatgcatgagttggcgcccacttgattccagccggattcgcctctctctctctctggtcctgtaaattccatgaatccatgattcgtgagcaactggtgtacaaactacaagctgatgatgaaaattccaccgtgaaccagtgcgattgtgattgtaattaagttagcggcggatccgagtcgcaacaaccagctc

SEQ ID NO: 114856 - DNA, 714 bp, Zea Mays
aaccacagaatattgaaaagatacagtgtcctttgattcttctcctcccataggccataggtatgattgcagaaaaaacatatccatatgtttaggttctgatatggcatctatcccttttactgcatccacatattgataggacctgaggtatgaaataatctgtctcaagtctaaatttcaagatatctttacttgttttgctcccatttctagtctgtgcctttacattacttctcttttctaaggaccgctacagaaatactacaagtgcagtcagtcctgttccttttctgttattattagcatggttctacatgcttgaatgtggtaatttactatcctgggttttgatatctacctgttctcattatggttcagttggatacgagaccagcaagtgtctgaaggtgtcactcctggtgaggatgtctacataatccttcgtctcgatggacgtgtcagaagatctggaataggcatgccaaactggaatgacatattacaggaactgccacgacttgaagatctgatgagcaaacttgaacggtgaaaaaggtgtgggagcagctaaagttttaccattactctttttcccccattccattcgccttgcccttatctgctgaaacttgaagctggaccatcgtagttcttgtataatatagtgaaattctgctattttgtttatagcttgccgaagtttttctgtca

SEQ ID NO: 114857 - DNA, 1750 bp, Zea Mays
ttgtgggggttcaatcggccgtacctcttcatctatataagggggaggtcttgacccgttacaagtcagttcccaagctaatcctatgaagatcgctaacaaatcccacaagaaacggggaaccgtaactgattctgcgcacgcgcggaccgtccgcgccgccactgcgcggacagtccgcaagccaatttcggtgctcaacagatatgtattggcagattatgacagtctccaacttgaaaacaattggcagtgaaggatgctcttgaacaatttgagaatgcattagagctgaatccaacatctattgaggcccaggcagcgctatataacaaggcatgctgccatgcgtatagagaagaaagcaaaaaggctgcagaatgtttaagggaagctttgagagactacaatctcaaatttggtaccatacttaatgatccagacttggcgccattcagagcatcaccagaattcaaggaacttcaagaagaggctttgcgtggtggagaagatattggttctggtttccgaagagacctgaaactcattagtgaagtacaagcaccattccgtggtgttcgaagattcttctatgtagctttgacagcagcagctggaatttcaacattctttaccattccccgacttgtactagcagttcgagggggtgatggcgcccctgatcttctggaaactgctggaaatgctgccatcaatattggagtatgccgcaggtattgttgttctggtagctttgtatttctgggaaaacaagaaagaagagaagcagatcacacaaatttctcgtaatgaaaccctttcaagattacctgtgcgcctgtcaaccaatcgcattattgaacttgttcaactccgggacatcactaggcctgttagtataactttctctatctttaatgtccactgtatgtttgctgaaattaattgtttttctcatttatttctgaaacctttattcagccacttgtcatttgaggtgtattttaggtgatattggcaggttcaaaagcatctgttactcgggcattgcaaagagctgagaggtatcggactgaactgctcaaacgaggcgttcttctaattcctgtgatctttggtgcttctcagaaagaccaaaccaaaccaaggggttttggtgcaagaagagctgctgcatcagttccttctgttggggttagaccaaccttacatattggctaaataccaaaaacctcacctgcctcttagtttgtgtgttttgcaccaaaaacttggtccctttctttgataatttaatgcaatgttgattttgacagggtgactttgaaaagcgtactgaatctattgcagcaaaatcacggttgaagactgaggttcggtttaaggctgatattgtttccccagaacaatgggaaagttggatacgagaccagcaagtgtctgaaggtgtcactcctggtgaggatgtctacataatccttcgtctcgatggacgtgtcagaagatctggaataggcatgccaaactggaatgacatattacaggaactgccacgacttgaagatctgatgagcaaacttgaacggtgaaaaaggtgtgggagcagctaaagttttaccattactctttttcccccattccattcgccttgcccttatctgctgaaacttgaagctggaccatcgtagttcttgtataatatagtgaaattctgctattttgtttatagcttgccgaagtttttctgtca

SEQ ID NO: 114858 - DNA, 1286 bp, Zea Mays
gctaaactagggctactcctaattcctaatgctaaggtgaaggatgctcttgaacaatttgagaatgcattagagctgaatccaacatctattgaggcccaggcagcgctatataacaaggcatgctgccatgcgtatagagaagaaagcaaaaaggctgcagaatgtttaagggaagctttgagagactacaatctcaaatttggtaccatacttaatgatccagacttggcgccattcagagcatcaccagaattcaaggaacttcaagaagaggctttgcgtggtggagaagatattggttctggtttccgaagagacctgaaactcattagtgaagtacaagcaccattccgtggtgttcgaagattcttctatgtagctttgacagcagcagctggaatttcaacattctttaccattccccgacttgtactagcagttcgagggggtgatggcgcccctgatcttctggaaactgctggaaatgctgccatcaatattggaggtattgttgttctggtagctttgtatttctgggaaaacaagaaagaagagaagcagatcacacaaatttctcgtaatgaaaccctttcaagattacctgtgcgcctgtcaaccaatcgcattattgaacttgttcaactccgggacatcactaggcctgtgatattggcaggttcaaaagcatctgttactcgggcattgcaaagagctgagaggtatcggactgaactgctcaaacgaggcgttcttctaattcctgtgatctttggtgcttctcagaaagaccaaaccaaaccaaggggttttggtgcaagaagagctgctgcatcagttccttctgttgggggtgactttgaaaagcgtactgaatctattgcagcaaaatcacggttgaagactgaggttcggtttaaggctgatattgtttccccagaacaatgggaaagttggatacgagaccagcaagtgtctgaaggtgtcactcctggtgaggatgtctacataatccttcgtctcgatggacgtgtcagaagatctggaataggcatgccaaactggaatgacatattacaggaactgccacgacttgaagatctgatgagcaaacttgaacggtgaaaaaggtgtgggagcagctaaagttttaccattactctttttcccccattccattcgccttgcccttatctgctgaaacttgaagctggaccatcgtagttcttgtataatatagtgaaattctgctattttgtttatagcttgccgaagtttttctgtca

SEQ ID NO: 114859 - DNA, 1295 bp, Zea Mays
gctaaactagggctactcctaattcctaatgctaaggtgaaggatgctcttgaacaatttgagaatgcattagagctgaatccaacatctattgaggcccaggcagcgctatataacaaggcatgctgccatgcgtatagagaagaaagcaaaaaggctgcagaatgtttaagggaagctttgagagactacaatctcaaatttggtaccatacttaatgatccagacttggcgccattcagagcatcaccagaattcaaggaacttcaagaagaggctttgcgtggtggagaagatattggttctggtttccgaagagacctgaaactcattagtgaagtacaagcaccattccgtggtgttcgaagattcttctatgtagctttgacagcagcagctggaatttcaacattctttaccattccccgacttgtactagcagttcgagggggtgatggcgcccctgatcttctggaaactgctggaaatgctgccatcaatattggagtatgccgcaggtattgttgttctggtagctttgtatttctgggaaaacaagaaagaagagaagcagatcacacaaatttctcgtaatgaaaccctttcaagattacctgtgcgcctgtcaaccaatcgcattattgaacttgttcaactccgggacatcactaggcctgtgatattggcaggttcaaaagcatctgttactcgggcattgcaaagagctgagaggtatcggactgaactgctcaaacgaggcgttcttctaattcctgtgatctttggtgcttctcagaaagaccaaaccaaaccaaggggttttggtgcaagaagagctgctgcatcagttccttctgttgggggtgactttgaaaagcgtactgaatctattgcagcaaaatcacggttgaagactgaggttcggtttaaggctgatattgtttccccagaacaatgggaaagttggatacgagaccagcaagtgtctgaaggtgtcactcctggtgaggatgtctacataatccttcgtctcgatggacgtgtcagaagatctggaataggcatgccaaactggaatgacatattacaggaactgccacgacttgaagatctgatgagcaaacttgaacggtgaaaaaggtgtgggagcagctaaagttttaccattactctttttcccccattccattcgccttgcccttatctgctgaaacttgaagctggaccatcgtagttcttgtataatatagtgaaattctgctattttgtttatagcttgccgaagtttttctgtc

SEQ ID NO: 114860 - DNA, 3043 bp, Zea Mays
atggcagacacggtcacgggcagttcaaggaggtcacaagatgacactgcaacattaatcccacacagtggcaatttgggaggatcaagccggaagggcgtgaaggccgccaggttcaaagatgatgatgaggttgtggagatcaccatcgtacagcgcgattccatggcaatcgaagatgtcagggtagtcgatgatggcggctcagggcatggtggtgggtttgacggcctgtcacttgtgtcaccttcctcgtcaaggagcggcaagctagcatcaaagtttaggcaggtgaaaaatgggctaaagatgaataactcaagcaataaggcgccacagacacagttgggaaagaacgtgaggaagagattggacagaagcaagagcggtgctgctgttgcgctcaagggcttgcagtttgtgactgcgaaagttggtcatgatggctgggctgcagtggagaaacggttcaaccagctacaagttgatggcgtgctgctacgttcgagattcgggaaatgcattggtaatttcagtggtcctattgaattcgtatctgcatacagctatttgaacaacactaatacaagcattgctttggattgtgcagggatggatggatctgatgagtttgcaatgcaagtcttcgattcattagcaaggaagagagggataacgaagcaggtgctgactaaggatgagctgaaagatttctgggaccaactaagtgatcagggttttgacaaccgtctgcggacattctttgatatggttgacaagaatgctgatggaaggatcacagcagaggaggttaaggagatcattagcctcagtgcatcagcaaacaagctttccaaactcaaggaacgagctgatgagtacacagcactcattatggaagaacttgaccgtgacaacctgggatacattgagcttgaggatctggaggcacttttgctgcaatcaccatctcaagctgctgcaagatcaacaacacatagttcgaaacttagcaaagctcttagcatgaagcttgcatcaaacaagggcacaggtccattttaccactactggcaagagttcatgtacttccttgaggagaactggaagcgcatttgggttatgactctctggctctcaatctgcatttgcctctttatatggaagttcatccaataccgtaatcgagctgtatttcacatcatgggttattgtgtgaccactgcaaaaggtgctgcagagactctcaaattcaatatggccttggttctatttcctgtttgccgaaatacaatcacttggattcgatcgaagacaaagatcggagctgttgtgcccttcaatgacaacataaacttccataaggtaatagcagcaggtgttgcagttggtgttgctttgcatgcaggtgctcacctgacatgtgattttcctcggctgctccatgcaagtgatgctgcctatgaaccaatgaagcctttctttggagacaaaaggccaccaaattactggtggtttgtaaagggaactgaagggtggacaggtgtggtcatggttgtacttatgactatagccttcgtattggcccagccatggtttcggcgtaataggctcaaggattctaatcccctcaagaaaatgactggcttcaatgccttttggtttacgcaccacttatttgttattgtgtatgcactgctcgttgtccatgggatctgcttatatctaagcaggaaatggtacaagaaaacgacctggatgtaccttgctgtccctgtgctcttgtatgtaagtgagcgcattcttcggctatttaggagccatgacgctgttaggattcagaaggttgcagtgtatccggggaatgttttggctctctatatgtctaagccacctggattcaggtaccggagtgggcagtatatcttcataaactgccgtgctgtctctccatacgaatggcatccattttccattacatcagcaccaggagatgattatcttagtgtccacattcgcacaaggggtgattggacttcacgtcttaggactatcttctctgagccgtgccgccctccaactgatggagaaagtggactcctaagagctgacctttccaaggggatcacagagagcagcgccaggttccctaaactcttgattgatggaccatatggtgctccggcgcaagactatcgggaatacgatgtgctcctgctcattggactgggcattggagccactccattgattagcattgtgaaggatgtgcttaaccacacccagcatggaggatctgtttcaggcacggagcctgagggcagtggcaaggccaagaagaggccattcatgacgaagagggcctacttctactgggtgaccagagaagagggatctttcgaatggttccgaggggtcatgaacgaggtggctgagaaggacaaggatggagtcattgaactccacaaccactgctctagtgtgtacgaggaaggggatgcacgttctgcactcattgtcatgctccaagagctccagcatgcgaagaaaggggtcgacatcttgtctggaactagtgtcaagacgcacttcgcgcgtcccaattggcgaagcgtcttcaaacatgttgcagtgaaccatgagaaccaacgcgttggagttttctactgcggtgagcctgtccttgtgccacagctacggcagtggtcagcagacttcacccacaagacgaacacaaagtttgagttccacaaggagaacttctaatggcataactggagaagctctggacgtggtcctctaatgatttcagaatgtgaattaccagggttgtaatatatatacgagtagaataaaatgatgggagttattttgttatagatgtcaaaagtcaaccatgttctttttgcaatgtgctctgtccatccctgtttactcctctatgccgtctaggcgaagtagataatgtatcttttgcatacaagcaacattagaaggtgtaacacatgattttttttttgataaaggaagattttattaataa

SEQ ID NO: 114861 - DNA, 108 bp, Zea Mays
caatgccaccaaaagcacatgcgttttgtaggtagtagcagtccgagggagtcaagctgtccatccagcgtttgcgtttgctagggagaaaacgtaaaatacatcaac

SEQ ID NO: 114862 - DNA, 933 bp, Zea Mays
ccagtactccatctatccagtagtacacaaacacaacacattacatacatcccacgctctctgccgcacaggccacacacgccccgctccgcccgtctacccttcacccaagaaccgcccgccgcgccgcgccgctcccatggagacgccgacgccgcgggtgaagcccgggttcaacggcgtcggcgtgggcatggggtcgtccgtgaacggcagcagccgccgcgccggctactacatgggcccggccggcgcagtggccgtggcgggcggcggcagggcggcagcagcagcgccggtagacgggtgcagcgtggcgctgcgcgtgtttgtgctggcggcgacgctggtttccgcagtggtgatgggcgtggaccggcagacgagcaccatccgaatcaccgtcaccgacgcgctgccgccgctggaggtgcccctcaccgccaactggtcctactcctccgccttcgtctacttcgtggtggcgaacgccatggtgtgcctgttctcggcggcggcgctggcggcctgccggagccgcgccgccatggtgcccgtgatggtgggcgacctgctggcgctggccctgctctactcggccgtgggagccgccgcggagttcggcatcctgggcgagcgcggcaactcgcacgtccgctggcctaaggtctgcaacgtctacggccgcttctgcgagcgcgccatggcggccgtcatcgtctccctcatcgccgcattcgccaacctcgtcctcctcatgctcaacatcctcaccatccacaagagctcttcctactactaagctagctactatagtatagagaaaagaaccatatacaatgtgagctagctactcatatatagctgttgctgtttgcaattgcatgcatggggattaactaaagatcgaccccaacttgttgaaagagtcca

SEQ ID NO: 114863 - DNA, 474 bp, Zea Mays
tttcaacgtagatattaactaaatgaaagcttttacagcctagtggtcactaaattttggtcgagtgagttcaatttttcctcctctagtattaatgaatttaattgcaagggcagggtggggaaaatgagttttaattaatggaacattaacaaactataattatgaaagtgtctactgatcaacatagcacagaccctagcaaggacacttgagtagctgctctctaaaattgatgtagctcaataagcagcagcaaggtgttgtgatcatgcagttctgttgcattcaactattgtatatttagcttaatcatggagcaatggtggtatctattctatagtttattttggaatggatttctaagtagtctactaatgatttgggttttaattttgtcaggagggaggtcctagaggtagtaagtcacttgtttactccatgatgacaatagcaagcagatcacggtggtgc

SEQ ID NO: 114864 - DNA, 457 bp, Zea Mays
atgctccaccgcggcgtgttctccgtcgatcagaacctctacaaggacggctctacgcgctggatggtcgaccagctggccaaggttctcgttaagctcagcgaggtcaacgtgctcaccggcgtgcagggggagattcgaaagattggaaaggatgtgatcttatatgccatattgagagatcatcctgtggctaagggaacaattatttcaactaatccaagctcagtgctaggaggagttgctctaggaaagcaatattgtgcggttgttgtgaatgttgtgctgaaaagggatgcccttctacctcgcccatatggttatttggaggagatgggtgatgctgatcggatgtcgatcgcatggccgtacaagagagtaataagctatctctttgttgttttttcatatatggtgattgcatattttctaactaatggtttctatgattatatag

SEQ ID NO: 114865 - DNA, 874 bp, Zea Mays
aaaccgttttatacttggtcgtgttgagtcgttgcccatttctttggagaccaagttttgcttactttggatgacttgtttggccattttctggcttttggtcatttgagtgagtttctcttcttcttcttcttcctctttctgcttatatatgttcatgtggtggtgttgacattgcactcatcaaatgggagattgcgaacacaagattgagttgtcccttgtggtttgggttgataatgagtgattgtcttaacgggtagcactcttgggtactcagtggactgacccgagtgtgagattatgtatgtgcaaccatgtcggtcggcttgtgctgtctaggtgtggagaacagggacagtaatcgacggctgaggtgaaggtcatgcggtctcgtgctgatggaccgggagcgatgaaggacgagtgttggatcttggctgacgaattggagtagatgggtgaccatccatggtggttgacacctgggacatgcactcgcgtaaggatatggtggagtggaccatcctgttggcgcgatcgaggactggcaggacacatgtctggtcatggaggacgcacatgtggtgctgtgatactcatgacggtttggtggttgagcctcaacaccatcctgcgttacggatgttgggttttgctaagtttgggcctcaaaactcgatggcggcggttctggagggatccggtggcggcacgtggcatcacagctaagggtttgtcaaggcgaagcaagttcgtgtggagcatgtggccatcaaatcgaaaacctatgagttggtctatttctcccctagcggagtcaatagactccatataaataggggtagtttacaaaatacaaataaccctctat

SEQ ID NO: 114866 - DNA, 122 bp, Zea Mays
atgatcctttgttttgatagagaacattttctaatgtctacctctttactaacaaatgatttagctaacattatctttttatgaccaaacactttggaaaggggtaaattctaaagtctaat

SEQ ID NO: 114867 - DNA, 1029 bp, Zea Mays
gcaagatagatgacagcacctttttatcctcttccttaccgggaaggcgcacttctcttcttcttctggccttcacctcctgcccggcccagaaatagaacccagccccctttctgatccattcatttctgcaagcaggcgggatccagagctaagcccccctcctattcgaagccgggtgtggcctcgcccttttgctcttccttcggtttggctccacgaaggcgccgcctagactaggagccccactcatattcaaaaggcgcccagctttcaagacgatgataataagtagttaggctgccattattccaatatcatggaatagcatggcccggggctaaggtaactccagtgggagagtcgtgttatgggtgaccttattgcacggttcagagagcacttgtgtatgtgatgcaagtgaacgtgtacgaaaaagctgtcgtaaagtttcgttgttcgttccgtcgttgaccctatctatgtttctacgatggcccaagaacacgctcattcttcagccgtagagagacttgtgaattgtgaggtaccattacgagctcaatatatacgagtgttattctgtgaaataactcgaatttcaaatcattcacttgcttcaactactcatgctatggatgtgggagcatcaactccgttcctttgggcttttgaggagcgggagaaattgttggaattctatgaaagagtcccgggagccaggatgcatgccagtttcatacgacctggtggagtggcacaagatctgcctcttggcttatgtcgagatattgattcctccacacaacaatttgcttctcgtatcgacgaattagaagagatgtcaaccggcaaccgtatctggaaacaacgattagtggatattggtactgtcactgcacagcaagcaaaggattggggattcagtggtgtaatgttaagaggtcgtgcgacatgaagacactgatagcaatatgggggaagttcccatcaggcaacaacggttctgcccgaccctacaaaagcatt

SEQ ID NO: 114868 - DNA, 118 bp, Zea Mays
gacattatagtaggctaagaaaacttaatatggtcatgcatccacagaaaataattaattttagaattaacttgctctcacaagctttattgcattaacaatttgttatttttgtagt

SEQ ID NO: 114869 - DNA, 947 bp, Zea Mays
tggtcgaggtcaaagtcatccatatcccattttatttacacccgaagtggaattccaaaaaacccttgaaaacgacattacaccaataaataaatcaaagttaagatgttagaacagtgaagttcaacttcaacactttcgaaagacgagaagtcgaaacgggtttctctattgttctcctcactgacatgtgggtgctcaagtgctatagtccctgctttgccaagcttctcggactgctcccatggatggtagtaaagaaaacgagttctatttgtgtatatcgtccttcctttttgcgtcccaagcaaccagtgcctcctttctccacactcgaagcaactgtctcttcctccggcgctttctctctccctctcactcatactctcgttctccagtctctccatagaagaggcgtgtcaggtttcgcccaccgcgccatgggatcgggatcgtgctgctgcatagggtgcaacggcggcggcggcgacgagggcggagttgacgccggcggcggcctcgaccccaaggggttcctgctggcgatgatgattgccctggtgcttctaatgctctgccacgtacgcccgcctcgccggaactcgtacgtcgtgtaccgcagctactgatcgccgacgggtgccaagctgaaaggtctctccatccggccccttcgtcgttccgattcctctttggccgacatgctttggtaaactcactcgattctttgtccgtcgtctgcagtggcgcgcgcgcaattggctgggtttttaatattatatagcagtagtataacatagcgtatgtttttagaggggggggggggggggggggggatcagtagtacacgtttgatgtgaatgatgtacccaactgaaagagagattgcacagcgaacctttgcgtctgttcttggccggacaggataattttcaatttcctcgacc

SEQ ID NO: 114870 - DNA, 1409 bp, Zea Mays
ctacagcgtacagggtatccgtcctctccgtttactctttcctcaccatcacatcgccgctgccgcgacccgcgggccgacgagatgagagccgccgctgcggcctccttccatctggcacccgccacgaaaccggcccatcgccgcggctgcaccacagagtcctgttccctgaagcctgcgccgactgctcggccacctcgcctccgctcgctcgccggccgggcgcctcttgtctgcgcctctctcgggatatctcatgataaagggttcgacatttctgaccccaatgttgttggacagaatgatttactgattgtgggccctggtgttcttgggcgaatcatagctgagaagtggaaaaaggagcatccaagttgcaaagtttatggccagaccgcaagcaaaaatcatcacaacgagttaacagatcttggcatcatcccctcattgaaaggcaccactattcatcagaaggttccacatgttattttctgcgctcccccgtctggttcagatgattaccctagggatgtcagattggcagcatcaaattggactggtgaaggatctttcctgtttacatcaagtacagctctgtatgattgcagtgacaacagcatgtgcaacgaggattgtctgtcagtgccaattggcaggagccctcgtactgatattcttctaaaagtggaaaatgttgttcttgaggcaggaggctgtgttctcaggctggctggactttataagatagacagaggtgcacatgttttctggttgaggaaaggaactttagacacacgaccagatcatatcatcaaccagattcattatgaggatgctgcctcccttgctgtagcaatcatgaaaaagggactgcggagtcgaatatttctgggttgtgacaacaagcccctttccaggcaagaaataatggatgctgttaacaatagtggaaaatttgacacgaagtttggaggctttactggtactgacggtccattggggaagagaatggagaattcaaaaactcgggctgagatcggttgggaaccaaagtatccaagcttcaccgaattccttggtatcagcagttaacatccttgcatactgttcagttagtctgactcagctgagtagcaaccgtgattagattgtaccatcgtttgaatttttatggcctgaaccggtgatggtgtacatctcagcctactttgggcctgtccccagtatttttgattttcacactatttgagctatgaaccagacagatgccaccccatcccatcggataatatatattgtcacgtgagtggatttgtcgatcatgaacctacgtggctacatatggtatactctaccgactatcgcgctgcaaattgatttcaacaaactgaaattgttgcagagaa

SEQ ID NO: 114871 - DNA, 1477 bp, Zea Mays
tccgtcctctccgtttactctttcctcaccatcacatcgccgctgccgcgacccgcgggccgacgagatgagagccgccgctgcggcctccttccatctggcacccgccacgaaaccggcccatcgccgcggctgcaccacagagtcctgttccctgaagcctgcgccgactgctcggccacctcgcctccgctcgctcgccggccgggcgcctcttgtctgcgcctctctcgggatatctcatgataaagggttcgacatttctgaccccaatgttgttggacagaatgatttactgattgtgggccctggtgttcttgggcgaatcatagctgagaagtggaaaaaggagcatccaagttgcaaagtttatggccagaccgcaagcaaaaatcatcacaacgagttaacagatcttggcatcatcccctcattgaaaggcaccactattcatcagaaggttccacatgttattttctgcgctcccccgtctggttcagatgattaccctagggatgtcagggctagggcttgggacctgctatgtttagacaagctcaaccatcacagtatcatgcatagtgacagagaaaggggctgtaaaacatgggtgatttctcaattcttgagattggcagcatcaaattggactggtgaaggatctttcctgtttacatcaagtacagctctgtatgattgcagtgacaacagcatgtgcaacgaggattgtctgtcagtgccaattggcaggagccctcgtactgatattcttctaaaagtggaaaatgttgttcttgaggcaggaggctgtgttctcaggctggctggactttataagatagacagaggtgcacatgttttctggttgaggaaaggaactttagacacacgaccagatcatatcatcaaccagattcattatgaggatgctgcctcccttgctgtagcaatcatgaaaaagggactgcggagtcgaatatttctgggttgtgacaacaagcccctttccaggcaagaaataatggatgctgttaacaatagtggaaaatttgacacgaagtttggaggctttactggtactgacggtccattggggaagagaatggagaattcaaaaactcgggctgagatcggttgggaaccaaagtatccaagcttcaccgaattccttggtatcagcagttaacatccttgcatactgttcagttagtctgactcagctgagtagcaaccgtgattagattgtaccatcgtttgaatttttatggcctgaaccggtgatggtgtacatctcagcctactttgggcctgtccccagtatttttgattttcacactatttgagctatgaaccagacagatgccaccccatcccatcggataatatatattgtcacgtgagtggatttgtcgatcatgaacctacgtggctacatatggtatactctaccgactatcgcgctgcaaattgatttcaa

SEQ ID NO: 114872 - DNA, 270 bp, Zea Mays
atggcgcgcccctctccttggccccagcttggagcttgctcggcctccagctccagcgcccggtgcgagctctcctctggtgccaggtcgtgcgcatccgtcgctgctcccttcctgctcgtccatggccgaccagcccgccatggtgtcgcgcgtccgtgtgccctacttgtccctgaccctcgcgctggctcgcctcatcgccgatttccaagaaccagcgccgtcagcttgccggtctccatttcagcgctcgagctcctcagctag

SEQ ID NO: 114873 - DNA, 264 bp, Zea Mays
ctttcaagaccatagtcatcttttgtgaaatgtgccaacatccgatcaatgaaaccaaaagggacatgcttgccttcaacatcctgttgtcccacacaagtagtcatttgtgaaatgctaaagaaactatcctttgagaccgcagtgatccatagccttcaaattgttactttcagacaagctattccgagcactgctcctagcaccatcacgagctttgataataacctgaacaaaaagggattgtattgaggttaaaacaac

SEQ ID NO: 114874 - DNA, 396 bp, Zea Mays
ccatgaccgacgaccaacgagagcggcgtgcgacgcctttaggcgacgaaggcagcccacaccatgtaaacgacgcacagcggtggaagcacgcaatggcagccgagctcgcggtggaggccgccgcgcttgtcggcctcccgcgcggatgactcctcgccggctccgttcgagatgacggtggaggacacgctgaagctgctcggcgtcgcagagggcgcgtcgttcgacgaaatcctgcgcgccaagaacgtcgtcctcgcctcctgcaaggacgaccaagacgccgtcgcccagcatgttggaggaactctagaaaaagctagtgaaattgtctgcaagaacaatggcttgagtattgcacaatggttcgaattctgcataggggcaaggtga

SEQ ID NO: 114875 - DNA, 362 bp, Zea Mays
gtcactaacatctacaggtacgtttaggctataagatttgatagtgatccttgctctatagcaacccaccgctagtcaccgacgacatctatagcgaccaaccataagttgttaaatttctagacttttagcgaccaaccgatcgttgctacaaaaggatttagcgactgactgtcggtccttaacctttagcaaccaacagttggtacctaataagggtcgctaaagatcaaccgtcgtgtagtgttagctttgtgccgcactgtgcgttgtaatgaactatttgtggattttatgtttgtatggactatttctggactttatatttgtatggactcaagttttatgttgtgaactcaaat

SEQ ID NO: 114876 - DNA, 633 bp, Zea Mays
atggctgaagatcgtgcatggatgtacaatggctgcagtagaaatggacatcattctgatgagtgggtagccaagaccaaagattttgtggaccacgtattcgccttgtccttaaccggcactgtcagatgcccttgtaggcggcacgaaaacagtatatttcttaataaggaaagagttagcctagatctttgtcagtttggatttatgcccggatatgaggtgtgggaacatcatggtgaggtagtacccaaccggaatgtagaagaggaggagaaaaatgattgggctggcgatgaagcgatgcatgagatgctagattcactacgtccagaattcaacctaagctccgaggatcctgccacaccagaggtttccagattttttaaactactaaaagactctgaagagccgttgcatgaacacacagatgtgagtatactcgcttttgtgactcagctcatggccattaagtccaagtactttttctcgaacaattgttacaatgagattttaaagttattaagagatgtgctcccaaagcccaataagtttcctaaagacatgtaccaatcaaagacaattatcaaaggtctcggtatggattatgagatgtttattgtgcaaaaataa

SEQ ID NO: 114877 - DNA, 512 bp, Zea Mays
cccagtcgtactcgtacctctaagcaagcaagcagcaggcaattgctagcactcgtacaagaagcaaaccccgcagagatcttaattactagctagtcgcttaattcgatccttcacatggagcatgtggcaaggctggcatcgcagcgtgcagtggtgatcttcagcacgagctcctgctgcatgtgtcacactgtgacgcagctgttccgcgagctaggggtgaacacgatggtggtggagttggacaaggacccgcgggggaacgagatggagaaagggctggccaggctactgggccgcagtgccggcgtaccagcagtgttcatcggcggcaggctcgtcggctccacggacaaggtcatgtcgctccatctcagcggcaacctcgtccctctgctgcgcaatgccggggcactctgggtctaatagctagcttggattcattgtagcgccttatgctagctctctgtgcgagtcagctgctcgagatcatcagctgacaatatata

SEQ ID NO: 114878 - DNA, 561 bp, Zea Mays
atgcacattaaagatggaaaagctacatatgtatcaagatatgtgaagactgtccgcctcaaacaagaggagtattttggtggagcgaagtttatgaagactctattcctgcttgtacacttcaatgctttgcttgggcatggaggtactgctggtaacaagttctggatgtcattaggtctaccattgatagctactgtgaactgtgctggtaacactggagccaagaacctctacatcatttctgtgaagggaatcaagggcgccttaacaggcgtccttctgcctgtgttggtgaccatggagaatggaaagcctaaccttaggaagaagaagcaagacaaatataaggatgctgaacctagtgcaatagatctttttaaggagatgcattgcagcaaaaagaaaggttttagcaaaaatgttcagaaagctattgttgatatggaagaaatggtggcaacatcagttcaagatggacaacaaccgaaatatcctacagaagttgtttatagtgtgcaactgggctccagtgtgttcttatgcaatcttggtctttag

SEQ ID NO: 114879 - DNA, 1333 bp, Zea Mays
ctacaaatatatggctgcagctgaggtccgacaccacacaaacagcacatctgtttagccaagctgtggccaacctctgcgaggaatggagatggagtcgactcctctcttgacaccatacaagatgggcgatttcaacctggcacacagggttgtgctggcgccgctgacgaggtgccgggcgttcgggaacgtgccgcagccggagcacatggctctctactaccgccagcgggcgacgcccggcggcttcctcatcgccgaggcctgcgccgtgtcggagagcgcgcgcgggtacccggacgttccggggctgtggacccaccaacaggtcgaggcctggaagccgatcgtcgacgccgtccacgccagcggtgccgtcttcttcgcccagctctggcacaccggccgggcctccccctcagaattccaaccaaatgggcaggcaccgatctctagcacggacaagcaaatcccagcacaggtgaaccattccggtgacgtcaacacgttcgcggtgcctcggagactagagacagaggagataccacacgtcgtcaatgacttccgggttgccgccagaaacgccatcaaagcaggctttgatggagtggagatccacgcggcaaacgggtacctgttcgatcagttcatgaaggacagcaccaatgaccgagacgactcctacgggggcagcttggagaaccggtgccgtttcacagccgaggtgatggcagccgtcgcggacgaggtcggtgccaaccgcctcggtgtgcgcctctctccgttcgcggattatatggactgccacgactccaacccagaggcgctcgcgcttcatgtcatcgacgagacgctgaacccgctcggcgtgctttactgccacatggtagagccaaggatgcgggtgaacccagacgacggtattatgactctcgagcacatgctgctaccgttcaggagggcgtttcgcgggacgttcattgctaatggaggctacgaccgtgaggaaggcaatgacgccattgcccgtggccgtggctatgcagatctcatcgcatacggccggatattccttgccaacccggaccttccgatgcgttttgccaagaatgccccgctgaacaagtatgataggagcaccttctatacctctgatccggtggttgggtacacagattatccatttctcgatcaactctaggatgattggcttataaacaatttccccacctggagtactatcttgaccttaaaataaaatgagtgtcactataatattaatgtcgatcaaagttttctaagtttaactaaatctacaaaaattattatt

SEQ ID NO: 114880 - DNA, 1076 bp, Zea Mays
tggcgtacctggaggcgtacgccgcggcggcgggcgtggcgccgcggttcggcgcccgcgtggaggaggccgcgttcgacgcgggcgccggcgcctgggcgctccgcctggcgggcgctggcggcggcggcgccggcgacctgctcctggcgcgctggctcgtcgtggccacgggcgagaacgccgtgccgcgcctgcccgacctgcccggcgccgcgcgcttcgccggccgcgtcctgcacacgtgcgactacaggtccggggaggagttcgcggggaggaaggtgctggtggtcgggtgcggcaactccggcatggaggtcagcctggatttgtgccgccacggcgccgcgccgtcgatggtggtgcgcaacacggtccatgtgctgccgagggagatgctgggtctctcgacgttcggcatcgccatggcgctgctgaagctgctccccgtccgggtggtggaccggatcctcctggcggcggcgcggctggcgttgggcgacacgggcaagctcggcctgaggcggcccaagacggggcccatcgagctgaagaacctcaccggcaggacccccgtgctggacgtcgggacgctagcccacatcaaaaccggcaaaattaaggtagtgggagcagtgaaggaggtgacccagcgcggggtcaggttcgcggacggcaaggaggagcagttcgacgcaatcatacaggccacggggtacaggagcaacgtgccgtcctggctcaaggacggaggcgacgtgttcacgagcgaagggatgcccaggatccccttccccaacggctggaaagggaagaacgggctctacgccgtcggcttctcgcagcgggggctgctgggcgcctcggccgacgccctcaacatcgccagggatatacaccgtcagtggacggacacggccacaagacccgtcgtgctccgatgtaacagtgctgtcgtctgactcgttttgaccccgcgggaaccccccgtgtgtgtgtgtcactgtgtgttagtgtacagaagtaacacaaccgatgcaagtggttatatatatcccatctcttcacaaggt

SEQ ID NO: 114881 - DNA, 138 bp, Zea Mays
atggcgcaggtttccgttggtgaaacatgggagagtgtcgagtttgaagaggactaccagcaatggcggacaagaccaagcaactttgggagcagcaacagctcatgcaaaattaagcatgtgacgatgaaattgtaa

SEQ ID NO: 114882 - DNA, 2284 bp, Zea Mays
atacgaataaagagagagacgatcatagttttataaaagtaaattgtgttccatatgaacgaaacagttcaatgtttctaacatattaggcccaattgagcaatcgtccgagagggaaattaagagtgcatttcataccgtatgtgccgaagctaagatcatcagctttcattgtcatgagtgaaacttccattccatcatcctacacctcttgtaactcactctcagaaataggtaaaaatgatctagctactgggaaatgggaatggccttagcagttagtgcaaaccgaaataatgcccccctagccccctgcacaagattacgatattcattgcaactagaccttatagcatcatcaggccaacaaaccaacggcaaataaaaacagaaagtgctaaatttacagtagtggatttgagactcaacatgttcctggaacacaaactaaatttctagctgttttgcagagagcactaccaaatggtgattatagtttcataggcatcagcgttagaatcaaattgtatgctcagtacagtacaaaaggcaccgaggcctaccgagtggagtgtgtaggtttggcaaggcttggccgaaaccagagttgcccccacacacacactaacgtccagaagagcatgcaatatcaccagttcaatgacggaggtaatcgaattcagccttcgcgagtcagtgggtacccgcagagaggaaggaatcaggaatagcagcaggatccagctcgtagaagccacagagctcgccacccttctctgttgtcagctggaaagagggtatccggtgagaaaacagcaagtcatcctttgttggcacctccagaatactcctctcattgtctggcttgaatacagttttgtagccatctacctgagtcagaaataagactttcgtgctagcttcattgcgctcagttatctcgccaatggcatattcgcaggtatctttgctaggaacccagccaggtgaccaattgtggtagatcgcccaaatttcccctacttctgggtggatttcaaagttccgcttcgaaccaccttgtgtttctactacatgagagaatgcatcgtttatgtcgtacttcatcctccagttatgaagtttaaatgtcccacagctcacgggtaagtcatgctctaaccatgtgttctcatgctctgatcgagggcaagcttccagccaagtcaggtgcactccaaatggatctgaatcaacttttgtaacccaaccatagtatttgggaaggccatcaaaatcactgtaaagagcccatatctgtcctcgttcaaacttattatatgaccggtcttcttcaaagttgtagaacaatgaatctggatatgtgaaaacagaggtggatgcacagacttggggagcagaataaccagacatgctagcaaggcgggcattatgctgctgagtttgaacggattgttttctccacttgcctgcatttctatggttgcccttatgagcacttcgtccatttccatggctgggtgtagtattgtcagtcaaatcaacagactcgctgcccattgttctattggtagccacacatgaatcaagatcaacaggtggaaatgctacgtccaggttactaggaagcgatacggtatctagttcaagaaacccacaagggacaccaaccttctcgtttcccactgttctgaaaaatgggatgctgtgggaaaagcgaagtagttcacttgatggtataacaaatgatggtttgtcctttgctggtgcaaacagactcacaaaacctttaaccttgaccaaggggataacagtcacaccagcttccactgtgaagtttgaaaggacctccaccacttcatactcgtaggatctatgactgtctgcatctgagacccactgcatactccagcccttataaagagcccaaacctcacctatatttggatatattacataagaacccctttttcttcctttaacccacgaaaccatgtgagaaaacatgaggggatcttgtgactcctctgtgtttcctaacgtaaagttcccacaagccacaggaagtttattatcaatccatttttcctcatcatcattcactgtagaatgctccagccaagtgtacttaactctgaagttggtggtattaacatgtcttattctagcatagaatcttggcatggcatcgaattcatcataaagtgcccatatctgatcaactgcaaacagtttgacatctctgcacttgtcgaagtcaaaaaattctgggtcagggtacgtg

SEQ ID NO: 114883 - DNA, 1852 bp, Zea Mays
agggaaattaagagtgcatttcataccgtatgtgccgaagctaagatcatcagctttcattgtcatgagtgaaacttccattccatcatcctacacctcttgtaactcactctcagaaataggtaaaaatgatctagctactgggaaatgggaatggccttagcagttagtgcaaaccgaaataatgcccccctagccccctgcacaagattacgatattcattgcaactagaccttatagcatcatcaggccaacaaaccaacggcaaataaaaacagaaagtgctaaatttacagtagtggatttgagactcaacatgttcctggaacacaaactaaatttctagctgttttgcagagagcactaccaaatggtgattatagtttcataggcatcagcgttagaatcaaattgtatgctcagtacagtacaaaaggcaccgaggcctaccgagtggagtgtgtaggtttggcaaggcttggccgaaaccagagttgcccccacacacacactaacgtccagaagagcatgcaatatcaccagttcaatgacggaggtaatcgaattcagccttcgcgagtcagtgggtacccgcagagaggaaggaatcaggaatagcagcaggatccagctcgtagaagccacagagctcgccacccttctctgttgtcagctggaaagagggtatccggtgagaaaacagcaagtcatcctttgttggcacctccagaatactcctctcattgtctggcttgaatacagttttgtagccatctacctgagtcagaaataagactttcgtgctagcttcattgcgctcagttatctcgccaatggcatattcgcaggtatctttgctaggaacccagccaggtgaccaattgtggtagatcgcccaaatttcccctacttctgggtggatttcaaagttccgcttcgaaccaccttgtgtttctactacatgagagaatgcatcgtttatgtcgtacttcatcctccagttatgaagtttaaatgtcccacagctcacgggtaagtcatgctctaaccatgtgttctcatgctctgatcgagggcaagcttccagccaagtcaggtgcactccaaatggatctgaatcaacttttgtaacccaaccatagtatttgggaaggccatcaaaatcactgtaaagagcccatatctgtcctcgttcaaacttattatatgaccggtcttcttcaaagttgtagaacaatgaatctggatatgtgaaaacagaggtggatgcacagacttggggagcagaataaccagacatgctagcaaggcgggcattatgctgctgagtttgaacggattgttttctccacttgcctgcatttctatggttgcccttatgagcacttcgtccatttccatggctgggtgtagtattgtcagtcaaatcaacagactcgctgcccattgttctattggtagccacacatgaatcaagatcaacaggtggaaatgctacgtccaggttactaggaagcgatacggtatctagttcaagaaacccacaagggacaccaaccttctcgtttcccactgttctgaaaaatgggatgctgtgggaaaagcgaagtagttcacttgatggtataacaaatgatggtttgtcctttgctggtgcaaacagactcacaaaacctttaaccttgaccaaggggataacagtcacaccagcttccactgtgaagtttgaaaggacctccaccacttcatactcgtaggatctatgactgtctgcatctgagacccactgcatactccagcccttataaagagcccaaacctcacctatatttggatatattacataagaac

SEQ ID NO: 114884 - DNA, 863 bp, Zea Mays
atgcagtttttggctgaagcttctgtagttgtatggcttggtgctacacaaaatgtgaggaaagtgattcccaatttgccctgtcagactgtgcagatggagttggtttcagataacagaaataaaaaccagggcaggatgctcgactttggggcaatcaaagtggaagaccaatacttggtgaacaagtttggtgtaatgggcaaggaatactatgaagtggatgaatctggtatagattatgttataacatctgcagcaaaaaagtggagagagtttaaggctgacctaaagaacaaatattttgatgaaacattgagttttgaagagcttattgctaaaagggatgaaagggtgaaagaatctgattgggagtggttgataacttattggatgtctccagaagccgaggctgagcaacaaggacgccctgtgagaagagatgaaatatatgttagaacacacacgcgtaagaacaaagaaggggatattgtgcctcgacctggagcagaaatattcattaactcaagggtgcatcggtcagatgaggtggcacatgattacaatggtaatgaccattcacaaaatatggttgaagatgacttgcaggttattactaggcgagttgcaagcactatgggccgtccaaggaatcgtgaagatgttaatactattgaagagcaaagtcgcaggcgagacattgcaacaatgatgggtcgtaacaaaaaatcaacattgactcaaggttctacagcagcagaacttattcagtgatcttttggcccatctttgctgataccgacaaagtacgcatgctgctgttgtcaaggggaggtgctggaagtaaggatcagagtgcttga

SEQ ID NO: 114885 - DNA, 360 bp, Zea Mays
atgaacaacggacgaggtgcatcaacgtgcaaggtcgacatcgcggttgagcattgtgttgagcgggtggcatgtgcggtggagcagcagcatcgctatgtttgggtcgcgggtggtcgatggagctggagggctcagtggccattgccagtgctggtgagcacaagacacgagtggggaagcccacgacctggtggaggccgagcaccaaggggaggcgagggaggagggcatcgacgcttccatggagaagggctactgggcgctaggctcctgcccatggggcttcctgcgcgtgcgcttgagggagcagtggccagagatggcgtctgccctgaacaagatcgagcatggtcctag

SEQ ID NO: 114886 - DNA, 473 bp, Zea Mays
acgcaatcccctctctcccacacgactgcaggcagcgactccatctccctggctcctaggacaccgaagctccatggctgcccagctccttccctagccaagctatggcttctcccatggcgccaccctttccctcggcgccttcccccagcgggattcctcctctcccatggaaatcagcagcccccttcttcctcaactcggacccgtacaacaggggctttcttccccacagtcggtcgtcgttctcctggccctgctccacgacgcccttcttctccaggccggtgtgcaggccctcttcctcctcatgccgagagtccctgcctccccttctccccctctgcaccatggccggttccttgttcccctcggaacccagcagggagagcaagcgccccttcccctagcgaatccatgatgctaggaggatctcctcctcggtcggcgctccaacccggcgtccatggcat

SEQ ID NO: 114887 - DNA, 1957 bp, Zea Mays
ctttttctgtgccgcgctgagcccctttccctgccgcgttgccctctctcttcaacctccagccgctcctcccatctcactccaccacgccctcggctgcttgctctgctcgccgcgcgcgctcctccctgcgcgccgctcagccttgccgtcgccctgtgcgcgttcttctctgccatggccgcgccctgttctcttcatcctacgccgcgaaccccgccgtggaccttccccgagctcgccccatggcgcccggccgagctcctccctgccgtgttcttgctcagcgtccagttttcctgcgcgccgcggtattcctccccgagctcgccccagccccctgtatcccccatggccgaagcttcttctagctccagctcggctccctctcccatcgtcttcttccccgctggcaagctctgcgaacgccaccatgcatctctggtgctcgcctcctcccagctcggactgcgtccccctctgctcgttccccatggcgctcgccctccagctgcggtgcgccctgctcgtgttctgggttggtccggccgtcgcaggcttcgtccagtgtcgttccctggcccgccgcggtgtccgtttccctgcgcgtgcgcccgggttcctgctctctgattgccgcgcgcccagctcgcctagtctgcacgccgagctccttcatcacggcttcctgcttcctcgtcagcgcgtctctttctctggtctcttgtgtcgcgctcgcccagatcgtcgccgttgagtttcctgtcacgctccctcagctcacttgccgcgctcgcctcggctcctagttcgacgcgcaattttggagctctgcgcgaacggcgcatggtctggtgctctgcggcaagcgcttcgtgtgggtggtgtggtttccaaaccacatgatgcgctggctcgatgcccagaccccggcctccgtcgtgctcgtctgcctcagcagcaagaactgctgctcggagcagcggcagcgacgccctcctttttgtcgtgctcaccagatcgggcctcatgtcgtcgatctgtacaattcatgttcggctatcggtttttgccggttgtcgatttcctattcgctatggtcatcacgtcggttattcctatccgagctagcctagcttgccagccgtcgcgccatctttacccgttaggctgtgcgttgtctcgatcacctcgttgtgtcgtcgtggacttgtcggcgtactgttgtggtacctggatcacgctcgcctcaactcgaataagtcgtactgccatcctcttcgtcgaatggaaatcgtcgcgctggcacgtcgaggtcgtcgatcgccattctcgtctacgccaagccccaaacagtgaagacactctggtgctggccacgcgtcaccatctcgacaaaaaggaatcccacgggtatttggtcaagaatggaaactatgtgcctcgctcgccagacgtgtgtgatcaatgacgtcaaccagaaaccgtcatcatgcttgcaactatcacgtcgaattagtcagggtaagtaaatttgttattcgtgttagtggattgatggatggactgactaggtataatatttattagattgcctgagtcgctttagtaaattggtcgatgttgtaggatgaaagaggtctcaataggtctcagtgtttgcgggactgtaggtgttaaaaatcagaagttttattaatatatatgatacacaggttaaccagtaaattagtttataaagttaatgaaagttcttctatcaaattttataagtgttaggtgtccaagaattttgaagtcaaaattataagtcgtttagtgtgttctctaaactaggtatgatattctatgtgtgttggtcgatttcatgatttgaatgaattttgattgctacctcgactgtttatctaggttgtaagagcatgattgtcgtaagtaacaatatatcgataattag

SEQ ID NO: 114888 - DNA, 1837 bp, Zea Mays
tgcccatgatttcccatccctgtctgttggatttctagactgagatggcgcgggaggaagcagtgttgcggaaggcattgttggtcattattgttggtactaggcctgaggtcctaggggttgaagtcattgatgaagtagctcgacactttcacgttgaggcgggcgcaatgtccattcatcaggccttgctagaggacatcattctgttcctgtcggacgaggatgcagcttcaagggtctttaatgagggaaggattttcagaggtccacagtttgatctcgtttttaagagatggacgcgttgtgcaaatgcttctgcagcgacgctctcaaccttggtcaatgtggaaatcaaaggcattccggcgcatgcgtggtcaagaggtgctgcagaacatctattacgagattcatgtcttatctctaaattacacctgccaacagttttgaagacggatttttcgtccttcgggttgaggacgtggtgtgtggatctaaagaattttcaccgtgaaatgatcctcctcatctctgagtcggggctggcagcaagagagaagcgatgtctgtcctacaaggcgacgctcggttctctctcgcttgggcccgaagcatcttctcgtggagaggaggaaagcctgatggagtctgaggtctcagttaagggcatggagggcgaagcgacaaaggtgctgccaccagatccatacccaattagtgggggtctagtgctaagcgacgactttaatgaagacccaagggagattttgctcagtcccgagaaatcggctctacaaactgaggacatggtgcaaggagatatcaatctggttgggagagcgttgcaagttcctgagaaggcgggcgtgctggactttcaagttgttgttgggctcgaggatgttatctctggtgatgggtcgttgggacaggccgctatagattcaccccaacaatcggttgggttgttggagtctatggggtcggtctcgccccatggtcgggtcgccgtctctggtgatgggccactgggtcaggcctcatctgattcgccccagcacttggctgggtcgctagagtctgatgggccggtctcgccttaaagccagcttgtgcaagttgatgttaccgaaaatttttcttcttcccccctgctacaacggggtcgctgggtcaagttgggttggtttcgcctccgtagcctggggctgagctgcagggacaaaccaaatttgtctccccccgacattgcaagattatggaccagaatggctttgtgctctctgttcttgataacgcaactctgaaagtttacagcagaaggggcgggacttcaggcgacaagagacattcaatcttttgtcgtcataatcagtggcaaacccctattagaccttggccagctccaatccaggataaagcaagaatgcaaatagatggctcgcggaagtccaatcgaccagagcgagtttttatagtaggttgtgtaagctgaagcgccacagggaattttcctctatgaagcggttcaagaagcgaaagcaacacagggttacagaatctgaagcgtcaatttagtaattgaccaagtcttgaacaataagttgagtctgcaaactcgggggctacttgatagaattaggaactcagacagaagatggaaagactcaaacacatcaagatcaagattatcaataatattcaagataagtgactcatctggccgattcaatgatatgtaccacaaacacccaaatctagcttttagaagatgaagactggaacacatgggtccatgggctcggctaagggcccaaggacttagacggtgcga

SEQ ID NO: 114889 - DNA, 1062 bp, Zea Mays
atggcgcgggaggaagcagtgttgcggaaggcattgttggtcattattgttggtactaggcctgaggtcctaggggttgaagtcattgatgaagtagctcgacactttcacgttgaggcgggcgcaatgtccattcatcaggccttgctagaggacatcattctgttcctgtcggacgaggatgcagcttcaagggtctttaatgagggaaggattttcagaggtccacagtttgatctcgtttttaagagatggacgcgttgtgcaaatgcttctgcagcgacgctctcaaccttggtcaatgtggaaatcaaaggcattccggcgcatgcgtggtcaagaggtgctgcagaacatctattacgagattcatgtcttatctctaaattacacctgccaacagttttgaagacggatttttcgtccttcgggttgaggacgtggtgtgtggatctaaagaattttcaccgtgaaatgatcctcctcatctctgagtcggggctggcagcaagagagaagcgatgtctgtcctacaaggcgacgctcggttctctctcgcttgggcccgaagcatcttctcgtggagaggaggaaagcctgatggagtctgaggtctcagttaagggcatggagggcgaagcgacaaaggtgctgccaccagatccatacccaattagtgggggtctagtgctaagcgacgactttaatgaagacccaagggagattttgctcagtcccgagaaatcggctctacaaactgaggacatggtgcaaggagatatcaatctggttgggagagcgttgcaagttcctgagaaggcgggcgtgctggactttcaagttgttgttgggctcgaggatgttatctctggtgatgggtcgttgggacaggccgctatagattcaccccaacaatcggttgggttgttggagtctatggggtcggtctcgccccatggtcgggtcgccgtctctggtgatgggccactgggtcaggcctcatctgattcgccccagcacttggctgggtcgctagagtctgatgggccggtctcgccttaa

SEQ ID NO: 114890 - DNA, 243 bp, Zea Mays
cccgtctacagctcgctcccgtgacgatgctgacatcgtctccagggaactccgattgcgatgccgcattcggctcgcacggtttaaaatttattcctttctaaagtatcgagtctagtgccagatcaaaatatcgaagccaatgctgtgcttcgatcagattgcatctcgttttgatctacatcttagaacatagaggtacacaaatttttgtatcagaagaaaagaaataaaaaaaagaaa

SEQ ID NO: 114891 - DNA, 595 bp, Zea Mays
ttcagcacccatattttggggtattcgacatgctttccatgccaccagcgaccacgacatcgttgattcccagctgaatactttgagccgcaacatgacagccttcatacccgaggagaaaactttgttgacggtggtacatggcacggagttgggcaagccggcgccaagggctgcctgccctgccggagcttggccgaggttgacgttaaggatgttgtccacgaaaacctcctgcacgagcgccgggtcgaccaagattgtcggggatggggcgggagaggttgtggtcgccgagctggagatgaaacgcgcagagaagaagcctcggaaccgggcacggcggctggacgcagggcgagccatggagatgggcgccgagctccatggatgcagggaggagggaggagctcgctggctggctggggatggaggaggagaaatccacgcgcgccatagaagggcttcgacagggcgtagggagagagaggagcagaggctgggggagcacgacgctgggcacttgaagtcgcgtcgttggggagggagacatcggaggggagggagaagataagcacacggcgaggagatgagg

SEQ ID NO: 114892 - DNA, 2635 bp, Zea Mays
atggcctaccttggggcacttttcttatatgctctttgcgtgaactatggcccaagttacttgttttgggtcatcattctgatctacaccgaggtcaacattctgtcacagtatatatatcagattatcattcaacactgtggtttgaatatacatttacctcttcttcagagattaggtttccctgacaataaaataaaagcatcatttgtcgtcagcatattgcctctctttttagtctatatatccactctcttgcagagctcgatcactgccaaagatggtgaatgggttccggtaacagaattcagctttcttagtgcaaggaacaacattgaagagaaacactgtgtagcttacagttggagagagaagctaaaaagtttgcccttgcctgtttttgatctcataaggatgattgttagaggcttatctagatactggatgtcattaacacatggagctgaatctcctccatattttgtgcaagttacaatggaggtaagccattggccagaagatggaatccagccagagaggatagagtctgccataaatagggtgcttgctattgctcatgaagaaagatgtcaggcaaacttgccttcctcttgccactgttgtagtaaagtccggattcaaagtattgaaaaaagcaaagaaaattgtaatatggctcttgctgtactagaagttgtttatgctgctcctgtagagtgccaatctaagggatggcacaaatctctcactccagcagctgatgtagaaagagagattcatgaatcacagaaagcaggattttttgaagaaataaattttccttacccgatcgtctcggtgattggtgggggtaaaagagagatcgatctttatgcatattattttggcgccgacttggcagttttcttccttgttgcaatgttctatcaatctatcctaaaaaataagagtgaattcttggaagtttaccagctggaggatcagttcccaaaagaatttgttttcatccttatggtgagctaatttactgttttagttaagtttcatcttatgagatgttttccttattgattgccaaacctcttgcaggttctctttttcttgatagtggttgaccgcattatatatctttggtcctttgctaccggcaaagttgttttctatctttttaaccttgtgcttttcacgtattctgtcactgaatatgcttggggaacggagctagctcacagggatattggaggacttgtactacgtgcaatctaccttacaaaatcaatttccctagcactgcaagctttacagatcagatatggtattcctaacaaaagcaacctatataggcagttcttgactagcaaagttactcaagtgaattacttgggcttccgtctgtatcgtgctttaccattcttgtatgaattgcggtgtgtacttgattggtcttgcacaaccacatctttaacaatgtatgattggctgaagttggaggacatatatgcaagcttgtttcttgtgaaatgtgatacacttttgaacagagctaatcatcgtcagggagaaaaacaaacaaaaacgacgaaattctgcagtgggatatgcttattctttgtacttatttgtgttatttgggctcctatgttgatttatagtagtggtaaccctacaaatattgccaatcccattgttgatgtaagtgttaagattgatataaaggcacttggtgggagattaaacttgtttaagactactgcttgtgaaaaaataccttggaagtacttgaaggcctatgatgatgttgatcctctagattaccttggggcatacaatgtggatgacattcagctgatttgctgccagcctgatgcatcaacaatgtggttgatacctcctccagtccaaaacagattcatccagtcccttgaggagagagagatgctttttggaaagatggaacttattttaaattgggattttctcagagctagaccaaaagggaaggaattagtgcgatatgaatcccctattgaacactgcccgagtgtagatgatgttaaacgagtgcttaatggaactgcaaacagcttcagtataattgatgcttacccaaggtactttcgagttactggatcaggtgaagtccggcgattagaagcagcgatagattcagtaagtggcgaattgctattaaataatggcactccttggtggtcattctatgatacaaacccatcagatttggcaggctgtcaagggctgaatggtcccatggctatagttgtttctgaggagacacctcagggcattattggcgaaacactcagtaaatttagcatatggagtttatatattacttttgttctagctgttgcgagatttattaggcttcagtgctcagacttgagaatgagaataccatatgagaaccttccgtcatgtgacaggtatatcagatatatgtgagaatgggcaaaaactggagttcagtcaagcttcttgtgcaatcaccatacgatcaaactaccaaaagtcataaaaacttctaaaagaatttatagatgtaatttattatttactctaccagtatatcaaattttaagttcgaattcatcctatgttaagacttaagagctat

SEQ ID NO: 114893 - DNA, 1204 bp, Zea Mays
tttgttatccatggcctaccttggggcacttttcttatatgctctttgcgtgaactatggcccaagttacttgttttgggtcatcattctgatctacaccgagagctcgatcactgccaaagatggtgaatgggttccggtaacagaattcagctttcttagtgcaaggaacaacattgaagagaaacactgtgtagcttacagttggagagagaagctaaaaagtttgcccttgcctgtttttgatctcataaggatgattgttagaggcttatctagatactggatgtcattaacacatggagctgaatctcctccatattttgtgcaagttacaatggaggtaagccattggccagaagatggaatccagccagagaggatagagtctgccataaatagggtgcttgctattgctcatgaagaaagatgtcaggcaaacttgccttcctcttgccactgttgtagtaaagtccggattcaaagtattgaaaaaagcaaagaaaattgtaatatggctcttgctgtactagaagttgtttatgctgctcctgtagagtgccaatctaagggatggcacaaatctctcactccagcagctgatgtagaaagagagattcatgaatcacagaaagcaggattttttgaagaaataaattttccttacccgatcgtctcggtgattggtgggggtaaaagagagatcgatctttatgcatattattttggcgccgacttggcagttttcttccttgttgcaatgttctatcaatctatcctaaaaaataagagtgaattcttggaagtttaccagctggaggatcagttcccaaaagaatttgttttcatccttatggttctctttttcttgatagtggttgaccgcattatatatctttggtcctttgctaccggcaaagttgttttctatctttttaaccttgtgcttttcacgtattctgtcactgaatatgcttggggaacggagctagctcacagggatattggaggacttgtactacgtgcaatctaccttacaaaatcaatttccctagcactgcaagctttacagatcagatatggtattcctaacaaaagcaacctatataggcagttcttgactagcaaagttactcaagtgaattacttgggcttccgtctgtatcgtgctttaccattcttgtatgaattgcggtgtgtactt

SEQ ID NO: 114894 - DNA, 1246 bp, Zea Mays
atcacttcaaaaagtaggaagctttactgagttctgacttctcgttatccgaaagatctttaccttctaatactggtgcttgtctgcttactgtagttgtcatcagcgaaacgagacatacaggaaatgggttcacttatatctctagaaaatgatagcttaacagaggaccttctgccttctagaaatgcgtttttggtccgccaatctcgatctggcagaaggcatggaaacatattactgagaggatcagttttccgaactttcagcattaatttcttcacttatggattcccggtcttgctgcttgccctttccttctggagtttcaacttcactagtatttgtgcttttggtctcctagcatacgttgggtacattttatatgcttttccttctttgttccaaatgcatcggctgaattggtcacttctagtgttcattctgctttgggcagccagcacatatgtcttcaatgtggcattcacattcttcaacaaaagatttcaaaaggatatgatgatttgggagactgttgggctttggcactattctattcctggattatttttacttgcccaattctgccttggagtttttgtggcactgtgtaatcttgttaacaattctgtttttctttacttgacttctgaagggggtccttcaacaagtgatgatcacctcattgatggactgttctttacagagaaggaagatacaatggttctgattgtagcaacaatagcatggggtctacgcaaactttcacgtgcaattactttaacattactctttctacttgtgatgaaacgaggatttattcatgctgtttacatgtgctttttcttggtgtttctggtgaatcattcaatcgacaagagactgcgccagatcttagtattgttttgtgaggttcatttttcgatactgtacattctccagcttgatctagtgtccagtgctctggagcgcagtggttcattaacaatggaggtactctcacagttaggtctctcaaataatgctacagcaaaggatttcatggagataggctcaatagtttgcttctgtgctgtgcatagccatggttttaagatgcttttttcattatcggcggttcttcggcatacaccttgtccacctgttggattcactattctaaaggctggtttgaacaagtcagttctactgtcagtttatagctcgcaaaattcacgagacggtgaagaccaccgtaatttacatg

SEQ ID NO: 114895 - DNA, 151 bp, Zea Mays
tccttgctattttagcacaagttgcgtttcatataatctggtacattgagggcaagggatggtctgtggctcattcttggtgggcgaagctggtgggtttagcaaggtatctatgttttaccagtctattttgctgattctgtattcctgg

SEQ ID NO: 114896 - DNA, 168 bp, Zea Mays
atgaccaggcggacgggtgggtgcgccggcggcttcctgctgccgttgctgctcctggcagcttctttacttgattggagcttggtttctcttattaatatggtcatcttctttgctattcgatttgctgttccaagaagaggtattccatatgcctgtgatgactga

SEQ ID NO: 114897 - DNA, 96 bp, Zea Mays
ggtccagtttttttaattccagtcttgcaagtacagttactaattactaaccaatgtcccattgctatacttctgtacagatcagatatatgcttg

SEQ ID NO: 114898 - DNA, 269 bp, Zea Mays
gtccttactggtgttaggagcgcaagcagagctgcccacgaaaggtgtcggtgcgacggtgatccttgcttgccgacagtgaggcaccggccctctgtcttattgacgtcatggccgacaccagcgctgcacgggaacgcaccgtggcccgcccccgtctccacgttgaagatcccaacctcgttcttatcttcccgtgctcaccttctctctcttaccaaacctttaatcggctagtggtggattgcagcgagctcactgaagtcgtc

SEQ ID NO: 114899 - DNA, 94 bp, Zea Mays
ctgttttgtgttcccatggtcatgagtacagttgttcatactatcattgtatttctagctatcctctagtttgtgtgggtccatgtggctttgt

SEQ ID NO: 114900 - DNA, 433 bp, Zea Mays
aatttgctttaaagttcttctccatcagttttaaacagcaccatttggaaccagtttgctactaaatttgatcagtctgcagtcaaagcagtagccagttgaacatgctgacatgttattgcgagtggtcaaggctcaggattcagagcagaagattcacataaatactggtgaatgatgccatcgacgatgatgaattgatgaaacgatggatgatgctatcgatgaaagatggaatggaactcaaattttggtggtcgcacaagtgtggagacatgaatttatatatacttagttaggctctgttagcacaaacagttgatgagcaagtttaaatttagagtacacttatgtatgagttatttgacaatgcttatttatgagatattgaatggtatttatctatattatattaattatagtgttattaaat

SEQ ID NO: 114901 - DNA, 937 bp, Zea Mays
ccttcccaaaatttcgaactcgtattaacggtcggcggtgggtgtggagcgggacggggcggcgagatcacgacgagatggagactgacatctcttcatgcggaggcggcggcgcccaacagcggggtataggacctgtggaggtgcaagcggcgacggcagcactgcggcggtcagaggtgttccacgtcttgaaggagctcgtaggcttcgtcctctacatgcaccaccagatcccctcggttttgccgagtcttgaaaatgaatttgcaagtttaaaggaggaaatgacagaaatggcattacaaccagctgaactcaaaccatctgatcggagaaagtacaacacacgaaaaacggaggaagtgccaaagaacatgctctaaccaagttagcccaatctgtttctcggaaggctatccgtgctcttgtatcacgtggagctgggagtctgtcctacacaggacctagcaagttgtttttgttggtaagatgctccagtacattaaagctaccactggatttcctgccaaagcttgattttcgttacagcaaaaaggttgtacctcttcaaatgcatataaagtgcagtaaatcagggtgttcagggcataaccagcaccatatgcctcttgttgattccccatgttcgacttcagaatcttctctttcagatgttatttggttccagtgcaagcatacaataagaggtttaccaggcaaggcgtcactagaagggtgatgtgttcatgatatcaaagtttacccaacatgtctttgttgttgtagcgagtaatataacatatatgtacagtagatgatgcttattactttgatgaattgtagcgagtaatatcaaatcagttactacgtaccttgtgtaaagcaacttttgctagttttcaggcaaattaatccgatgttcggttggagcaca

SEQ ID NO: 114902 - DNA, 763 bp, Zea Mays
ccttcccaaaatttcgaactcgtattaacggtcggcggtgggtgtggagcgggacggggcggcgagatcacgacgagatggagactgacatctcttcatgcggaggcggcggcgcccaacagcggggtataggacctgtggaggtgcaagcggcgacggcagcactgcggcggtcagaggtgttccacgtcttgaaggagctcgtaggcttcgtcctctacatgcaccaccagatcccctcgctatccgtgctcttgtatcacgtggagctgggagtctgtcctacacaggacctagcaagttgtttttgttggtaagatgctccagtacattaaagctaccactggatttcctgccaaagcttgattttcgttacagcaaaaaggttgtacctcttcaaatgcatataaagtgcagtaaatcagggtgttcagggcataaccagcaccatatgcctcttgttgattccccatgttcgacttcagaatcttctctttcagatgttatttggttccagtgcaagcatacaataagaggtttaccaggcaaggcgtcactagaagggtgatgtgttcatgatatcaaagtttacccaacatgtctttgttgttgtagcgagtaatataacatatatgtacagtagatgatgcttattactttgatgaattgtagcgagtaatatcaaatcagttactacgtaccttgtgtaaagcaacttttgctagttttcaggcaaattaatccgatgttcggttggagcaca

SEQ ID NO: 114903 - DNA, 1121 bp, Zea Mays
ccttcccaaaatttcgaactcgtattaacggtcggcggtgggtgtggagcgggacggggcggcgagatcacgacgagatggagactgacatctcttcatgcggaggcggcggcgcccaacagcggggtataggacctgtggaggtgcaagcggcgacggcagcactgcggcggtcagaggtgttccacgtcttgaaggagctcgtaggcttcgtcctctacatgcaccaccagatcccctcggttttgccgagtcttgaaaatgaatttgcaagtttaaaggaggaaatgacagaaatggcattacaaccagctgaactcaaaccatctgatcggagaaagtacaacacacgaaaaacggaggttagacgtagaataaagaagcacgagaagttgatgaatggcatctctaccttactctgttctcttcagcacgcacttgatgaagtttctagcattgaaggagttgtcctgatacttggaggaagccttgtacggcccctatttgtttatgacattacaatttctcatggtatctttggtccaggaagtgccaaagaacatgctctaaccaagttagcccaatctgtttctcggaaggctatccgtgctcttgtatcacgtggagctgggagtctgtcctacacaggacctagcaagttgtttttgttggtaagatgctccagtacattaaagctaccactggatttcctgccaaagcttgattttcgttacagcaaaaaggttgtacctcttcaaatgcatataaagtgcagtaaatcagggtgttcagggcataaccagcaccatatgcctcttgttgattccccatgttcgacttcagaatcttctctttcagatgttatttggttccagtgcaagcatacaataagaggtttaccaggcaaggcgtcactagaagggtgatgtgttcatgatatcaaagtttacccaacatgtctttgttgttgtagcgagtaatataacatatatgtacagtagatgatgcttattactttgatgaattgtagcgagtaatatcaaatcagttactacgtaccttgtgtaaagcaacttttgctagttttcaggcaaattaatccgatgttcggttggagcaca

SEQ ID NO: 114904 - DNA, 103 bp, Zea Mays
cggagacaaatatgaatttgaattaaagcaatcaacagttaaactctacaagttaactcaaatcataatcacaagatgacaagataacaagataacaattaat

SEQ ID NO: 114905 - DNA, 2323 bp, Zea Mays
tttcttgcaaattctggatggcgtagtccatttgttttggacggcgtagtttcgcagcctatctagccaagagctggagtcgggttgacccgttatctcttcccatcgattggagatcgatcccaatgatagcacattatcccatcccaataaagttttttttctcctttactttattgttattggtagtgtagtttcgccgttgctggtgaagaagcattcttatcccaagaaatagtggtactcattctcattagtttagttttgcttctcataaatttaaagcgctttcttttaaagaagcatcaggttccatctttctttcgttagttaagccacctttttctaagaaggattttagtaattcaggattaatagtacttagaatgttttttcatattgagaaattctgtctagtggcattcgatcacagaagccgttgacagcagcataaataacaacaatttgtttttcaattggaagtggctcatattgtggttgtttgggcacttatgtaagccttgcacctctattgagtaatgcctaagtcgcagcatcaaggtctgacccaaattgagcgaaggcggccacttcgcgatattgtgccaattccagttttgaactactgcagacttgtttcatagctttcaactgagcggcggacccaacgcgactgacggataagccaacgttaatagctggtctaattccgcgataaaagagctctgtttccaaacagatttgtccatctgtaatggagatcacattggtggggatataggccaatacgtctccagcttgtgtttcaatcacgggtaacgcagtcaagctacctgcaccagtctggtccgatcgtttagcggctctttctaagagacgggaatgtaaatagaaaacatccctggggaaagcctcacggcctggtggtcggcgtaacaataatgacatttgtcgatatgccaccgcctgtttacttagatcatcatatataattaatgcatgcattccattatcgtggaaatattcccccatggcacacccagaatatggggccagaaattgcagaggagctggatccgaagcggtggctgctacaagcatggaatattccaaagcattcacttctgacagaatttgaactaattgtgccacagtcgagcgtttttgtccaatcgcaacatagacacaatacaatgtctcactctcatttgtgccccttgagttcatttgcttttggtttaatatagtatcgatagctattgctatttttccagtttgtctgtccccgattataagttctcgttgaccacggcctataggaaccaggctatccactgcttttaagcctgtttgcataggttcgtggacagatttacgttcaataatccctggggctttcacttcgacacgtctttgttcgtgatcgcttagagccccttttccatcaataggtactcccaaggcgtcgaccacacggcctaacatggcctttcccgcaggaacatccacaatagatccagtgcgcttgacaagatctccttctttaatagcggtatcactaccaaagacaacaatacctacattctcattctcaagattcaaggctattcctttcacaccgctggcaaattccaccatttctcctgcttgaatctcgttcaatccgtaaactcgtgcaatcccatctccaactgagaccactcgaccgatctcatccactttcaaattcgtgtaaaagttgatcattctactttctaatagagtcgtgagttccgcagctcttggtgagaattccatactttactttactttaacaaacaaagacgatggataaatccgcttttcaaaaagaaaaacctcgatcttcaaggtgctggagggaagcatacctactaccagcttagttcagagttgcctcagcgcgctcgagtaataactgggaaaatcaaggcagtcttgaattaattagaagagctttctcatcaaagataaaataaactatatatgagaagagaaggctgtgcttatttaattccctcctattctttgataccacttctcacataatggtgcctaagtagtcaccattgccattggagcttccttgcttgcattctcatttcagagtttgggactaccactagaactctgtgcgccagatcaatattcaagtctgaaaaaacacaactcgaaatgctattgccaatcgagacacctgccttttattcattcatcgaccacatatcctccaaggcagagaagtaggacacatggaatctcagatcctggcctggcctatgaacacattcccagagactaataa

SEQ ID NO: 114906 - DNA, 756 bp, Zea Mays
atgcagacgagctacaacagtcccagtgcacagcacgacatcgagggtctgctgacacagctgctgttggaggaagcgcggatgcatagctcagtacaggacatggcgcagttctgtacggatgcgagtagggagcatcgcgcgcagatgggtcgcgcggcatggactagcatagatgacgaacgtcgcgcgatgccgcagatagtagctgagcacaggcaagcagttgggcgtgatgggagggcaagaacagggaggtcgacagcgaggttcgggcaccggcgaaccagctacagcagggacctcggcaagacgtggccatggaggagagagagaaaagcaggggcgccgcgagctgggaagcagggaggaagctggagccagggcgcgactatggaagatggagcttggccagcgaactgtggacgacgcaggatgccgattgccgaccagcgcgcaggggagcagggcgcgagctgggcagagggagctgggggttcgcgacgagcttggggaggtgggtgcgctggagccgggcgccgggaagaagaaatccgagctgggcgtgatgagctggggaaggactcagtgagagggagagatcggcagggaggagtgtgacgctgcggcgaccatgggaaggggctacagcaatgcgtagggaagctggaggaggagctgcgcggaggagaagccggggaggagcggaggagcggcttgacgccgtggcttggagagagaagacaaggaggtaga

SEQ ID NO: 114907 - DNA, 621 bp, Zea Mays
atgcagacgagctacaacagtcccagtgcacagcacgacatcgagggtctgctgacacagctgctgttggaggaagcgcggatgcatagctcagtacaggacatggcgcagttctgtacggatgcgagtagggagcatcgcgcgcagatgggtcgcgcggcatggactagcatagatgacgaacgtcgcgcgatgccgcagatagtagctgagcacaggcaagcagttgggcgtgatgggagggcaagaacagggaggtcgacagcgaggttcgggcaccggcgaaccagctacagcagggacctcggcaagacgtggccatggaggagagagagaaaagcaggggcgccgcgagctgggaagcagggaggaagctggagccagggcgcgactatggaagatggagcttggccagcgaactgtggacgacgcaggatgccgattgccgaccagcgcgcaggggagcagggcgcgagctgggcagagggagctgggggttcgcgacgagcttggggaggtgggtgcgctggagccgggcgccgggaagaagaaatccgagctgggcgtgatgagctggggaaggactcagtgagagggagagatcggcagggaggagtgtga

SEQ ID NO: 114908 - DNA, 219 bp, Zea Mays
atggagcttggccagcgaactgtggacgacgcaggatgtagaccagcacaggagagtcccgacgagcttggggagatgggcgcgttggagccgggcgccgggaagaagaaatccgagctgggcgcgatgagctggggaaggactccaggagagggagggctcggcagggaggagtgggaggctgcggcgaccatgggaaggggctgcaggaacgcgtag

SEQ ID NO: 114909 - DNA, 1601 bp, Zea Mays
ttattaaacaaaagcagttgtctcgataccaaaaccgcgtatctcaccccgcctccttttcttcgcgtcccccgcctcgatccgatcggggacgggtcgaggggcaggggaatgtcgtcgtcgtctgcgtcatcttcggcggcggcgcaccaccagcagcattaccggcggcagacaggagggagcggtctcgtgccgctcgccgcgctcatcaaggaggaggcccgcacggagcgccaatccatagccggcggcgaaagcaggatctccgcgcgcgacgatgacgcggcaggagtaggaagctccggcgtaggaggggaggcggcggaggcggcggtggagtcgcggctggagcgcccgctgctgcgctatgggtgcgccgctcagtgcaaaaagggcgaggacttctttttgctcagaacggactgtcttcgtcccgccatctccgtctcctcctcggcctccccgcaccccatcttcgccgtattcgctatacttgatggccataatggtaacgcagccgcaatatacacaagggacaatttgctcaaccatgtccttagtgctatgccacgggggctgtccagggaggagtggttgcacatgttgccccgagcactggttgcagggtttgttaagacggacaaggagttccagagcaaagggcaaacttctggcaccaccgctacatttgtgataattgatgggtggactatcactgttgcctctgttggtgattctcgctgtattttagatgctcagggtggggctgtttctttgcttactgtggatcacagactagaagaaaatgttgaggagagggagcgcgttacagcaagtggaggtgaagttggaagactcagtgttgttggtggagcagagattggtccgctacgatgctggcctggaggtctatgcttatcaagatccattggagatatcgatgttggcgaatttattgtccctgttccatatgtgaagcaagtgaagttgtcaaatgctggaggaagacttattattgcttcagatggcatttgggatgcattatcctcagaagccgctgctaagtcttgcagaggtttgcctgctgagcttgccgcaaagcaagttgttaaggaggcactcaggacaagagggctaaaggatgatacaacttgcattgttgttgacataatcccacctggtcaaacaatacggcctctgtctcctcctaaaaagacgagcaagctgaagtcttttatttttagaaagaaagcgaaggacccttctcagaagttgactaaacagcattcagctgttggtatcgttgaagagatatttgaagaaggttcagcgatgctatcagaaagacctttaacaagaccccttatgttatcttcgcattgtggtcctgaaagcctgcttgaaacttgatttccagttcgaatattacctgcttgaaaaagggccagctgtgctcattcataaggagtgagtggaaaattttatgttttggaacagttaatgtacaaaagggtgaatcctacagtacaaacagtataaattatgtgaagatttaccggctcctaaagcttggtatgggtgtgtttttcagtttgttt

SEQ ID NO: 114910 - DNA, 204 bp, Zea Mays
atggcctctaacaatagcaacaaaaccgtcacgctcgacgacctcgtcacccagatccaaaacctcaccatcaccctcaatgatgtgctcagcaaggtgaccaacaattcgttgcggttgacgtgttgggcgataacgtcaacactatgtctgtcgaggtctcttccttcaaggctgatcaaggccgcctccatgtcaccgtaa

SEQ ID NO: 114911 - DNA, 575 bp, Zea Mays
agcaaatagctctattaaccaggcctctcacgagcactgtgcgggggtatttataggtacctgaacgtccagcgcttgtgttaaggacgcatgtgccctcagctacctaggttatcccaaaatattcccataaagcagggttacagactgtaattaaagggatgcctttacaaattaggcccgtaacacgcggcggccacgcagggcccgttataatgggccggaacgcacgtgggcctctgagctggacgaggccgcactgtgggatgccttcgtcgccggtcttcgtctggtgccgatcaagcgaagggtgtccctatctgctttgtctgtcagagcagcggctaagcagcggagacttcgagcgaagggtggcgtttctgccttcgctccaacaagaggcatggttggcgttgaagtagatgagctcggtcaccgatggtgtagcgagaccgagcgctaggtcgacggagcgtggacatggaagcgcgctgagggagctcgcgaggggagcagtgccacacagcgaagaggagcaggcagagtcgtacgtcggaggcttctaaggagtggtc

SEQ ID NO: 114912 - DNA, 1509 bp, Zea Mays
ggacgtcctcgcataacctccctacacatatcttcttcacctgacctctcttccttaccctccctcgtagcagtcgtctgccgtggtccggtgacctccccacgatgcctcccgggacgagatccacatggccctcacggaattccaaagaccctcgtactgaatacgagaaaatgagggctgtgaatatgatgaagaacaatcaattgtttcaacggctaggccttggacaattaaaaacaatgatcaccgcaacaactgcaaacaacaaacaaggcaatcttcaggaatcaggttctttatattatggtgagaacgttgaggattctggtgaaaaggatgttggcatggaattccaagctcgtaaaggtgtccctacccacatctccaatgatggtgaacatatgtcaacaaaagtaacaagaggaaataaaataattatggcacctgtgcaggaacgaccagttagagtcactagacaaagagttgctgaagtaaaccaaatgtctacccatagcctaaatgtttctacacaacccagttcaagtgccaccacaaaccatgatttgacccacaaccttattgttcctacacatcctagttccaatactgccacaaacaatgagcccatccaagacatgatactgttgcacaacctactttccagatacaggagggtgataaccacactgggaatcaagaaatcataccaaggagaaaaagtatgggcaggcaacttgaaacgttaagcagaggactgggagtcaagattccaatccaaatcactgaagggaacaaaaggccagaaccacctattcaagctgttaagtttgcatcagagggtggaatcacattgaggcagcacattccaatatttaaccattggaaggaatacaagaagagagagaatgaacctataataagaaacaatattggcaaagttactgctaatttcactgtggacagtgagagcaagacagtggaagatgcatgtctagacatgctaaagagtggacagcgccaaatgagttatagactgaaacagaagtacttcaatgggatacctgctaatcaagtgaggactacatcacctattccaatcatgtctgacaacgactggagaaagttggtgcagaagtggtctaccccaaatcacaaggaaagttgtgtgaagaacaaacttaatcgtgaaaaagtacagtatcaacaatgcacaggctctcgatcctacattgcaaaggcttttgtattggctccagtgtgttcctacgcaatgttggtcttaagtccgcctccaagaaaagctccacaacgactgtttctgcaaaggttcaacaacttcaggatgaactggagaccgagaagcaagaaaaagatggccttcgggaagaagtggaaaccttgaaggctcaagcacaagcatctcagaagaccattgatagtatgaagaggtcgatggaagaaaataacaacctccttcgtcaactattaagcttcaatcgaggctaa

SEQ ID NO: 114913 - DNA, 104 bp, Zea Mays
gaaaagtttcatgaagttaatttcagagcattttgcagatattgatgaggtactatgtccttgtcgaaagtgtttgaatcggattgccagaccaaagtcaaaga

SEQ ID NO: 114914 - DNA, 217 bp, Zea Mays
ggatgccttaagatttttttgggaaagatggtgttggaaggcagttggggattaatgatttggtctcttgaacgaatccactcttttctatgcacatgttatgtattagtaatatataatgatagaaagccgacagtctgtcttttccacacactatgttttagggttttcctgtgaggttgtgaaaaaactctttatgtgagaaaaaaaatatttc

SEQ ID NO: 114915 - DNA, 241 bp, Zea Mays
caaacaggccgtaggcgagtttggctggcctcagaatggtgtcaacaagctcctgtaaaaatttcagattttttggacacccgagcgaaaagttatgcccaatttaaggaaggtacctcaagttatgtttttggaggcacgactagaaagcggcggttagggcataaattccctatctgcaatcacatcaattaatggggtggatcgacttgtgatctatgtaatggtggatgtgatagcg

SEQ ID NO: 114916 - DNA, 712 bp, Zea Mays
aagcttactaaagaccaagtacaaccttttgtggataaaattgcaaggcagctccctaagggttgatttggtgacaaggggatcccgggaggattggaggggattgaggggaaaataaactaatttccccctcaatcccctccaatcctcccgggatcttgggtcaccaaatcagcactaactggaaggcggatctattgacaagagcaggtagaaggatccaggttaagcatgttttgactggtatgatggtctatttagcaatggctatcaatttcccttcctgggctgggatgccattgacaaaatcagaaaaggctttctttggagaggtcgcaaagaggccaagggtggtcattgtcttgtgtcctggggaagagtttgtcgcccgctcaggctcggtggcctgggcatctccagtctgcccgagatgtgttgggctcttcggatgagatggttgtggttgcacaaaactgatccaactcgtccttgggcgcagctcccttttcatgtgtcgtataaggtccgggccttcttctccactgttctagtttcagaagttggcaatggtgccaacacccttttctagactgataaatggatctcagggcagagaatttgtgatattgctccaaggatttttcagtgtattcccaagaggattacaaaaagaagaactgtgcaagaggctctgctaaatagaagatggatc

SEQ ID NO: 114917 - DNA, 474 bp, Zea Mays
atgactaaaatgattcaactacacgcggatgacaatgaatccgaggtcgagcaatccatcgaacacttggcaaacattgcacgaatctttcttcattacccggttcctatgaatttctctccttggcaccaagttggagacctacggaatggagcaccgcagtatgctatggatcttcgacgtgtccacggttcaagaacatccagcatccactttgaatttctatggttcaagcacatcctcgaccccaaacgaatagcacgtcgggacattaccacccacgccatccatcatatggaggtgaacatgagcgacgaccgacaactcgtaggggcgtcgatgaccagtagctgtgcacggccgagcaccacgcgaggtcgaggcgaagatgaggatgaagaaggacgacagcatcggaccaacatgccgacacagggcgtgatgggaatcatggccaggatttgggcaagctga

SEQ ID NO: 114918 - DNA, 126 bp, Zea Mays
atggccaggattcctcgcaggttgtctcggccgtgtggtgcacgttccctactcctcgcaggtgtaaaatttgctcaaagatatgctttcaggtttctggatcacagacttagtgcagaaggctga

SEQ ID NO: 114919 - DNA, 501 bp, Zea Mays
atggaggttggatccatcgagatcctcggttcccttgtgacggaagatgatggcgggcgacatgataggcgagaggtagagtgggcagggaaacacgaagggcgggatgacgggtggggaaacacggagctcggcgcaagagggttggctcgcagagctcgaccgaccgagatcctcacatgtcggcgaggagagcgggctggaggttggcatggctcacgacgaggagatcgagctggtggttggtgcggggcttggccaaccgagatcgtcgcgacgaggagggttgaggttgccgagcgcatcggggaagggttggtgggcaacgcgggagagcgacgtggggatcgcgggcggtgtgcgtcgggggagggagcacgcacatcggacgggcagaggagctccatggtttatcgggcggttgagatctctggaaggcagaacgacagaacgacagaacaaagagaggcagactacccttacaggcttagtaagtactag

SEQ ID NO: 114920 - DNA, 864 bp, Zea Mays
gtctttgtcaggctcacacgtctcctcatcgccgccgtctcccttcctctccctccgcttccgcgcgaggggactgggccgcgagaggcgggcgaggtttgggaaccgtaggaagccacgggcgttcaactcgcggaccagcttctccctccgcagtactgcggtggcccgtggggcggggccccccggctcctcggcggggtagcccgggggaggaggcgacagtgagaggaggccctggtcgttacggaggcggatcacgttgtggacgcggggccagttgagcaggtggccccggaggcggcgctcgaggggtgcgcacgcggcggcagggacgcgtagcgcggccaggtcgaaggtgcgggcgaaggggtccgggtagtccagcgggcgccgtccgcggcggagcgagggtccatggaggggaggtggggttcgcgagggaaccgaggagcaacagaagggtttgatgcctaggcgaatgaggaagcgggcggtaccggtggccgggcagcggaagcgggtgagaacgcagtggtgatgggggtggagtggcggcggcggcggcggcgccatggatggataaaaggtagcgtacgagtacgaccaacagtggcgactcgcgagtcgtgacgggaggtcacgcgctaaggcaaccgatggcggaggagaggattgcgtcgagacgactttgggtaggcaggcattacggaaaagcggcaagtcgaccatcccaggtctctcggtcagtggcccaggcaacgtcgcgatatgaatgtttgaatttgttcgatgatgcttgtggaggaaagcaaacaaaatgtccaaaaaaattagataatgggaaaaaagatattgtccttc

SEQ ID NO: 114921 - DNA, 1646 bp, Zea Mays
agccgatgaacaccgctagctcctatgctagccatggtgccagcgctctctctgagctcacccagcccagccacccctcctctcttcttccttgcggtacttctctgctggccggcgttttcccagcggtggatctccttgtgtgccgcgttcgtgcgtgttccagttttttctatttccaggcgctcgcgccctgctacaactcggctccagctcgatccctagccttcctctctgttcatctccctgccgcgcgcacagggccacgcgaaagatcctctgctcggttccctgctcgctcggtgcccggctctagatcaccggcgctcctccctgtgcccggccggagttccgctgctcggccatggccgccgtcgagcttcctgctcgcacctatctccctcgctgcctgcgtcgtcgaagctccccgtgccgtgcactcgccgtggctccttgttgcggctcgccccaactcggatccgctgcgagctcatcggaccgcgtccctggatcgccccagcttccatggctgctcgcgaagtccctgtgttggccgcgcagggccttcatcggccatggcgtctcatcttcgctgccccagtttcccctgctcccatggtgatttccccttggaattcctccctgttcatgcctagccgaagttccctgtgcgcgcgccctgatgtccattcgttgctgcgcgcgcgtgctcgctggccatcctgcttccttgtgtgcgctccgcttgccgtcatcctcgacgcgccgggtgcgctctctgcgtccagctcctgtccgcggcgtcgtgcgtctcccttttgtcaaccccgcgtgggcgctcaccgtcagctgatggcttgatgctcgtgctcggtcatctgcagcagttcgcttggtgtcagttcgcgcgtcgtcgccctctatcgccggatgccatcctcgtctcgtcacttcgttgccgcgccgtcgtttttctcgtccagtactcgcgcagtcttgccaaaaccatgctgccgtctcccaaccgcttgcccttaccccctgcacgcgcttgtcgcactagtcaaccccgcctcggtcatcgttatcgatactgcgcttaccggtggccaaagctcgcgtcgccctctccctcactagattcgtgtcctcgctagctcgctccagactcaatctcgttgtcgttccgtgcgtcgtcaagaaatcccaagcgtcgagtgaagacgaagctagcagcgtggtgttcaccaagtgcgcgacaaaaagctcaaacaagtcgtcgatcgtcatcctcgtctacgccaagctctgagaagattagacgcagaagaaaataaatcagtatgcggccggagaattctcggtgtggacaaagaagaagagcgattcgacgcagcactcaccctattttcggtgaaatgctgagctgaaaggcgtcgtcgatttcgtggtttcaagtcggatgtcataagggtaagttaattcgtattccagtcaactaggtctataaatagaattgttgctcacaataaatgttattaatttagcatacatatattgtgatgatctatttagataaatctgtaaatcaagtaattaagttacacagtttaaagagttaataaaaatctaggaataaaaataga

SEQ ID NO: 114922 - DNA, 838 bp, Zea Mays
aatgaaaaaatgtcactatttcattcaaccccctaggatttcttctctctcctctgctagcccttctgcaccaaatcccacacggatggcatcccaatcaaggtcatggcggcgccggctaacagacaacgagtctcccctggtcaccatccaattggacagggagcacccccaccactccccaaacacgccaccctacacagatctagacattggagattctaccgtgtgctccacggaagccggtggatgagaggagtgtgaacgcaagtagattaatggaggtgagggcgagcttgagggagaagcagctcctgctgctggtgaagtggaagacctgggcgagcttggttggagcagggagcaggacggccgcggtcggcgagcaccggcagcgagggcgtggtccgagcgccggcgttaagggcgagcgccggccatggaaagtgagcggtcggcgctgggtagcagggatggtcggccttgccgtcaccggcgagctagcgcgagcagaagctggaggccaagggacgccatgggaaagccgccatggggacgagcttgaccaggggcgcggcgtgagggagctgctcggccagcggatgccagagcgtgcagtccaagctggttgatgtgagcaaggacgccacgaccatggcgagcagcaggagggcggccgagctggaggacggcgttgccggagcgcgcaggccgagctgggcgcgagggagatgagcagagggagctccgagctagactgcggccatggaaagggagcaggagcttggcagggcgctggggaggctaggcgcgagggagatgaagctccagagaagat

SEQ ID NO: 114923 - DNA, 89 bp, Zea Mays
ctcccttcgtcgcgcccaggccgtatcccgctccagctcgccgaagtccctcccacgaccgtctccctcaagccgccgtgagctccatg

SEQ ID NO: 114924 - DNA, 300 bp, Zea Mays
cagcgccggatcccagctcgcagagctccctctgcacggcgttcctatttccggtcgagctcgtcttcagctcgcgcccataatccctgctccctctgcctgcgtatttccctgctcgccatggagtttgccgagctctccaccagccgaggtctcctccctgccgtgactgctttcccatggctgcgcgcgaagttttcggctcgccgtgccctggattccctggccttcgcgccttggctctctgcccggagctccctgtttcgttcggcgctctccctgctcgctctaaacgcgcag

SEQ ID NO: 114925 - DNA, 79 bp, Zea Mays
ttttaaatctgcgggtgattcacaagtcggattgagctcaaaatttggggagatcttgcaaaggtatttgctcaggtgt

SEQ ID NO: 114926 - DNA, 720 bp, Zea Mays
tccttccacagtccgtgccataaaattcgctcggtcacggtcccgtcaaattgcgaagctccctgccgtacgcttgcccgctcggatttcaccagccgccgttctctaacccatgtgccggtcggcgtcgtggagtttttatttgatcagctcgtcgtcgcgtcgtttgccgtcgagtcgtcaaacatgtcatcctctgctcaaaccccacctcaccagctcgctcccgacttcagctgaaacttgaaagtcatcatcgttccgcgcgtcagcaagaaaacccaagaatcaggtgaagacgaagctagcagcgcgatattccctaagcgctcgacaaattgcctggatcggaaaatcgctaccgatctcgtggattcgtggcagctgttgaaacggtaagctgatgaattgtttagaatagttcgaacgttaaataaattaatgtgttagtgcgatgctcattaggtgctcgataaattgcgtgagtcacaaaactctcgtcgacttcacagttcttgcgattatcgagccagattcagttatagcgagttatttcgctattccggccaattagcggaattagtataccgaatagaatattaataggcctgtgtgatgaggaaatagtttaatcacttatacatatgtgtatatatttacgataaagaaatatttgagtaattgttgacatgaaaaacatgtgagaagtaaaataaaatt

SEQ ID NO: 114927 - DNA, 712 bp, Zea Mays
tccttccacagtccgtgccataaaattcgctcggtcacggtcccgtcaaattgcgaatctccctgccgtacgcttgccagctcggatttcgccagccgccgttctctaacccatgtgccggtcggtgtcgtggagtttttatttgatcagctcgtcgtcgcgtcgtttgccgtcgagtcgtcaaacatgtcatcctctgctcaaaccccacctcaccagctcgctcccgacttcagctgaaagtcgtcatcgtccgcgcgtcaacaagaaatcccaagaatcgggtgaagacgaagctagcagcgcgatattccctaagcgctcgacaaattgcctggatcggaaaatcgctaccgatctcgtggattcgtggcagctgttgaaacggtaagctgatgaattgtttagaatagtttgaacgttaaataaattaatgtgttagtgcaatgctcattaggtgctcgataaattgcgtgagtcacgaaactctcgtcgacttcgcagttcttgcgattatcgagctagattcagttatagcgagttatttcgctattccggccaattagcggaattagtataccgaatagaatattaataggcccgtgtgatgaggaaatagtttaatcacttatacagatgtgtatatatttacgataaagaaatatttgagtaattgttgacatgaaaaacatgtgagaagtaaaataaaatt

SEQ ID NO: 114928 - DNA, 496 bp, Zea Mays
atccatacaaagaaacgaaataggttgcctgcataagagattgaatgatattgtctatgtttcctacaaccgaaggatgaagactaggtttcacataaggcgtgagaagggaaaggttttgaccctttggtcattgaagagttcgattgggataatgagtgggccgattcctcctatgtgcagtctcaaggtgctcgtgggtttgactgtggtgagaatgagaatggccttacataggaacttgttgatcaagctatgggtgcatcaagctcgctgcgaggacgaaatcttccaaggaatgccaacaagcgtgcaagagtttcacactcaaggtttgaaaaagattctggttcagccaatgaaggaagaggaggacaaagatccacatgatgatgttgatgtgactgattctgaagatacacatgcacccaatggctcaaatgttggtggagaaaacaatgaggctgctccagatgagttcgaagatggatattga

SEQ ID NO: 114929 - DNA, 105 bp, Zea Mays
ccctcagccaccaccctgcagcatcctccctcagccgccaccttgcagctgccagaaaggagagagaggaggagagtcgccgccaaagggaggggaggtcgcgaa

SEQ ID NO: 114930 - DNA, 314 bp, Zea Mays
ttcgaccggcagtgctggaggtgtgattgtctcgccagttggtgagggcaatcccaggatgagcagtatggtcaacttggtcgtcgtgctcaacacagagttggaccacgcccttgacgagttgggcaaggttcgggtggaggttgcggaattgcatgctgaatgcgtggcacgccactatcttgatggtggttctcccgcccctgtcgggattcagcacccttacctttcaccgccccgtggtcgcttcgactatggtacctcagactgcaggacccgcatagatttggatccatagatcgatggagtcggtg

SEQ ID NO: 114931 - DNA, 384 bp, Zea Mays
gcgtagtgtttggagtttgggggtctgcctgcagtatagttgcaaggcagactgtgagtgttttctgttgccttttgtaggctttgtagctaggtccattttgggccgttttttctcctcttaaataaatgatgcgcagctcctgcgcgttcgagaaaaaaatcgtggggcgcgctgtgaaggtcaacgtcccttacatcgaaagtaagcgggatatgaaaccacttcgtttggaccactgttccagtgagagcgacgtgaaacgtgattgacccttcggtagtaatctttcttttatcgtttgttctcaaattctacattggaccctccggggatcatatggatgacccctctgaacaatgggttggcaaattcttcttgttt

SEQ ID NO: 114932 - DNA, 429 bp, Zea Mays
atggttgagcagccacctcctcctcccccctcctacttccacgtcttccctcccctctcttcctcctcttgggctcgcgctgccgctggtacaccccgcgccccctacgtcgcgtgcgctcccccggtctcccctgcgttcgggccggagtgggggtcaggccctagcgccggtgcgagcaccgcctctgcccttactgctgtggcaactgcagttcccgcgggggttgcagatccggaggaccctcccccgccaccgtcccttcctgtcgtcgatcagccacctcctccaccggtcgcccaccagggatacaccgtcgccgcccttaccgctgcctgcgcggagcacgcggcgcgacaggcgcggctgcgggaagcagccctcatgtgggagcgtgagcgcgatgccgccgacgctatcgctgcttag

SEQ ID NO: 114933 - DNA, 4483 bp, Zea Mays
tctagatcggtttttaaatcaattttggactaaagataatgtgaaggttacgatttcgactcgtttattgttgggataaaccatcctctatatatatcagataatcacaaccggacaaccaattaagggatccaacatttcatcaactttttacatctcttacacctttttgccttttttatctcttgttgttcgtcacatctcttctaaagattgtttgcttttacctccccaaaactaaaagggcaacttttgaataacatcttccccttttgtacatagcactgtggttgtaaaaacctacatgaaagatgttcagtaattgatgaaagtgaccacatgctaatgtgtacgtacttttggcagtgatcactactcactacagcgtataaaccaagaggatctctgagtattatgtaaatacattgaatgttgtatcctaaagtagctccttcaactgctggacaacatctgcaagtgcaacagatggtgctgtcaaacctatcattggataataaaactcaccttgctactaaagaacactcagttaccttgaacaatatatggacttgtcttgaattcatgccagaaatttggatggaatgtgatgtcatagtggaggaactttgcagcaaggaatgcagctccagcagcaatatgatggggcttgaactgaagccaaagtgaacttcgtagcctgcaataatgaaataactaagaacaatagatggattatacctaaataaataaacactgaaactagagcaggacaaaccatcaattagaaccgctcacatgaaaagtgaagtcatttgtttcaggcaacatgacaagccatgtcagcaagagatgttaaggcctcaagggtcaacgatccaacatatattaacaatttacaaaaaaaaaaaaaaaaaacatgtccaattctccttaccactaaaagatgccaggtatcacattattgaacaaccttctgaagaattgccctattgctaaaatctagcgattagacatgcaccttgccacacatacatcatcaattatttgatcatataacacctccaggggcatatgccactcctggaattgcaaaagtcatttgacaagacaattttatttgcatgccacaaaaaaacaacaaagcgaactcaagcaattgcagctgttttgttttcaaacaggagagatgcatgtcatttagttaaaatggagaaaagagcacactggccgaactagagaagctaaactcgacaccaactcaacccccttgaaggcggaaacttaaccaaaacaccagagcgtgctgggatcaacgacctgagttcacaagttttttgtttgctaattgatgcaatagttggtattgcctataatcaggtaggatatgaccatctctacaaaagattatccttgttaagcacccatgagcgcatcatatcaaaatgccattgccatttcatggtggcactctttggtatatggaaaaatgtagtccatttatgacaaccattaattactaattcataaaaattttatgaactcacaaagaatacacaaaatcacaacgcattctgcatgaaaaataaaatgtattcaatgcaaagaatataataaataggaacttatcaattgtaaatatgaaaatcctttataaatatgcaagcgagattttaaaatctcaagtagttatgttttgcgaactggtagtcgagaaaataagggcaacactatctgtaactcataacaaaagcagtaaagagtcaggcatgtgctctctcattgcaagttggtctgcacaacggtgaagtttcagaccgacactcttacaccaatattgtagcctcacctgtgggccatatgtaatatctccactgtttgcaagtcatccgactacttcgcgattagtcaggcaggtcgcctcgtaacagccaactagacaaacgactcaattagtgtttcaggtcatccaaatcgtccgattagtcatcaattaggacaattagtcgtccgacttattctaaatccgaccaggatatgcctggcggctagggttttgtagtgggccataggcttctactttttcggcccatctactgaaacataaagcttcccctctcctctgcccctgtcgaaaccttgcctgcgcctgctgaaacccgacggctgccgccttccagtccagatcactggcgccggctccagcccaccggtggcatatccagcaccagtgacgagatgagctccttatctcaaggttccccttgctccccctttcctatctttcttatcagtatgtctgtaccgcttacctgctacatgttcttcatcttagagcttggtagtagtttgtactttgtagtagtgatcagtttcagttggtactttagaatctgtgattattgttgaagtgtataaatggattggctaccttctcccatcagcttaagcttttgggttgaactggttagtgtgtcactgcgtccactctaacaattatgtcttctctaatcctaagtgagtgcccagcagtgacttgtacctctatttgacctgtacagagtttgatggtggttgtgggggcgttcataatgttgaggtcatattctcaaagtccaatgtcgtcggcagtggctgtgcttcggccctgcttcagcattatcagccactggagactctaaaacccttgctgaaaaggcaattgcagcgctccctcctgatcttagtgcacgagcaaatgaccggaagtgaaagactaggacctaggatggaagtttgggtggtggccagacacaacaaagaaggattttgatcagtgtgttttctgtttgaagattgttccttctggaatcaaaaggttcaagcagcatcttaccggtggcaagctgtggatgatgcattaggagcaactcaggctcttcaggacagaaatttgagaagaacagctgatgcatgtgttggttcatcttctcaacctcaactaacctatattaggacaaggaagcattcaagaaatgcagcagctcaagatattggagaagatgacagtgatgctcaagaagatggtcctgctacagcagaacggcaacaaccaccagaaacaactcgagatatggaccaagatgaatctgaatctgctggaggagaagctgatgctgatgcttggatgatgatctgctctatttagcaggtactgcattactgcttgactgcttgtagcattgtattcaaaatttcagtttcagactttcagttctgctatagtgctacaatgctactgctatatgtctatattgcctttcagtttgttactaagttccaatttcagacttccagatttatataatgtctattgtagtattgcttatatatacataattatacatacatccagaaatatctaggacgattaggagacaaccaaaggtcgaccaagaccgattaggcgccaaaatcgtcgccctaatcgtgattaggcgcctggtcggacctctggaacgcccagctagtcacccgacctgaaaacagtgaatatctctgtttaaaaggtggcaataggcgctaggagttgctagcaccaaggcattttgtcctagctattttcaaggtagagatatttgagattgatatgtgtgaaaatgggcagtcagagatggagaaagacgaactacaaacaattactcaagcatggtgatatcattttttcagattttctgaatttccattatttagcatggcactgctcaccgtccacaaaaaagtacaaatgtttagtagcacctagcagacacctacagacacctggagcaaagcagagccatctgctagattagctcttttaaaagtactgcagaatatagatgttcaggccatcaggtgcatatcatgtgccttaactttcttccttctagttgttgaaaattatggttaccatatattagttattgggtctaaagatgttctttcaagaacacgaaactaatcatttgctaatatcatcacagttgagcatggtactttacagacaagtggcgtaacacataagcaattcacgctacatcatcaggacctaaattctaggcaatgtattgtaaccaaccctattgagttgaccaccatgaatcgtagttatttgaacaaggaattctggcgctaaatgctcataaatatatggaaaaatccactcgatgccattggattttatactcatcccttgtgtgccattgaatagcatttagtggatatttttttgtgtgtatgccatgtaagcccagtggcccacaagggattagtataattttcgatggcatacaggagattgtttgtgctccacccaatgaaatattcttgtagttatgggaattatgccatcaaatttcttgtaattgatcacttactcagagaaaccatacttagtttctgagtttgcaactcacacaccatgaaaggaaaaaattgtgataagtaataatataatgaatcgaat

SEQ ID NO: 114934 - DNA, 146 bp, Zea Mays
gggctcacttagggtttttattagggttgcaacattcttacctttttgaaagacccatttgttttgatcatgatacttttaagtatatgcttggtgaattctttactcttaagttaatttgatgctcatgcttactttggttcaca

SEQ ID NO: 114935 - DNA, 1166 bp, Zea Mays
acgatttcaattgccacgatcatggtgccaatagtctgaagccggggcatagacggtgccatgtttgcaaaattctcaccgtatctaggggcaacaactaaaatcactccaccttagcccaaaatcaattcggatccgcctccatggctgccgcttcgcagctcctctctctgttcttcctcctcctcctccctgcttgtgatgccatctactgcgacgaagacgactgctacgacctcctaggggttaagcaggacgcgaacgcgtcagacatcaagaaagcgtactacaagctctctctcaaacaccacccggacaagaatcccgatccggagtcgcggaagctcttcgtcaagatcgccaatgcttacgagattctgaaggatgaatccactagggcgcagtatgactttgccattgaacatccggaggaggttttctataacacagctcagtactatagggcatactatggacataaaacggatcctcgtgcagtgttgattggtcttcttctaattgtttcagcatttcaatacattaatcagctaacgaggtataaccaggcgcttacttggaagatttgttggttttggagataccgggtaaagaaattaccatatacatgggaggatgcttgctacttgacctggatttcactccaaatacctgcgaatgcatggaaaaatatggatgagtccaggaaggaggaccttgtgagaagacacctctgggaaaagagcaacatggagaggtatacttcagggacgaggaaggaaccaaagcgtaggaggtagctgtgcaacatttttgacctgagactacagcaactttaaacaatacaacatactcctatattggagtgaaaagttattgaccaggcttgagttcaccgatagctaattgctaggatccccgggaagtggcatggctaaggaatcatgtttggaggacaattcatgtaataaagtgatcaaggcgacttttgtaggtgtttcttaatcttaatttctgagtagctaataactgtaaacgaacgagtcatgcttcatcgctccactcaacgtaccaaaatcactgcaaagagaacatactaatgcacttcctctcgtctactgctgtatgcacctgcagccattttggtagtcatcaagttgaacacatgc

SEQ ID NO: 114936 - DNA, 1397 bp, Zea Mays
acgatttcaattgccacgatcatggtgccaatagtctgaagccggggcatagacggtgccatgtttgcaaaattctcaccgtatctaggggcaacaactaaaatcactccaccttagcccaaaatcaattcggatccgcctccatggctgccgcttcgcagctcctctctctgttcttcctcctcctcctccctgcttgtgatgccatctactgcgacgaagacgactgctacgacctcctaggggttaagcaggacgcgaacgcgtcagacatcaagaaagcgtactacaagctctctctcaaacaccacccggacaagaatcccgatccggagtcgcggaagctcttcgtcaagatcgccaatgcttacgagattctgaaggatgaatccactagggcgcagtatgactttgccattgaacatccggaggaggttttctataacacagctcagtactatagggcatactatggacataaaacggatcctcgtgcagtgttgattggtcttcttctaattgtttcagcatttcaatacattaatcagctaacgaggtataaccaggccatgaaaagtgtcaagcaaactcctgcttacaaaaataggttaaaagctttggagtatgagcgaacaggaggaattgctagcaaaaagaagggcatcaagcaggtggataagaaagttgaagaagagctaagtaatgaagttgaattgcaaattcatggggttgaaaaaccgtctgtttggaggctgtttggtgtccaatttatactttggccttactctgttggcaaggcgcttacttggaagatttgttggttttggagataccgggtaaagaaattaccatatacatgggaggatgcttgctacttgacctggatttcactccaaatacctgcgaatgcatggaaaaatatggatgagtccaggaaggaggaccttgtgagaagacacctctgggaaaagagcaacatggagaggtatacttcagggacgaggaaggaaccaaagcgtaggaggtagctgtgcaacatttttgacctgagactacagcaactttaaacaatacaacatactcctatattggagtgaaaagttattgaccaggcttgagttcaccgatagctaattgctaggatccccgggaagtggcatggctaaggaatcatgtttggaggacaattcatgtaataaagtgatcaaggcgacttttgtaggtgtttcttaatcttaatttctgagtagctaataactgtaaacgaacgagtcatgcttcatcgctccactcaacgtaccaaaatcactgcaaagagaacatactaatgcacttcctctcgtctactgctgtatgcacctgcagccattttggtagtcatcaagttgaacacatgc

SEQ ID NO: 114937 - DNA, 615 bp, Zea Mays
atgggggaatgcgaggacgacaaggagtacaggtgctgggaggagctgctgccggacgcgctggggctcatcttccgcaacctgccactccaggaggtgctcaccgtcctgccgcgggtgtgcaagtcctgggggcgggtggtcgccggcccctactgctggcaggagatcgacatcgaggagtggagccagcagcagagcaagccggagcagatcggtcgcatggtggagctgctcgtcggccgcaacggcggctcgtgccaccggattagcgtctccgggctgctccgcgattcactcttctcgttcatcgcagacaactgcacgaagattggagcccgtgcgctggaggtgttcggcaggcactgcaggtccctggtggggctccggcgagtgatgcacccgatcgacctggcggacaaggtgtgccagcacgacgaggcgcacaccatcgcgcgtagcatgccgaggctgcagcacctggagatggggtacatgatggtggcgacggaggcggtgctggagatcctggggcagtgccgcaaactcaagggcgagaaagaggagagagggagaatggaatacggtagaagaagacagcggccaaggaagtaa

SEQ ID NO: 114938 - DNA, 99 bp, Zea Mays
gcaaaggaagcaagagcactgggagtacgaatatccttagtccgaggaagggtgctatatcggtggtgcagttcttacacatcattatatccatattgg

SEQ ID NO: 114939 - DNA, 104 bp, Zea Mays
acaaaatcgaatgaaaagtacagcctatctcgattaactgatcgaaacctagcgcatcatgttttcgagtcgccaggtgtttattctcttggaagcaagccaac

SEQ ID NO: 114940 - DNA, 207 bp, Zea Mays
gattctgatccagaagatgccgcagaagactttgaaacggttacaaatggattggctcactccgctctagatttggttatgccagccataggcaaaagtgagaaacctcaccctcgggagaaaggaatatgcctcctactagaagcgttggccaaggaaatacccccgtatgagctgctttcggcaatgggtgctgcggtcaactag

SEQ ID NO: 114941 - DNA, 1285 bp, Zea Mays
ctcgtataggtgaacttggttcgttcaatgaaaaggatccactgggaatgaatgggaagactggggtagtatcttcattagccggaaggaattagtctccactagcgtaattcgaagaacgaacaagaaaaggcgtcactgtttaggtaggaggatggatggatgtggtccaatggctaaagctctgccagcttcttgtagactggcagtctccgagaggaaccttaaccccccggggggaggccgggtgggatggtatacttttttttcgccacaagtgggaactcagtccttggtaagacacaaggggggaaggaagatcttcactcattcattttcattaattgcctgcggtgagacgcgacccacaacaaacgaagggggtggagggagaccgaagaaggaacaattgtcttgaatgctacgctgggatcagcagcttccagtgaagacaaaatgagtcgggcaggaagaggaagatcgtgcggggaaaacggggttcgaacccgcgacttctggcgtgacagaccagcactctaaccaactgagctatttccccctttcgtaactactgtcgattcaacagtcacctaccggttacctttgtaactataccaaaaccaaagtagctgtacaacagaatgcccttcgcctttagtacttttttttcttttgacgacaaagaaatggctctgctcgcttagactcggggctccgcgctctatcagctatcagttagttggcgctacgcgcgacttcagttgacaaaagcgaacaagatagcgctagcgcccgcggagaactttcgtttgttcgccttctaaaaggcctactgacctgccggtgaaaagccggttacaaaataaataataagacgtaggtagtgcaaaagtaccaaaacaactgaagcctacatcccactacgtctgggttcccccttcctatgaaccttgagtcagaggtcttaccttgagtcaataggtagggtcaactataccaaaccaaagtggaagggccactatctaagctattagtgggctggtttgaactattgatttactgaatcgagtgaagctgtgttgcgtaacaagactataggtcgccaaggcctagaagtacaagtggtcgccctaacggccactctcaaactcactacttgagtgacgaaagtcacttagcttctttaatagggcttgccctccggggccccgggaagaggaagaaggagatagagcaaagggtctcctctttctgtccgctcttcccggcatgtagagatccgatt

SEQ ID NO: 114942 - DNA, 2360 bp, Zea Mays
gtctcctccgcggctccgccatcaacggaaggtgtccgaggatctcctcccctctcctccgcgatccccgtcatcggcgccgccatcaacgcccccctcgcgccctccattacctctgctccgcgatttgccacctcattcggttccgctgagctcgttccctccgaacgcgtacccgtcgcgacagttttcgcccccaccgcgcccaagctcaccgtcgtcgtgcaccgcgcctcctccctcacccaacgtcggggccgccggccacaagcgcgcgctcgccctgcctcctgcgcctccaccagctgacctggctccagatctggaccccgagttcgagtcctcgctcgaggccatggtgctactgcagcgctccatcgcggcagtgggagctacccttcaaggtggatgagatgcttagcgaggccatggtggtggtggcgtggtcgaccgtatcggcacggcagcatcggatgagcggccgtcggcgggatgctaggcggaagagcgtcaccatcagcccggagctgtcgcagagccagaaccgcatctacctctacggcaccgtcagaggaggaacatcgggccttggcgacacgagcacctcgtggcccgggtgcgcgacgacgagggacccgctctgctctaaccagtactcgcgcaagcgctacttcgtgctcgaggacgccgcgcttcgctgcttcaagtctgcgccgtcctccaagggcgagtatctgatggcgaaacctcgaaacaatcttagaacagttcaatatggccagcagctccagcagggtgagaaagatcgtcatcaggttctaaaggatttctcaaagttgcttgatgatcagcagtggctacctgtaaaaaaaaacagggcgctgctccggaagctctccttggtcggtgcaatggatacggcttctgtgtatgtggggatcccgtgtgacatccccttccacagcggctgcaatgttgggcttatggatgagggaatagtggctgcaatggcttatcctattattcatgcgacttatgccactgcacaaatggacgttgtggtgatcacactgtcacgagagctgagcaaactacagcctgcatgcttgaccacatcatggtcgagcgccccccgcctgctcccccgcgtgccaatcccttcccccgtcgtgccctcgatgcatgcctcctggccccaccgcgccacaccccacgccggcaagtctgacgttcaaggaatctgcaaggaagtcttcgaggacctgtcatacaataacatagggctcctggacatcaactccctccttgtcgccaccctcatgttttataatgttgtctgtgctgactgcgcttcctctttcttgattatggctttcgccagttcaatcaacaggcagttggtcctattaccgagaaaatggagtgatttgtttttggtttgtgataagtcggatgagatgatcttcgaggccacggtgcgatccgagcagttctttgattttaatggttacccatgtcctatgagaaggaacccttcatatcacttcttgatgatgataaataaatatttcgagttcaaagatgtctccaaacaaccagaagacatggacccccgtatgccgcctcacaccacacccatggttcatcatcgtgcctccaatcctctactcgccaccgcacatctcgctgtccaaacacatttcctgatttcctggttcatcctcctcccgttcagcttcctccagatctcgccttcgctcattgtaagtggcaagaagggagttccaggaggccgcatcgagacagttgatctcgtcgaacacccaacgcgtgaaggtgaggcacttcatccgttcgatgtggcagcgagggggcggtggacgcagtgggaggtggtggtgtccaacgaccgtggcagtaggcgaggcgaagcagctaccggtggtggggcgagagtggagcccacgtcacatgtcgtaccacgtgcaagggggttcttacgcgagctcgcagtcatcgccgaggcggtctccttcatcgtcacagtcgcccgaggcggctactgaggcggacggtggtgcttcgaggccgtggcggtctaggtgggaaatcgtggaatggttgtcctcccttgtttctggtactaggtgcttgcatctggaaagacaaaagtgcccgtaggtgcttgaatctagaaagaaagtgtcactgctaccagtttgcttttctcagcttggtggagcagtaatagtgtgtcacagctaccagtttgcttgtcttagcgtgctacttgtctgagtaatagttgtgtcaatttgctacttgtctcagtaatagttctgtctatttgctaattgtct

SEQ ID NO: 114943 - DNA, 450 bp, Zea Mays
atgtggcccctgcttaggatcgacatgcatcttgcatgtatcctttcccaggttctagccatatctgttgcaacagccatgggttgttaccatatacgcccgtatctgcgggtagctagcctcgtcttcggcctcaaacagaacgccatagcgcagctgagagagagaacagaagggaggagagagggcctcgccggcgaccttcgctccggccttgatgtgggtgcccagttcctcgctgggcagtgccgagcgtacaccgagaaggtcgcgctctcgccggtcaagtctggaggacgagctgctcagaatgcgtcgtcagcattgagagaagtcatgggctcctacacaaatgcaatccgccgtcgtctacgtctcgaccaacgaagaaatatcatgcgtcttcgtgggattggaaagtggacaaccgtaggaaatgtaatctgctag

SEQ ID NO: 114944 - DNA, 192 bp, Zea Mays
cgcgtgagcgttctctggcgcgggcaggaagcgtcgaacacgtggaggtgtgtttcttccattgttcaaacgtctccagagatcgcaaacgtgcgaatcttgccatgaatccagcgcagacctcttcctggcacctagggctatctcacatgtgtgagttccaaaggaggatacgccctagatcaggagata

SEQ ID NO: 114945 - DNA, 92 bp, Zea Mays
gcgggctctctctctcccatggtcgagttcctatgtccctactccaactcgagctcccatctcccatggctgtctgctccatctcgctctcc

SEQ ID NO: 114946 - DNA, 102 bp, Zea Mays
ctagttccaaagtattcgccaaatcaaaaccgtgtcacaagtaccgttaatcctttgcttatcgctaaaaatcttgcttcaaaaatatctgtgattttcggt

SEQ ID NO: 114947 - DNA, 980 bp, Zea Mays
atggcggcggcatgggcggggctggctgtgttgctcgtcgcggcgcagttggcatcagcggcgcaggtcacggcgccagcgttcctgtgggcgcccaaaaactacggagtgacatacctgaaaatgggtcgagcaattagtctgtggaaacacatgcaaacaatggtaaaggagaaagccccggtgatggtgccgctagaatcactgagtttcttgagcatatgcgcacaccctgacgacatccaaaggaggcagctgaatgagtcgacgggtctttcggtacatcaagtgaagttttggttcgagaataaaaggacccatgtaaagcatctgagtggaagagaagagaactacaggttgaaagcggagaatgaaatgctgaaggaggaaaacaataggcttattaggcaggaacagagcaatgctcctgcccctgctccctgtcccagatgcattaatgatgcggggcacctcctgctcgagaaagaagttgaacggctgaaggcgcttaaccagatgctgcagcaagagttgcagctacaaggcacggatggtgaaacacataggcactcatctctctcagatctcgtttactggagcatcaaagtgtcaactgcttataacccgctttgcttctaccagctctccttcacacgctcagagttttccatggcattcccctacgtttccacatcagtcaacgagaaactagaggactcgttgctatccagctttgccgagaactacaacaatggtttcggaagaaaccgcatcacctacacagacacgtgtaccggtcaagatctgaagaaataccacaacatggatgccatcaatgacctggtagtgtcaggggtagcgtcaaggagagtcaaccacccaagtggacaaaccgatataatcgtcttctgtagcggcgggttcgagaatccaggcactgcgaaatcaaaaggttaggttaaatactaccgctaattgtt

SEQ ID NO: 114948 - DNA, 431 bp, Zea Mays
catacctaggcttcggtgcttgcgctaatttggccggggacgaacgcaagtcaatcagtcgacattgaggcgtgtccgcagcgctagattgcaacgacatgtccctgttccacgcagcatgcattggtagagttcaaagggggaactacgtaagcttcagtgtcatatggagatcagagaatgggaccaacttaggtgtgcagctgctccatctgtcctggccatggcaaggtgagcaatcggtggctatggtcaccaccaagggaatggcatgcaaggcactcggacagggcaaacccaggggctggggagggaagctacacaaacctgaaggcatgaagaccacccccacacatgcagagaaaccagggctagagctcaaggacaaggaagaggattcactgatccaggttctaaagcaaccaggatag

SEQ ID NO: 114949 - DNA, 2626 bp, Zea Mays
aaacccggctggtctctctcctctgagttgcccttgccccacattacaccacaccacccccctcccactccatgctgtcaggagcggaaggccgaagcgccaccgcgcccaccctgatctgcccgcccacctaacgtcggccgtcaatcggccgccgccgcgatggggtttgacgggctggtcgtggtgtcagatccttacctgcagcgccgcttcacgcaggccgaacttcgcgcgctccaggcccagtatgcggcgctgcgggacgcgtcgcctaacgggaggctgcggatgcgggacctccccgccgccatctctggcgtccgcggtgcggccaagagcagggacgccgagaaggagaatagcgcgccggagccaggcccctgccatggcctcactgacgaggagtgggcctccgtgcttaaggccgtcgcgcgtgctgacgagaagccgcaccaggacgcgagcttcgagctcttcctccgcgtctacgctgagatgcagctgcgactcaaggcagtaagcgtctgctccggccgcgccggaggaatcgtgcgctcctcctcctcctctgctgttgccttcctcacggcggccaccaccacactgcttcacaccatcagcgagtccgagaaggcgtcctatgttggccacatcaacgcttatctcgcggatgatccgtccctgaagagcgccctccccatcgatccggcgaccgatcacatcttccatatcaccaaggacggcgtgctcctatgcaaactcatcaacttggctgtaccgggcaccatcgatgagcgagccatcaataccaagagggtccttaatctttgggagaagaacgagaaccacacgctttgcctcaattctgccaaagcgatcggctgcactgtcgtcaacatcggcacacaagacctcgccgaagggaggcctcatctggtcctgggcttaatatctcaaataatcaagatacaactgttggcaaatgttaatctgaaaagcacacctcaattagttgaattggttgaggacagtaaggagatggaggagcttatgagtttatctcctgaaaagattctactaaggtggatgaactttcaactgaagaaagcaggtttccagaaaagagtaacaaatttttcatcagatataaaagatagtgaagcctatgcttgtctattgaatgtcctagcacctgaatgcagtgcaaaaccatctgcgatgtctgtaaaagatctacttcatagagcaaggttaattcttgagcatgcagataggatgggctgcaaaaggtacctgactccaaaagacatagttgatggtttacccaatctaaatcttgccttcgtggctcatattttccaaaaaagaaatgggttgtccaaacaaatgaaacaagtttcctttgtggatggactctctgatgatgctcaagtttccagggaagaaaggtcattccggctgtggattaacagccttggaatttcaacttacatcaacaatgtgtttgaagaccttagaaatggatgggttctccttgaggtgattgacaagattgctccaggctcagttaattggaagatggcaaatcgcccaccaatcaaattaccattcaggaaagttgaaaactgcaatcaagttttgaagattggaaaagaactaaaattttctttggtgaatattgctggaaatgatattgttcaagggaacaaaaaactgatattagcttttctatggcaattgatgcggtacaacattctacaactgctgaagaatcttagatttcactcaaatggaaaagagatcacagataatgacatattggcatgggccaataagaaagtaaaagattctggaaagcaccactcttatatgcaaagtttcaaggataaaagcctttcaagtggcacctttttccttgacttactaagtgctgtggagcctcgagttgtgaattggagccttgtgaccaaaggggaaaaagacgaagagaagcaaatgaatgcttcatacatcatttctgtggctaggaagcttggttgctccatttttttgttaccagaagatatattggaggtgaaccagaagatgatgctaactctgacagcaagcattatgtactggtatttgaaaaggccaacatcacaatcattggactctgaaaacgggagttcatgtgaaacaacctccatcacaacttcagatgattctgcatctgaatcatcgattgatgacaatacaactagataaaagagcagggtcatgaaaataattgatatgacctgtcattttgaaaacttgggattgattgtttgctgtaattttaagggcaaatacattcaagaccgaggcaagggaaatggttaagggctttgggtgtttttttgaggtttaatagtgtgattgggtgaaagatgtttgacatcctgtaaatatatctataactagtgacaataggttgtccaaaatccactatttgagttagaacaatttgagttacaatgtacaataaattagtgtcctatccgttaaagcttttaggcgcatgttgtcatatgcttatggaataactacaacattttccttgaaatatgcttaaattaacacgagcttaaatcgcttgtga

SEQ ID NO: 114950 - DNA, 493 bp, Zea Mays
cttccaaaatttcgacctttgataggagaaaatagttacacctgtatcgttatgatgttcaatctatttttcttgcatgtgactaaccgtctagtggaggtattttattaacaaataaattgcttcacatgcaaaatagtattgtatttttatttgcaaagtagctgctactaagtgttgttattttttctaggatgtgctggagaatgaaagcttctgtcttaaaacaataggatacaagaagcttgcaagtggttttgtgaaggcttttgtgaatcacttgaatcattagttcttttaagaatggttttgtaaagcgttagcaaatatgtgtaaaacacaataagatgtgtggcaaagtcagtgatctagttgtacagttttttatgtttatgtgatatgtggatatttcattgtgcaatgttaatgaactgtgtatgtctatgtgattatgtgtataaaatatatgttttgtggtgcttttgtgataata

SEQ ID NO: 114951 - DNA, 983 bp, Zea Mays
cagttatttgattgattcacattttcaaatgatcggttgaaactctgttatgcttgactagactgaatctagattgtttactaaaattgggcatgggttttaattgtagtggtttgtagctatctgtcattgtacactgattcaagtgacaacgatttcttttctgtggatgcattttagtaggattggccaccaaggtcgtggagtatatgttgcccaattttaatgaggtctggtgggatatcattaccttagatatcttgatatgcaaatagtttggtgagacatttgaagataattaatgttcatgtcacaaacattcagttaccttgtttatattaatgtgatgtgcaataagttagaattaagcagccgacatgccctccgcttgcttgattttatacaatttctttacatcagatatatatctattagtcagaaaggaaataaaaactaatacatatttgacatacttctgacatcacattttgtttgactatactatttaatgttatgccacttgtcaaatatgcatggtcttgggaatccaagaagaattgttggcatttgtaataacattatttggtaatgatagttctaggttttctacttaaacaacaattatttttgatgcaggtgtttggactggaatgcgcacagtctgttactttgatggcaaaacgcaacgaagtaccatgggtaaggatgtgctggagaatgaaagcttctgtcttaaaacaataggatacaagaagcttgcaagtggttttgtgaaggcttttgtgaatcacttgaatcattagttcttttaagaatggttttgtaaagcgttagcaaatatgtgtaaaacacaataagatgtgtggcaaagtcagtgatctagttgtacagttttttatgtttatgtgatatgtggatatttcattgtgcaatgttaatgaactgtgtatgtctatgtgattatgtgtataaaatatatgttt

SEQ ID NO: 114952 - DNA, 608 bp, Zea Mays
cagttatttgattgattcacattttcaaatgatcggttgaaactctgttatgcttgactagactgaatctagattgtttactaaaattgggcatgggttttaattgtagtggtttgtagctatctgtcattgtacactgattcaagtgacaacgatttcttttctgtggatgcattttagtaggattggccaccaaggtcgtggagtatatgttgcccaattttaatgaggtctggtgggatatcattaccttagatatcttgatatgcaaatagtttggtgtttggactggaatgcgcacagtctgttactttgatggcaaaacgcaacgaagtaccatgggatgtgctggagaatgaaagcttctgtcttaaaacaataggatacaagaagcttgcaagtggttttgtgaaggcttttgtgaatcacttgaatcattagttcttttaagaatggttttgtaaagcgttagcaaatatgtgtaaaacacaataagatgtgtggcaaagtcagtgatctagttgtacagttttttatgtttatgtgatatgtggatatttcattgtgcaatgttaatgaactgtgtatgtctatgtgattatgtgtat

SEQ ID NO: 114953 - DNA, 93 bp, Zea Mays
tttttcttttttttattccattttccttttatttgaatctcaaactatattcaaatttaaattcaactttgtggatcttcatttataaactct

SEQ ID NO: 114954 - DNA, 112 bp, Zea Mays
gacatgcaccaaaatcgggaaatctagactagacatcaatcaacatacaattaatttactaataaacattccaaacccattggaacactagagctactattttacaattaac

SEQ ID NO: 114955 - DNA, 819 bp, Zea Mays
catcaaaatatggtgggtgaggaccgtcgatggatgtatgaaggttggcgtatgaatcatccctcgatggagtggataagaaagacagagaattttattgatcgtgtttttgcttcgtcgaaggcaaaggatggtaaggaggtccctgtcacaagatgggatcaatatgcccttgcaataaatgcgcaacatgggaatgcacaagctgcagtttggcacgacttctggaaacattacaagttgcctgaaggagatactcatacggaacacgcacactccgtgttccataggaatgcggcaagtgttgttggggatatgatgtactatgctcgaatccaggtgattagtaaagccatgtttggtagtgaagggcgacgtccagagagtaagaatgaggcgacacagtatggagtcgatatgactgagcaacaatatcttgagcattcgattccatggatagctgccaatgatgctgcttggcatgcgttatgtcgttactgggcttcggctgaattcaaggcaaagtctgtgcgacacagttccaatcgtggaaccgagtcgtatcataggtatggaggtgatgatcactttcgtttggcaaaacgaatggaagttagcactggtgcagtaaccagtgatgttcaaatataccttagggggcacagagtaccagatcctgcaaatccagatgtgttgtgcagccaaaaggcaacagatcgtgtggctgcatatggcgaggcgatgactagtcagcacggaccagactatgactggaggacctcacctattgatcctcaggctgtgtatgcaagtggttga

SEQ ID NO: 114956 - DNA, 300 bp, Zea Mays
atggtcatgcctaggctccgctcaagcccctttctctcccctctgctcgtcggccgcgcccacgcccaactccctaccgagcggctccctctgcgcgtcaatggccctagctcggatcccctccttcatccccttccagccgagctccggcgacgcgacttcctgttcatggccgcgcgcctagatgcctacgcgcccatggatcctgcctctgctcgcccggtcgcacgggtgttcgtcgtcgggcccctgctcgaccgtgcgttctcccagcgtcgcgcctccttcttcttgctctag

SEQ ID NO: 114957 - DNA, 501 bp, Zea Mays
atgtcgaccacggcgagcagaggagcgcgcatgtccgaagctgagctggggcgagcgcgaccgttgtcgccggtgaggagtcgagcagtcgggcgtgacttccatggaagcagggacagagacgctcggcgaacaaaggaagggacgcacgcaatcgtgagccggaggcagaacgccggccagggcggactgagaaattcggccgagcgctacgagcagaggaaggaatgcgctggcaagcacatggcggccatggggacgagcttgaccatgggcgcgaccgacgagccgaagccgagcgcgaggaagaacgaaggagacgaggacgcgccagtcagggagcatccgcgagcagggagatggagctcgaggacgcgactgccatgggcgaggaacgagccgagggagctgggcgcagtgcagtggagctccggcacggcggctgagcaagagagagcagagcagagggcgagcaggacaccgtggtggagtgttgcgtag

SEQ ID NO: 114958 - DNA, 1753 bp, Zea Mays
aagaaaggatatcttcgggaacatccatccatccccaatccccaaaggcgaggagagaactagcaaaggggaaatggctgcttccacaaacaacactctcagggtgctgttcaccctaatggttgtatgcgccgcagtatgcacagcgaaaaggactgtagcaaaggcaggagacttggcgccagcccctgctccgttaggagcaggaggcgccaccgcagccccagaaggtgcggctagagccagcaggacgttcgacatatcgaagttcggcgcgaccagcgacggcaagacggactcgacacaggcagtccaggacacgtggacgtcagcgtgcggagcgatgggagacgcaacgatgctcatccccaagggcgactacctggtgggccctctctacttcagtggcccgtgcatgggggacatcaccatccagctcgatggcatcctgctgggatccaacgacctggccaagtacacggcgagttggatccaggtgtcgcacgttaacaacatcgtcatcaacggctccggcacgctcgatggccagggcaccgcagtatataccaagagcaagaccgacgtcgtcaaggcgatgcccaacacactagtgttgttctacgtgaccaacggcactgtttccggaattaaactactcaactccaaattcttccacatcaacatcgacacttctaaggacatcaccgtgaaggatgtgaacatcacggcgcccgcggacgtcgagaacacggacggcgtccatgtcggcgggtcctccaatgtacgcatcaccaactcgaccattggcaccggcgacgactgcgtctccatcggccccgggagcgacggtgtcatggtgaacaacatcacctgtggccccgggcagggcatcagtgtgggctgcctaggccgctacaaggatgagaaggacgtgagcgacgtgacggtgcgggattgcgtgcttaggaacaccaccaacggcgtgcgcatcaagtcgtacgaggatgccgagtctgtgctcacggcgtcccatctcaccttcgagaacatcaggatggaggaggtggccaaccccatcatcatcgaccagtacttctgcccccagaaggtctgccccggcaagcgaagcaactcctcgcatgtctccatcaagaacgtcaccttccgcaacatctccggcacgtcgtccacgcccgaagccgtcagcctgctctgctccgagacgcagccgtgcagcggcgtctcgctcatcgatgtcaacgtcgagtacgccggcaagaacaacaagaccatggctgtgtgcagcaacgccaagggaaccgccaagggaagcctccaggccctggattgcctcgtctgatcgatgaccttgcatttgcatgcattcttcttccgtttcacttttccatattctattgcgttccagccaagcatcttgtttcttttatatatatatatatatatatatatatatatatatatatatatatatatatatatatatatatatatatatatatatgcaggcaattatattaatggtggagacgacacatatatctgggcgtttgtctgccttcccagctggtttagagcactgtaatattattagatataacagggcgttatgttgtatttttacatcactataccttaccatgaggtcctttctcctctgtgaggggtcaggcattgtattggaaccttgtacggcgtttgcctttttaatgcaatgacatacactactcgcacc

SEQ ID NO: 114959 - DNA, 109 bp, Zea Mays
cagtctgcacagatctggagtgagaaaagatataaataaactaattagtgaagttttcaaaaactatcgcaacatcaatttccaattcaggtttaagttagtgcttttc

SEQ ID NO: 114960 - DNA, 547 bp, Zea Mays
ctgctctaccgagcagctcgcccagccgccagttctccccggcctccgctctctctgccggtgctcctctcctccagctcaggcgcccggccgagcgccccttattccgcaatgtcgccgaatcgtgcccctgctcctttttgtccatggctctgctcgtcctccacctcagggcttgttcggttattcctacatcatatggattggatgggattggaaaattttagtagacaatatgacttgctatggatttaaactcactcaatcccctccaacccacatggattgagatgaaaccgaacaagccctcaagttgcgccctgggatttgcccaaaacctcaatcgcctcgacgccagttcccagcttctactcaaacggcttcaggctcggaccgcgccctcctcagccggcgctcatcttccacggcactcagtttgcccagctcctctcccatggccgccccctcccgcagcttcatcttcagccgctcagttccctggtgcgcgtgttcctgctcctttccacaccgcgcgactgcagaccga

SEQ ID NO: 114961 - DNA, 342 bp, Zea Mays
atgcactctttctacagtgatgttgtgcgcctacaggtttgtttcctctgtgacatgctaccatgctgccactaccaccatttcctctgttcccagtgttcatttttttctgaatcctttgtttcagggtctaagggaaaggttttcacattgcaactcaaacatggacgcgggccaggggcgccgcgcgatcgggatcgcctcagcaagaagcagcagaagaaggatgccaggaaggcggagaaggctgagacggtggcgcagccccagcaacagcatctgttcaacaccgaagacctattcgcggccaactatggtgatgtcaccgtcgaggtgatttag

SEQ ID NO: 114962 - DNA, 222 bp, Zea Mays
aactagaagcgcagtgacgaagctctcgccgagctggtcacggtgatgttctgggttgccccagaagatgagcggacaaagagaaattactcgccggagttgtcgctagagtttgggcgggagtcaaactttgacgagctggtcatgtaggcttatagctgcgaacttagctggcggcgggctgctgtggcttggatgacgacggggctgctgcgaggctat

SEQ ID NO: 114963 - DNA, 1431 bp, Zea Mays
gcactttcggcgtgtgtgagctgccctaattactaagaaaaacgatgacgaagatggaggtggtggagacggcgatggtggtgacgccgagcgaggagatgcgccgacagggtctgtggctgtccaacctagatctccaatctccccacatctacacgacggtcctcaactactacccagctccagcagggcgcccagagcacgggggcggcgcgtgcgaccctgagcggctcaaggtggcgctggccagggcgctggtgccgttctaccctctggccgggcggctctgcctgggagaggatggccggcggtatgtcgactgcaacggagagggcgtgcgattctttgttgcccgtgcggacgtgactggcccggagctgttcaaagactaccagccgtcgccggaggtgacggagacattcgtgccagacatgccgcccgaggagctcccctgcatggtggccttgtttcagctgaccttcctcaagtgtggcggcgtggtgctgtcctcaagcttccaccacgcagtcgtagacggcaccagcctattccacttcatgcagtcatggtccaggctagcccgaggcctcgacgcggccgaggctgtcgggccacaggcgccgttccacgaccggacctccctccgcgcgcgcgcaccgccgctccagcagatgggtgcaccaccagcaccagcagcccactcactgaacttcgccgccaccagctgcccccgcgctttcgtcgcccgcgtctacccgttcccgcacactctcgtccacgagctcacgtcgcgatgctgcggatccggagccaccggcgtctccaggttcgccgccgtcaccgcgcaatctggcgctgcatgtgcgtcgctcggcggctggcaccggcctccgacacccacctgggcgtgatagtgaacgtgcgcgcgcggctgcgcccgccgctcccgcacagcttcttcggcaacgccgcgctgcaggcgcccgccctgccacggcgggtcggggacgtcattgacggcccacccgcgtccgtggttgggatgatcatggacgcggtgaacagtgtggacgacacgtacgtacgcgccgtggtggactaccatgagctgccgaaggagaatctcgtcctgggggcgatggagccaccggaatcagatgtggccatggtcagctggctggggatgccgctgtatgacgctgacttcggctggggcgtgcccgagctcgtcatgccgacgacggtgtctgtcttcagcggcatggtcctcgtgctgccgcgtggtcttgacaaggagagcggaatcatcgtggtggtcaatctggagcccgaatacctgccggccttgaaaaagctcctctatgacgtcgtcctgtgagctcacagcaccgacctgtaattttcatatgcatatacagattgatttttact

SEQ ID NO: 114964 - DNA, 982 bp, Zea Mays
ggtagtccaacaaagccctacagacatcaatctctggtccgagagaaatggaagcaagcagcaaggcggccctgctcctcttgatggtcatcgtgggatgtttgacgattcctgcacactctcggaacgtcgttcgtttctgcaaatgccagaagcagacctgcaaaaagggagcaatattcgaagctgtttgctactgctgtccaggcggtagttgttactcgacgatccaggattgcgcaccagcttgccgctgcgataagctttcgcatgccccactaaatttaacagacagaccgtgaagcgtgaatccagtgatttatcatagcgaaagaaataaaaaagcggtggtgtttcttgatacttgatatctaatctagtatactctgacgaaccaggttccaatcgtaacaaacaaattaaagcacgctagaacctgataacaattaacaaagcaaataaaatattctctgatctccagcggcagcagccagtcagcaatcatactagtactcaacaaggacatggtcacgcacgccttcagacaggcggaggatgttcagcgaccgtcgtagtctgcagccttggacacacacgccgtcattctcattcagtttcatcgccccgctctgctgctagggccaagctcgcacggtggcccggcagtaggggcagtcgccgcgggaacgcagccagcgctcaaggcatgccgagtggaagacgtgcctgcagcgcagccgaggccaccgcacctctccaggcatatgtcagcttgggacgaagcttcagcggcctcgcgtcttctgcttcctgcagctcggagacgggcctggggaacgctgtgatcggtacgcaacgcactcgtcagcgttagcgacggcagggacgacgacaggctccgtcgccgcgccttcttccgccttagcttgccggtgacgggttcgccgggctggaagcgactggttagagcacagcaccgaag

SEQ ID NO: 114965 - DNA, 448 bp, Zea Mays
cggtagtcaaacaaagccctatagacatcgatctctgatttgaggaaaaaaatccttatatggcgagaattacaatggaagcaagcaaggccgtcctgctcttgatggtgatcctaggaagtttgatgattcctgcatactctcggaacgttgttcgtttctgcaaatgcgagaaacgggcctgcaaaaagggagcaatatccgaaggtgtttgctactgctgtccaggcggcagttgttattcgacggtcctagattgttcaacagcttgccggtgcaacaagctttcacatgccctccatttcgaatagcaaggggattcatccctatgtatcccctcgtgataccttaatcaccaaatcaatcctaaatgtaatagacagtgaatcaatcctgtgatttattgcagagacaataaaaagcggtggcggttgttgatgtttgatat

SEQ ID NO: 114966 - DNA, 536 bp, Zea Mays
taagtttgccttttatagatgggagtaattgctaaccctcctaaacctagagatatctcatacctgaagactaaagttcagtgctgaaagcaagttcatccttgaatctttgaggaggagagcacgcaagatgacagaaggtaacatcaagatcctgtattttgttggtatgtcgtgattagtgtggtttatttgtgactgattgtgttgttgcatgagctatgtactctttcccgcaaatacgactgccaccaagagccattgaggcgacaaagagagccggcaaagcagcagatgttttctattgcttcaagctgctggaggcaacatgaaatttcactgttttaggctctgttttttggcaaaaggaaggggtgttccaccatcggacaactacccttacagttgaggaatacttccctaccatcatttcgagcttcaaaagttcaacgactcattcatggagcaatacgagggctactccaggacgtggtgtgaacatgaaaaatgatagtcaacattggtacttcatgatg

SEQ ID NO: 114967 - DNA, 87 bp, Zea Mays
ttatttaatttgagcttacatacacttgatgagatatacaaggttgcattaatagtactgagtccaaatgttcctaggcaaatattt

SEQ ID NO: 114968 - DNA, 427 bp, Zea Mays
tagtcaaacaaagccctacagacatcgatctctgatctgagaaaaaaaatccttatatggcgagaattacaatggaagcaagcaaggcggtcctgctcttgatggtgatcctaggaagtttgatgattcctgcatactctcggaacgttgttcgtttctgcaaatgcgagaaacaggcctgcaaaaagggagcaatatccgaaggtgtttgctactgctgtccaggcggcagttgttattcgacgatccaggattgtgcaccatcttgcaagtgcagcaagctttcacatgccccccatttcaaatagcaagcagatcctgccctagtcatcaagtcaatactaaatgtaagagacagtgaatcaatcctgtgatttattgcagagacaaatttaaaaaagtggtggcggttgttgatgtttgatat

SEQ ID NO: 114969 - DNA, 531 bp, Zea Mays
gatgggagtaatggctaaccctcctaaacctagagatatctcatacctgaagactaaagttcagcgctgaaagcaagttcatccttaaatctttgaggaggagagcgcgcatgatgacagaaggtaacatcaagatcctagattttgttggtatgtcgtgattagtgtggtttattcgtgactggttgtgttgttgcatgagctatgtactctttcccgcaaatacgactgccaccaagagccattgaggaggtaaagagagccggcaaagcagcagatgttttctactgcctcaagctgctagaggtaacatgaaatttcactatttcaggctctgtttttgggaaaaaggaaggggtgttccaccatcggacaactatccttatagctgaggaatacttccctaccatcatttcgagcttcaagaagttcaacgactcattcatggagcaatacgagggctactccaggatgtggtgtgaacatgaaaaatgatagtgtgataccccaattttctgaaaagaagttaaa

SEQ ID NO: 114970 - DNA, 147 bp, Zea Mays
ctaaaatcaagacctatctaatggtatatagtttagaatcgtttgaaaattttataaaacttatttatgttttcttacctattattactcttgatacatatattcataatttgcacgagaacttaagaaggaccaagagaaaactaa

SEQ ID NO: 114971 - DNA, 428 bp, Zea Mays
tagtcaaacaaagccctacagacatcgatctctgatctgagaaaaaaaatccttatatggcgagaattacaatggaagcaagcaaggcggtcctgctcttgatggtgatcctaggaagtttgatgattcctgcatactctcggaacgttgttcgtttctgcaaatgcgagaaacaggcctgcaaaaagggagcaatatccgaaggtgtttgctactgctgtccaggcggcagttgttattcgacgatccaggattgtgcaccatcttgcaagtgcagcaagctttcacatgccccccatttcgaatagcatgcagatcctgccctagtcatcaagtcaatactaaatgtaagagacagtgaatcaatcctgtgatttattgcagagacaaattaaaaaaaagtggtggcggttgttgatgtttgatat

SEQ ID NO: 114972 - DNA, 136 bp, Zea Mays
gttaggcttaacattagtgcaaacagttgtattttagtttagatttagagtacacttatgtatgcgttatttgacaatgcttatttatgatatattgaatagtacttatttatattatattaattataatgttgtt

SEQ ID NO: 114973 - DNA, 813 bp, Zea Mays
atggccactcgacgtctacgtccacagcctacaggtagttttgttttctttcaagttggctgcttttgtatgcaagacaagatagtgaaccttggagccaacacgcctcgaccagcagcaaatgtttgtgtgaccatcagtgatctcaagaccgaagaaaggaagcaaaagctttccaggtataggaagaagaagatcaagcggaactttgacaggaagatcaaggaaggctctggcagacagccagccaagagtgcgagggagatttgccaagatcgaagaatgcaacctgctgaagccaagaaagtagatccaagactgcacttctggatattggtaagcactactagaaatattcagagacaacatgaatggcttccaaagggctgggtgatggaggtaagagctggtggggagaaggcggacaagatgtacaagttttatgtccactcaatcactggtctacgattgctgtcaaagcaagatgtactactctatatcaatgaggcaaaggtctctgggtgcgacaccaatggacaatgtgacacaacttctgaagataacatactttcaaaagtggactttcggccaagtggattgcctgaaggttgggtgaaagaactagtgtacagaaaaaccaaggaagggttgatcaagagagatccgtactacacggatcctgctagtttctacacattccgcacgctgaaatctgcattatccttcctagaaactggaaaggtatccgagcgtgcatttattcaaaggacgagtgttcatgatctgtactcttttgaaatatctgcagacatg

SEQ ID NO: 114974 - DNA, 1080 bp, Zea Mays
atagataggtatccactaactccagacaaagttctttacctccagattcctcacaaataaaggccctcaattattaccctccaaagaaagcaaaaaaaaatccaatgctcctcctacctcgtcctcctttataaagcaaattgcaaactgcttctgatgcaccatcccagcaagagcaagcttcaacctttgcatgcagagacctagtggaatagagcgaggggaatggagcaaggagacgaggcgtcgtcggtgaccaaggagagcccggagcagcagcttacccgggaccgggagcagcagcacgacgccggcgtggcgtggctgaacctcacgcttcgcgcgggcgagtcgccctcgccggacgcggccgcgagctgctccgccgagtccgggtccgggtccgggtccgggtccgggtccgggcccgagcccaccgccaagccgtccgccgccccgcacaaggtgttctcctgcaacttctgcctgcgcaagttcttcagctcgcaggcgctaggcgggcaccagaacgcgcacaagcgggagcgcagcgccgccaagcgctcctaccacgcgcaccgcatgatcgtgggcctgccgctgcacgcgcacgccgcgctcatgcactcgctccgggtcagcccggcctcgtcgccgatccacaaggcggcgggcccggccagagcggcggcgaggttcctcgagggcggctccgcctgggggacgacggtcgccgcctgcgaggaggcgcccggttcggcggcgtggcctgggagcttcaggctgagagcgcagcactcggagcacgagcgagcgttcgagactgaacagagcaagatcgacttggacctcaggctctgatggggggatgtgcccgtgcatggtcagttcatctgctgaataaatctggtctggagatatgatcaggttcagctcactgtcaggtgaaaacccatagagttttggacatattgagtcgcttagaattgttttgatggtactgcaattatgcatttctgtagctggaaactgtactttagatctattgacagacatcagttttcttgcatgttttcgaca

SEQ ID NO: 114975 - DNA, 90 bp, Zea Mays
atggctgcagcaaatctgagcacagttggcttctttgcagatgcgggcgataaattgaagctgtgggtactctgttttctgaaaggttga

SEQ ID NO: 114976 - DNA, 1246 bp, Zea Mays
agaaccaccacaaaacctgctctccttttttttcaacagcctcgtgtgttttgttccagccaatattaagaggatgatgacggacaggcagcgcgtgaggcaatgcgacattgaggtcatgaagatggccatgctcaagcacgaagaaaccttcaggcagcaggtccacgagctacaccgcctgtaccgtatacagagggagctgatgatgacgacgagtgacgacctgaccggagccaagccggtgaccaccccccgccggcgcagcaagcagccgcggcgggcgctgccgctgggcctgcagctcccggccgacgagtacatagccagcgccgacgaggacgaggacgccgccgccggcacggagctggagctgacgctcgccgtcggcgggcgctgctcacccgccggccgtcgcaagagcgacaggaggaggaggaggcaagcagcagagcctcgcgacgacgccggcgccgtctcctcccccttcgggcccgactgctccggcgcgagcgtcctatcgtcgccttcgtcggccgagtactgctccgatgacgggcctgcggcagcattccacgttccgccgccgccgtgccagagggccgtggcgtttgaccttgaagaaagcatgatgatgcggcagcacgcgccgtggctgctgcagtgccggcagtacctcaccctgaggatgacatgaaaccctgcaggctgctgcagcaagctgcagctcgccgtccatgtccatcgatcaatcaatcacattgtacctggtttgcgttgtgttgtagaagcagtagccactagttttttgttttgtttgtttttgctatgtcctaggtggcgcttgtgtcctaataatcctgatccaaagatgctaattgatcatgactaatgagtgcatcctgattgattaataatgttcaaactagtgctgattcaggagtaataatattgccactattcattcaaaattcttggcattctttagactatctctaacaacttacttatttacatcttttatttcaaactatattgtttcaagcagcttaggtagtgtttggttactaggtgttaaagatagaagtaaatcatctatacatagaatgcttgcatgcattctttccttagttcgcctgcgtccctgtaatttcgtccctgtaatttggcttgccaattctgcatgcatgtaatctgtatatatataagagaatgacagcagtctgtgcggtagcacattacgtct

SEQ ID NO: 114977 - DNA, 1556 bp, Zea Mays
aaaaaactccaattgcggcgggtggggaaaaaaagagagaaagaaatttttttctccgttttttgaccccaattctgactgactcgccgccggcggctcgatcacgccggaaccctagtcgaggtctggggtagtttcggccgtgctcgggagctcgtttacgcggcgagctcgaccgccgcgggtctccggagccggtggacggcatcatcgtctagggtttgctcttaatcatctagggtttgctcttaccggagctgctcggccgcatcgtccgcgggcctacattttgtgctgccgccgagatgccgccgccgtctaagaagttggctcgcgtcgacacgctccagctcaaggatcagatcgtcaagcggctggggcccctgcgcgctgagctctacttccgcagcctcaagaagttcctcggctgtcagctcggcaaggatgagtttgagaagatctgtgttactacattggggaaggagaacatcaagctccacaatttcctcctccggtccatcctcagcaatgcttgtctatcggatgggcctccgccaagcatgcaggcggccactggaaactcgcagactagcacggtgtccaatgggacattcagcaatggcttattgccggtgaggagggtgaggccccggactaagaggttcagtgataagccgagcccgattgggaagtctcctcttggtcatccgagtgctgggggggagtttgtgtcagctggttgcaaggttttgcaggaggtaatctctgtggaggatggcgaggaggtcaaccaggcccgtggtagcccagtctgtgtgcagagccgaagcccgataaggcccccagtgggggttccaaaggttcagaattctgagcctttgatatcttgcgctttagatgtgtgctgcaattatggtgaactgccagattctcagacgctgtccaagctacttgatgataagttgaaggctcaaggtctcagtgtatccaaagagtttgctgatgtgttgaacgctgggttgaatgcatacatgactcggatgctgaagccctgtctaggtattgcgaaggcaaggggaatcaacaggacgatgcaccaagcaaatagccgcaccactgcttcagtaaatagtgggcagaacaatggctttcctttggaatcaagccattgttatcaagcttccctgcctgatctctcgacagcagtgctatcagatgctcagttagtggggtccgtggtgattcatgagaagatttcttcctatctccacaactgatagagagcagttagtttcctccacatttttggcaaaccctatggtggagttggtcaagtttaggcagtatgttgtagggccttctatcctgctgtagaaactacagctacaggtagttaggttgaggtatagtgaagttttactataggactgggtagtgtacccatggctggtgagggtgatacttcttaggatgcagtacatgatagtgagttccatttagctgtgattattcgcaaaggaaataattataacaaaagattctggaatgtgtcgtgc

SEQ ID NO: 114978 - DNA, 109 bp, Zea Mays
aattggaaaggcattgaagtgtcaaaaaatagtaaataatccaagttctagagtgcgaagagcgcccacttcaaatcgtccagccagaaacgttaacttttttcattcc

SEQ ID NO: 114979 - DNA, 1488 bp, Zea Mays
atgcggcgctcctccccgtactcgtacgccttcttcgagcgcctcctccaggagcacttcccatttccgcgccgcctcttccaggtgcacgcgctgctcctcacctctggcgtgctgctccttgactcacaatgctccgcggcggcctttccttacaactgcctcgcccacgcgcaccgccgcgtccccgccgcctcctcttcgcgccccccgtccgccccactgcgcctcttctgcgctatgctcgcccgcggcgcgcgccccaactgccactccttcccgtccctcctcatgtccgcctccgcgtccgccgcggcggcgctccacgcgcagtgcctccgccgcggcctcgcggctgactgcttcgtcgcctgctcgctcgtcagcgtctatggccgaacgggacacccgtcttgcgacgcgcgcaaggtgttcgacgagatggagggtcccccggacctggcctcctgcaacgcactgctcgacgcgctgtgccacgccggggacctggacggtgccggggacttctttgagcggatggcggtgagggaccccgtgtcgtggacgacgctcgtgtctgggctgtcgcggggcggacgccaccggtgcgctctcgaggtgttcaggggatttttgctgggtaacgtgggacgacggctcgaggaagcaacgctggtcagcgttttctcggcctgtgccaacgttgacggcggtgagggtcttgccgcgggcatggctgtccacgcatacctcatccgtcatgagattgagctcactgcgttcctgggcacagccctggttgacatgtatgggaagcatgggaggattggcttctgtaagagtgcttttgcggtcgtctgcacgaaggaggtttgcacgtggaatgcgctgttatcagcattggctaatcacgggaaggagactgacgcgctggtgaagttcgacatgatgaggggtgaaggcttcttgccggatcagataagctttcttgctcttctgacggcttgtgctcgtgcaggattggtggaggttgggttatactggttcgacgcaatggttgctgaatacaaggtggtaccgttgatgatccattatggatgtgttgtggacctcttaggccgtgctagccgttttggagaagccattcaggttatagagaggatgcccttcgcggctgatgcttctgtgtggggtgctcttcttggggcttgcaagctccatggaaatgtggagcttgcagtggagattgggcagaaactaatgtctcttggcccccagcaatccggtcggtatgtgactattaggaatgtctatttagaaggcgggaattggcatgctggcgcaagaatgggagaggtgatgctggaggctggaatcaagaaaacagtagggcagagcagtgtggtgcttcatggcactgacattccttcatcaccgttcactgcaaaatgtgctggtcaggaatggatgaacttttacgattcttaa

SEQ ID NO: 114980 - DNA, 527 bp, Zea Mays
attaatattattagagtgaacgcactaacacgttcaactcaaaaacttaagctaatggaagaaggtagtcaatccacttatacacttcaacactcccactcacgtgcagccagagagaaagatgtaaacgtgaaaataaatgggtggaggcacaaagaaagcctctgctaggattcaaactcgagaccaccggctttgataccatgttagagtggaaatactaaccagttcaactaaaaagcttaaactgatggaagaaggtaggcaatccacttatacactttcaacacccccactcacatgcggccagacagaaaggtgcaaacgtggaaataaatgggtgaagtcacaaataaaacatctgccaggattcgaactcgagacctctgactctgataccatgttagagtgaacacactaaccagttcaaaccaaaagcttatgttgatgggagaagatagcaatcaacttatacacttcaacaaatatatgtcgtccgttagcttaaatttgaactactcggcgac

SEQ ID NO: 114981 - DNA, 3253 bp, Zea Mays
caattcaaacgaggatccgatcccgcgacccccaccactcccttcacctcgtccgcccttccttcctcaccgcccgcgccgacgtgatcagggatcaggcgctcagtgatcgtcaccgcgcacgactcgtccgttcgtccgtccctcatcgccgcaccgatccgggcaggcggcgtgagatggaggacgaggggagcggcggccggagccggggcccggacgggttggccatcgcaccctcctctcctccgccgagggccaagacggtgaggatgtccgaggcccgcgaattcatcatcccctacgccgccgaccagggccgcttcgacgtcggccaacagggttcgccggaggcttccgcgggagcggcgcaggacacgccggactacatccggaggggcgccgcgcggcacagggtcgtgccgctcaagcccttctccgccccagcctcgccgccagctgagggaccggcttcgagtgagagatgcggcgccgcgggcggtggtcgagccgtcccagggggcccgcaaccggaagagtctggagaggatacatccgattgctgcggtgtgttaaaacagcagtacggtgtgcttctgcgggagaaggaggaatgcaggaggctgttagaggacctcatgagggagaacgtgctcaagactagggagtgccgtgaagcccaggagtctctccatgatctgcggatggagctgatgagaaagtccatgcacgttggctcactagcctctgcagttgaagggcaagtgaaagagaagagtcgtttgtgtcaattactgaaagaattgagcgaaaaatttatggtattaaagtcagagcaccagaatctaagacaagaatcagtagagtacagaaaatgtgtgttagatgcttcacaaatgtctgcagcaattcaacaatatgtgagtcgatatgtaagtctggaatgtgagtttaaagacctcaaagagaagttcaatgaggaggcaaaggagcggaaagacttatacaacaagcttatagagctaaagggcaatataagagttttttgtcggtgccgaccacttaatgcagaagaaatagcagaaggagcttcgtcagccattgattttgactctgcaaaagatggagagctcattgttaggggtcatgtatcgtccagaaaaatatacaaatttgattctgtcttcagccctgaagaagaccaagaaaaggtttttgagaaaactgcgccatatgcaatttctgtgttggacggatttaatgtttgcatctttgcttatgggcaaactggtactggtaaaacatttaccatggaagggattgaaggtgctcgtggtgttaactatcgaattctagaagaactttttcaaataatcaaagaaagggagggcacattccaatatgagattactgtcagtgtattggaggtgtacaatgagcagattcatgatttgctactgacaggatctcaaccaggagcaacaacaaaaagactagaagtaagacaagttggagaaggggctcaccatgtaccaggacttgttgaagcacgagtgactaacatgaaagaagcttgggaagtactacgcactggcagcaaagctagagtcgtgggttccacaaatgctaatgagcatagtagtcgatctcactgtatacattgtgtaatggtcaaaggagaaaacttgatgaatggagaatgtacaaagagcaaattatggctaattgaccttgctggaagtgaacgggtagcaaagaccgatgcacaaggagaaagattgaaagaagcacagaatataaacaaatcactttctgcacttggtgatgtcatatccgctcttgcaacaaagacctcacatataccctttaggaattcgaagctaacacacttgctacaagactcattaagtggagattccaaaactttgatgtttgttcaaatcagtcctaatgagaacgacgtgggtgaaactctttgttcattgaacttcgcgagcagagtacgaggcatagagcttggtcaggctaaaaaacaagtcgatgttggagaattgtcaagatacaagctcatggttgggagagccaaacaggatagcaagaacaaagatgctcagattaagagtatggaagaaaggatacaagcacttgaagtgaagaataaggccaaagacttgctcaccctgaatctccaagagaagatcaaagagctggaatcccagcttctagttgaaagaaagatagcacggcagcacgtcgacaacaagattgcccaggatcatctgcagaagcagcacggcatgaaagaagagaacaactcgtacctgagaagcccaatggccgagaggaacctcaactccacagcagagaaagcagcagcaacacctaaaggcctgtgcatctccaagcagatgttctccgacagcaacaccgacgcctacagcttcaagcagctgatgtcactaggggaggaggaggagaaggagaacaaccctgaagccgccgcgcagctgccggcgcccagtacgaaagcgaggcgagtctcgctcggcaacggcggaggttaccagcagccgctgaagccgatttcgcgccggacgtccctgataccgcttccgcgccacaactcgctgctgccaatgcccacagcagcagcagcagcagtgtcgccgcttgacaggatcacggagaacctgtcgtcgcgctcgccctcgccgtgctctcctccggtcgtctccgtcgacaagggcagccggagtagaagggtcagcagcctcctgcgccgaagcctgcagaagaaggtagtcatcaggccgtcagtggcggcgcaggcagcgaagaaagccggtgctgctgcacctgctgctcaagggactgacagtagtgcacgcagagcggctcggcgagtgcctgcgagcggcggcggtgttggtgggcagaaggtgcggcaacagaacagggacaaggagcgggggtggaacaacgggacgagcctcaggaatttctgaccagtaaaaggagtgttctgttagattgcttgtacaaaattcaggtgatgctcggtttgagtttgtgagttctcgcgtattgtgagagaactctacgaattgctgccggctacagtcagtctcacaaacttgtgtgatgctgtaaaaccacttcgtgctgattttcatttggagggttatcattgtcattgagaatccgtctataattaagaaaatttgcaaatgggtttcaagaccttttgattgag

SEQ ID NO: 114982 - DNA, 818 bp, Zea Mays
acaaaaacctcctgcagtcgttttcacctcctccctctctcacggcggcttttctggcgacggcggcggcggcgacgacgagcagccacctggggaagagcaggtagcaggaaatggcggcgttcctgaggtcaaaatgttcaccagttggacgtactttgatgggaagccttggaaatagtttgtttggggctgccaactcttctgttggggcaataacaaggccttctcattgcgatgctatcagtcagcaaatcagaacattcatccagatgaggactaacctgaaggtggtcgataactccggggccaagcgggtgatgtgcatccagtccctgagggggaagaaaggagcaaggctcggggacatgatcatcggatccgtaaaggaggcccagcctcgtggcaaggtcaagaaaggagacgtagtctacggcgtggtcgtccgtgccgccatgaagaaaggacgcagcgatggcagcgaggtccagttcgacgacaacgcggtggtcctcgtgaacaagaagggcgagctgatcggcacccgcgtctttggccccgtcccccacgagctgaggaagaagaagcacctcaagatcctggccctggctgaacacattgtttgaggtgtgtcgcatagccaagtgtttgtgggaatgtttttttttgtgtgttctctgtttgaataatgcattgtgaaacgatagcatggaccgtttgaactattttgatgacattgctcgtccatttggatggccaatacgtgtcgtgatcgattctggagttccatttttttttgttacaagctgctttcacat

SEQ ID NO: 114983 - DNA, 705 bp, Zea Mays
aaaaacctcctgcagtcgttttcacctcctccctctctcacggcggcttttctggcgacggcggcggcggcgacgacgagcagccacctggggaagagcaggtagcaggaaatggcggcgttcctgaggtcaaaatgttcaccagcaaatcagaacattcatccagatgaggactaacctgaaggtggtcgataactccggggccaagcgggtgatgtgcatccagtccctgagggggaagaaaggagcaaggctcggggacatgatcatcggatccgtaaaggaggcccagcctcgtggcaaggtcaagaaaggagacgtagtctacggcgtggtcgtccgtgccgccatgaagaaaggacgcagcgatggcagcgaggtccagttcgacgacaacgcggtggtcctcgtgaacaagaagggcgagctgatcggcacccgcgtctttggccccgtcccccacgagctgaggaagaagaagcacctcaagatcctggccctggctgaacacattgtttgaggtgtgtcgcatagccaagtgtttgtgggaatgtttttttttgtgtgttctctgtttgaataatgcattgtgaaacgatagcatggaccgtttgaactattttgatgacattgctcgtccatttggatggccaatacgtgtcgtgatcgattctggagttccatttttttttgttacaagctgct

SEQ ID NO: 114984 - DNA, 947 bp, Zea Mays
acaaaaacctcctgcagtcgttttcacctcctccctctctcacggcggcttttctggcgacggcggcggcggcgacgacgagcagccacctgctggtgttcggattcttcgtcagcggctggcgaggacagctagagcgcccgccaacaatctcaggactcaggttatggggggcagaggttcctctttctttaggccttgttcggcaggggttgcatggattgagaggggaagagcaggtagcaggaaatggcggcgttcctgaggtcaaaatgttcaccagttggacgtactttgatgggaagccttggaaatagtttgtttggggctgccaactcttctgttggggcaataacaaggccttctcattgcgatgctatcagtcagcaaatcagaacattcatccagatgaggactaacctgaaggtggtcgataactccggggccaagcgggtgatgtgcatccagtccctgagggggaagaaaggagcaaggctcggggacatgatcatcggatccgtaaaggaggcccagcctcgtggcaaggtcaagaaaggagacgtagtctacggcgtggtcgtccgtgccgccatgaagaaaggacgcagcgatggcagcgaggtccagttcgacgacaacgcggtggtcctcgtgaacaagaagggcgagctgatcggcacccgcgtctttggccccgtcccccacgagctgaggaagaagaagcacctcaagatcctggccctggctgaacacattgtttgaggtgtgtcgcatagccaagtgtttgtgggaatgtttttttttgtgtgttctctgtttgaataatgcattgtgaaacgatagcatggaccgtttgaactattttgatgacattgctcgtccatttggatggccaatacgtgtcgtgatcgattctggagttccatttttttttgttacaagctgct

SEQ ID NO: 114985 - DNA, 108 bp, Zea Mays
atggcggttccgatgggaaccagtggcggtacacggcgtgatcgcggagggtgcgtcaaggcgaagcaactccgcatgaaggacgtggccgtcagatcaaaaacctag

SEQ ID NO: 114986 - DNA, 1764 bp, Zea Mays
atggtgcacgcggtccgcatccgcaacggcgccgcggagtcgtacgcgtgccgcttcaccgagacggcgcggctccggcaggagcgcgccctggggcgggccgtgttccccaaggccatcggcgagctgcacggccactccgggatcgcgcgcctggcgctcttctacgcgcgcggcctctgcggcctcgtcgacgcgtcccgcggcacgggcgtcgccaacgccggcctcgtctacttcaacggccgcctgctggccatgtccgaggacgacctaccgtaccaggtgcgcgtgaccgccgacggggacctccgcaccgtcgggcgctacgacttcgaagggcagctcgggtgcgccagcatgatcgcgcaccccaagctggacccggcctccggcgacctcttcgcgctcagctacgacgtcatccggcggccctacctgaggtacttctacttccggcccgacggcaccaagtccgacgacgtggagatcccgctggagcagccgaccatgatccacgacttcgccatcacggagcggttcgtggtggtgcccgaccaccaggtggtgttcaagctcggcgagatgctccgcggcgggtcccccgtggtgctggaccagggcaagacgtcccgcttcggcgtgctgcccaagtacgcgcgcgacgcgtcggagatggtgtgggtggacgtgccggactgcttctgcttccacctgtggaacgcgtgggaggagcccggcacgggggaggtggtggtggtcgggtcctgcatgacccccgccgactccatcttcaacgacgacggcggcgaggacgggcggctccagagcgtgctgaccgagatccggctggacacgcgcacgggcgcgtccacgcgccgcgccgtgctgcctccgtcggcgcaggtgaacctggaggtcgggatggtgaaccgcaacatggtggggcggaggacgcggtacgcgtacctggccgtggcggagccgtggcccaaggtgtccgggttcgccaaggtggacctggacacgggcgacctcgtccggttcgactacggcgacggccgcttcggcggggagccctgcttcgtgcccaccgagggcgcgccggcgcgcggcgaggacgacggctacatcctgtccctcgtccgcgacgagcgggcgggcacgtcggagctcctggtagtgaacgccgccgacatgcggctggaggccacggtccagctaccctcccgcgtgccctatggcttccacggcaccttcatcggcgaacgggagctagaggcccaggcctgatgattccttggttgttcttttacactgacgacgactgatcgatccatccatccgccgccgctggtcctcctcctctgttttcgcttcctggagcaggggagggagggagggggaagaaggctgttaccagagggagcctgagcccgtacataggaggtccccggagccttgttcccctcataacatatgcaatgcaatctctgcactgcaccagtcaccactactcctgcactgttgtttgtctcagttacttttttttattttttaccatgttctaaacatggatggattatggctagtcagtgactagtacagtagtgtaagctgatgaattgaaccacccagttgctgcaactgaggtgttactgttgttcactcatgccaagcaccatgtccatctctaactgttcgtcctctttcatttggttctcgtacacactcttttttatagggtacaagcacgcaatgaac

SEQ ID NO: 114987 - DNA, 204 bp, Zea Mays
ccctttctttacactcattgcgtcctcttcgtcgtttttcatccgaggcctctttcatgcctaggctggctacttcaactcgcatctttgtttcttgtgcgtgtagacgaagcttttcttcatgatgctttggtcgaaggccagcttcgttcaacctgtattatacaactaaaaacagccgaaggtcggcttcgcctgactttc

SEQ ID NO: 114988 - DNA, 95 bp, Zea Mays
ttttttctgcctttttccagtagggacatcatcctcaatattgatggcttgttcactattgccgcctccatccgctgcagcagcaacactaccgc

SEQ ID NO: 114989 - DNA, 555 bp, Zea Mays
atggccaagtgcctcaccgcatccgccgccacccttcatgccttagccactgcatctcgttccctcgcatgggagatagactccatggatctcctctgctacatggcgttggtggtcatcccgttgctggtgcggacggcactagctatggagtgggacacgttcgacgtggtggctgacatcgcgtgggaggtggagtccttacgatcaccaatggtgtctgtgcccgatagggccgagcataattttgtggcgggagcgacacatgcaaggagtgttggctcggctaatgacacgacgcttgttgcacataaaggtgggcaaatggaggccaccagcgacgaggctcgtctagagattgtttgtgttgtacccttcgccgagaatggccacctggtctccatgattgagcttggcaagatccttcacgcaagggtactgaccgtcataattgccatcttcaagcctccctacaacacgagcgtcacaaggcctttcctcgtcggcttcttcgtagccaagtgttgcacccttcgccgaggatgggtcccctag

SEQ ID NO: 114990 - DNA, 2271 bp, Zea Mays
accatgtctcttggtgccaaccaagctggatgcagatcagtagtccatggagccgaaatccggctccggcggcctgggaagcatgatgaggctgtcggcccggacggatcgctggcgctgcacgccgcgcatggcgttcttggcgaagcgcgacacgaggagcgtggtcttgaacctgctcgtggaaaccccggacgagtcggcctccatctcctcctcccggcgccgctgctcggccgccttccgcttgaggtacctcctccatgcggcctgtatgaagcaggaggcccaggtgcgccactgctgcgagtagaagcggaaggtctgctgcagctgcttgctgtgcaggcgccggaactgccccgccacgaacttgagctcgtcagcgcgcagcgcgaacgcctccacctcggagatggccctaacggtgcgcgtggacagcgggaagttggcgccggcctttgggtcgagcgcccacgtgagtagctcctccccgcagaagtcgccctccttgagcagcccccggttgtagaaccccatccggccgccgtcggtggtggagctctcgaggcggccgcgaatgatgaagagcatctcgtcgacggggtccccctcgcgcacgatgtaggtggactcggtgcagaggctgggcttgaggcgctcgcagatagcgtcgaggaggcgctcgtccatgttggcgaagagcgggacgcggcggacgaggcggaggcagaggtgccgcttgacgtcgcggcgcaggtccttgggcaggctgcgcacgaggctgtcctcgtcgacgccgcgcgtctcgagccacttgtactggttgtgccgccacacccgctcccggagctcgtcggggaggacgcggtggtgcatccactgctccgagtccctgcgcttgaggcgcatctcctccaggcgcagcgtcatggactgcaggtacgtctgcatgttgccgatgaggagcgccatgaggatgaggcccagcagcgcgagcgtgatggagaagagctgctcccccttgtagtgggtcgtctccaggccctggccgatggtgctcaggttctgcaggccccaccagaggcagaagaggatcttggccgtcaggttctccgtggagtagacgcccgactggatggccgtggtgtagatgccgtaggggaaccccgtgccgctgccgtcgacgggggcgcactcctgcgccagcacctgccggatcatggtgcgccactcgaggaagcccgactggccctggctgccgccgccgcagtacatgtaggtgcggcactggtggaagttgaggttggtgcacttgtcccgccagcagtcgtccagccgctcgatggccagcaggtaccagaaggcccccaccatgtggctggccagcatgtagagcagcaggtagaaggcggcgccgccgaaggccgtctcggcgaacacccccgtggtgcgcttcagctccgaggtgatggggtagaagcgcaccaggcggggcacgtactgcgacagcaccgtgaagagcagcgcgttcttggtgggcagcaggtccgcgcccttgggccggttgaggaagttccagatggagacctgcggcagcggcagcacggacagcaggtcgacggcgaagaatcggcgcaggtagcggcgcgcgatggcggacgagtcgatgaccagctcgccgcgcccgaacacgcgcgacgacggcgcgatgtacgccgtccggaactgcagcgcgatccgcgccaggtagaaggcgtccacggcggtgcgcaccacggtggcgacggtggccaggttgcggtcgaagccgatgcaggtgttcttgtccgtgtacttgacggccaggaggtagaggaagagcgggtcgatggccacggacacgatgcacgcgaagacgaaggcgcggttcatgcgcgccaggaacgcgtcctgcgggtcgaacacctgctgcgacatcttccggaagtcctcctggaacacgaggccgatgctcctcagccgctccgaccggttcatcacgcccgccgccacccgaaccgaccgcgcacggaacttggcggcggccgccgccgggttgcccgagaagtagctgtccatgtggaacccgccgccgtgcccgtgcccgtgcccgtgctccatgctggcaccgccgccgctgccggaagtggggctggacgccgaatccgccggcgcgtctgcctcgacgagcctcacgaacttctccctgcgcccgttgatgaactgggtccggtagccgcacccgaacat

SEQ ID NO: 114991 - DNA, 5590 bp, Zea Mays
cccgcccagcgccggggacagcgagaggcggacgaagccccgcgcggcgctccggtcgcctcaacatcttatccatccacccagctctcctccgacttcgccaagccccgcagccagataaaaagtacggcctcccctccggcgcgcgaacgcgacacggcgcagtgtctcctcgccctccggtggtcctcgtgcgcgcgcaccgacacgtcccggcgaaccgctccgttgtccgttccggtagtttcggtacgcgcgccgctcgccttggcgccatggcgtcggctgccgcttcggcggcggcggcgctggcgcggcacgtcctcctccccccgcgctaccacgcgtcgccgccctccgccgctcgccgggcccgcgccgcgcccgcgctcacctcggcgtcgccccgctgcgtcctccgtcgcgtgggtaggacgccccggtacgggacgaccgggaagaagaggactaggcgcttcggggctccgcgcgcggggatggacatggacctggccagcggcgccgtcgaggtgatcaacgacctgggcttcgacacgctcaccttcctcggcgtcacggtcctcgtcgtccccgccttccgcgtcgtcaaggccagcccaattctcggcttcttctgcgccggcgtcgtgctcaaccagttcggcctcatcaggaacctcaccgacgttaagctgctctccgagtggggaatccttttcctgctgtttgagatggggctggagctctccctctctcgcctcaaggctcttgcgaggtacgcctttgggatgggcttgcctcaggttcttttgtcaacccttgctttcacggcgttcgagcttcctcctaatgatgccataggaacaaagatattgcagtttctctttgattcaagacctgatcttgtgaacatcaggagtatcgatgaagcaatagtaattggagctgccctctcactatcttcatctgcttttgttctccagcttcttgccgagaaaggtgaacttccaacaagatttggttcagctacactgggaattcttctcctgcaggacattgcagttgtccccctgttggtcatactccctgtgctggagagtcagaatattatagagcaaagtgtgtggccaattttactagctgagagcttaaaggcactgggcgggcttggcttactttcccttggtgggaaatacttcataagacgtgtctttgagtttgttgcagagtcaaggagttcagaggcatttgttgcgctctgtcttcttacagtcgcagggacatcacttatcacccagaagctgggatttagtgatacattgggtgcatttctggctggagccattcttgcagaaacaaatttccggacacaaattgaagctgacataaggccattcaggggcttgttgcttgggctgttctttgtgactacagggacttccattgacatgcagcttctcatccgggagtggcctaatgttctgtcactgttggggggtcttattgtaatcaagacactgataatcaccgcaattgggcctagagtcgggttaactcttaaagaaagtgtaaggatagggctgctactttctcaaggaggcgagtttggatttgtggtgttttctttggcaaacaggctcggtgtcctaccacttgagttgaataaactgcttataattgttgttgtgctgtcgatggcattaactcccttactcaatgaagttggaagaagagtagcagggatgattgatgaaagatctgaagaaaaagaaaagcctgctgagatggtgaattatggtgccactgaacctgttgtaattcttggttttggagagatgggacaggtgcttgctaaatttttatctgcaccattgtcatttggaattgagaaagacacagaaggatggccatatgttgcattcgatctgaatcctgttgttgtaaagtcagctagaaaatcaggatttcctgtgctattcggagatggttcacgccctgcagttctgcaatctgctggcataacgtttccaaaagctatcatggttatgtatactggaaaggaaaaaacaattgagtctgtaagcagattgcgtcaagctttcactgcggttccgatatacgctagagctcaagacctctcacatttgttagatcttaagaaagcaggcgcaacagacgttgtcctggaaaatgccgagaccagcttgcagctaggttcaatacttttgaaaggactgggcgtcatgtctgatgatgtatccttcttgagtaagcttgtgagggactcaatggagctacaagctcaggaagcactgaaagacattggggaccaagaagttgatattatgaagcctcttcaggtaagagtgtcagatttagtggagagcaatggtaatagttcaagaatggtagccccagagcagtcgttaagtctaagtagccgcccagacataaaggcaataaaaccaccagtggcgaatgggatacctgatatgaaggtggaaaatgacaagacaggatacgattttgacagggtggattctgaaaatggtgtgacatactgtctattggaatctgatgaccaaagcgatgaagcctccagtacaagcaaggaaatgatcgatcagtctgctgatacaagggttaatgtcaatgataagaagatactctagctctacttgtaggatcaagttcattggtgattggctgatcgctgggctgatcagaactgccgcatttcttgcagctcctataggtttcttgaagcacttctaaagactgcaatactgcatttaagttcctggtacatggagtcctacagaatagcaaccataaacacttgtgtcatgtggagatattgcggaaccgaccagccgtgcagcaaatctaaaggctgaaaatactgagcttgagttgtgcaggtgtacagcagatctaaagccatgcagcaaccataaacagttgaagattttcagctggcaaatttgccaacgcagctgagtgcatgcatggctttggcaggatccggttgtaactagcaacatttcagaatttagaatatcattttttcacagctcagattatatttgactgaagccacaacataataaagggacttccattgatagatacattcttgtacaatatctgtatctgattcctagtgtgtactagatggtacatacctgagcagtttattatgtatcatcatcatccaataaagtgctgaactaaattttgggtattgatcaatccagtaaaccataatagcctctgctctgacgaattattcacaaataatggggagaattaaatacataccatgtctcttggtgccaaccaagctggatgcagatcagtagtccatggagccgaaatccggctccggcggcctgggaagcatgatgaggctgtcggcccggacggatcgctggcgctgcacgccgcgcatggcgttcttggcgaagcgcgacacgaggagcgtggtcttgaacctgctcgtggaaaccccggacgagtcggcctccatctcctcctcccggcgccgctgctcggccgccttccgcttgaggtacctcctccatgcggcctgtatgaagcaggaggcccaggtgcgccactgctgcgagtagaagcggaaggtctgctgcagctgcttgctgtgcaggcgccggaactgccccgccacgaacttgagctcgtcagcgcgcagcgcgaacgcctccacctcggagatggccctaacggtgcgcgtggacagcgggaagttggcgccggcctttgggtcgagcgcccacgtgagtagctcctccccgcagaagtcgccctccttgagcagcccccggttgtagaaccccatccggccgccgtcggtggtggagctctcgaggcggccgcgaatgatgaagagcatctcgtcgacggggtccccctcgcgcacgatgtaggtggactcggtgcagaggctgggcttgaggcgctcgcagatagcgtcgaggaggcgctcgtccatgttggcgaagagcgggacgcggcggacgaggcggaggcagaggtgccgcttgacgtcgcggcgcaggtccttgggcaggctgcgcacgaggctgtcctcgtcgacgccgcgcgtctcgagccacttgtactggttgtgccgccacacccgctcccggagctcgtcggggaggacgcggtggtgcatccactgctccgagtccctgcgcttgaggcgcatctcctccaggcgcagcgtcatggactgcaggtacgtctgcatgttgccgatgaggagcgccatgaggatgaggcccagcagcgcgagcgtgatggagaagagctgctcccccttgtagtgggtcgtctccaggccctggccgatggtgctcaggttctgcaggccccaccagaggcagaagaggatcttggccgtcaggttctccgtggagtagacgcccgactggatggccgtggtgtagatgccgtaggggaaccccgtgccgctgccgtcgacgggggcgcactcctgcgccagcacctgccggatcatggtgcgccactcgaggaagcccgactggccctggctgccgccgccgcagtacatgtaggtgcggcactggtggaagttgaggttggtgcacttgtcccgccagcagtcgtccagccgctcgatggccagcaggtaccagaaggcccccaccatgtggctggccagcatgtagagcagcaggtagaaggcggcgccgccgaaggccgtctcggcgaacacccccgtggtgcgcttcagctccgaggtgatggggtagaagcgcaccaggcggggcacgtactgcgacagcaccgtgaagagcagcgcgttcttggtgggcagcaggtccgcgcccttgggccggttgaggaagttccagatggagacctgcggcagcggcagcacggacagcaggtcgacggcgaagaatcggcgcaggtagcggcgcgcgatggcggacgagtcgatgaccagctcgccgcgcccgaacacgcgcgacgacggcgcgatgtacgccgtccggaactgcagcgcgatccgcgccaggtagaaggcgtccacggcggtgcgcaccacggtggcgacggtggccaggttgcggtcgaagccgatgcaggtgttcttgtccgtgtacttgacggccaggaggtagaggaagagcgggtcgatggccacggacacgatgcacgcgaagacgaaggcgcggttcatgcgcgccaggaacgcgtcctgcgggtcgaacacctgctgcgacatcttccggaagtcctcctggaacacgaggccgatgctcctcagccgctccgaccggttcatcacgcccgccgccacccgaaccgaccgcgcacggaacttggcggcggccgccgccgggttgcccgagaagtagctgtccatgtggaacccgccgccgtgcccgtgcccgtgcccgtgctccatgctggcaccgccgccgctgccggaagtggggctggacgccgaatccgccggcgcgtctgcctcgacgagcctcacgaacttctccctgcgcccgttgatgaactgggtccggtagccgcacccgaacat

SEQ ID NO: 114992 - DNA, 3197 bp, Zea Mays
cgctccggtcgcctcaacatcttatccatccacccagctctcctccgacttcgccaagccccgcagccagataaaaagtacggcctcccctccggcgcgcgaacgcgacacggcgcagtgtctcctcgccctccggtggtcctcgtgcgcgcgcaccgacacgtcccggcgaaccgctccgttgtccgttccggtagtttcggtacgcgcgccgctcgccttggcgccatggcgtcggctgccgcttcggcggcggcggcgctggcgcggcacgtcctcctccccccgcgctaccacgcgtcgccgccctccgccgctcgccgggcccgcgccgcgcccgcgctcacctcggcgtcgccccgctgcgtcctccgtcgcgtgggtaggacgccccggtacgggacgaccgggaagaagaggactaggcgcttcggggctccgcgcgcggggatggacatggacctggccagcggcgccgtcgaggtgatcaacgacctgggcttcgacacgctcaccttcctcggcgtcacggtcctcgtcgtccccgccttccgcgtcgtcaaggccagcccaattctcggcttcttctgcgccggcgtcgtgctcaaccagttcggcctcatcaggaacctcaccgacgttaagctgctctccgagtggggaatccttttcctgctgtttgagatggggctggagctctccctctctcgcctcaaggctcttgcgaggtacgcctttgggatgggcttgcctcaggttcttttgtcaacccttgctttcacggcgttcgagcttcctcctaatgatgccataggaacaaagatattgcagtttctctttgattcaagacctgatcttgtgaacatcaggagtatcgatgaagcaatagtaattggagctgccctctcactatcttcatctgcttttgttctccagcttcttgccgagaaaggtgaacttccaacaagatttggttcagctacactgggaattcttctcctgcaggacattgcagttgtccccctgttggtcatactccctgtgctggagagtcagaatattatagagcaaagtgtgtggccaattttactagctgagagcttaaaggcactgggcgggcttggcttactttcccttggtgggaaatacttcataagacgtgtctttgagtttgttgcagagtcaaggagttcagaggcatttgttgcgctctgtcttcttacagtcgcagggacatcacttatcacccagaagctgggatttagtgatacattgggtgcatttctggctggagccattcttgcagaaacaaatttccggacacaaattgaagctgacataaggccattcaggggcttgttgcttgggctgttctttgtgactacagggacttccattgacatgcagcttctcatccgggagtggcctaatgttctgtcactgttggggggtcttattgtaatcaagacactgataatcaccgcaattgggcctagagtcgggttaactcttaaagaaagtgtaaggatagggctgctactttctcaaggaggcgagtttggatttgtggtgttttctttggcaaacaggctcggtgtcctaccacttgagttgaataaactgcttataattgttgttgtgctgtcgatggcattaactcccttactcaatgaagttggaagaagagtagcagggatgattgatgaaagatctgaagaaaaagaaaagcctgctgagatggtgaattatggtgccactgaacctgttgtaattcttggttttggagagatgggacaggtgcttgctaaatttttatctgcaccattgtcatttggaattgagaaagacacagaaggatggccatatgttgcattcgatctgaatcctgttgttgtaaagtcagctagaaaatcaggatttcctgtgctattcggagatggttcacgccctgcagttctgcaatctgctggcataacgtttccaaaagctatcatggttatgtatactggaaaggaaaaaacaattgagtctgtaagcagattgcgtcaagctttcactgcggttccgatatacgctagagctcaagacctctcacatttgttagatcttaagaaagcaggcgcaacagacgttgtcctggaaaatgccgagaccagcttgcagctaggttcaatacttttgaaaggactgggcgtcatgtctgatgatgtatccttcttgagtaagcttgtgagggactcaatggagctacaagctcaggaagcactgaaagacattggggaccaagaagttgatattatgaagcctcttcaggtaagagtgtcagatttagtggagagcaatggtaatagttcaagaatggtagccccagagcagtcgttaagtctaagtagccgcccagacataaaggcaataaaaccaccagtggcgaatgggatacctgatatgaaggtggaaaatgacaagacaggatacgattttgacagggtggattctgaaaatggtgtgacatactgtctattggaatctgatgaccaaagcgatgaagcctccagtacaagcaaggaaatgatcgatcagtctgctgatacaagggttaatgtcaatgataagaagatactctagctctacttgtaggatcaagttcattggtgattggctgatcgctgggctgatcagaactgccgcatttcttgcagctcctataggtttcttgaagcacttctaaagactgcaatactgcatttaagttcctggtacatggagtcctacagaatagcaaccataaacacttgtgtcatgtggagatattgcggaaccgaccagccgtgcagcaaatctaaaggctgaaaatactgagcttgagttgtgcaggtgtacagcagatctaaagccatgcagcaaccataaacagttgaagattttcagctggcaaatttgccaacgcagctgagtgcatgcatggctttggcaggatccggttgtaactagcaacatttcagaatttagaatatcattttttcacagctcagattatatttgactgaagccacaacataataaagggacttccattgatagatacattcttgtacaatatctgtatctgattcctagtgtgtactagatggtacatacctgagcagtttattatgtatcatcatcatccaataaagtgctgaactaaattttgggta

SEQ ID NO: 114993 - DNA, 3201 bp, Zea Mays
cccgcccagcgccggggacagcgagaggcggacgaagccccgcgcggcgctccggtcgcctcaacatcttatccatccacccagctctcctccgacttcgccaagccccgcagccagataaaaagtacggcctcccctccggcgcgcgaacgcgacacggcgcagtgtctcctcgccctccggtggtcctcgtgcgcgcgcaccgacacgtcccggcgaaccgctccgttgtccgttccggtagtttcggtacgcgcgccgctcgccttggcgccatggcgtcggctgccgcttcggcggcggcggcgctggcgcggcacgtcctcctccccccgcgctaccacgcgtcgccgccctccgccgctcgccgggcccgcgccgcgcccgcgctcacctcggcgtcgccccgctgcgtcctccgtcgcgtgggtaggacgccccggtacgggacgaccgggaagaagaggactaggcgcttcggggctccgcgcgcggggatggacatggacctggccagcggcgccgtcgaggtgatcaacgacctgggcttcgacacgctcaccttcctcggcgtcacggtcctcgtcgtccccgccttccgcgtcgtcaaggccagcccagtgaaattctcggcttcttctgcgccggcgtcgtgctcaaccagttcggcctcatcaggaacctcaccgacgttaagctgctctccgagtggggaatccttttcctgctgtttgagatggggctggagctctccctctctcgcctcaaggctcttgcgaggtacgcctttgggatgggcttgcctcaggttcttttgtcaacccttgctttcacggcgttcgagcttcctcctaatgatgccataggaacaaagatattgcagtttctctttgattcaagacctgatcttgtgaacatcaggagtatcgatgaagcaatagtaattggagctgccctctcactatcttcatctgcttttgttctccagcttcttgccgagaaaggtgaacttccaacaagatttggttcagctacactgggaattcttctcctgcaggacattgcagttgtccccctgttggtcatactccctgtgctggagagtcagaatattatagagcaaagtgtgtggccaattttactagctgagagcttaaaggcactgggcgggcttggcttactttcccttggtgggaaatacttcataagacgtgtctttgagtttgttgcagagtcaaggagttcagaggcatttgttgcgctctgtcttcttacagtcgcagggacatcacttatcacccagaagctgggatttagtgatacattgggtgcatttctggctggagccattcttgcagaaacaaatttccggacacaaattgaagctgacataaggccattcaggggcttgttgcttgggctgttctttgtgactacagggacttccattgacatgcagcttctcatccgggagtggcctaatgttctgtcactgttggggggtcttattgtaatcaagacactgataatcaccgcaattgggcctagagtcgggttaactcttaaagaaagtgtaaggatagggctgctactttctcaaggaggcgagtttggatttgtggtgttttctttggcaaacaggctcggtgtcctaccacttgagttgaataaactgcttataattgttgttgtgctgtcgatggcattaactcccttactcaatgaagttggaagaagagtagcagggatgattgatgaaagatctgaagaaaaagaaaagcctgctgagatggtgaattatggtgccactgaacctgttgtaattcttggttttggagagatgggacaggtgcttgctaaatttttatctgcaccattgtcatttggaattgagaaagacacagaaggatggccatatgttgcattcgatctgaatcctgttgttgtaaagtcagctagaaaatcaggatttcctgtgctattcggagatggttcacgccctgcagttctgcaatctgctggcataacgtttccaaaagctatcatggttatgtatactggaaaggaaaaaacaattgagtctgtaagcagattgcgtcaagctttcactgcggttccgatatacgctagagctcaagacctctcacatttgttagatcttaagaaagcaggcgcaacagacgttgtcctggaaaatgccgagaccagcttgcagctaggttcaatacttttgaaaggactgggcgtcatgtctgatgatgtatccttcttgagtaagcttgtgagggactcaatggagctacaagctcaggaagcactgaaagacattggggaccaagaagttgatattatgaagcctcttcaggtaagagtgtcagatttagtggagagcaatggtaatagttcaagaatggtagccccagagcagtcgttaagtctaagtagccgcccagacataaaggcaataaaaccaccagtggcgaatgggatacctgatatgaaggtggaaaatgacaagacaggatacgattttgacagggtggattctgaaaatggtgtgacatactgtctattggaatctgatgaccaaagcgatgaagcctccagtacaagcaaggaaatgatcgatcagtctgctgatacaagggttaatgtcaatgataagaagatactctagctctacttgtaggatcaagttcattggtgattggctgatcgctgggctgatcagaactgccgcatttcttgcagctcctataggtttcttgaagcacttctaaagactgcaatactgcatttaagttcctggtacatggagtcctacagaatagcaaccataaacacttgtgtcatgtggagatattgcggaaccgaccagccgtgcagcaaatctaaaggctgaaaatactgagcttgagttgtgcaggtgtacagcagatctaaagccatgcagcaaccataaacagttgaagattttcagctggcaaatttgccaacgcagctgagtgcatgcatggctttggcaggatccggttgtaactagcaacatttcagaatttagaatatcattttttcacagctcagattatatttgactgaagccacaacataataaagggacttccattgatagatacattcttgtacaatatctgtatctgattcctagtgtgtactagatggtacatacctgagcagttt

SEQ ID NO: 114994 - DNA, 3756 bp, Zea Mays
ggaggcgaagcttgcagggcggcgatggacgtggactcccgcatggcgacagagtccgactccgactccgacgctcgcggcggcgggtcggggtccgggagcgagacccccacggcgtccgcgtccgcgtccgcgtccccgtccacgtccgcgcccgcgcccgggacgcccacggccgcggccgcgtccccggggctggtggcggggcccaggccggcgccggggtacacggtggtggacgccgcgatggacaagaaggaggacgggccgggatgccggtgcgggcacacgctaacggcagtgccggcagtcggggaggagggctcgccggggtacgtgggcccgcgcctgatactctttggtggtgccaccgcgctcgagggcaactctgccacgccgccctcgccggctgggagcgccgggatccgccttgctggtgccaccgcagatgtccattgttatgatgtgttatcaaataagtggaccaggcttactccacttggtgaacctccttcaccaagagctgcacatgtagccactgctgttggtaccatggtggtcattcagggtggaattggccctgccggcttatctgctgaggaccttcatgttctggatcttacacaacaacgaccgcgatggcatagagtggtggttcaaggtcctggtcctggtccacggtatggacatgtgatggccttggttgggcagcgattcttattgacaattggtggcaatgatggaaaacggcccctggcagatgtatgggcccttgatactgcggctaagccatatgaatggagaaaacttgagccggaaggtgaaggaccaccaccatgcatgtatgcaactgctagtgcccgttctgatggtctccttttgctttgtggtggaagggatgccaatagtgtgcccctatcgagtgcatatgggcttgctaagcatagagatggtcgctgggagtgggcaatggcccctggtgtgtctccatcacccagatatcaacatgcagctgtttttgtcaatgcacggcttcatgtctcaggaggggctcttgggggtggtcgcatggtagaagattcctcaagcgttgcagtattggacactgctgctggagtttggtgtgataccaaatcagtagttacaactccaaggacaggaagatatagtgcagatgcagcaggtggtgatgcttctgtagagctcacacggcggtgcaggcatgcagcagccgctgttggtgatttgatatttgtttatggaggtttaaggggaggtgtgctgctagatgacctcctagttgctgaagatcttgctgctgctgaaacaaccagtgcagctaatcatgcagcagcagcagctgcatccacaaatggacaaagagaacctggtagatatgcctacaacgatgaacaatcaggacaaactgttacagtttcaagtcctgatggagctgttgttcttgggactcctgttgctcctccggtcaatggggacatgtatactgatattagtcctgagaatgccattatccagggacagagaaaaatgagcaaaggtgttgattatttggttgaagcatcagctgcagaggctgaggcaatcagtgctactttagctgctgtaaaggctaggcaagttaatggtgagatggagcattcacctgatagggaacagtctccagatgctgcaccaagtaccaagcaaaattcaagcctcataaaaccagatgttgctcttgtcaacaattcaacagcacctcctggtgttcggttgcaccatagagcagttgtggtggctgcagaaactggaggtgccttaggtggcatggttaggcagttgtccattgatcagtttgagaatgaaggtagaagggtcatttatggaacccctgagaatgcaactgcggcaaggaaattattagatcgacaaatgtctattaatagtgtgcccaaaaaggtaattgcttctcttctgaaacctcgtggctggaagccccctgttcgaaggcagttctttcttgactgcaatgagattgcagatctatgtgatagtgctgaaagaatattttcaagtgaacctagtgtcttacagctgaaagctcccattaagatatttggtgatctgcatggtcaatttggtgacctcatgcgcttatttgatgaatatggcgctccttcaacagctggagacattgcttacattgattatcttttcttgggagattatgtcgatcgtggtcagcatagtctggagacaatcagtcttctccttgcactgaaggttgaatatcctcacaatgtacatttaattcgagggaatcatgaagcagcggatatcaatgctctttttgggttccgaatagagtgcatagagagaatgggtgagcgggatggaatctggacctggcaccgtgtgaacaggttatttaattggcttcctttggctgcactaatagaaaagaagataatttgtatgcatggtggtattggtcggtccatcaaccatatagagcaaattgaaaatcttcaaagaccaattaccatggaagcaggctcagttgttctgatggatcttctgtggtctgatccaactgagaatgatagcgtagagggactcaggccgaatgcacggggccctggtcttgttacctttgggcctgatagagttatggagttctgcaacaacaatgacctgcagttgattgtgcgagcacatgagtgtgtgatggatggctttgagcgattcgcccaaggtcacttgatcactcttttctcggcaacgaattactgtggaacggcaaacaacgcaggtgcaattttagttctcggaagggatctggtggttgttccgaaactcatccatcctttgccgcctgctatcacgtcacctgagacctctccggagcatcatattgaggacacatggatgcaggagttgaatgcaaacagaccaccaacaccaaccaggggccgccctcaagcccccaacaatgaccgaggctcccttgcctggatataacaggctggccatattattaaacaattgatttcttgtctcctatcattggcttgaggctaaaattatccatccattctggacacatggaagcactctgctgaaagcacacactggcccaaaacaatgtcgaaagaaaactgttcagggagcgagactaagcggtgctctgaaggcgaaggccagagaagagtcactgtcgacagcgctccccaaatcctttccacaaacaagtagaagagcagaaccaagtgttggtaaaccacaggatcttgcctgggatcgcgcctgtacatactcagacgccagcagatagaggaggggttgtgtatgtgttctttttgtcttagcgtcgaaagggatagcagcgtccattgtactaggtattcatttgctgtagattttgatttgttgcctcatgttgcaaagtatggagtgggaaagttggtttcctcgtgtgacggacggtggtctgtcaggtcttgtataatagcgttgtcggctgtttatgtttgcagcgcgtcagctgttacttagcacaccttacacctccctcatgttgtaattcccatcaccggtgctgatgaatgtgcacaatatattgttgtctgttgtccaaagttttgggtcctggacgggttaggtgatttgatttggtttattggagaagcaatacgttgtttgattttgagctgtatgctgtgcacctttgggatttattttattttgcaaatttgt

SEQ ID NO: 114995 - DNA, 231 bp, Zea Mays
atattttttttatttactaggattttcatttaagaagaaatgttattcaataaccaaaaatcaatcatgcgcaataaaagaattattccaaatgcaaatacataacaaacacttaaaagaatcaatcatggtcgctaaaaatcatgtttacttgttttaattaatttttagtcactaacatctacaggtatgttcaggctataagatttgatagtgatccttgctctatag

SEQ ID NO: 114996 - DNA, 515 bp, Zea Mays
cacataaacacaaaagcaccacaattatatattcacaaaagcatcacaattataatatcattcacaactagatcatttacagatagctagctagatcattcacaaaagctccagagatgattggtcacaaaagcaccacagcgatatcactctagcttgaagcagtttaaaagcccacaactacatcactaatgtttcatatcactccaactattgttcaaaagcccacaactaccagctcatcttttaaatcaacgttgaaatagcagataggagctgagcaagctatgctgaatatgcatttcaacagtggaagcatgaacatggctacatcagttcttctcgtcttctgttttgcttgacgtagtggcagcctgggtgcttgacgtggtgtgctttcaactgtggtgtgcttgacatagtggcggcatgggtgctaagtgatctactagcaggacaaagaccaacaccattgagagaatgagcaggctgtgcccttgataaagaatgaatgt

SEQ ID NO: 114997 - DNA, 98 bp, Zea Mays; identical to SEQ ID NO: 111888

SEQ ID NO: 114998 - DNA, 1510 bp, Zea Mays
tcatcactccctcgtcccccttccactttccccacctcacccggtcaccccttctctgcctcgtctccactcctccccccgccgccctcgccccagagccccgccgcgcgattgggctctgcaccctcctcggatccgctgccgcacgtcgtcgccaatcgacattccccgtttccctccgccggttcccgttgctgcgcctgcctgctttacccccttaccgtttcctgaccctgtcctggttcgcgggtttcccgaattcgcgcgctcttgcggcggcgagatccggcccgctcgtcgtagggagagggagccgaccgctcctgatccgagccgcgccccgcgggggtttcgtatcccgttctcccttctggtccggccacaggatcgcagtcgcaaggctgaggagcagcagggggagatggcgccgccctacgtgctgtcgctgctgctgctgctggtgctgtccgtcccggccgtcttcctcgtcgcgccgcgcctcatcccgccccgcgcgctcccggccatcccggacgccgacgagacggaggacctcgcgctgttccgccgcgccgtgctcctctccgccgcgccctcctccaaggccggcgctggccccgcctccccctcgcgtttcttcggcgctgcccaccgccgacagaggaagcagaaggtggcctttctcttcctcaccaactccgacctcgtcttcgccccgctctgggagaggttcttcgcgggccaccacggcctcctcaacgtctacgtccacgccgacccggctgcggcgttcgccctcccgcccacgccctccttccgcggccgcgtaatccgggggaaggccacccagcgcgcctccgccacgctcatctccgccgcgcgccgcctcctcgccaccgcgctgctcgacgacccggccaaccacttcttcgcgatgctctcccagtcctgcgtcccgctgcggcccttcccggccctctaccgcacgctcaccgctgacactgccggcccgcgcggccgccaccgcagcttcatcgagatcctcgacgccgagcccactctgcacgaccgctactacgcgcgcggcgacgacgccatgctcccggaggtgccctacgagagcttccgcgtcggctcccagttcttcgtgctcaccaggaggcacgctgtcatggtggtcagggacaggaggctttggaacaagttcaagctgccgtgtctcgtcaagaggaagcactcgtgctacccggaggagcactacttcccgacgctgctggacatgcaggaccccgcaggatgcaccaagttcacgctcaccagggtgaactggaccgactcctttgacggccacccgcacacgtaccagccggaggaggtgtccccggagctcatcagggacctcaggaagtccaatggcacatactcccacatgtttgcgcgcaaattcgcgcctggatgccttgcgccgctcatggagattgccgactctgtcattctccgtgactaggct

SEQ ID NO: 114999 - DNA, 958 bp, Zea Mays
ctgtccagcaggaagtctggcgcctccctctgcctcctgtacagcgtgcgcccctggtcctggcgtgtttcttttttttttctggccggccatggatttcctcggcaccattcctttgattcgagtggggggggttcggcctcaagccagcatgagttggtgacctccctgctcggccatggctgcgccatgagcatctagtgcccctccccctcgacctccctgcttggcaagtgtccagccgacgcccaactcggcctcgccgtcggccttgcccagcagcgacagtccgccccggcactcaccagtgccaagatccactgcgccctctccttccttgaagtcgtggtgcttggtggctttgccttggcgctcgacacccccaatggctaagcagacccctctgctccctcaggccagcgccctccccggctcttctccatggcgtgctcagctctcccatccgtggacagtaccaccccctccctccacttcggctgaagcatacacaactcccctgctcttcctcgccggtacgccagcaagcctgcagcagtagcctcggatcccctccgcatcgagagcagccgcatcgtcgatccgtgcaaccttgacgtctccgcgtctcgcttccccgtcgatctgcgcagtccccgtcgcaatgccgtcaatccgcgctagctatcggtgtcgtgcctcgtgctctacctatgcgacgaaatgctagccggtggatagcacatgcgactcaccgatccggccaggttgcttttgttttatttacgattcagtcgatggcgtgaatatgtgcgtgaaaatataattgtatgaatgaacgtgtgtatagaagaaaacgaagtagaaagaaacttggatgtttttatatttgataggaaaaatatgcgatgcgttgtttaaatgcgaaaactaagttataaaatgcggattttgttttggg

SEQ ID NO: 115000 - DNA, 694 bp, Zea Mays
atctctcccttccctcttctctctcccctcaactctcctcattcttcgcaggctgagcagcaaccgccccaatctgcagttcaagaaccgcccacgcagaacccctccgccctccgctccttccaacttgctctctacctgcaccagcctcgcccacccttcgctcgccgccgccatggggaggggaaagttcaagggaaagcccaccggccgccacagcgtctccacaccagaggagatcggtaacgacgcgcccgcccgccccatggtcccatttataggtcgaattcgatttcatatctggagcgtgccacagcgagcctagacgactgcttgatctgatgatttcaatgtgagctagttctggaccgggtttgcgtgatcgagcagaactcaaaccatttatttagtagcttgtcgcgagttgtcatttaagttcctggttttaagtctgtgctacgaggtttccatgggattcgttcgatgcttggaggaacgatgatttgttcatctagttgttcgatttagaggctcaatgataaagctctttagaggctagatacaggaaataaatgctacacttagctttcttttttcattaatttctacctgtgtatatatgtctaaataattagcacactatatttgggcttgttctgataactttatcctctaaataaatgcagctgctggt

SEQ ID NO: 115001 - DNA, 114 bp, Zea Mays
gtcatatcattaacagtttatcccgtatttttttatctcccgcagcggttccctctaaatacttctcctataccccactataaccataaaatatcattttctatacctactttt

SEQ ID NO: 115002 - DNA, 648 bp, Zea Mays
cgcgattcccggcgtcctgtcgtcgatgcccctgtttcccatggcgatttccctaggaattcctttctgttcgacgcccaaccatccctctgttttcctccctcgcgcgggccacgaactctttgtttgccgcgcgcacgaatttattctgctcgccacagcgtgtcgtcgaactcccgcaccatcaccgcctctgtcacaagctcgttagccacaattaacttaaccgcgtcagcacacgactgtggtcatgttcatcgaatttgccaacactttgttgccgattcgactatcgtcgcttcgcgtgttgtcgagcccgtcattttccctgtcttgtactcgcgtcctgtttcctgctcgccagcgtgccctctcggctcgctcggctttaaaatccctatctcgtcgtcgacctcgtcaagacttaattcgtccgtcgtgctggtcactattccatattgtgcctattagctcggatcctgtcccagctcgttgttgtgtcattcacagtccagtcgtcaaacccgtcatctcctgctcaaccccacctcaccagcccgctcaagactgcaatcgaaggtcgtcgtcaatccgtgcgttatcaagcaatctcaagaatcgggtgaagacgaagttagcagcgcgata

SEQ ID NO: 115003 - DNA, 299 bp, Zea Mays
cgcgattcctggcgtcctgtcgtcgatgcccctgtttcccatggcgatttccctaggtattcctttctgttcgacgcccaaccatccctctgttttcctccctagcgcgggccacgaactctttgtttgccgcacgcacgaatttattctgctcgccacagcgtgtcgtcgaactcccgcaccatcatcgcctctgtcacaagctcgttagccacaattaacttgaccgcgtcagcacacgactgtggtcatgttcatcgaattcgtcaacgctttgttgccgattcgactatcgtcgc

SEQ ID NO: 115004 - DNA, 102 bp, Zea Mays
ggggaagcagggtatcatcgtacacgagcagtgcctctctcttttgtgacagagaaggaagcacaagcattggacttggtccaaagtacacaagtcctagga

SEQ ID NO: 115005 - DNA, 424 bp, Zea Mays
cggcggcggcgacgggggtggtcaccggcggcgagcggcacacggggcacgtcgggtgcagccgcagccaccggtcgacgcagcgctggtggaaggcgtgcgcgcactggggcagcacgcggagcacgtccccgggggcgtactcgcccaggcacaccgcgcagcacgccctggtggccgcctcctcgtcgccgtacaccaccttgggcagcgcccggagcgcggcctcgtcgagccccgcctcgacgtcctccacgccgcccacgaacacggcggtgaccgtgcggcggtgtgcgcggcgggcctcgtcgtcgtccctcaggcgcgcgggcgcggcgcggcgggagcacgcgcggagcagggcggccacggtgaccacggccagcacgctgacgacggcgaaggcggcctccagcctcaccat

SEQ ID NO: 115006 - DNA, 1911 bp, Zea Mays
tcgtttgccccctccctccccacctgcaccaccaccaacaccaaccaacaggtggcgagagcgagagcgagagcaaagagctgagcgggacggagcagctagcgctagggataacgcacacccaccaccatggcgacgcccggagagcagccggcggaggtcgtgtccgtcgagatgcccgcacccgacgggtggaccaagaagtttactcccttgagaggggggagatctgagattgtttttgtttcaccaactggtgaggaaattaacaacaagaggcaattacttcagtacctaaaggcacaccctggaggccctgctgtttcatagcttgattgtggaactggtgataccccaaggcgttctgctcgtattagcgagaaagtcaaggtatttgatagcccagagggcgagaagatcccgaagcgcagcaggaactccagtggtaggaagggtaagcaggggaagaaggaaacccctgagaccgaagaagccaaagatgctgaaactggcaaggaggcagaggaggccccaagcgaagatgccgcaaaggagactgatgtggagatgaagcctgctgaagaggtgaagggggcctctgctgaaacagaagatgctgacatggctgatgctcctgcaccagcaccaatggaagaagataagaaacaaactgaagaactggcagaagctattgcagctcctcctgtgccatcggaggagaagaaagatgtcaagccagctgagcctgaagctgcagcaagcaacccaactgaggattcggcccctgctcctgctgaacctgctgatgttgctgctccagctgctgagcccaaatcagacgccaaacctgctgctgttgctgctccagtgcctgagaccaaatcagacgccgagcctgctgctgttgctgctccagcgcctgagaccaaatcagacgctgagcctgctgctgttgctgctccagctcctgagaccaaatcagtagccgagcctgctgctgttgctgctccagcgcctgagaccaaatcagatgccgagcctgctgctgttgctgctccagtgcctgagaccaaatcagatgccgagcctgctgctgttgctgctccagtgcctgaaacgaaatcagatgctgagcctgctgctgatgctgctccagttcctgagatgaaatcagagtccgagcctgctgctgttgctgctccagcgtctgaaaccaaatcagacgccgagcctgctgccgttgctgctccagcgcctgagaccaaatcagatgccgagcctgctgctgctgctgctccagtgcctggaaccaactcagatgctgctgctactgatccagcacctggaaccaaggccactgccgccgatccagcacctggagctccagcagagaactccaccgacaaagacggaagccaggagagccagcccgtgaacaatggacagctgccgcactcgacggtgaagtgcacctgaagccgcaacgccggaaaaacctgaaccccttccggcgccgtgtatctcatttaggaacaaacattcgcattcgcattcacattgttatcagttaaaaagtctatggaacggtaagcatgttaattagtcagtctgacgctgctgggtgacaggttggtaattaggctctgcatttagctgttttgtatggctgctgtcgccgccatacatgtatcatcttcttgtggttgtatggtacctaaccgcgtaaacatgttaaccttaggccatgtattaattactccgctctaatgtttgtatgtgtattgtcaaacttgcagaaccagttgcatgcatgaaaaataataagtgtctgggtatctatgggtgcggggtacccatctccgcaccagcgcacccagccagaaacagcagtttgtttggatctaatcagaa

SEQ ID NO: 115007 - DNA, 783 bp, Zea Mays
cctctctctctctctcccggcgctctccttccccagccgtggagctcccacgcacgattctctactccatctcctaaccgagccccctccagccacctccctcggcttcttcctcccatccgaccgcccctgctcatcttcctacctcccgcagctcccagccgagcggttctctccccctgtgcgcccttcctgcttcccctgctcggatttctactttcctccatggccgaacgtcctcttcatctctggtcgacctcctctcgcgctcggctcttcaccggcgagctccctggtgccgcgcccggctccttgccccaggaccttgccgcgcgagcttgcctctgctcggccgcgctcacgccggctccctgttcggcgatggaagacgcgtcgcgcgcccaagttcctgcgcgtccctctgcccctacgtgtgctcctatgtccatgccgcgctcccagtgtcgagctccagccgcgtccctgtccctgtccatggccgccgagtctctctgcgcgcggctcgcgccctgcacggatcccctccctctgcccagatctcgactttcggcccagctcgctccagctttgttgtcgcgcaggtcaccggcctccgtttgccacgcgcagctggcgtttcttcttgacgcgcgctccgcctgccgtctccctgcgcgccgtggtatcccggcttttcctagctcggagcgcgttcagtccccagctcgccgtgcccggtcgagctctctgcgcacacgccgcgcgcagctatgtccctatgct

SEQ ID NO: 115008 - DNA, 489 bp, Zea Mays
atgggagaagctggagccggggcgagctcggacgcgcgtgggagctggagcaaggagccggtgcgcagaaagctggatgccaagcgccatggcgagcaggaagcagaggctggtgcgagctcgtgtgaaggaagacgagggagaaagatccgagttggagcttggagctcggcagcgtacggccatggcaagggagatccaagcgagcaagcgcaggggcgccgagcagacaagaagcaggcgtccaggggtgtggcgagcttgcgatggccggaaccagagtacggcgagctatttgaagaatcccagaggcggcagataagaacggccagggatgaggccgacggtcaacacagtgaaagaaaatccgagaacaacccagaatttctagcgatagcaaaagagtcgacggtaattgtgacagttgattcgattcaaaaatctgataaatttaactgcggtctgaacatctggttccacagcaagtga

SEQ ID NO: 115009 - DNA, 3211 bp, Zea Mays
atgggtgatagacgtgattggatgtatgaaggtttcaagaagggtgggtgtcacacaagtgaatggtttgccaagactcagatatttctggaccatgcagctgctttgtcacaaatagataatattaggtgtccatgcaataaatgtagaaatatgacgagccacaccaagaggatggaccatatgcttgaggatctgcagcctgaattggccccagataatcatgattcaccaacaccggaagaccgttttggggaggaaatgaatttgaatgatgacttacgtcagttatctgttggaagtgtaactgccaaaagctatggacgttacgacgtcattggatatcactttcgtttaagcatttttgaatctagtcatcttatggccgccactcaaaatagtggagtcgttactagggcaaccgacatggagggacacgaagcctgctattacgagaaaatcaaaaatataatcgagattacatttgctggaaataagcctttagcgctaattttctttgagtgtaaatggataccgctaaagtcaaagaagttagtgaaggggctgttcaagggcatgggcctatttcaggacagttcttcgagcagcagcagacgtcgagagttgttgagcgctgtacatggagatgaggatgagcagcacactgaggagcagcacaatgaggatgagcagcataatgaagaggtgcaacacaatgaggaggtgtcagacggagatagcgtcgctgaggtgctcgtcagtacctgggacgagtacaagttaaaaaaggaacgaaaccacaccgacagacagggacttgtgcgtcatgacttttggcttcgatatcagttgcctgatagagaggattacatggggcacgctgaacgtgtgttccaaaacaatgcaaagaagctagtgaagaatgccatatactatgcgagaattcaggctacaaacctgtattttcaaaattcattggaagaagcaggccccttgaataaaaaggaagggtcctcaaagatatatttgactgaggatcaatatcgtgaggtgatggttccatggatggcgcccgtgcctgatgcgtactatgcttggtgtcgatattgggcttccgaagacttcaagaaagcgaagctacgcgtggccaaaagcctagtgacattgaggtctactaggagggccataaaggaccagaccctaccaaccctgaccagttctgcagccagacagccacggatcggctggtgggttttggcccaaaaatacacactcttcgacggattcattgactcatcgtcggtgagatctcagaggacaggttcgtcttcccatagctcgtgctctcgtcgaccaaacaagcaggagttggacattgtgaggatgtgtgaggagatgagacaacaacgagaatttatggaggcttgtaatgcacataaccaagcgatgtatcaattaatgcagcaacagggcatgacaccaaatattccaccgccaccacattggagccagtttgcatccacaccagctccgcgattggggactcaacatttcaacacccctccgacacatatacctgcacctgaagatagggttacgcccgaagcgggtggtagtgagtctgatcccacagcagggactggatttgttgactccctcttcacgttccctcctggtggcggcagcggtcaaagctctaaccacccaagtggtggttatctctaaatatggtgttatgttgtatttgttacttaactcatgcatactatgtttttcgtgaactaaacactttaacttatctcattgttcctatttgaaatgtttatgtaaactatgttggtgatgttaagtttgtgatgtgtgaattgattatcaatgtatgtgtttgtaatgtgtctgttctatgtgatgatatatatgttatgtgtgcaattgtggagaaataatgacctaatttggtgctggttttgtagcaacataggttaatccccatcggctatggtcaaaccgacggggattaacaattaatgcccatcgaaccagtaactgtcgtcggcccgcggtggccaatgggaattaattgttaatccacgtcggctcgccatggccgacaggagttactgggccgacgagcaatatttgttaattctcgttggtccgccatggctgacaggaattagggttaattcccgtcgacttgtaagtggccgacggggattacttattcccgtcagcgcccgacgggaataagcttatccccgacatctgatgcttgtcggcttagggccgacgggaattatccatataccgatgggaattactaattcccgtcggtttggagcttattcctgtcggttcttagtcgacgggaattaagtggattcctatagtgcacgccaatcccgacaccatcacttgggaggaattcagagataatttctgtcagtactatgttccagcaggtctgatgacagtgaagaaagaggaatttctggcgctcaagcaagggcccatgtttgtcagtgagtaccgagacaggtttctgcagctgtctcgctatgctccagaagatgtcagcacagatgccaagaggcagtatcgtttcttgatagccttagtagatcccctgcactatcagatgatgaaccataccttccccacatttcagcacctgatcgatagagcgatcatgatagagaagaagcgcaaggaaatggaggatcgcaagcacaagattggtgggcctcagcctcgaagcagcaatcaccctcgtttctcaggcaacccacctcagcagttcaagcagaatcagcgcccgccttagcagcagtttcagaggcagtacccctagcaccagcagcagaatcgctagaatagtcagacaggaggaagtcagttccagaggcagaatcagcaggcacctccctccccaccccagaaaccaaccagagcagtcaagcagccccagtgcaaggtggaggcagagcatgtttccattgtggagagcaaggccatgggtgatgcattatccaaagaaggcagcccaacagcagtcaggccctagtgccctagcgaagcagaatgtgtctcagccaggagcaggcaaccgcgtccagacacgctacatccatgggagactgaaccatttggaggcggaagcagttcaggaaacacctggcatgatagtaggtatgtttccagtcgattccca

SEQ ID NO: 115010 - DNA, 2689 bp, Zea Mays
gatggtggcgcggatgatgcggtggcctcggccgccgccggcgcggaatatccgcgtccgcctggtggtgcggcgggcggagggcctgcccccgcctcctgcgcccctctcgcctgacgggtcccccggccccgaggccgaggcgaaggcgtttgtggaggtgagctggaagggcccgaagatgtcgccgctctcctcgctgcggcgcgcgcagcggcctcccaggaaccagacgcggaaggaggcgctgccggccgtcgccgcggccgctctcgaggatggcgccgccgccgcccctgctctagcggtgtcggcggtggcctgggacgaggagttcgagagggatgcggcgctcacggcgacgtcgcaccgtgagcccgctgcgttccacccctgggacgtcaccttctccgttgtcagcgaatcaaataaaatatcaaagagcaaacttgttttggggaccgcttcactgaacctagcagattatgcatctgctgctgaagaggaaatcgagataatcctaccattgtctgtgcctagtagtgcaacagacctggtcccatcactccatcttactttaagcctggcggaagtaagaacatctcaacaatcacctggcgcttcacaacgttctgttattgccccattgtcaccttcctctggtgactctcttgcttctggaaaagatgaggtttctgtcattaaggtgggtctgagaaatctgaaaatgctaagagatctagtgtctacacggaggttcaaaaagactaaccaagactttgacggcagtgagaagtattatgtccacagcgatggtgcagaattttcttgtgatactgactctcttgacgatgatctggatgatagagagcatgacgatgagtttgggggttcagccgttaggaagtccttcagctacggctcactgcagactatgaatgttggtgccctactttatgcgcctaggattgatggagacgatgagggttgggtacattacagtcaccgcaactctgatgttggttatcatgttgagcaagtgccaccccccacagctgaggagcatgcttccatccctttgcggcggaagaggagcatacttccagctcggtggagaaaggtaaaattaccaaaggctaaaggggagcctctgttgaagccgtatggagaggagggtggtgatgatattgactacgatcggcggctgttgaccccttctgatggatctgtttcagaggtacatattttattgacatctcaaggatcaaatggttctaacagtatggtgtcggtatttggtgatgacgattttgttgtggggaactgggagtcgaaggaagtatttagccgagatggccacttgaagctttctacacaggtgttctttgcatcgatagaccagagaagcgaacgggctgcaggggagagtgcatgcacagcacttgtggctgttgttgcagactggttccaaacaaaccaggacctgatgccaatcaggtcacagtttgacaacctgatccgagaaggatctctggaatggaggagactctgtgagaacgagacctacagagagcgctttcctgataagcactttgatcttgaaactgtccttcatgcaaagatccgtccactcacagttgctcacagtaagtcattcattgggtttttccatcctcaaggcactgaggatgtaactggattcgacttcctcgacggtgcaatgtcattcgataacatctgggacgagataagccgagcagcggagtgctcctccggaaagcctgccctctacattgtcagttggaacgaccacttctttgtcctcaaggttgacgccaatgctatttacatcattgacacgctcggtgagaggctgtctgaaggctgcaaccaggcatacatcttgaagtttgatgacaccaccaccatccacaaaacacctgctgaaaagaaggaaccaagtcctgatcaccgtggacgccgcaaggattcctcagagacctgctcaaccgagcagggcagcggatcggacactgaagagtgcgagcctgtgttgaagggcaaggatgcatgcaaggagtacatcaagagcttcttggccgccatcccgatccgggagctgcaggctgacatcaagaaaggtctcatggcatcaacgcccctgcaccaccgcctccagatcgagttccactacacggaaccccgccccgccgagatcgcggcgccttctccactgcccccattcgaagcccccttcgagttctgctggcccgagccaccgtcaccgccagctgccactgaatccaccgtgacccatccacctgccatggaggccggcataacccaggctgtcgccgttgtatagccggtcctggctgctgctgcggcctagcctagggcaacggttgcttagtttaacatatagagggcggcgcttcttttagcgagcgaattgtgaggtcgagaccagatcgaagatttggctggcttcggccctggtctgctccttttgctgtctaattaagatgaactgactagtatagcttgactgtcttttggtctcagctttcatcatcttgtaaagaaagaaaggatgattgctcctgcacatctttacctgtgaagcgagttcgctggaattgtaatcctttgctacattatctttatgtgaatcatgacctcgtctttt

SEQ ID NO: 115011 - DNA, 272 bp, Zea Mays
ttaatatgttgcctcaattcgatgtattgcgagaacttaaccactcttcatttactcaggtatgaagctgagcttgctgcagcagctgcacaacctcttcctgatgacgatgatgacctggttgagtagaaagggtcatgagtccacgacttgggagttctgccttgtgttttaagttgttctagggtgaactctatcttgaggtctcattgcctggatcatctttctctccttggttgtgttgcaacttttaagtgtggaaatagctagat

SEQ ID NO: 115012 - DNA, 330 bp, Zea Mays
atgccttttgcaagccaagaagcagcaaatgctcctctttccgacagacctatttggtcaactcggcacggtggagccagccgctcggcgccgatgtctgtcgggacgtggcgccagggaggagctcggcggtgctcgttggcggcgcgggagcggaacaggcggagcgctcggcatcaacattcttggcggggtaggatggagttgaacatcctgaggaggtgttcttcggcgtctcctctggcttctccagtggccggacctcgtccaccagagtggtcagcatatgctgagctctcagcatctcctctggcttatccggcgccgtga

SEQ ID NO: 115013 - DNA, 928 bp, Zea Mays
aagaacaacagttagaaggatatgtagtgcttgcctgttcctcctcctgagctttgttgtttactgcaagttaatttgcctgcctggaaaaaaaaattgttgggcctcccctcccggttacaatcgatgttttcaacgcctcaaaagtactagtagatgactagtgaattagatcattgttgtgtgaagccggccgctttgttacttccattcgcacgcgacgtccagtttccttccgtttaaaaagctgacgaatagcactactgggcctttctctctctcttctccgatcccttgcaggttaccaagaacctgatgatcatgtacacacgctgtctgcggcaggactattcgtacacggataagctaaggaagacggggcttgcaggcagcgccattacccagagcaaacaggtattgcgaggctatggcagtagctgctacgattatgataatgatgatgatgacgacgacgacgacgataacgatgatggagcaggtctaatggagattgaggcgctgcacaacccgtaacccgcaagcccgtccctggtgcgggtggatgcaccacaacaatagtgaatcgaagaagaaaataaggcacatgtggaaggttttcgatctctccatgcaaatgcgtagcaaactaataatgcatggcaaataatgttcagttgcatggcgcattttgatttgtggatgagatggagtcgtcgctatagcatcgtctagcaatgtaaatacttaatataattactcaaaagtaaaatttcaaagcaaagtaaggattataaatgtcttgatattttttccgagtatactctctgctatttttttggctcttggcatctaggcaaggccaacaagctgctactgcgcttaccatgaatcatcctccttagatccttagatgttttttatttatttt

SEQ ID NO: 115014 - DNA, 1233 bp, Zea Mays
atggcctcgtcctcccgcacggccgacgtcgccgccagcagggtgctgtccgagaagggggcggccgcaatggcggagtgcgtcggcctgcttttcgggaagtggacggcgctgcagctggcggtgcagaaccagtggggcggccacgactcgcaggctaaggccgaccggctcgcctcctccgtcctctcctggttcacccgcgccgccgccgccagagaaaccgcggaggctgcaccgcgaacgccgcgaaccgcccccgcaaacctcctcgagcaaccctccgcgctcgcacaatccccgtgtttgtttaatctgtacatggatgacgacgacgtgtctcccgacacccgcgacgtctacgtcgccaacgccaccgtatcctcctacttcgccgcctccgatgtcgcctccgtcgaccgtctcttcgcggaggtctccaccgacgtcgtcgcctggaccaccatggtcgccggccacgccagttccggcggcctaggccgggcaaggcacttcttcgacgccatgcccgagaggaacatcgtatcctggaacgcgatgctgcgcgcgtatgcccgcgccgggatgctcaccgaggcgcgggacctgttcgacgcaatgcctaccaggaacgccgccacctggagctgcatgatcagtggcctcgtgctgtcgggacgctgctgggaggcgctgcgtgatcaggggctcttcggtgacatggtccgcagcagcggcatcgtgccgaatgagcccgcgctggtgagcgtggtctcggcgtgcgcccagctgcggtcactggaacacggcgcgtgggtgcacgcgtacgacgaacaggagctgcagggggcgatgagtgttgtcctcgcctccgctatcgtcgacatgtacatgaaatgtggggggccctgtcgctctggtcgtgtcatggaggccttgtatttcgtcaagagcatgcccgtggagccacaccctggcttatggggcgcactagctagcgcctgcaagatgcatggcaaggttgagcttggtgaggaggttgccaagaagctcattgaactggagcctcgctatggcagccgatacatcctgctgtcaaacttgtatggctctgtgaatagatgggatgacatggcctctgtgcgtaagatcctcaaaaggagcaaggtgcccaaaggcactggcaatgcagtggttgggatgacatcgacatcctgtatgtcgaatggttga

SEQ ID NO: 115015 - DNA, 161 bp, Zea Mays
tttcttatttcaaatccaattcaaaccatgtttaatttctaaatttcaaatttatgcacaagaaaaactccacatgatgcacaatttctacataatatttatttattcagttactttatttatttatttatttattttatttaggctaggttttcaacatg

SEQ ID NO: 115016 - DNA, 1241 bp, Zea Mays
cgcgctcccaatttcaatcgtcttcttctctgcacctggccgccgctcactgccggtggagatatttgtttccggccgccgtcgtcatccaaacgccgctcaagccgccgctgttcctcgccgttatccgctcagccggccggatacaaatccagtagcgcccagccccagccgttcttcctcctctgccgcgccctctggttcggattccgatggccagcagttgaggctcccaagccgcgtccctggcgtcttcctccctggctcctactcttccaagcgtggagccctctgctcgccacggtccttccgtagctcccaaccgatttccctgcgtgctcctcccgtgcagctcgccgtgctccagctcggattccccctccatggcgcgcccgagcactccggctccctgctcgagctcgcccagctccctgctgcggtgactagcgctcagcgtccggctccctggatgcttgccctgctcgccgccatcctgctggatcccctccacggcgcccgttcttcccgggtgtcttcctccaccgcgctctcctctgcaagcaactgggttctgctctgccctgggcgtcgttctcagtcactggtggaccgcgcgctcctttgtttgctggtcgtggctccctcatgctcgccgtcgattcgatatgccgccacgtcctcgcctcgtctcggtagcgcgcctgccagtgtcgttcctcgctatgtcgagctccctccccgtcctgtccagttcgccgtgtgggtggaacctacgtgcacgctgtcatcgacaccatggtcgtctccctgtgcgttgcgtccctcatctccagccgacgcactaaggaatgggtgtggagtatagaagaaagtgaagcccgaaatggtgctcgccgggcgctcaacaaaatgcctgaaccaaagttcgtcgtcatcgttctcgctgatatctagacgaattgtgatgtggtacgttaattagtcgcccgatgcggaagatgacccaagtcgaccccaagcgcaagctaatctgcaagctgaagctgatgaatcaaactgaagatggttaaatcaagcaagtgctcggtcgaagaatactcgtcaagcggacgtcaactaacaacactaacctagtgttactcaggcaagccccggtgcatttgccaccttccttgaggtttttatgtaacaccctaaaaaaataaaccatttttataatccaaatatggtatgtcctatgg

SEQ ID NO: 115017 - DNA, 1069 bp, Zea Mays
cgcgctcccaatttcaatcgtcttcttctctgcacctggccgccgctcactgccggtggagatatttgtttccggccgccgtcgtcatccaaacgccgctcaagccgccgctgttcctcgccgttatccgctcagccggccggatacaaatccagtagcgcccagccccagccgttcttcctcctctgccgcgccctctggttcggattccgatggccagcagttgaggctcccaagccgcgtccctggcgtcttcctccctggctcctactcttccaagcgtggagccctctgctcgccacggtccttccgtagctcccaaccgatttccctgcgtgctcctcccgtgcagctcgccgtgctccagctcggattccccctccatggcgcgcccgagcactccggctccctgctcgagctcgcccagctccctgctgcggtgactagcgctcagcgtccggctccctggatgcttgccctgctcgccgccatcctgctggatcccctccacggcgcccgttcttcccgggtgtcttcctccaccgcgctctcctctgcaagcaactgggttctgctctgccctgggcgtcgttctcagtcactggtggaccgcgcgctcctttgtttgctggtcgtggctccctcatgctcgccgtcgattcgatatgccgccacgtcctcgcctcgtctcggtagcgcgcctgccagtgtcgttcctcgctatgtcgagctccctccccgtcctgtccagttcgccgtgtgggtggaacctacgtgcacgctgtcatcgacaccatggtcgtctccctgtgcgttgcgtccctcatctccagccgacgcactaaggaatgggtgtggagtatagaagaaagtgaagcccgaaatggtgctcgccgggcgctcaacaaaatgcctgaaccaaagttcgtcgtcatcgttctcgctgatatctagacgaattgtgatgtggtaagctgattcgttacttccgctattggtcggatggatttggttagacacgttagttacgtcgtttctcttgtcgatagcactggcgcattgtggtagt

SEQ ID NO: 115018 - DNA, 914 bp, Zea Mays
actgtacagcagcacattgctttatatgttatttcttattattccagcagaagggaggctcatgctgagcgttcgacttctgctacaaataatgacttcatggctacggctgttgatgctgaggcatactaactacactggtggtaagtggtaacagctaaatctgtaggtatcactacccttggatatctcaacctcatgaatctataattcgtctatgatcatttttttaatcggataattgcatgccagtccatctgagacaatgtaccatttttacggtggctgcaggtacaaagctggaatagtttgtttgctacaaatgaataatcaagcttccagggtttgtacagcctaaggggaagcaagaagcagcttttgttttttgccctggtatctagtagcctccatgagcaattcttttgccccgtggctgcttgtacaaatggtaggtttcagactggtgtgtcgaaacagtcagtccagtactttctagtttcagagagtagcttagcttaacacggtgcaaaacttaaacgtccttttgtgcgactgacttttggtttttggaagagcatctgatctctgtctgggatattctgaccatgaactattgcaatggctttcatatattttttctttcagtatttctgataatgtggcctgatggaagtggattgggtatttatttcatactcttattactccaatccatatcctcacggccgctgctcccctcctacgttcttcctctctaacagcaatttcaaaagaaccccaaaactaacatgaaaattaatacattgacttttttttaaaactttgaccactcgatttatttaatatttatccaaacatgtaaaattttaagttaaggacaaactatgttaactaataaaataaatcataaaaaa

SEQ ID NO: 115019 - DNA, 1981 bp, Zea Mays
ttctccgaccaaatcccctctcctactactacccacttccaactccttcagagaccctaattaccagctacagccagcatccgatccagcgcccgcctctgctccccatggactccgaccaggagtccgtcgacgactgggtcgtcctcgcctcgtcctccgacgacgatgagcgagtcatcgcgctctcgtccggctcctgctccgactccgagcccgatcacgccgccggatcccccaacctcctccccgcctccattgaccccgacgacgccgagggcttgtatgcgctgtcggacgccgaggacaccgacgcgtccctgcagccttccccgctgctgcccaacccgctctcgggactcttgcaccacacgctggccggggacgtcgcctactccgccttcgacccggtgcctcccgccgccaagcagctggtcccggacaccaccttcgccgccttctttcccgagcccgtcgccgcgctcgcctccacccgcggcctcgtctgcctccgcggcgcctgctccgccgcctactacgtcgccaacccggccaccttcgccagcgagcgcctcccggcccccgcccgcgaccaccgcgcccacggcgaccccgccgtcgtcatcgccttcgacctcgacctcgaccccgacccctgcgacgccgaccccgagcgcgccgagtctgagggcgaggggttctaccgccactaccacgtcgtcgtcgcgttccccgtcggggaaggcatctacgctttcgagtccttctcgtccagggcctgggcgtgggcaaccggaagcggggtcgccgacgctgaggccgtcctgccaggctccggggtcggcgcgctcggctgcgcgttctggcgcaccaccatgggcctgttcctctgctacgaccccgtctcgcgccgcgcggacctcgtccccgcgcccgccgaggtcatgcagtggccctactgggagcttggcgagatggacggcacgctctgcgtcacttgcatgggcgcccgcgtcgacgccgtcgtcgtcatccgcctcgacatcgtgagcggcgccatcaactggactctggcggggtatttcgagggcggctgcctcaggggacgcaaggacgtcacgctgctccgctcgcagggtaaggcggaggtcgtcatgtgggaccccagctccgagacggtggtggccatggacatcgagggccgcactacacgcgtcatcaggttcatccctggcagcggctactatgccgatttcatcccctacgtcagctcgttggccgccgtctctcgctccggcagaagggaggctcatgctgagcgttcgacttctgctacaaataatgacttcatggctacggctgttgatgctgaggcatactaactacactggtggtacaaagctggaatagtttgtttgctacaaatgaataatcaagcttccagggtttgtacagcctaaggggaagcaagaagcagcttttgttttttgccctggtatctagtagcctccatgagcaattcttttgccccgtggctgcttgtacaaatggtaggtttcagactggtgtgtcgaaacagtcagtccagtactttctagtttcagagagtagcttagcttaacacggtgcaaaacttaaacgtccttttgtgcgactgacttttggtttttggaagagcatctgatctctgtctgggatattctgaccatgaactattgcaatggctttcatatattttttctttcagtatttctgataatgtggcctgatggaagtggattgggtatttatttcatactcttattactccaatccatatcctcacggccgctgctcccctcctacgttcttcctctctaacagcaatttcaaaagaaccccaaaactaacatgaaaattaatacattgacttttttttaaaactttgaccactcgatttatttaatatttatccaaacatgtaaaattttaagttaaggac

SEQ ID NO: 115020 - DNA, 2020 bp, Zea Mays
cggatcctccgccgccttcgcccccacgttacaaacaacaaattctccgaccaaatcccctctcctactactacccacttccaactccttcagagaccctaattaccagctacagccagcatccgatccagcgcccgcctctgctccccatggactccgaccaggagtccgtcgacgactgggtcgtcctcgcctcgtcctccgacgacgatgagcgagtcatcgcgctctcgtccggctcctgctccgactccgagcccgatcacgccgccggatcccccaacctcctccccgcctccattgaccccgacgacgccgagggcttgtatgcgctgtcggacgccgaggacaccgacgcgtccctgcagccttccccgctgctgcccaacccgctctcgggactcttgcaccacacgctggccggggacgtcgcctactccgccttcgacccggtgcctcccgccgccaagcagctggtcccggacaccaccttcgccgccttctttcccgagcccgtcgccgcgctcgcctccacccgcggcctcgtctgcctccgcggcgcctgctccgccgcctactacgtcgccaacccggccaccttcgccagcgagcgcctcccggcccccgcccgcgaccaccgcgcccacggcgaccccgccgtcgtcatcgccttcgacctcgacctcgaccccgacccctgcgacgccgaccccgagcgcgccgagtctgagggcgaggggttctaccgccactaccacgtcgtcgtcgcgttccccgtcggggaaggcatctacgctttcgagtccttctcgtccagggcctgggcgtgggcaaccggaagcggggtcgccgacgctgaggccgtcctgccaggctccggggtcggcgcgctcggctgcgcgttctggcgcaccaccatgggcctgttcctctgctacgaccccgtctcgcgccgcgcggacctcgtccccgcgcccgccgaggtcatgcagtggccctactgggagcttggcgagatggacggcacgctctgcgtcacttgcatgggcgcccgcgtcgacgccgtcgtcgtcatccgcctcgacatcgtgagcggcgccatcaactggactctggcggggtatttcgagggcggctgcctcaggggacgcaaggacgtcacgctgctccgctcgcagggtaaggcggaggtcgtcatgtgggaccccagctccgagacggtggtggccatggacatcgagggccgcactacacgcgtcatcaggttcatccctggcagcggctactatgccgatttcatcccctacgtcagctcgttggccgccgtctctcgctccggaagggaggctcatgctgagcgttcgacttctgctacaaataatgacttcatggctacggctgttgatgctgaggcatactaactacactggtggtacaaagctggaatagtttgtttgctacaaatgaataatcaagcttccagggtttgtacagcctaaggggaagcaagaagcagcttttgttttttgccctggtatctagtagcctccatgagcaattcttttgccccgtggctgcttgtacaaatggtaggtttcagactggtgtgtcgaaacagtcagtccagtactttctagtttcagagagtagcttagcttaacacggtgcaaaacttaaacgtccttttgtgcgactgacttttggtttttggaagagcatctgatctctgtctgggatattctgaccatgaactattgcaatggctttcatatattttttctttcagtatttctgataatgtggcctgatggaagtggattgggtatttatttcatactcttattactccaatccatatcctcacggccgctgctcccctcctacgttcttcctctctaacagcaatttcaaaagaaccccaaaactaacatgaaaattaatacattgacttttttttaaaactttgaccactcgatttatttaatatttatccaaacatgtaaaattttaagttaaggac

SEQ ID NO: 115021 - DNA, 223 bp, Zea Mays
ttgatcaactaatttaatgttatcaattgattatgaataggaaaggcccttataaattctcaaaggtttcaaaaaatcttgaaacactgtcctatatatatatttctttattttaatatttcatgatatattatttttttctaccaaattttggggtttacactcccatatgtctcatgacaaccattattctccaattctttcgtgcttgctatagccaacc

SEQ ID NO: 115022 - DNA, 1876 bp, Zea Mays
gctcaagagaagaaaacaacaaacatggttgttagcgagaccgcagaaggaacatcggggtatggtaatcttttacctattgttttttcagtatgtcagtcccctgagtggtgggctgacactggtgctaacattcatgtgtgtgctgatatttctttgttttcttcttatcagtgcaaaagggctggagccttgctgacggggaattgatcacatgcgcgtgttcttggtgtgggtacaatcattctgaagtttacttcgggaaagacggtgctattgaagatcgtgcaacatctcccctccatcaaaaagaatcttgttagtggctcgttgctatgtcgagatagctataaacttgtatttgagttcaataaatgtatacggtcaaagtatgagacatttgttggaaaaggctatgacagtggaggcttgttccacttatctttgcattatgtgtgtaatgagtctgtgaacaatgtaatttcgaaggagtcgtatatttggcattcacgactttgtcacatcaattttggttgtgtcgcggttaacaaatttaaaattaatcccgaaatttgatttagtcaaaggttttaagtgtcaggtgtgcgtgcaatctaatcaacctcgcaagcctcataaggctgccaaggcgaggaacttggcaccactagacttaatacattccgatttatgtcagatgaacagaatattgactaaaggaggtaaacaatattttattacttttatcgatgattctactagattttgttatgtgtttctcttaaattcaaaagacgaagctttgcattattttaagacctacaaagctaaagtggaaaatcaactcgagaggaaaattaaacggttaaggtgtgatcgtggtggagaatatttttcaggtgatttttctgatttttgtgtggaacatggtattattcatgagaggacaccgccatgctcaccataatccaatggggttgctgagagaaagaaccaaactctaactgatttggttaacgccatgttagaaactacaggactatctaaggaatggtggggtgaggcgatcttgacagcgtgtcatgtcctgaataaagttcccacaaaggacaaagaaatcacaccattcgaggaatgggaaaagaggaaactaaatatctcctattgcgcacctggggttgtttggctaaagtgaatgtgccaattaacaagaagcaccaattagggaccgaaaactgttgattatgttttccttgggtatgcttttcacaacattggatataggttcttaattataaactctagagtaccgaacattttggtaggtactattatggagtccagagatgctacgttctttgaggacgaatttcccatgaaagctacacataatacgtctagtgatgaaccaacgataccccatgagcattttattctggtagaacacaatgaggaatctcatatacataatcctatggaagatgatgatgtatcaactcgaaagagtaagagactaaggattgcaaagtcctttggtgatgattacattgtatatcttgtggatgacaccccaagtaccattgaagaggcatattcctctcctaatgctgacttttggaaggaagcactaaggaatgagatgaattctattatgtctaatgcaactttggaggtcgttgagtgtccttatggttgtaagcccattgggagtaaatgggttgtcaagaaaaaacttaggcctgatggtactattgaaaggtacaaggcgaggcttgtaattaaaggctatacacaaaaagaaggtgaggatttctttgatacttattcacctgtggctcgattgaccacaattcgtgtgctactttcattggctgcc

SEQ ID NO: 115023 - DNA, 393 bp, Zea Mays
agcgtcccgcaaccctccgggcccggcgacacaaggcaaggaaaaaaaaggatggctctccggcgcaacgccggatccctcgcgctccgcgccgccgcctacctccgccgccaccgtccccatcctcctcccccactggccctcgccgcccccgctcccactcccatacgctccccgctggccccgcctttccggcacttcgctgctccgcctggtactcagaccaataggaagcgaggcaaggaggaggacgatgccagcgcgggcccgcgcatgaacaacgccatcgccgctcccttcgtcaggctcgtcatggatgaaggccacaacattctcccccggcatgaagccttgcagcttgcgatcaggatggacatggacttggttgaggta

SEQ ID NO: 115024 - DNA, 507 bp, Zea Mays
atggatgcatgtatctctgatgacaatgagacaccaatggaagttgttgcacctgatgatgatgagaggctttatcctgatttattagttgactggtgggatcaattggagtttgaagggtatgatcctttgcctacacaatttgagtagactgatgaagaagagaataaggagaatattgaaaatggtgtggtggatctagaccaagaagaggatgaggatagatctcgaattgagtacgacagagacaatccctcgctaaaagaaggtagcacatttccatcaatgactgattgttgcaatgtacttactacttgctgcatcaagggtgagtatgattttgtgatggataagagtgagcaagaaagattgactgtgcactgttctttctcgaggtgtaaagggaggatgcatgcttccactatgcagaatagcacaattattcaggtgaaagtgaatccatttccacacacttgtccaagtaccgaaagaaaaaaagactcaaaa

SEQ ID NO: 115025 - DNA, 297 bp, Zea Mays
atggctaatagaggagctaggggcgcggagcatgaagaagcgccagggagcagcgtgagcctgggcgaaatccgagtagagagcttcgcgctttgggaagagagagagagggcgatgcgagtccgagcagaggccaaggacgcgtggagggagatggatgagcggctgccttcggacatgggggcgagcagggcgcggcagaaagctccaaaccggtgcggccatggtagagctgcgcgcgtgtaccagaaagggcgcgcgaccaccagggcttcagccgcggtagggaggagctag

SEQ ID NO: 115026 - DNA, 995 bp, Zea Mays
gatcttgtaataattcctgctggtgtccctcggaaacctgggatgacaagggatgatttgttcaacataaatgctggaatagtccgtaccctgtgtgaaggaattgcaaaatgctgccctaatgcaattgtgaatgtgatcagtaatcctgtcaactctaccgtcccaattgctgctgaagttttcaagaaagctggaacttatgaccctaagcggcttttaggtgtgaccacacttgacgtagtgagagcaaatacgtttgtgggagaggttcttggacttgaccccagagaggtaaatgttccagtcattggtgggcatgcaggaattacgatactaccactcctttcacaggtgaatccttcctgctcattcacctcggaagaggttaaatacctcacttctcgcatacagaatggtgggacagaagtagtcgaggctaaagctggagcaggatcagcaactctttcaatggcctatgcagctgccaaatttgcagatgcttgcctgagaggattgcgtggtgatgctgggataatagagtgctcttatgtggcttctcaggtcacagagttgcctttctttgcatccaaagtgcggctagggcgatgtggcattgaggagatcctaccacttggaccattaaatgagttcgagagatctggtctggagaaggcaaagaaagagctggcggagagtatccagaagggcgtctctttcatcaagtgaggccggcgacggccagcccaacatagaaatagatgtggcgtgtttctgcttcttgagaactcatcttgttatctctctgtaagactgagtgcatgacacgaataatccacgtacacggctgtactaaaaagatgatgaatctgtggtggctaaaaaaagggaaatagaaaagtctggtaataaaagttgtttctgaacaaatgggtttctgaagtcatatactggtatgcaacaactgaagaacacgatataatacggttgcatgc

SEQ ID NO: 115027 - DNA, 334 bp, Zea Mays
gatcttgtaataattcctgctggtgtccctcggaaacctgggatgacaagggatgatttgttcaacataaatgctggaatagtccgtaccctgtgtgaaggaattgcaaaatgctgccctaatgcaattgtgaatgtgatcagtaatcctgtcaactctaccgtcccaattgctgctgaagttttcaagaaagctggaacttatgaccctaagcggcttttaggtgtgaccacacttgacgtagtgagagcaaatacgtttgtggtatgtatatcaatagggttttgacatgatatgctatgcaacattgtattccttcatgggctcaaaattc

SEQ ID NO: 115028 - DNA, 482 bp, Zea Mays
gtgggtggttattgttacctgcttctgaaacaagcaacccattgcagtgagcaaagaaagaaagaaaggtgtggtgtgtgcccgttttcaggtcggtcgtgactttggttatccactgaaaagatacgcttggtgggtgctttcttgtgctgaagaaaaagtatcccacagaaccacaaccgtttgtattatctggtgatttcctgcattattagctggcctaactaaaccatgcgctcagaccctaaaccagctgtaagtctgtaactgaaaagcacagtgtactagcagaatggtaatggtcaagatgagccagatgttgaccatcctagctacgtatccagtcaaggacaaccaaaacaatcatggctcctcttggtgtctgcaacctgcagtgtggggctccattatcctgctgctctggccattctttttctctagccctctttaggctgagcatcgttgctgcatcgcaggcagct

SEQ ID NO: 115029 - DNA, 117 bp, Zea Mays
tcttttttgttatttatttgtttatatatatagttttgttttattcatttttgataacatgcaatatttacccatatatatgctggtaaaattatgctaaatattttttatatttgc

SEQ ID NO: 115030 - DNA, 87 bp, Zea Mays
attttactattgtttactgcttatgtaagtagtgatacacatatgcacatacatgtcgtcacatacatcaatgtgattttctggatt

SEQ ID NO: 115031 - DNA, 551 bp, Zea Mays
tagactttatatgatcgaatcactcgtgtaaatcatcggcacatcaattagtatatctatactactataaatatattttataatcggttgcttagagcggctcatgtatgcatgttggtttgcctcgacagttggacgacctcttcctatacttaataactcggcgacttgcattgcatgggcatggcacgctgttgcttgaataattcagttcaattctaaggcggcggcggcggcggagaagcatgatgatgatctgctacgagtactttgggctcgccggagctgtcgtcctttgtcgtccggccggcgggtggcccggcctcggcgagcatctgcacgacatcggccatggtggggcggagtcccggcatgctgcaggtgcagcgcacggcgacgcgcagcgcctgcaccatctcctccttgtatggactccacgcgaggcgcttgtccagcgcgtccgcctcggctccggcgccggcggccaccttgccggagacccagtgcacgatgtccctcgtgtccccgaactccggctcgatgggcttcct

SEQ ID NO: 115032 - DNA, 901 bp, Zea Mays
gcatgatgcgtcgccgagccatgacgatgacaatagccgccgtgctctgcctgctcctcttctctggccgtctcgccgcggcggagaagactttccgcggaggcggaggcggaggctacggcgggttggaggccggtggcggaggcggcggcggcggctactccaccccgagcgaggcagcgccatccacgcctgccgctggggagacgacgaccccttcgtcaggcggcggttactccacccctagcgaggcagcgccatccacgcctgccgctgaggagacgacgacgactccttcgtcaggcggcgggggttacggcggtgcaaccggcaaggcttcctcaggcggcggcgggctggaccccgacggcgacccagaggttgggctgaacgggaaggcgatcgaggagatcgtgaacgagcacaacgtgttccgcgccaaggagcacgtgcctccgctggtgtggaacgcgacgctggccaggttctcgcagcagtacgcggagacgctcaagggcaactgccagcagatccactcgtcgtcgccgtacggggagaacctgatggagggcaccccggggctgacctggaagatcaccgtggacggctggagcgaggagaagaagaactaccactacaactcagacacctgcgaccccggcaagatgtgcggccactacaaggccgtcgtctggaagaccaccaccagcgtcggctgcggacgcatcaagtgcaacagcggcgacaccatcatcatgtgcagctactggccgccggggaactacgacggcgttaagccatactaaaatatatatcgacccattgcatatatatgttgcagagctttttattttggcaacatatctagtgcacatgatctgctggtacacatcatacacat

SEQ ID NO: 115033 - DNA, 2977 bp, Zea Mays
ttcctgttctgttcgcaccgcctccgcctccctccctccctctccccttccggactctctgctctcctctgctgctagtccatccattaatctcctctcctcgccatcgccgcactcacgctacgcttccctcctcaagcccgagggcttctccgggaaggaatcgccgcgccgggttcctgcaacgccccgccctttgcgcacccggagcaactgagtcgtggctatcgaggatgatgccgcgtttcagataacagagactgtgagagtgcacgacacacttgacatgcagagatgaagatcagtgcgcttctcacctccgcgggcatcaacattggcctctgtgttctcttcctgtcactctactccgttctcagaaagcagccggccaatgtcagggtctacttcggccgcaggatcgctgaggaacacgatcggctccgaggggcatttatcttggagaggtttgtcccatccactggatggatagtcaaagccctgcagtgtactgaggaagagatcctggctgctgctgggttggatgctgttgttttcaatagaattctagtattcagcatacgcatcttctcccttgccgcagttttgtgtgttttcgggattcttccactcaattattttggacaggatatacaccatgttcgaattccttcagaatcactagatatatttacaattggcaatgtagaagtgaaatcaagatggctctgggtccattgtgtaaccctgtacataatttctgcagtagcttgcattcttctatacattgagtacaagcacattgccaggttgaagctccttcatcttacaagcgcaacaccaaaaccaaaccattttacagttcttgttcgtggaataccaaaggcagataaagaatcatgcagtgatgttgttgataatttcttcacaaagtatcactcatctagttatctcttccatcaagtagtttacaaagtcgggaaagttcagaagataatgactggcgcaaagaaggcatataagaagttcaaacatttcacagatgaaactgtcgatcaaggttgcaggacagttacctaccgctgttgtctgtgtggagcttcttcaaattctttcaagttgttgaacactgagtgtgagcagaacaaggggaaagcggacaataaatccatcttggacttagacgatgaggaatgcacaactgcttttgtatttttcaaaactcggtatgcagcacttattgcgtcagaaatacttcaaacatctaaccctatgaaatgggttgctaatcttgctccagaaccagaagacgtgtattggtccaatctttggctaccctataagcaactttgggctcgccgtattgctacactcctaggctctatctttttcatgttcatatttctgataccggtgacatttatacaaggactatctcagctagagcagttgcagcagaggcttcctttcctaagaggaatattgaagaagaaatactacatgactcagctagtaactgggtaccttcccagtgtcatactgcaaatcttcctgtacattgttgctccaattatgatgctgttttctacattggagggccctacatctcacagtgaaaggaagagaagtgcttgctgtaaagtgctgtactttacagtttggaacatattctttgctaatgtattatctggtactgtcattagtcaattgaatgtgttatcaagcccaaaggacatacctgtccagcttgctaaagctgtacctggacaggccactttcttcatcacctatgtcctgacctcaggatgggctagtttgtcatctgaagttatgcaactctttggtctgatatggaactttataatcaaatacgttctgagaatgagagaagatacagaattcgttccctcgtttccttaccacacagaagtaccaaaagttctgttgtttggactattgggcttcacattttctgtgctggctcctctgatcttaccttttctgctggtgtacttttgtcttggttatgttgtataccgcaatcaggtgagaagctagaggatgtatccttgttatttaccccaaatttatctgtagcatgctaatatactattcttttcagttgctcaatgtgtatcgaacaaggtatgacacaggtggtttgtattggccaattgcatacaacacagtcatattctcacttgtgctcacccagatcatctgccttggtgtatttggccttaaagaatcgccggtagctgcaggcttcactgtacctcttatcatccttactcttttgtttaaccagtactgcagaaaccggcttcttccattattcaagacttttccagcacaggatttaatcgacatggacagggaagatgaacgatcaggaagaatggatgaaattcaccacggacttcattctgcttattgccagttcgctgacactgtagatgtgcccttggataaaattgaaatcgttggtggggatgaggagcaaggctctagctcgggtcagtccagtgttaaagaaacgtgcgaggatcccaagaagcacctggctcaccctacactaaaaggactccctgttaaccgcctccggcatgccgtgaggtcggttactttcctgatcagattgcagagaagaggtttatcagaacagaaaatcggataattagttagccgccaaccccctttgcttgttggctatataaatgtacagaggcatacatgcatatacgatcgttcccttagaagagagaagggctaatgtagaagtctgtgggagaacatcatcatgagtgttgaggtgcaattttgttttgtcgcatggatgagtttgttggttctgcgggttatctggcagattcagctacccaaaccttagccttgcacgttgatgaaattaatgctcatggttttgttgtaagagattaatgtggccaaagtgatctagatgtataatgtcctcctctcc

SEQ ID NO: 115034 - DNA, 1268 bp, Zea Mays
ttcagcacaaccgttatattcgttcttgcacttgtcagagtattatacccttacaaccatggtgcaaaatcaacgacattctttaaatgtttgtgttgagcttcactgttcaattgctccatcacagatgtagatttgatatctacattctgctttcacatacctataaaggagttatttttcatattttggtatgttgttgttttcactaaacttcaagagattttaattgtcaacctcatatgttggaaaacagatggttctagacacacttgaagaatggttgtcactgaacttaagggattttaattgttactgaactttattgatgcatagtgaatttaccattctaattgttgtgactgcatgatatcaaaacagtgacatgtctttttagttgctactgttgtcgggttgggtggtggaggagaaaacaatgatcccactgctcaatctatcgatatatgagccaaacaagacacaaatcatggaacaagtgaattgcctacatcttaccatcagtgtgttgaagaatggttggatgacaaaggccaaggagaatgctgcagctatgttattcagtttatatgtggtccatgacaataaaaaagataatgaatgatccagagaatgtggaatgtatgcatagccttttattcgagtcagctattaaacaagaaaaatggttggagtgattaaacaggctaaactattgttcaagtgagtagagatattttgcaacacttaaataatggatagtgtcttatcgttatagtttcctatcatatttttatgtaccatgcataatttctgatctaagctgtcacctgtaagtttctcagcagcttatctcttcatcattgtgttaaccttgtacattatgcagaaaatggttgtctttatcatgcattgaggatgtctggaatgctatcacaaataattagtgtttttatatcagtgtatattataaatatattatcaatgtattcttaatgatgaagaggaacaacatggaatacacaaggtggacaaggctagcacaccgaggtcaagtttatcctccaggaccaaccatggaagtgaatcttctgatgatatttgcctatcattaagaattatatattgactcttttgaaataatttgtgcaatattgataatgtttgttcaacatcagttcaatctatttgggcctacgtatttatagttgtattacatatttatattatcaacataatgttagtgttgcggtgatattttgcatcacgaa

SEQ ID NO: 115035 - DNA, 870 bp, Zea Mays
atggcgaccgacgacggcgagggccagcagccggtggtgctcatcacggggtgcgccaagggcgggatcgggtacgagtactgccaggccttcgcgggcctcggctgccgcgtggtggccaccgacatccccgaccaagtccccggccttgccgccgacctcgcgggcacgccggccgcggaggcgctcccgctcgacgtgacctcggacgccagcgtgggcgccgccgtcagcgacgtgctggcgcggcacggccgcctggacgtgctgctcaacaacgccggcgtcggctgcacgggcccgctcgcggagctggcccccgccgccgtgtcgcgcgcgctcgacgtcaacttcctgggccaggtccgcaccgtgcgcgctgtggcgccccacatggcggcgcgcgggtccggccgcatcgtcaatgtcggcagcgtcgtgggcaacgccgccacgccctgggccgcgccctactgcgcgtccaaggccgccgtgcacgccgccaccgacgcgctccgcctcgagctccgccccttcggggtgcacgtcgtcaaggtcgtgccgggggccgtcaggtcggggctgggacgcgccaacgccgcgcacctcgcctcccaccaggagtggcgcatgtaccgggacttcgcaccggccatcgaggagcgcgcgagggcgtcgcagacggggaaggccacggacgctgccgtcttcgccaggcacgtggcgcgccgggtcatgagcgcgcggccgcccagggagatcgtctacggcaacatgacgctgctgttcgccgcgctcgccgtgtcgcctgcgtgggtgcgcgacgccttctttgccaaccgcttcgggctcaacaagaagcagcgctag

SEQ ID NO: 115036 - DNA, 1083 bp, Zea Mays
atgatgagggtcatggacaagctcaaagggaagaagcacggagatcgtggtgactcctcgaggtcacggtcgactaggggttcaggtggtggggatacctcctctatgttgttccagggctctacagcgtcaaggcagcggctagagcagctccttggttgcatggaggagcaggggcgcgaagtggcaagccatagtgcacctgggcaagagcgcgaggtggcaggccatagtgcacctgggcaagagcgcgaggtggcaggccatagtgcacctgggcaagagcgcgaggtggcatgccacaatgcacttgagccggagcgtgaggcgataggctcaagtggacctatgctagagcaggaccacaatgcatttgagcaagcgagcgaggcggcagaccacaatgcacctagtcaggaggacgagctggcacgccaaggttcaccaatgcgtgatgatgatgactatggggaggactacgatggagaggccgatggagaggccgatgacgaggttgttacaacgacacaggcaacgaacttcaggttggggatcggtgatggggttgtgagtcgcgatagctttggtcgtcggtctgtttcctcggtggggagtagatctcgaacttcaacttcgagggaatcagagcttgatgagcaactaagacaacaacaacaacaagttcaacaactatctcaacaagttcaggtgatgcagggaatgctgatgcagatgtatagtgctcagatgggatctccaatgggaccccagttcacccgtccgtcacaatctggacaaaccccaaacaccaacgaaacacagggttctgaaaccggacaaggaaacccacagatggacattcagtggtcgatgcctcctagaggacaaattcttcctcctccacaaccaggtatgggatattggccgccaccaccatggggatatcctacacatccaatggggccttggggacgccccccatggccaacacagccacttccatcaccagcgatcttcaggtttgatataatgattacccaccaaaagtttgaaaatttagaaactaaagaggtccaaaattga

SEQ ID NO: 115037 - DNA, 655 bp, Zea Mays
ttcgacaaatttgtagcaactagcacaggcccaagggatacacgtcccgggtgcccccaccaccacctcccgttcattatccttggtcttcacctccacctacacctacatctctacctaccgaacatcagacccctccagctaccttgccgatgcatgaatgagaagacaggtcagactttgtcgaaaccctcttcgctagtggaggtatcgaccatcactcgtcactgtaacccgatggtgatcggcgaccgtgagcttccatgttattgtgttctgatacttgagacttttattatgactatgtatgagatattgtctcttattagtactgaatgagatgtgtcttattatgactatggatgagacttttgtgatgtaactgatgagactatgggtttaaatattgttatgtgattgtgtgtgagatgttttatgtgaaaatatgttgtgctatatagctattgatatatttgttatgttgtggaatgtggtgtaaaataaaaataaacaacatttgtaatgctggtaaaattaacttcctagaggccaattaggccgtagaaagttagtcagccgtaagaagttagtcatacgaagttagtcagctgacggcgtgaagctactaacttccgagaacctactaacttccgag

SEQ ID NO: 115038 - DNA, 1190 bp, Zea Mays
atcctcgtccgcaccctcctcctccacgccacgatgagcatgctcctccagccgcagccgtaccaacaacaacaaccaccgtcgccctcctctcattcccatcccgccagtatggccgcggccgccgcctactggctcgcggagcacccggccatcgtggggttccggtggagcccgacgcacctgtggttctccacctgggcgttcctcctggggtcgctggccgcctacgtggcgctctgcctggccctggacgtggcgctggccctggccgcgcagcgcctgcgccggcgccttgcggttccgctgggccccgtgcccgcggcgcacgcgctgctgatggccggcgcgtcgtccgccatcttcgcggggacgctgctgtcggcggtggcggagatacgggacacgcggtggtcgtggcggggccgcagccgcagcaccccgctgcggtggctcctgtgcttcccgcccgggacgcgctcctcgggccgcgtcttcttctggtcctacgcctactacctgtcccgctacctccacgcggcgcggggcgtgctggcggtgctgcgcaggcggcggagcgccgcgccgcgggtgttcgcgcacgccgcctccgtggccatggcgttcctgtggctcgagttctcgcagtcgttccaggtgctggccatcctcgcgtccacgctcacgcacgccgtcgcgctcggctacaggttctgggtcggcgcggggctccccgccaggggcgccgcccacgtcgcgctcgcctgccagctgggcctcctcggctgcaacctcgcctgccacgtcggcgtcgtgtggatgcacttcggcgccgtcggcggcgggtgcagcggcatcggcgcatgggtcttcaacacgctgctcaacgccgccctgctctgggtcttctttcattgctacggcaagcgcggcgtcgacgaaggcagcggcgccgccagcacaaaggacctatgaattggattggatgatcagctattcggctgctgctgctgtaatatttttgtaaataggcctggaccgcccggcggacggaaacaagaacaaggcgaaggatcgattcaatccctgctgcttctttagttactgctagtccgtcccgttctttcttgtgttcattccaccatgatgattctaataaattaacactgaagaagaagaagaagaagaaa

SEQ ID NO: 115039 - DNA, 720 bp, Zea Mays
atgccattagactccttcacctgcgataactgtatcctccagattgaagaaacatctatccatctcttcttcaggtgcaactttgctaagagatgttggcttcttttaggcctccttccgccatgtgctacagatcttctgcataccctattgagaattagaagacgtttgcaagtcccctggaggcttgaagctattatcatcatgacgtggtgcatttggaggtgcagaaataattggatcttcaatgaaattcccccttcggttcctgagtattggtcaggaatgaaagagcagtctttgaggactcccagtctactgattaaacaagagttcagtggcattctacagtcccagcaggattgcatagagatgtcccaagactcatctgcaaaggagtctgacatgcttggttcccaccaggggcatatgcatatggtgaatggaccgaccgatctcaccaatggcgatgcccacaatggtatacaacttgattttggtcacggctcgtcgaacgagattccctcggtggtgcaagtccaagctctactatctctaagcctcaacatacagatcatggcgtcgtactggtctgtcaaagcagatgacggcggcggccttcgagtcaatgacatccgaacgaagagcgtgcagcacaagatggcaatccggaactcgaggtacctgaaagcagcgcaggagctgcttgacgagctgtga

SEQ ID NO: 115040 - DNA, 1433 bp, Zea Mays
ttgcttcattaacggatttaaacctttggccatttctttacagtgcaacgtggacagcgcgagcacatttttgactgaccggcatagcagcctgaggatccaaacaggcgacccgcgtgtcagagatgcagcatagcatggacgcgggcgaggtgcggcactggaacgcggacgtgaacggcgtctccatccacgtcgccgagcggggccccgaggatgggccggcggtgctcctcctccacggcttcccggagctctggctctcgtggcgccaccagatggccgcgctcgccgcccgcgggttccgtgcgctagcccccgacctccgcggctacggcgactcctccgcgccgtccgaccccgccgcctactccatcttccacatcgtcggcgacgtcgtcgcgctcctcgaccacctccaactcacaaaggtgttcgtggcggggcacgactggggcgcgcatgcggcgtggctcctctgcctgttccggcccggaccgggtgcgcgccgccgtcgttctgggggtaccgtactccgctcgacacgcacacgctcgccccatcacggaggccttcgcggcgtttggcgagggcttttacataaatcagttccaggaggctggaagagctgagagcgcattcgcccgttacgatgtcgcaactgtcctaaaaaagttctactccatcgaaatagatgatgtcaccgctcctcctggggtggagatcatagacttcctggaggcgtctccctcgccacttccttggatcagcgaggaagaactgggccagtatgctgagaagtttcacaagtccgggttcactggacccctcaactactaccgcatgtcggagacgaactcgagactccttgcaccctggaacggagcgaagattacagtgcctgtgaagttcatagctggcgataaggacatcggtgcccagtcctttggaactggggagtacatcaagagcgcggagttcaagtccaccgttccagatcttgaagtcaccgtcatcgaaggccaccattttctccagcaggagcaggccgagagggtgaactcggagatggtttcctacctcgtcaggtttactagctagccagtaaagaaatctttctgaactgaagaagtcttgaagagctgaataaagtgtgagctaggcatttgctcttagcttctcatctcatgatcgttctctcgtctgcacagctggtggctgtgacccgttcggtgatttaggagaagcaatctctcgttctttcagcagctaggtgtggtgtggacagaagcaagcttcgcgtgggaaacttgctcgatgccaggactaccgcctacgctctagtctccagtggcgctcgtcgctcaagggcgtcgcgtccattgttcgttgatgtcaattgtcaagaatgactgctctccagctctccctcc

SEQ ID NO: 115041 - DNA, 1347 bp, Zea Mays
aaaggagagaaaaaaaacggaagcatcaagtctgaaactgaaaataagggcgaatagcggtttctctccctcccttgccttcgtctccgcctcccgtctttcctcaagaagtcgattcccttccccaagaacccaagcccccaccatgacaagctcctcctctccttcccgaaaggcgctgagcaagatcgcttgcaatcggctgcagaaggaactcgccgagtggcaactcagcccccctgctggattcaagcacaaggtctccgataacctacaaaggtgggtaattgaggtcactggagcggcgggcaccctttacgccggcgagacctaccagttgcaggttgacttccctgagcattatcctatggaggcacctcaggtcatttttctcaatccagcgccaatgcatccacacatctacagcaacgggcacatctgcttagatattttgtatgactcgtggtctccagcgatgaccgtgagctctgtctgtatcagtatcctgtctatgttgtctagttcgccagcaaagcaacgtccagtggacaatgaccgctatgtcaggaactgccgcaacgggaggtcgccgaaggagaccagatggtggttccatgacgacacggtgtaattgagcgcctgtcagccttccttgctgtggtatatctcgtcaaggggagattggggatgatttaggcctatttgtaagcatccctctatcggattgcgaagcttaccttcctgtggcggtgtgttaaatgagttgcacacatgtgtcgagtctgagaatacatattaccatcatcaatgatataagtaatatagaataagcatgagtgtaccctgcctgaatcactggaacgagctcaaaaggaattaactgtgcaggtttaactatgacttgctttgctcaatgtgcctttgtatcagtctgcagtctgcttatggatttgcctggttgttcattgtagcgctgcgctgctgctattgtgatagttgtaactcgcactgacaccgatggatttggtattccagttttctttctctgcttatggacgtgctgaagtctgagtgaaatgggatgggtaacttgacattctgtagcagtctatccaaagtttatctaaaagcactgttttgcaccgttttgcagtgtaaactgcactgttcgtgtagtggagtttgaatattggtatgaggatgggtaagttgctggagatagtcaagtttgagctgcagtggaggaagtgtgcgtaaatgaaattattctagcttattgattacttgtaccaaatagacgaaaaacagtgctgcagtcttatggaaattgaagtcagtcttcaaact

SEQ ID NO: 115042 - DNA, 1337 bp, Zea Mays
aaaggagagaaaaaaaacggaagcatcaagtctgaaactgaaaataagggcgaatagcggtttctctccctcccttgccttcgtctccgcctcccgtctttcctcaagaagtcgattcccttccccaagaacccaagcccccaccatgacaagctcctcctctccttcccgaaaggcgctgagcaagatcgcttgcaatcggctgcagaaggaactcgccgagtggcaactcagcccccctgctggattcaagcacaaggtctccgataacctacaaaggtgggtaattgaggtcactggagcggcgggcaccctttacgccggcgagacctaccagttgcaggttgacttccctgagcattatcctatggaggcacctcaggtcatttttctcaatccagcgccaatgcatccacacatctacagcaacgggcacatctgcttagatattttgtatgactcgtggtctccagcgatgaccgtgagctctgtctgtatcagtatcctgtctatgttgtctagttcgccagcaaagtggacaatgaccgctatgtcaggaactgccgcaacgggaggtcgccgaaggagaccagatggtggttccatgacgacacggtgtaattgagcgcctgtcagccttccttgctgtggtatatctcgtcaaggggagattggggatgatttaggcctatttgtaagcatccctctatcggattgcgaagcttaccttcctgtggcggtgtgttaaatgagttgcacacatgtgtcgagtctgagaatacatattaccatcatcaatgatataagtaatatagaataagcatgagtgtaccctgcctgaatcactggaacgagctcaaaaggaattaactgtgcaggtttaactatgacttgctttgctcaatgtgcctttgtatcagtctgcagtctgcttatggatttgcctggttgttcattgtagcgctgcgctgctgctattgtgatagttgtaactcgcactgacaccgatggatttggtattccagttttctttctctgcttatggacgtgctgaagtctgagtgaaatgggatgggtaacttgacattctgtagcagtctatccaaagtttatctaaaagcactgttttgcaccgttttgcagtgtaaactgcactgttcgtgtagtggagtttgaatattggtatgaggatgggtaagttgctggagatagtcaagtttgagctgcagtggaggaagtgtgcgtaaatgaaattattctagcttattgattacttgtaccaaatagacgaaaaacagtgctgcagtcttatggaaattgaagtcagtcttcaaact

SEQ ID NO: 115043 - DNA, 2337 bp, Zea Mays
gtccttctccttctctcacacactccactccacgtccccctccttcaaatcctaccaacacccaagcacaaggagagagaagccgccgccgccgccatggacaatattgaggtgaggaggaggaagaagaaagggagaagcagcggacgccgccaggggggacgggtacaggcggtcctgcgcgccggcctcgtcgccatggccttcgccctcctctgcctctgctcctccacgccctccgccattgccctcaccccagacggcgaggcgttgctggagctcaagctggccttcaacgccaccgtgcagcggctcaccagctggcgtcccagcgaccccaacccctgcggctgggagggcatctcctgctccgtccctgacctcagggtccaatccataaacctcccattcatgcagctcgggggcatcatttcgcccagcatcgggaggctcgacaagctgcagagactagctctgcaccagaacagcttgcacggcccaatccctgcagagatcaagaactgcaccgagctcagggcaatttacctgagagccaactacctgcaaggaggcatcccttcagagattggcgagctcgtgcacctcaccatcttggacctgtcaagcaatctgctgaggggcacaataccggcctcgatcggaagcctcactcacctgcgctttctgaacctgtctactaacttcttctccggagagatcccaaatgctggtgtcctcggaaccttcaaaagcagctcgttcgttggaaatctggagctctgtggcctgtccatccagaaagcttgccgtggaaccctcggctttcctgctgtgttgccacattccgatccgctctcttcggctggtgtttctccaatcaataacaacaagacgtcacactttctcaatggcgtcgtgatcggctcgatgtcaaccttggctcttgccttggtagccgtacttgggttcctatggatctgcttgctgtccaggaagaagagcattggtggaaactatgtaaagatggacaaacagactgttcctgatggtgcaaagcttgtgacataccagtggaaccttccatattcatcaagcgagattattagaaggttggagctgcttgatgaagaggacgtggtcggttgtgggggctttggcacggtgtacaggatggtgatggatgatggcacgtcgtttgccgtcaagaggattgacctcagccgcgaaagtcgcgacaggaccttcgagaaggagcttgagattctgggcagcatcaggcacataaaccttgtcaatctgcgaggctactgccggctccccacagcgaagctactcgtatatgatttcgttgagctgggcagcttggaatgctaccttcatggagatgaacaagaggagcagccattgaactggaacgcgcggatgaaaatcgcgcttggctcggctcgaggcctggcatatctgcaccacgattgctcgcccgggatcgtgcatagggacatcaaagccagtaacatcctgctggatagaagcttggagcctcgtgtctccgattttggcctcgcgaggctgcttgtagacagtgctgcccacgttaccaccgtcgtcgcgggcacctttggatacctagcaccagagtacttgcaaaacgggcatgctactgagaaatcagacgtgtatagctttggagtgcttatgctggagctagtgaccggaaagaggccgaccgattcttgcttcatcaagaagggactgaacattgttggctggctgaacaccctaactggggagcaccggctggaggatatcatcgatgagcgatgcggcgatgtggaggtggaagccgtggaagccatccttgacatcgcagccatgtgcaccgacgcagacccggggcagcggccatcgatgagcgctgtcctcaagatgctggaggaggagatcttgtccccctgcatgagcgagctgtgctacgagcagcacctggagctctgagctgaggaggaagatgttgctggctgcgtgcgtgaagcgtcatggatgagactgaagttttgtactgtagatacaacgatgatggatgagtgtaggtgatgttttgtgtgctcttagggccaatgaagaacagtaagcagcagttcgtgagtgaagaaggatcgtccattgggcgtactgccctgatacgataccggttggctgcacatgagcggccggccttgtgcctcgcttgcgaattgcaaccaaaaggctgacgagaaaactccatgtgctaatgttttcaacatccacggaagggcgtatcactgaatattgacgatgtagaaattgttggactaa

SEQ ID NO: 115044 - DNA, 2232 bp, Zea Mays
gtccttctccttctctcacacactccactccacgtccccctccttcaaatcctaccaacacccaagcacaaggagagagaagccgccgccgccgccatggacaatattgaggtgaggaggaggaagaagaaagggagaagcagcggacgccgccaggggggacgggtacaggcggtcctgcgcgccggcctcgtcgccatggccttcgccctcctctgcctctgctcctccacgccctccgccattgccctcaccccagacggcgaggcgttgctggagctcaagctggccttcaacgccaccgtgcagcggctcaccagctggcgtcccagcgaccccaacccctgcggctgggagggcatctcctgctccgtccctgacctcagggtccaatccataaacctcccattcatgcagctcgggggcatcatttcgcccagcatcgggaggctcgacaagctgcagagactagctctgcaccagaacagcttgcacggcccaatccctgcagagatcaagaactgcaccgagctcagggcaatttacctgagagccaactacctgcaaggaggcatcccttcagagattggcgagctcgtgcacctcaccatcttggacctgtcaagcaatctgctgaggggcacaataccggcctcgatcggaagcctcactcacctgcgctttctgaacctgtctactaacttcttctccggagagatcccaaatgctggtgtcctcggaaccttcaaaagcagctcgttcgttggaaatctggagctctgtggcctgtccatccagaaagcttgccgtggaaccctcggctttcctgctgtgttgccacattccgatccgctctcttcggctggtgtttctccaatcaataacaacaagacgtcacactttctcaatggcgtcgtgatcggctcgatgtcaaccttggctcttgccttggtagccgtacttgggttcctatggatctgcttgctgtccaggaagaagagcattggtggaaactatgtaaagatggacaaacagactgttcctgatggtgcaaagcttgtgacataccagtggaaccttccatattcatcaagcgagattattagaaggttggagctgcttgatgaagaggacgtggtcggttgtgggggctttggcacggtgtacaggatggtgatggatgatggcacgtcgtttgccgtcaagaggattgacctcagccgcgaaagtcgcgacaggaccttcgagaaggagcttgagattctgggcagcatcaggcacataaaccttgtcaatctgcgaggctactgccggctccccacagcgaagctactcgtatatgatttcgttgagctgggcagcttggaatgctaccttcatggagatgaacaagaggagcagccattgaactggaacgcgcggatgaaaatcgcgcttggctcggctcgaggcctggcatatctgcaccacgattgctcgcccgggatcgtgcatagggacatcaaagccagtaacatcctgctggatagaagcttggagcctcgtgtctccgattttggcctcgcgaggctgcttgtagacagtgctgcccacgttaccaccgtcgtcgcgggcacctttggatacctagcaccagagtacttgcaaaacgggcatgctactgagaaatcagacgtgtatagctttggagtgcttatgctggagctagtgaccggaaagaggccgaccgattcttgcttcatcaagaagggactgaacattgttggctgggtaagcagtgttcgtttttcttttttccctttaccttttttaccccctttacctcgtcatgttggctgggttttctgcagctgaacaccctaactggggagcaccggctggaggatatcatcgatgagcgatgcggcgatgtggaggtggaagccgtggaagccatccttgacatcgcagccatgtgcaccgacgcagacccggggcagcggccatcgatgagcgctgtcctcaagatgctggaggaggagatcttgtccccctgcatgagcgagctgtgctacgagcagcacctggagctctgagctgaggaggaagatgttgctggctgcgtgcgtgaagcgtcatggatgagactgaagttttgtactgtagatacaacgatgatggatgagtgtaggtgatgttttgtgtgctcttagggccaatgaagaacagtaagcagcagttcgtgagtgaaga

SEQ ID NO: 115045 - DNA, 393 bp, Zea Mays
cgcaccgaactgaaacatatttccttcatcgattcagtcacttcatcgaacataagggatgcaagctagcagagacagcggggggctcaccggcatggacgacgtcgtggcctgggcgagcacatggggagcaacgtcggcatggggaggcatggccgacggcgcacagccggagttgacgacaacagagctgagaggggcagggccggtgggctaagggagctggcgagcattggcacggttggagaaggagcagggcttagaggcgcttgtgccatagagcttggctaccggcgagctgatgcagggcgctggaagctcgagcatatggagcagcttggctaccggcaaagaccaagcgtagacgagctgaacatatccagggagccatga

SEQ ID NO: 115046 - DNA, 625 bp, Zea Mays
cattcgctgagcatcgccacaatataactaaccaatccaactaatagtaaaaacaaatcagctcaccataatcgaatcgacttgatatatgtaagaacggcgacagttccttggttctatttcgtcgaacacctagagcgcaccgaactgagacatgtttccttcatcgattcagtcacttcatcgaacataagggatgcaagctagcagagacagcggggggctcactggcatggacgacgttgtggcctgggcgagcacatggggagcaacgtcggcatggggaggcatggccgacggcgcacagccggagttgacgacaccggagctgagaggggcagggccggtgggctaacggagctggcgagcattggcacggttggagaaggagcagggcttagaggccttgtgccatagagcttggctaccggcgagctgatgcagggcgctgggagctcgagcacagggagcagctcggctaccggcaaagaccaagcgcagacgagctgaacatctacagggagccgtgacttcagaaacagagaaaaaatggcataagaaaacagatgagctgtgttcctaggaaactagtggataacgcctatgagatgaaagatgtggctgg

SEQ ID NO: 115047 - DNA, 258 bp, Zea Mays
atggggagagagctccctgctcctacgcttaaccagagaaggggaggagaggagaagaaatggtgtgagggagaagggagagggcaggggctgccatttattgagctggagctctggacatgtcaggtggcagtgagcagtggcaggtggacaaatgttgacattgggcggccatttttggcgttttctgtttgttttcggaccttggtcgctgtagaagatttcttccttgatgtacactctacaaatcttgtatag

SEQ ID NO: 115048 - DNA, 156 bp, Zea Mays
gttccatcctttttacactttcatgcatatagccttacaagtaatgacttacaacttcataaacacctaagaaaggataaaacattcaaatagttggaaccataaacaatttaagcagcctcaatattagcataatatcaccaaccatggtttgtg

SEQ ID NO: 115049 - DNA, 211 bp, Zea Mays
ggtggcctaatgccttcagtctggcaatttgtctctgccatatgtctcaaataagccaagcaaagaaaaagaccgctgctaggtggttgatactggtcttccctctttctcttgccacctcgggcattctctgtggcctaaaaatagaatgggttcaagcttgctacagaagataaacataatggatgagcatataaagcagagatttaat

SEQ ID NO: 115050 - DNA, 138 bp, Zea Mays
gtcccgagcggatcgaggcacacgctaagcactggaaggatgttgactacctcatcttcaacacctacatctggtggatgaacaaggccgacatcaaagtcaggagacccaattcgaggtactggtctgacaacattg

SEQ ID NO: 115051 - DNA, 1100 bp, Zea Mays
tttagctaacaaaaataatagaccagcttaccgacccaaaccaactaacaaaataacaacctagctcaccacaccttaggccaaattctacaagaaccacgacgatcacgggttcaagcataacaccgaacacctaacaagcgtcacttactcacttcactgcgtacaccatctagctttctatgccaatcgtatactgcgattcacacataccatcatagggaaaacacagatcactacacatggatcaaaacaatgccgatcataagttaacatttgaacaccacacctgctatctgaaacacggacctggcgacgtagaacaaaagtggtcgacgatggggtccctgacgagcgtctgagtgtgaggggaggtgtcccgacaaggtgagcaatgacgacatgacgacgaggagcaagggggctgttgttgcgatgacagatggtgaagggcactgtggagcagggagacacggtctccacggcgacagggaaggtgtagcagaccctaacgacatgtggaggactagttcgcggagctgttgctgctcactgggtgaacatcacggagggccaagcacaacatctagagcggcagcgaggtggtgcttaggagctcagccgatccaagaacggagttgggaggcatggccaacatgggtgagccccgttggcaaggcacggtcgacgttgatgccgagcagggagaggtgcggccatgaggaggtgcgccgtgctgaagctggaggggaggcgtcgtacatagggctgggagcagcgacgatgaggcgccatgtccgatgaagactctgcgcggccgagcgccatggaaaatggggcgcgcgcgggagctccatggcgagcggatgccaggcgcgcggccatggaggaacgggggagaagcgagctggagatggaggccgagccggagcaccgtgagggagagatggagcgctgccgggggagcgcagcaaggaagcagggagcttggaccaggggcgcgcgcggtcgtggggaagaagacgagggagagagagacgcggctagggcttgctgggaagacggcgcgcggcttgtggagaagacagggtcttcggcgg

SEQ ID NO: 115052 - DNA, 822 bp, Zea Mays
gattctttttttatataaaaaagtagacgctatcttctattttctttagaactaggtttgtcggtttgtttggcaaacacgatctatgtactgacctgaactttgcgtattccctttttccaagcaggatctcacgttgacttactctgtttcgttgcgctctttcttttcaaaactagattaaataccaggattatctcaagttgaggacaagggttgaattcctccaaactacacaaagaaatattcttggggaggatctgggtccacttagcatgaaggagctcgagcagctggaggaccaaatagagatatctctgaagcatatcagctcaagaaagaatcaaatgctacttgatcagctctttgacctcaaaagcaaggaacaagaattgctggatctcaataaagacctaaggaagcagctgcaagaaacaaggccagagaacgcgctccgtgtctcctgggaggaaggtgggcacagtggcgcaagtgggaatgttcttgatccttatcaggggctccttcagcacctggacaacgatccttccctgcagttcgggtaccatcatcaagcctacatggatcagctgaacaacgaggacctggtggacccgaatgagcatggtcgatctggatggatatgaaatgctctgatgacccaaaataaagttgatgcacagcagggattcaccctgcaggacgcgagactatgtattgaagctaagacctcgtgtgtgttgtgttgtgtgcgaagcttggaactttataaatcgttgtcatgcccatggctttctatttctttctcggagctgcgcaaaa

SEQ ID NO: 115053 - DNA, 2106 bp, Zea Mays
gtccactgtcctgtccaccacacacctctgctcctaaacccacccccactctccagttcccggcgcaccgcaccaccgatggccacgaccgtccgcctgcagctggtcttccgcccacccgctgctgcttctccttgccgtcgtcgtccctcatcagatcatctgattttgagacggcgtccagatcacccaagatcatcctcgtcccgacggccccagcaaccgcaatcctccagcaccgccatccgcgagagcaggcagcagcaggtgacgctgaagctgacgtacctggagatcaacagctgggtgtgggaggtgcagcagcaaggccaagcccccgtgcgcatcctggtggacccagtccttgtcggcaacctcgacttcggcgcgccctggctgttcgacggcgccaagaagaatcccaaggtgaaggccctcggggtggacgacctgctgctggcgccggaggcgaggccggacgtgctgctcatcacgcagagcctggacgatcactgccacgtccggacgctgacgcagctgtcggccagggcgcctgacctgccggtggtgaccacccccaacgcgcagccagtgctcgaatccctgcccacgcccttccgccgtgtcacctacatcgagcccggccagtccaccgccgtcaaccagcaggtccgggtgctggccaccgcaggccccgtcctggggcccccgtggcagcgccccgagaacggctacatcctcatggccacaggtgaggagagcggccccggcctcctctactacgagccgcactgcgtgtacgacaggtccttcctggaggagaagcagctgcgggcggacatcgtcatcacgccggtggtgaagcagctcctcccggccaacttcaccctcgtctccggccaggaggacgcggtggacctggccaggctgctgcgagccaggtacgtggtacccatgagcaacggcgacgtggacgccggcggactcctggcaaccgtgctcaccaaacaggggacgacgcagtccttccaggccctgctatcggaggcgcttcccgaggcgcaggtcctccaccccacgcccggcgtgccgctccaactgcagctggactggacatcatagattcatagatggtgggcactgggcaatgggggcatccatccccagccacaatcatagcattttcggagtttatataagtgcacacatatatataagaagccacacccagaatagtgattaagctcattgaacgtaactcctgtaacttttattcattgcttaagctctctacaaatgatccacatacatacaaatacatacatgcatacgtgcgtacatacattcgagttgaattgaacaacaaaagatttggagacaacgcaaaaaatagctcaacggggcaaaccaccaaagagcacacagcattcaagagctcccagcgtgctcttctccaacccacaaagagtttccagacttgatgatgcctgtaatggtaaatgagcagacttatcggtgtgtcccgcctctcctcctggaggacgaggatgcaatgcgtgcccgaggaagccccagaatagccaccagcccaccgatgaaagatgcaccggctgccaccgcaaaagcgggtgcatttccaccgccaaacagctgatcccatgggccactgccaagtgacacaataacctacagcaggtgccagttagtgatatatatccccaaaaagctgcatcatcatcatcatcatctatcctaactctagttcaacttactccaatccactgtccttttgtcacgctgcagtttaccaatttacgtcttgagtactctttccttttacacacacaagtttttcagggattgatttgtaccaatgcaggccactgtttctttaatacaaacagtacaaacacacaatctctgtgccttgcaaggctgaccctaattgtgaacctagccttttctgctagcttatattcactatatagccgtcggtttgttcagctactttccatcacaactcagtcttcaattttcttggtggaattgtgtaacaagaaggggagtgaaaacctgatcgcttttctaaaccgaagattggatttc

SEQ ID NO: 115054 - DNA, 93 bp, Zea Mays
cggccatcaagttctgcttttgcttccgtgccgcacacattcatctttgctagatggccatgttgtaaaattagagaaataagtgacatgttt

SEQ ID NO: 115055 - DNA, 306 bp, Zea Mays
ctgcggtgctccagccatggccgccgagctcggcctatgctcctccctgcgtcgcgcgccgagatccctacagtcctccctgcgccctgccgaagccctcctatggcgcgcccctcttcctggttcttctctgcgcgcgcgtctactccctcagctcaccacgcgccctgctcctcgctcctccctgtgcgcgcgctcctggctcctgcaggtgttccaatcgttggcgccgctgattgaaactgctttccgtcggtccagtgttcctgcagggcttcctgtgagctattccctagaaaaaaagaa

SEQ ID NO: 115056 - DNA, 101 bp, Zea Mays
ctgatatccgtcaatattatatatgcaataattttatcgaatacatctgacttttatctgaataaatatccgaccgttaaatatatagtaaaatatattcg

SEQ ID NO: 115057 - DNA, 678 bp, Zea Mays
atggcgtgttgctactctaaagaagagatgataggaagtagcgacaaggtcgtcaagaccacctggcacgatgtctcctgccagatcaccaagatcaacatgtacaagcatcagaggcttcgtaaagcagctctgaaggaggaagagcatctatttgtttcagtcaacgggactataactctgttgggcttaaccgattcaatgtcaagtgacaatgctggtggtattgctgagatggctggaatgagccacaaaatctgtgagagaactgatgctcttggtgatactggcaacacaacttctgctattagaaagggatttgccattggttcaggtgctattgtgtccctggtgttgtttggtgccttcgttagcagagctggagtgaaggttgtcgatgttcttcccgaagcacgccagcctcctcctctggctcctattcgagatggtggtggctccatgtttggaggaatcgggtccaccattgttgaaggtggtatggtatggcatttggtatgggtagtgccattgcacacaggggagatggctgttgacgctatattgggtccccggaccattccacatgagaccgttgtctcagaagctgttgttcccgccccagtatccattctaaggccttccaagatgtatgtttgcttgccaatttatgtttcctaa

SEQ ID NO: 115058 - DNA, 398 bp, Zea Mays
atggcaaccgctgggagaggtaatagagttaaggaactcacgattggcctaatgaattccatgaatcccacaaactaggccccagaggagaatggtaccatgacatagtagtcaccctgacgacctttataatgcaccttgggcacgccgtgtgtgcctccaagagcgctgatttgccattcagctggagggccgtaggtacagcccttgctgctagtgtgctcaaacttgatggcaacctcttgggcagcggacgccgcggagcgtgcggcgtgggcggcagtcagacgtcggccaagaaagacatggccgaagccacctttgccaagcttcctctcgaccttgtactcgggagatcctccgacctggacctggaaggcaaggcagtggagatctga

SEQ ID NO: 115059 - DNA, 396 bp, Zea Mays
atggagcgtgcgcagctttgcaggggctcggacgagggacgagcgggggctctgggcgccagagctaggcaccaggggccgccatggctggacagatccgccgacaatgggcttcgagacaagcgtccgtgggagggcttcgttgggggaaagggctgctacacgccgccagaaggaaaagggagaagagaaggcttacctgcgtcgctggtaaccgaaggggcatgctcgtgtgatctgggtctcgggaaatcggaggcggtttggcgattggaaacaagaggagggatgtctacgtacctggtaagcgctgcccttctcgcctgcgatctggggaaacgatctggatctgggaaaagacaggaggttttgcgacgactagagcggtatttatag

SEQ ID NO: 115060 - DNA, 4439 bp, Zea Mays
gcgcaaacaagttcgcatcgccatctcgctcgcagggaggagaggggagtctctaaccctaaccctacccgcccctgtcgccatagccatggctgccggcggagagctctccccctcccccgtgccccccgcatcccccatcaagcattctcgctcacccgacgatgcccagcccgacgcatccccgaagcgtcgcaagcgccaccatcaccgccgccaccaccaccaccgtcggcaccgtcacgccgattccccggtacccgtggcagccgacgaagaggtagaggagggggagatactcgaagatgccaccgccgcctctgccatggaggtcgatgctgagtccgccgccccagaggctttccttgctccggagcactttggtaatggtgctgatacagactcaaacacagatgcaaccaagatgcaagctcctgctctgcctacccttccatcctcagaagatggaaggaggtcacttcatgatgcccctgagtctgaaagaggagatattctttcaagtgatgttgaggacaacaaaggacatgaacgaaggcaaagacaaaaccgttctaaatctccaaagtctagaagggagaaggaaaggaggcacaaagatgaccatcacacttcatcttcaaaagattatcattccagaaatcactctagaacatctccttactcaaggcatcaaagtgaagctcattcgagagatctgtacttgagatatagagagaaaggtgattacactaatggttctcgtgcaaatcttagggatggttctgatcatgagagcaatgatcggaatgggaagtctggcagacatacgactaggacccacgggagtgaaagagaaaggagcagcagccatggtattcatgatagacatggtgacaggtacagtgacagacgtgccagccaggaaaggcatagagacgataggatatatagagacaaaatcgattcattagaagctgctcctaggcacagagaaagaagcaggagtcatagtagatcggatccaagggaaaatacacgtcttcgtgatcaaagcagggagagggaaagacggagtggtagttcaaggcatagggatcatgacagcaagagggatacaagtaaagatcggcatagagaatctgacagggttaacagtgcacatgaaagggatagagggagagaggctagggacagggaatggcatagggtcaagggaagtgaaactcatagagctaaggaaggacgggacaaagttagcgataatgataggcacagggattcaacacgctcaaaatatagcgtgtctgatggttacaaagagaggacaagatctggggagaaaggtagagatgctgaccataaaaaccggaagtttgaagaaatgaaggaaaattctctcaaggaggaagatgaagaggagtaccaagagaaaatagaacagcagttagcaatgcaggaggaagacgaccctgaaaaaatcaaagaggaagcaaggaggaggaaagaagctatcatggcaaagtacaggcagcagcaatcgcagaaagaggatatggaatctaaaccaagtggcaatgatgaagaagtaagagcaatggatggaaacgaagctatacatcagaaagatgatatcgatagcagctttatgggcaatgtcgaagctgaaaataagcatgattcttcagaggtatttgatggcaagacaggctttaatgtgggaaggtctcctgctcacaattatgcttcaactagcacgggagcattcactgatgagaggacaataggtgtttcaggtcttggagagggttctcccaagagtgagagatcagcagacatgttttgtgatgacattttcggagaatcacccaccggaattagaaaattgggaaaggatgatggtttgcatattgagagaaatgctcttcatgacaactgggatgatgcagatgggtactacacttatcggttcggagaattgctggatggccgttatgaaatcatagcagcacatgggaagggtgtgttctcaacagttgtgcgggcaaaagatcttaaagcgagtaaggatgatcctgaagaagttgccatcaaaattattcgcaacaatgagacaatgtacaaggctggtaagcaagaggtttcaatattggaaaaacttgcaagtgcggaccgtgaggacaaacgccactgcgtgcggtttatttctagtttcatgtaccggaaccatctttgcttagtttttgaatctctcaatatgaatcttcgtgaggttttaaagaaatttggtcgtaatattgggcttaaactgactgcggtgagggcatattcaaagcagcttttcatcgccctgaagcacctgaagaactgcaaagttttgcactgtgatataaaaccagataatatgctggtgaatgaggctaagaatgtgctcaaggtatgtgattttggcaacgctatgcttgctggtatgaatgaagttacgccttatcttgtcagccgtttctatcgggcacctgagatcgttcttgggttagcctatgatcaccctttagacatgtggtcagttggttgctgtctatatgagctttataccgggaaagtcttatttcctggtccatcaaacaatgccatgcttcggcttcatatggaattgaagggtccattccctaagaagatgcttcgaaagggtgcctttactatgcaacacttcgatcaagatctcaattttcatgctaccgaggaggatcctgtgacaaaaacggctgtgagaaggttaattttgaacattaaaccaaaggatgttggttctttgtttccgaactttcctggcgaggatccaaaaatgctatccagttttaaggatcttcttgataaaatatttacattagatccagaaaagaggataactgtatcgcaagcacttagccatccatttatcactggcaagtgacacaagatgacgattcctcttgaccttgaacttagcatcttcactgtaaaatacattttgggttcctcttgtctaatcatcaacgtttctgtcttgtgtcctgggagctctgagaaaaagtacatggatgaagcacggaacttcggaagagatggctatctgcagaccttgttgcatgcacttatcatttggatatattctgttgcttgattctgccagggcctctgctatgtgcacattttatatgcttaagggccaacataagaaggtcctgggatggaggtcgctggaccctctactcacttgccatggtaaatcctctcaactctggatgtcttccatttttttcttattaaagagttttcacctaatagttgattatgggttggtacatcaaggctgattcagttcaattttagcaacctttactgtttattaggtgcatttccaatattttgtgttttggttagtaatttcttttgccagtttcatcaaacattgatcttctaaacaatttgtttgttttttgtgtgcctgccaaacttcttcatattaatgggttatgagattcaagtactatatgctttacatgaaagctgtattctctaccattcagcgaaatgtgcgaaacatgagaaacatttttgtcttgtgtaacaatttgagagctgattattacattgactgctagttataaaaccgtgggcttattacttttactttgtatctagatttgctgcatgtagataaacactggtgggaagctgaaattttactgtgtaattagtattcaagtgcaggagagatgcgtatcatttcattgagtaaagaggctacagggaaagaaatccaacatagcccgcccctcctccctctaagcacacaagacctgaaaggttctcagcctgttagcaccatggaatgctcttatttgtgattgcctgcagcaccgccatcataacacttgcaatgatgccattaaaaagacatcatactgatgtttccagatctctcaagccaccaagatagtgagttcaggcctttcttgctatatcatttggcacttgtcagcctagctcaaaccggcttgataacttattgatgataggttgaggcgcaatggaaataatccaagcctgccagattggtaaccattctttagactgccatttagtaagtcaggttgaacctattaccatctataaggacttgttcggttagctctcaatccatgtggattgagtgggattggatgggtttgaatcccaaacaagtcaaacttcttctcaattttttccaatcccatccaatccatatgtattaggaataaccgaacaagccctaagtgggcatgcaaatggcattgtgttggattggaccattgtaaacggtttctcgtgttggatgcaagcattctgtagttgttttgagttgttttttattatctgtagtacttgctgggtaaatctaaagaactggatttgtgtca

SEQ ID NO: 115061 - DNA, 3247 bp, Zea Mays
gcgcaaacaagttcgcatcgccatctcgctcgcagggaggagaggggagtctctaaccctaaccctacccgcccctgtcgccatagccatggctgccggcggagagctctccccctcccccgtgccccccgcatcccccatcaagcattctcgctcacccgacgatgcccagcccgacgcatccccgaagcgtcgcaagcgccaccatcaccgccgccaccaccaccaccgtcggcaccgtcacgccgattccccggtacccgtggcagccgacgaagaggtagaggagggggagatactcgaagatgccaccgccgcctctgccatggaggtcgatgctgagtccgccgccccagaggctttccttgctccggagcactttggtaatggtgctgatacagactcaaacacagatgcaaccaagatgcaagctcctgctctgcctacccttccatcctcagaagatggaaggaggtcacttcatgatgcccctgagtctgaaagaggagatattctttcaagtgatgttgaggacaacaaaggacatgaacgaaggcaaagacaaaaccgttctaaatctccaaagtctagaagggagaaggaaaggaggcacaaagatgaccatcacacttcatcttcaaaagattatcattccagaaatcactctagaacatctccttactcaaggcatcaaagtgaagctcattcgagagatctgtacttgagatatagagagaaaggtgattacactaatggttctcgtgcaaatcttagggatggttctgatcatgagagcaatgatcggaatgggaagtctggcagacatacgactaggacccacgggagtgaaagagaaaggagcagcagccatggtattcatgatagacatggtgacaggtacagtgacagacgtgccagccaggaaaggcatagagacgataggatatatagagacaaaatcgattcattagaagctgctcctaggcacagagaaagaagcaggagtcatagtagatcggatccaagggaaaatacacgtcttcgtgatcaaagcagggagagggaaagacggagtggtagttcaaggcatagggatcatgacagcaagagggatacaagtaaagatcggcatagagaatctgacagggttaacagtgcacatgaaagggatagagggagagaggctagggacagggaatggcatagggtcaagggaagtgaaactcatagagctaaggaaggacgggacaaagttagcgataatgataggcacagggattcaacacgctcaaaatatagcgtgtctgatggttacaaagagaggacaagatctggggagaaaggtagagatgctgaccataaaaaccggaagtttgaagaaatgaaggaaaattctctcaaggaggaagatgaagaggagtaccaagagaaaatagaacagcagttagcaatgcaggaggaagacgaccctgaaaaaatcaaagaggaagcaaggaggaggaaagaagctatcatggcaaagtacaggcagcagcaatcgcagaaagaggatatggaatctaaaccaagtggcaatgatgaagaagtaagagcaatggatggaaacgaagctatacatcagaaagatgatatcgatagcagctttatgggcaatgtcgaagctgaaaataagcatgattcttcagaggtatttgatggcaagacaggctttaatgtgggaaggtctcctgctcacaattatgcttcaactagcacgggagcattcactgatgagaggacaataggtgtttcaggtcttggagagggttctcccaagagtgagagatcagcagacatgttttgtgatgacattttcggagaatcacccaccggaattagaaaattgggaaaggatgatggtttgcatattgagagaaatgctcttcatgacaactgggatgatgcagatgggtactacacttatcggttcggagaattgctggatggccgttatgaaatcatagcagcacatgggaagggtgtgttctcaacagttgtgcgggcaaaagatcttaaagcgagtaaggatgatcctgaagaagttgccatcaaaattattcgcaacaatgagacaatgtacaaggctggtaagcaagaggtttcaatattggaaaaacttgcaagtgcggaccgtgaggacaaacgccactgcgtgcggtttatttctagtttcatgtaccggaaccatctttgcttagtttttgaatctctcaatatgaatcttcgtgaggttttaaagaaatttggtcgtaatattgggcttaaactgactgcggtgagggcatattcaaagcagcttttcatcgccctgaagcacctgaagaactgcaaagttttgcactgtgatataaaaccagataatatgctggtgaatgaggctaagaatgtgctcaaggtatgtgattttggcaacgctatgcttgctggtatgaatgaagttacgccttatcttgtcagccgtttctatcgggcacctgagatcgttcttgggttagcctatgatcaccctttagacatgtggtcagttggttgctgtctatatgagctttataccgggaaagtcttatttcctggtccatcaaacaatgccatgcttcggcttcatatggaattgaagggtccattccctaagaagatgcttcgaaagggtgcctttactatgcaacacttcgatcaagatctcaattttcatgctaccgaggaggatcctgtgacaaaaacggctgtgagaaggttaattttgaacattaaaccaaaggatgttggttctttgtttccgaactttcctggcgaggatccaaaaatgctatccagttttaaggatcttcttgataaaatatttacattagatccagaaaagaggataactgtatcgcaagcacttagccatccatttatcactggcaagtgacacaagatgacgattcctcttgaccttgaacttagcatcttcactgtaaaatacattttgggttcctcttgtctaatcatcaacgtttctgtcttgtgtcctgggagctctgagaaaaagtacatggatgaagcacggaacttcggaagagatggctatctgcagaccttgttgcatgcacttatcatttggatatattctgttgcttgtaagacaactagccagttggcattccattccctgtgtacaatctttcctatggatttacaagatatacatgaaagtctgcttcatttc

SEQ ID NO: 115062 - DNA, 2176 bp, Zea Mays
gcgcaaacaagttcgcatcgccatctcgctcgcagggaggagaggggagtctctaaccctaaccctacccgcccctgtcgccatagccatggctgccggcggagagctctccccctcccccgtgccccccgcatcccccatcaagcattctcgctcacccgacgatgcccagcccgacgcatccccgaagcgtcgcaagcgccaccatcaccgccgccaccaccaccaccgtcggcaccgtcacgccgattccccggtacccgtggcagccgacgaagaggtagaggagggggagatactcgaagatgccaccgccgcctctgccatggaggtcgatgctgagtccgccgccccagaggctttccttgctccggagcactttggtaatggtgctgatacagactcaaacacagatgcaaccaagatgcaagctcctgctctgcctacccttccatcctcagaagatggaaggaggtcacttcatgatgcccctgagtctgaaagaggagatattctttcaagtgatgttgaggacaacaaaggacatgaacgaaggcaaagacaaaaccgttctaaatctccaaagtctagaagggagaaggaaaggaggcacaaagatgaccatcacacttcatcttcaaaagattatcattccagaaatcactctagaacatctccttactcaaggcatcaaagtgaagctcattcgagagatctgtacttgagatatagagagaaaggtgattacactaatggttctcgtgcaaatcttagggatggttctgatcatgagagcaatgatcggaatgggaagtctggcagacatacgactaggacccacgggagtgaaagagaaaggagcagcagccatggtattcatgatagacatggtgacaggtacagtgacagacgtgccagccaggaaaggcatagagacgataggatatatagagacaaaatcgattcattagaagctgctcctaggcacagagaaagaagcaggagtcatagtagatcggatccaagggaaaatacacgtcttcgtgatcaaagcagggagagggaaagacggagtggtagttcaaggcatagggatcatgacagcaagagggatacaagtaaagatcggcatagagaatctgacagggttaacagtgcacatgaaagggatagagggagagaggctagggacagggaatggcatagggtcaagggaagtgaaactcatagagctaaggaaggacgggacaaagttagcgataatgataggcacagggattcaacacgctcaaaatatagcgtgtctgatggttacaaagagaggacaagatctggggagaaaggtagagatgctgaccataaaaaccggaagtttgaagaaatgaaggaaaattctctcaaggaggaagatgaagaggagtaccaagagaaaatagaacagcagttagcaatgcaggaggaagacgaccctgaaaaaatcaaagaggaagcaaggaggaggaaagaagctatcatggcaaagtacaggcagcagcaatcgcagaaagaggatatggaatctaaaccaagtggcaatgatgaagaagtaagagcaatggatggaaacgaagctatacatcagaaagatgatatcgatagcagctttatgggcaatgtcgaagctgaaaataagcatgattcttcagaggtatttgatggcaagacaggctttaatgtgggaaggtctcctgctcacaattatgcttcaactagcacgggagcattcactgatgagaggacaataggtgtttcaggtcttggagagggttctcccaagagtgagagatcagcagacatgttttgtgatgacattttcggagaatcacccaccggaattagaaaattgggaaaggatgatggtttgcatattgagagaaatgctcttcatgacaactgggatgatgcagatgggtactacacttatcggttcggagaattgctggatggccgttatgaaatcatagcagcacatgggaagggtgtgttctcaacagttgtgcgggcaaaagatcttaaagcgagtaaggatgatcctgaagaagttgccatcaaaattattcgcaacaatgagacaatgtaagttaagctccctagagatgttctcctgcaatttctactatggaaaacaaataggaat

SEQ ID NO: 115063 - DNA, 2946 bp, Zea Mays
attctatttgattctggtgcatcacatagttttatcagtgccaaatttagtgccaagtgccagttgccctttcaccacaccgatgggggcattacaatttcaaccccaggaggcagggttgccacttatcaaatcaacaggcaagtgcctataaaattcggtagccttgtgattagaaccacccttctcatcttaggattggatagcgtggatattatattgggagctgactggttgaccaggcatcaggcagtattggatattgcagccagggccattgaaattcattcccctgcttatggcgagactgttttgtatttacctggccagggatgcacccgttcttgtgcctttgttatgatagagtccccagtggaaaagatcccagtggtccgtgactacccggatgtttttccggatgaattgccagggatgccacctgaccgagatattgagttcgccatcgaattgcaacccgagatcgctcctatctccaagagaccctataggatgcctcccgcggaattggcagaattgaagaagcaattgcaagagttgttggacaaggggtttattcgcccaagtacttcaccatggggatgtccagctttatttgtgaagaaaaaggatgagagtttgagaatgtgtgttgactaccgccctctcaatgcggtgactatcaagaacaaatacccactgccccgtattgatgttctgtttgatcagttggtaggagccaaggtattctccaagatagaccttcgctcaggttaccatcaaatcaagatccgtgccagcgatattcccaagacgaccttttctaccagatatgggctgtatgagtttttggtgatgtctttcgggctgaccaatgccccggcttatttcatgtacttgatgaactcagtatttatgccagagttagacaagttcgtggtcgttttcattgatgacattctggtttattccaagaatgaagccgagcacaccaaacatttgcatactgtacttcagagactgcgtgaccatcagttgtatgctaagttgtctaagtgtgagttctggctgaaggaaatcaaattcttgggtcacacaatttctcaggatgggatatcagttgatcctgagaaggtgcaagaggtaatggattggaaacccccggctacagtaaggcagattcgaagttttctgggtttggcagggtattatcgatgatttattccggatttctctaggattgccaaaccaatgactgaactattgaagaaaggagtcaagtatgagtggagccaaaagtgtgaagatgcttttcataccttgaggcagcatttgacaacagccccagtgctggctcaacctgacaacaccaagccatttgaagtttattgtgatgcttctggtacaggattggggtgtgtcttgatgcaagagaacagagtcattgcttatgcttcccgagcactcaggccccatgagcagaactaccctacacatgatctagaattggcagctgtagttcatgctcttaagatatggagacactacttgatgggagctcactgtaacatctacactgatcacaagagtctcaagtacatcttcactcaggcagatctgaacatgaggcaaaggagatgattggagttaatcaaggactatgatttggaggtgcattaccaccctggtaaagccaatgttgtggcagatgctttgagcagaaaggcccagtgcaattgtatgaacatggatgtgggagttaccaccctgtgtgatgagttgtgcagattgaacctggaagttgtttcttcgggtgacctaagctatatctcggtggagcccacattgcaagaatagatagtcagggcacaggttgaggataagggtgttcaggttatcaaagatatgatcaagcaaaaggcagaaaaatacaagtgtttccgacaggacagcaagggaattctatggtttggagatcgattggttgttcccaaggaccctgagctcagaaagaagatactggatgaagctcacctttccaaattctccatgcaccttggtagcaacaagatgtaccatgatctcagatctctatattggtggaccagaatgaagagggaaattgccgagtacatatccgagtgtgacacctgccagagaatcaaggccagtcacttaaaggtagcaggccctttgcaaccccttcccataccatcttggaaatgggaggacatttgcatggattttatcgtaggattacccaatacctccaggcaccatgattctatttgggttattgtggacaggttgaccaagaccgctcatttcttgccagtacacaccacccacaagacagaaaagtatgcggaaatttacattgatcagatagtaagattgcatggtattccaaagaccattatatccgacagaggagcactgtttgtggcacgcttttgtgagaagctacaagaatcacttgggacacaagtaatccgaagctcagcataccatccacaaacagatggccagacagaaagggtgaatcagattttggaagacatgttgcgagcatgtgcactacactacggaaaggattgggacaagtgtctgtctttggcagagttttcttacaataacaactatcagtctagtctgaagatggcaccttttgaggcattatatgggagaaggtgtaggaccccactgaattggtctcaagcaggagagagggaaaattttgggccagatttggtacttgaagcagaggaaaaggtcagagttattacaaagaacttagaagctgctcaggctaggcaaaagagctatcatgacaagaggcggaagcctctacagtttgaggtgggagaccatgtttatcttaaggtatcacccaccaagggtgtccagagattcgggatcaagggcaagttagctcctcgctacatcggg

SEQ ID NO: 115064 - DNA, 1587 bp, Zea Mays
atgcatatcgacgcacactaccccaagtgctttgtctactacctcatactcggctcatggctcctctcctgtcttctccacttcgagtacttccacctctcgcgctcctcctttgcagcaccccgctccgctgctctgatcgtactgcccatcgcgccggatgcaagcttccttcccaccccgaccgtcgaggcttacaacaggcagcgatcaacatcgtcgtcggtggtagcgtcaccttcgcagtcgtcatcacaaccatggtgcgagggacggtatgtcttcatgctggacgtgccatcacgcttcgatatgctcagggactgtgttgccggctcgccattgttcgacgacatgtggagctggtgtgcaatcacggtcaatgctgggcttggccccaagattggccccgtcgccggcaatggcagcgacggcgacacagatatcatccctagcaccggctggtacagcacagaccagtactcgctggaggtgatcttccacaactggatgcggcggtacgagtgcctcaccgacgaccagacagcggcgacggcggtgtacgtaccgtactacccggcgctggagctgcaccagcacctgtgcgggttcaacaccacagtacgcgacggcccgtcggaggcgttcctacggtggctatcttcgcagcccacgtgggcggcgctcggcgggcgcgaccacttcatggtggccgccaagacaacgtggatgttccggcgggagccaggcggccgagacgaagggtgcggcaacaacttcctcggccagccggaggcccggaacattacggtgctcacctacgagtccaacatctgggcgccgcgggacatcgccgtgccgtacccgagctacttccacccgtcgtcggccggcgaggtggtcgcgtggcaggcgcgcgcgcgggccgcgccgcggccgttcctgtacgcgttcgcaggcgcgcggcgtatcaaggggcagctggccatccgcgaccgcgtcttcgacgtgtgcgaggccgcggcgcggcgcggccggtgcgggatggtggactgcagccatggccttgagggcagcatcacatgccggtcgccgcggaagctcgtctccctcttcacctcggcccgcttctgcctgcagccgcgcggggactccttcgcgcgccgctcgtccattgacagcgtcatggccggttgcatccctgtgttcttccaccggccgtccacgctcaaggcgcagtaccgctggcacgagccagagccgggtagaaccaacagcgacgaccgccggtactacgtgctcatcgactccaacgacgtgctggaagggagagtggacattgaggaggagctgagcaggtacacggatgacgaggtcaccgccatgagggaggaggtgatcaagatgatcccgagattcctgtacaaggaccccagggtgaggttcgagggggacatgagggacgcgttcgacatcatcattgacgagatgatagccaggatgaggaggataaaaaatggagagcaattgatatggaagggcgatggcgaggatagggatgaggatttgattgccagcgattcatga

SEQ ID NO: 115065 - DNA, 1119 bp, Zea Mays
ccaccggcagaccgagccgcgcctccattcttgtacgaaaccatggctcgcaaaaaggcaaccgtggagcagctccggacgctgaacaaggttcgtgaattcaagcgaaggagaaacatgcacaaggcagcaggagcaggaccgggcaacaagggagaaaatgtttgtgcaatttgtgacgatggtggtaatctaacttgctgcgaaggttgttgtcagaggtctttccaccttgataacgaacataattgcatcaagacacttgggctgactatacaagaggcaaagaacataatcgagaaggaagattttatatgcaagaactgccagtacaagcaacatcagtgtttcatttgtggatcgttagggtcttctgatgacactgacacatcgtcacagcaggtattccaatgtgagcatgacgattgtgcacgcttttaccacccaaaatgtgttgctcaaatgctatatccagatagccaagaactgttcgagctccacgtggctgccggagagagcttcacttgtcctatgcatgaatgtattgtgtgcaaggaagtagataataagaaagataagacgttattggattttgttaaccttttttacaggaagcatgagatcgtaagagaactacaaactcctgcaaggaatcatatcgtttttcctgaatccaatgtgctgaaaacgtttcaagctctttatgctcaaagagaggcgcctgaccactcgtcatcgaagcaaacccactcgtcccctccaccggctgcaagagaccagaatcagtgctactgttctagccctttatgctcatttgctccaagttccgtgttcatgcgtccgcatccaggctcctctggttggctcgatgactgactaactaattaactatacggcccatctgtcccctgtagagagaaaccacctgttacaagtccttttgcaaataattggatgtagacaagctagtgttagccaaacgacaaaatcctatttttttttaatataacctgatttttttattgttacagttactagcaaacatgtttctacgaacgagagaaaaaatattaaacattcactataaatgataatggaatggcacatattgattatcca

SEQ ID NO: 115066 - DNA, 684 bp, Zea Mays
ctccctcccctccccgcctcccgagtcccatccctctgcggatttagccctcccagtggctccgctcaactcaactcggaccactgagctctgaccactaactcaaccactctagatcacggcgggcactggtgcagcaatagcagcggggtccaagaaatgagctcgcggggtcccgacctggctgcgcccggggaggagcaggagacggcggaggagatgctggagcacgtccggggcatggtgccggcagcggtgacgcgggcggcgggcaggttcccaagccggtggaaggcaatcaccgtgaaactggacgcgctgccggcgtgcctgtccgacctgtccagccacccttgcttcgccaggaactcgctgtgccgagagctgctacagtgggtggccgccacgctggccgactcggccgagctcgcggcgcggtgctgggagccgccgacggacgagaagttgatggcgcagagcgccgtcgacgcgctctccaggaggctcgacctcggccttcgggactacgcgctgctcatcaagaccggcatcatgtcggacgccgccagtctgtcaccgccgccggaggaggcgccgtcgtgtcagaggagagtggacgccgccatcgcggccgcgaagaacgaggggagtcgaggtacggacgacgtcgtatgttgggggtga

SEQ ID NO: 115067 - DNA, 2076 bp, Zea Mays
atgaagggcggcggcggcacgacccgcacacggaagaagaacgacgacagcggactgctgaagaatggcgacacgatgcagacgacgcgccggcggtccgcgacggcggctgcagcaggggagatccgggacgccgtgacggaggatgggggagatgcttggaaacgccatggtgaaacgcttctgttcatcgacgtggaatctcgacctgcacaatcattaacttgtgtcagtagaaccagtctgcatgagatcgagttgtccatgtgtgctctttttagtgggatgatagttaatggtgcatgtttgcttctgagctggcatgcagagacactgctttctcttgaattcatccattgtcagctttatcctaccgtcatggataaaatttgcatgagtgtgtacctgaagggatctcaaagccatggaatccaacaatttagtattaagtcgtcacaaatctgtgaaaccaagcctctgaccatctcttctggtctgttcaaaattttgtcatctggtcgttgcacctgctgtcacttcgtgatattaagatgcagtcaccatttgctcggatgattattcacactcttctcgagtcgtcatgtgatttacacacacttgagatatcagaaaacaatgtgggttgacatgaaaaatatattcttaatttccttttacttattttctatctggtaaattggttgttttttgtagattgctggctggctttcggaattgaacaaatgttctacaaacttattagcgctgaaatcagatatttttatgaactccctgtctgttcttaacctgagggaaaataatttgcaaaaggatgatgttgtagatcttcacaaaattctaataaaaatgcctaacttaagagatttagatataagtggcaatccagtcatggatgaaggtatcagatcattgatccctttcatttcatggtctattcaaaaggaaaatccacttctgagattaacagttgagaactgtgagttgtccagtattggtgtgattatacttctggagtgcctcacaaatgcgaagcaactccttgatgtgctatctattgcagacaatcatctagggagttctgtggcagctgcattggccagattcttgggttcacatgtacgggctttaaatgctacagatatcggcttgggaacagtaggcttccaaatacttgaggaaacattgccaacagaagtagctctttcccacatcaacatcagtaagaatcgtggtgggatcagagcagcatattttgtttccagattaatatgtcgagcaccagaccttgtctcagtcaatgcagcagggaaccttttaccacctgaatcattggaagtcatctgtaactccttgaagcaagggacttgtaatttggagcgagtggacctgactggcaacatgcatttatcaagcaatatttttcctgcattccttgaattcaagaagcatggaaagccaattctggtagtaccaccaaacttgagcacttctgctccatatgatgatgacccatgactactatgtaccgtataagccctagtgctgctcaagtcacttcagttggaactaaataaatagtgatagtatttttttggatcattcccaagaatcctaaccactagatcaaaacacaacacaaattgtacatctgtttagattcgacacggctttcgtcggtgaagctttgcgctagggcagcgacggtcgggaaagcgagcttgatgtcgacggtggactttctgttgctgacagacttccctctagatcggttaaggtttgaggtggagatcgaaaatgattgtgaatcttgtacctttaggtgtcggcctccacctctttatttatagggctacgcaacagatgctcaacaaccttgatgctctcgatcagggcgtgaggtcaggggtctagttttcggttgggtcaagttgggtcaactagtggagatcaattctaacattttcccctttaatctcattttataccttcagctttatacctttaatttttttgatattccattatagataagtgcatagagcatgtttcatcgtc

SEQ ID NO: 115068 - DNA, 1975 bp, Zea Mays
ttttctacttctacagaagcatcccattagtattaatcacggggtattgatcatttatgtgtttctgaatagttttacttatatgcatttgtcatatcgatactttttttttgggaaaacgcaggagaactgcgcctcaatatattaagaagaagagataaatccagatcaaagagatctggacaaattacaaggcctcctcatgggggccagaaacacagcaaactgaaaaaatccatcaaactaaacaactccctagtctccaggaattagggcagcaaggtatgaaagacccttagccccagccatctcccaagactgcctctcctccctggctaaattaatggacagatctaaactaggagtacaaccatcaaaaacacaactattaccatcaaagacacaactgttaagtcatatcgatactttatagtccatttcaatgtgaaacatttaaacaccgttcaatccttacaattgttcaggtcgttgcacctgctgtcacttcgtgatattaagatgcagtcaccatttgctcggatgattattcacactcttctcgagtcgtcatgtgatttacacacacttgagatatcagaaaacaatgtgggttgacatgaaaaatatattcttaatttccttttacttattttctatctggtaaattggttgttttttgtagattgctggctggctttcggaattgaacaaatgttctacaaacttattagcgctgaaatcagatatttttatgaactccctgtctgttcttaacctgagggaaaataatttgcaaaaggatgatgttgtagatcttcacaaaattctaataaaaatgcctaacttaagagatttagatataagtggcaatccagtcatggatgaaggtatcagatcattgatccctttcatttcatggtctattcaaaaggaaaatccacttctgagattaacagttgagaactgtgagttgtccagtattggtgtgattatacttctggagtgcctcacaaatgcgaagcaactccttgatgtgctatctattgcagacaatcatctagggagttctgtggcagctgcattggccagattcttgggttcacatgtacgggctttaaatgctacagatatcggcttgggaacagtaggcttccaaatacttgaggaaacattgccaacagaagtagctctttcccacatcaacatcagaatcgtggtgggatcagagcagcatattttgtttccagattaatatgtcgagcaccagaccttgtctcagtcaatgcagcagggaaccttttaccacctgaatcattggaagtcatctgtaactccttgaagcaagggacttgtaatttggagcgagtggacctgactggcaacatgcatttatcaagcaatatttttcctgcattccttgaattcaagaagcatggaaagccaattctggtagtaccaccaaacttgagcacttctgctccatatgatgatgacccatgactactatgtaccgtataagccctagtgctgctcaagtcacttcagttggaactaaataaatagtgatagtatttttttggatcattcccaagaatcctaaccactagatcaaaacacaacacaaattgtacatctgtttagattcgacacggctttcgtcggtgaagctttgcgctagggcagcgacggtcgggaaagcgagcttgatgtcgacggtggactttctgttgctgacagacttccctctagatcggttaaggtttgaggtggagatcgaaaatgattgtgaatcttgtacctttaggtgtcggcctccacctctttatttatagggctacgcaacagatgctcaacaaccttgatgctctcgatcagggcgtgaggtcaggggtctagttttcggttgggtcaagttgggtcaactagtggagatcaattctaacattttcccctttaatctcattttataccttca

SEQ ID NO: 115069 - DNA, 938 bp, Zea Mays
gtggcgaccggcacatcaacatcagagagagggtggaacagacagagaaagagggactgtggtgtgcacatggaggagctctccaacaaggctctggcaccaagcttgctttcgctgtgcctggatgcggtagctgatcgtctcatcagcgacaacgccgccgcaggcggcggcgtgggccgaacgggttcgtcaggagggtgcagcggcggcggcggtctcgccggattctcggaagatgatggaggggaggcagacgaggaccgcctgcatccacaggagttggcggaggggcttccctgggagcttctccatcggctggcgtcccggctcccgcctgtcgtacttgagtcactccatcacgctgcacatgcccgatactgttctgctgaaactacttctggacttggagtgcaagatggagaaagacgtggggtgaaacgttcaaggtgtgaagatttcaacagcacttggcagttgttgttcaaacttcgctggcccctgggtggtaatactggacataataatttggtcactgtggattggcagcaaaagtattgggaaaagcatttacaagagtgtttaaatgaagctgcagaacatgcttttcttccttttttttgtgggagtattggtgagctgagtatatcagctaaaatcatgaattccatctaccagagcatgggcacatctcaacaacattcaagattagcatatcaatgcagcaaatttggttgctatgtgaggagcttgagactgcaaggtgttctttgcactgcagaaacttatgtcttgttgcaacaatgcaagctggaaagattaatgttcataagaattatatcagacctagaggtaatgttaagggtgtgtttggtaacgatctagattctcgtagaaacgttacaaatcttgattctctcaagaaacgtttctggtga

SEQ ID NO: 115070 - DNA, 447 bp, Zea Mays
atggccgtgggagggacttcggcgagctggagcgggatacggcctgggcgcgatgaagggagctgcgcgtccagagcgagcagggagagcaccgagcggaacagagagctccgggcagagagccagggcgcgaaggccagggaatccagggcgcggcgagccgaaaacttcgcgcgcggccatgggaaagcaggcacggcagggaggagacctcggctggtggagagctcggcaaactccatggcgagcagggaaatacgcaggcagagggagctctgtgagctgggatccggcgccgggggaggagagatggaaggagagggaagcaaggggagggcacaggaaagagccacggcttggagaggagcgctcggcgtggagataactatccaggagcagagcgacggccaggccttggttcatcacccgatcgctgtccaacaatga

SEQ ID NO: 115071 - DNA, 107 bp, Zea Mays
aatttatttaatcgaaaaatcatagatattttggatctcaattatcttagcgatgtatacgatgtagacagtaattgtgacacggtttgatttgatttaaacccgat

SEQ ID NO: 115072 - DNA, 2319 bp, Zea Mays
cagctttgacgatgagcttctgcctagcttagcattggtagtacatcctagtggtcacccaaaggttggtattgactgggacgcacttcaaattgttgagaggcaagatgaggaaggtaggatagaaattgttgacgatgacaaaatgtatgagttgatcgggttgagagctgaggatgaagctgctgagaaggctggtgaagctttcaagatgcaagaaggtgatgtcaatagaagttatagtgagaatgaaactattgatgcagccatccctgttgatgatgaaattccaaatgagagggtgatgttgcatgacccagacaagccttgtatggatattggaacaatgtaccctagcaagcgtgacttcaggctagctgtgagacagtgtgtgatcaatgaagagtttgagctagaaatatataaaactgatccgagtcaatttattggtaattgcaaaggagaaggttgcccttggcatattgtgggacgtaggcaacaatctgggaatagtgttatggtcactgtcttaattgaggaacacacttgtacttcgagtgcaagaaggaaaaccacgacccctactagcgcttgggtagcattaaaggttatccatctcctcaagaaggagtctaacatgggtccaaaggagctgcgcaaaaggttggaagaaaaatataagtgtgaaattcattatgacacggtttgggcatgggcatatggcagaccatacctcagcatagactcaactgccctcaatggtagatggaatgggcatatggctgcagccacgactattgatggtcataactggatgtatccacttgcatttggatacatagatggtgaaactgatgataattgggtatggttcatgagccaactgaaaaaggcaataggagatctttcattgctttttgtatgtacagatgcatgcaaagggttagaaaattcagtaaaacttgttttccctcaggctgaccaaagagaatgctttaggcatctcatgcagaattttgttaagaggtttggaggtgacatattctctaagatgtaccctacagctagggcatatagggcagaagtttcacaattcttttacaatcaagttgtggaagcttccccagatgtaaagaaatggctagatacttaccacatgctcaaatggaggaggagtcaccaacaatctagctgaagtcttcaacaactggattaaagattggaaggaccttccagttgttgggcttgtagacaagtgtagggagctgataatggtgttgtgggagaaaaggagaagaattggagaaaaacttaatgggaagatcttacctgctgttttacaacaactgaaggcaagaactagaggcctagggcatctaccagtgacaaaggctggttttttctctgcacatgttgaagacatcacaaacactcacaacagacatgtagtgaagtcatatttgcatgagtgtacatgcctagagtggcagcacactagcaaaccttgtccacatgcgttggctttgattatagcataggagagtgtggatgtggaattggaagattttgtgcatgagttctactcagtacaaaggttcaaaaaatgcatacaagagaataattgaaccactacctgataggtctcaatggccaacagtggatcttccctatgcgattgttgcaccacttaacaagagaggtaaaggaaggtataagaaactaagaattaagaattgtttggaaggtgggaatatcaaaggaaaaaaagtagctacagagaaaggcaaggaagctgacaagaatgcagtactagaagctgacatggagggttcaaaccaatctgagaaggggaaaaggaatatgattagaggcaaaagaaagtgcaaaagatgtggagaattaggtcacagtgaaactagctacaagtgcccattgaacagaacaaagaaaaggaagagaaagcctcacatgaatagaacaaagtatggggataatgccaaaatccccaaaactcgacttcaagaaagtgtccaaggtcaaggtgctgtccaaggtgaagctactatcgaacttgaaattgttcaagatcatggtgctatccaaagtgaagttgatgtccaacttgaagaagctatccaactcgaagtttctcttccgattacaccaacaagggagtctattttacaggacagcccaatcagagtcactaggagcaagcttgatatgttgctgggagatgtccagtcacctgccaagaatacaactcctaagaagatgctagtgaagaagctcacaccaaggaagctgaagagagtctaa

SEQ ID NO: 115073 - DNA, 2043 bp, Zea Mays
ctcaccagctcaaagctgctttagctagctagcaagagagagagagagagagaaaaaatatggctccactcgtcgctactgccacgatgaaccacgctgtggcccatctgctaggacccaatcatgagagtttctcacggcaccatctttcttcctcgctgcagcaaaacagtaagcgaaggtgtaatcttagcttcaggccacgagctgctgagagtcagaatggaagccaaacgctgagcccctcggaagtccctaaaagagactggttcccctctgacttcatctttggtgccgccacttcagcgtaccaaattgaaggtggatggaacgaggatggaaagaagccaagcacatgggatcacttctgccacactttcccagattggatagcggatcacagcaatggggatgttgcagcagattcgtaccacatgtacaaggaggatgtcagattactgaaggaaatagggatggactcctataggttctccatctcttggtccagaatactgccgaatggcacactcgaaggaggtattaatccatatggcatcaagtactacaaaaatctcatcaacttgttggtagagaacggcatagagccatttgtgacaattttccactgggacacgcctcaagcactggtagacaagtatggtggctttttagatgagaggattgtaaaagattacacagacttcgctaaggtgtgctttgagaacttcggtgataaagtaaacaattggttgacctttaatgagccccaaacgttttcttctttttcatacggaaccgggctatgcgccccagggcggtgcaccccaggacaaaaatgtgctaacccaattggaaactcgctcactgagccatacactgttggccataaccttctccgagcccacgctgaggctgttgatctttacaacaagtattacaagggtgagaatggacgcatagggcttgcatttgacgtaatgggtcgtgtcccatacgaaaagtcggcgtttacggatcaacaggccgaacaaaggtcctgggacattaacctaggatggttcttggagccggttgttcgtggtgactatcccttctccatgagatcattggcaagggaacgactacccttcttcactgacaaagagcaagagaagctagtgggttcctatgacatgttggggttaaactattatacctcaaggttctctaaaaacatcgatatctcaccaaactactcgccagtgctcaacactgacgacgcatatgccagtcaagaaacgaatgggcctgacgggaatcccattggtccttggatggggaattcgtggatctacctatatcctgaaggcctaaaggatctgcttatgatcatgaagaacaaatacggaaacccacccatctacatcactgagaacgggatgggtgacgttgaccatggcgatctacccatggaagttgccttggatgaccacaaaagagtacattacctccagcgccacatcgcaactcttaaggagtcaagagacttgggagcgaatgtgcagggctacttcgcttggtctctattggacaacttcgaatggttctccggctacacggaacgttacggcatcgtctatgttgaccgcaacgatggctgcaaacgctacatgaagcggtcagccaagtggttcaaagagttcaatgctgcgaagaaagcggctgccaagaagattcttacgccagcttagaaatcgttgggcctgatgtatggtatggtgccacgcatgaaagaccgggcacgtttttctttgcactatctgaggaggcagcatctgttctctccagcaccgtggattgttcccgccagttcagtatttccttattatgcaataaatgaagtgatcgatttccccttttcagtatcatgtaatgttgaattattatagaatatatctttttttttgtcaaacattgggaacaaaagctgctaactctaccatcaccggacgatgtgacgtgatacatatatatgtgcttcgacatatcatcatgtgcggtata

SEQ ID NO: 115074 - DNA, 1759 bp, Zea Mays
atggatcggttcgggaactacaagaactaccagacaaggcgctatgaggatggagacgacgatgcaaagcaaatgctgaggccctgggaagtccccaaaggagactggttcccctctgacttcatcgttggcgctgccacttcagcataccagattgaaggtggttggaatgaaggtggaaaggggccaagcacatgggatcacttctgccacagttttccatctttgatagcggacgggagcaatggggacgttgcagcaaattcataccacatgtaccatgaggatgtaaggttgatgaaggaaatagggttggatgcctataggttctccgtctcttggtccagaatactgccaaaggggacgctcgaaggaggtattaatcaggatggcatcaactactacaaaaaactcatcaacttgttgctagcggagggcatagagccatttataacaattttccactgggacacgcctcaagcactggtagacaagtacggtggctttttagatcggaggattgtaaaagattacacagatttcgctatggtgtgcttcgagaacttcggtgacaaagtgaaaaattggttgacatttaacgagccccaaacgttttcttctttttcctatggaatcgggttgtgtgccccagggcggtgctccccaggacaaaaatgtgctaacccaattggaaactcacttatcgagccatacattgttggtcacaaccttctcctagcccatgctgaggctgttgatctttacaacaagcattacaaggatgagaacggacgtatagggattgcatttgatgtaatgggtcgagtgccatacgaaaagtcagcgtttgtggatcaacaggcacaagaaaggtcctgggacattaacctaggatggttcttggagccattggttcgtggtgactaccccttctccatgagatcgttggtgagggatcgactacccttcttcaccgtcgaagagcaagaaaggctagtgggttcctatgacatgctggggttaaactactataccgcaaggttctccaaacacattgatatctctccaaactactcaccggcgctcaacactgacgatgcctatgctagccaagaaacgtatgggcctgacgacaaacccattggtccttggatggggaatccgtggatctacatgtaccctgatggcctaaaggatctccttatgatcatgaagaacaaatacggaaacccacccatctacatcactgagaatgggatgggtgacgttgacaatggcgacctacccatggaagatgccttgaatgaccagaaaaggataaattacctccagcgccacatcgcagttattaaggactcaatggaattgggggcagatgtgcggggctacttcgcttggtctctggtggacaactttgaatggaccgcgggctacaccgaacgttacggcatagtctacgttgaccgtaatgacggctacaaacgctacatgaagaagtcagccaagtggttgaaagagttcaacactgagaaggctggcagcgcctaatgatgtgccatgcataaaagaccgggtctgtgtgatttgaattctatatttttatttgcacctccacaggaggtagtggagtcatgttctccaacaccgtatattgttccagttcactgttaccgtattatgtaataaatgaagtgatcaatttctctgtttcaatatctgtaatgttgaattggatgatatcttatttttctcaactggc

SEQ ID NO: 115075 - DNA, 2391 bp, Zea Mays
ttccaccactcacaccttacaagatcatgtgaagaacacattaagataaaacgcatggagcagaaacgatactgtattttgaaacggaagtagcagaatgtaaggtgattctagtaacaagcgagctaaacgatactgtattttgaaacggaagtagcagaatgcatgcaaacgtgattccggccggggaagcaacggaagaaatccaaaaatggcaaaactagaacgaaagacccggcgaggaaagctagagagtctgtctgtttctcaaaaccatcgaccacgacagcgccattttcctcaatctctctcctccgatcctctcttgccctagggagagagaggaagagagagatcgatatatatatccgggccgtccatccagggagcgctaccgtggtggtcgtcgtccgcagccacgcgtggcggccgcgacgatgggcaactgctgcgtgtctcggccgtcgtcaggcaagcggcggggtgcctgccgcggtggcgccggcgggccgaaccgtggcgggcgcctgggcggcgccaacgtgcggtccagctccacgctgtcctccatctccgccactgccgcgacgcaggcttggtcgccgctgaccgtgctggggaagggcctcgccgcggaggtgagcgccgaggagctcctccggcggtaccagctcggcgaggagctggggcgcggcgagttcggcgtgacgcggcggtgcacggacacggcctcgggcgaggtggtcgcgtgcaagtccatcagcaagcgcaagttgcgcagcagcgtggacatcgaggacgtgaggcgcgaggcggccatcatgcggtcgctgcccgagcaccccaacgtcgtgcgcctgcgagaggccttcgaggacggcgacaccgtgcacctcgtcatggaggtctgcgagggcggcgagctctttgaccgcatcgtctcgcgcggccactacaccgagcgcgcggccgccggcgtcatgcgcaccatcatggaagttgtcctgcattgccacaagcatggcgtcatgcaccgggacctcaagcctgagaacttcctgtatgccaacacatctgagacctcccctctcaaggtcatcgactttggcctctctgtgtgcttcaaaccaggtgacaggttcagtgagatcgttggatccccctactacatggctcctgaagtcctcaagaggaactatggtaaagaaatagatatatggagtgcaggagtcatactctacatcttgctatgtggcgtcccaccattctgggcagagactgatgagggcatagcgcaggctataatccggtccaacatcgacttccagagagagccatggccaaaggtgtcggaaaatgcgaaggatcttgtgaggaagatgcttgacccgagcccctactctcggctgactgcccagcaggttctagaacatccttggatacagaacgccagtgcagctcccaacatcccactcggagaagcagtgaggtccaggctgaagcaattcactgtcatgaacaagttcaagaagaaggccctgcttgtggttgcagagtacctaccagccgaagagctggaagcaatcagggagttgtttcacatgctggacaccaacaaggatgggcacctgacaatcgaagagctcaggaagggactgcgactgataggacacaacgtccatgacacagatgtggatatgctcatggaagctacatggacggcaatgggaccctggactgcaaggagttcgtgacagtctccattcatctgaagaagatccgtagcgaggaccacctgcccaaggtgttcagctacttcgacaagaacgggagcgggtacatcgagatcgaggagttgaaggaggccctctctccgagaggtgaccagaaggcaatcgacgacataatcctagatgtcgacaaggacaaggacgggaagataagctacgaggagttcgagctgatgatgaaagctggaatggactggaggaacacgtcgcggcagtactcgagagcggtttacaacaccctcagccgcaagatgttcaaggatgtctccctgaagcttgacgctaacaatggcccacttgctgcagcagccgtcgttgtcaaagaacaagcggttgactgagtcatgtcgtctctactacctgcaaactcaactaaaacagagaatgcgagaactgtacccagttttcagtgttttgtgtataggtcgccacattttggcaagcaaatgtatcagggcgggtcaattgacttagtttcaggtgcaaaatgccaatgctctccgagaactacacgcttactctttctcataaaacaacaaaacaagatgctgttatgggaattgtggctctggtgaaaataaagaaacgactacatcttcag

SEQ ID NO: 115076 - DNA, 285 bp, Zea Mays
ccgatggacttcatgccggcggaggcctcgctgtagaagaactcgagcaggccgacgaaggaggtgacgtccatcacgcccagcaggaagaactgcggcgtgagccagaacacggacatctcggcggcggcggcgccgccctcggccctgcggcggccctcgactgcggcagccacggcgagcgccacgacgttggacgcgaacccgacgccgatccgctgcaggtgcgtgacgccgcccgcgtaccctgtggcgcggcgcagccacggcacgacggcgcggtcg

SEQ ID NO: 115077 - DNA, 510 bp, Zea Mays
aggcttcaaccgtgggggtgtgttttcaaaggtccaactgtttctgcatttccatatgcaccacgacatggttacgatggcttccattttccaaggacggggcatgcgcattctgattgttagagaagccaaaggtatgttggagatgtggagaggcgtgaccctaatcagatgccagcaccttcgactgtagctgcacctcaggaatagggatctagtgttgagcttgtctttgagcaggagccagaagaagacttttttgcttcggctggtacttagatttctacatccatttgtagatcgggtgagcctgcacaccccctgtcatgtgtttgtaagagcgctgggatgaatatttgagtacctctctccaatatgtccacttgtctagctgcccatgggtgtggtgttcgtgtaatgtactggtaagcatttgatattgctgataagcctcattggatatagaggcctggaacatctcatggggtgatagcatcattgcctgtttta

SEQ ID NO: 115078 - DNA, 1205 bp, Zea Mays
atggccgaggatggtgccgacgacgggcaagggatctacgacccgttccttgtgccgaacgacgacttcgatgacgacgtcctgtacttgctagacatgaacgacggcggcggcatggacccgcggccgctgcagggagcagcgacgcaaagcgccatcgtcgtcgcaggtccttccggcgacgacaataataatctcctagagtggccaccgacgtcgacgctggactccgtcgtcgtcgacaacagcgctcctacgcacaacgccgtgcttgccagcgatcctactactactgctacaagcggcgtgcaagacgacgccggcgctgcagggcttcaagcaacaaagttgggtatccatggggtcgccgccggcgtgttccaccatgcaaccctagagttgtatcgcatagactccaacggcctggcagcgacaatgacaacacaactgacgcatcagtcctacgtggattttagtggccgggactacgtgtgggtgaagcactacctgacggactacgcccggcagcgtgctgccggcggctacatggtcctggacgactctatctcagcgttccaggatgccctgtgcaccagcatggtctgcgctggtcacgcccgtgaagcggtagcactagagattaatggcggccgtcctgctggtgatgacggcggcggcgttgtgcgggcaccagcagctatggtcgaggaaagcagcgtgccggcagttgcagggccgtctaaagcagttgataataaggagcaaggacgacgacgaccagagattcgcccggctgccaagactgtactcgcggtccagagggagagagcgagcaatcttcagctggacgatattgcgcgctacttccacctgccgatggtggaggccgccaaggaactctgcatctgtgccactgtcctcaagggcaccagccgtaaattccatatacgacgctggccttaccggaagattaagagcattgatagtcagatcgctaagctgacaaggggcaatggcggcccagcagccatggcggagatagagaggctcaccgattacaggagaagaatttacgccggtctggaatgaaacaccgtgcgcatcaattttacaccggaaataatacttttatcgccgcagctcgttgtgtcttgtacacttgtactcggtagcaaaaaaaaaaaaattcattttctttctggaag

SEQ ID NO: 115079 - DNA, 612 bp, Zea Mays
ggaacatctagcgaggaggaagatgctactcaaaaccacttgagtttggtgaacaaagatgagaaccagcaaactatggctgacctatttcaagaagtttttaatccaacaaacatggatggtgccatgaaatcaatgagatcaacaggagctggtaactatggaagaatgcaacagattatgcagatggagaaagattggcatgtggaattcttgagacagtatagcagagagcacaattattcaggaatagtttactactctaatgctcattctattaacattgacaaaaatatatatcacttgaagacagggcggcgacttcaccgggacaacgacactggcggcgagtccatctacggcgccaggttcgccgacgagaacttcaagctacgccacacggggcccagcgtgctctccatggccaacgcagggcccgacaccaatggctcccagttcttaatctgcaccgtgcagacgccctggcttgacggcaagcacgtcgtcttcggcaaggtcgtcgatggctatgccgtcgtggacaagatggaggctgtcggttctcagtcatgtgccacggtcgagaccatacgcatcgaggactgcggctag

SEQ ID NO: 115080 - DNA, 867 bp, Zea Mays
gtatataaatagacccgtggtgtggtggtggccagccacgaccggccatgaccaccgagttcctcagggtgaagaagttccaccaggacgaggccgcccggagccggagactgatagagctgcagccggagctgtcgctcggcccagtgtggccgggcttggcaaccggtggtggcctggcagccaagagctcctcgatcgagtctcatggaagcccccggaagaagaggaagaactatacggcggccagctgggactgggaggtgcatcagcagccgcccgcgagcctggatctccagctcaaccaccccctgcctctcgactgggaacagtgcctcgacctccaatctgggaggatgtattacctgaacaggaagacgctgaagaagagctgggttcgaccccgggagcagagcctgaataacgtggacctcaacatctccacagctcccgacgaggatgagccagggaaacccgctggcaccttgttctctggaggcaacatggtggccgtgccgtgcgccaactgtcacctcctagtcatgctctgcatgtcctccccgtcctgccccaactgcaagttcgtgcagccgctgccaccttctgttgtgccgcctgcctatccgaggctcggtgccgccgtcaagccgctggagaccctcagccttctccattaggcgcatgcacgcgcgctccactggcagaagcttgtagaaaggaggaaaccatagttgagttgtgtggtgcatgggttagtattactattacctgggtaatgggtgtatgaatgtgaaatcatgcatgcatataaaaaggggtacggtcggttgcacgaatcaaacaaatcaatcaaatctactttatttc

SEQ ID NO: 115081 - DNA, 205 bp, Zea Mays
taagtcatgccgcctgatggacagaggcgtcagctttttatgtatcattcagatcccccatttctttatctgttcaggtcatgcacagcaagggctggatatgttcttgttacctgctaattgcctgaaggaaccgccagacgttagctccctgcctctcgtcaagtaaacttctgcaggcttggacaatctctgactcaggatc

SEQ ID NO: 115082 - DNA, 1784 bp, Zea Mays
tccagtcgcgagccgcagctgcgcgtcgcgtcgcatcgcacgcatctctcctgccctccagctccaaagcttcgtcgtctgcgtcgccccgcgccccgtcttgctcgctccaagctagacaccataccacccagatcccgaggcccctctccctcgatcgccgcctcccggtagcggatccggcgccggctcgcgccccccgacaggttttgttttatgcttgttcatttgtctatggacaatggactagttgctgcactgcttttgtgagtcaccatgggaagcagtggagcagatacatcgtctaagccaaacaaggcatccgccccacaggagcagcaacaacctgctacctcaggtgctgcaacaccggctgtttatccagactggtccagcttccaggcatatcctccaatcccaccacatgggttcttcccctcacctgtggcatcaagtccacagggtcatccttacatgtggggagctcagcctatgattccaccatatggagcaccgccatatgtcatgtaccctcctggagtgtatgcacacccatctatggcctcgggtgcacatccatttactccttatgccattacttctccaaatggcaatgctgatgctactggaactactgctgtagcttgtgatactgatggcaagccctctgaaggcaaagataaaagtccaactaagagacccaaaggaactttgggcagcttgaacatgcttactggaaagaaccccagtgaacatggtaagacctcaggtgcatcagctaatggagccacttctcaaagtggcgaaagtggcagtgacagttcaagcgaagggagtgaaggaaattctcataatgattcatacaagcatagtggacaggaacaagatggagacgtacgaagttcccagaatggtgcatcacgttctccatctgagggaaaatttaaccaagctatggcaatcatgcccatgccatcaagtggcccagtaactggtccaactacaaacctgaatattgggatggactattgggccaacacagcaagctctgctcctgtaattcatggcaaagtgaccccaacaacagttccaggggctgtggtcccagcagagcaatggatacaggatgaacgtgaactcaaaaggcaaaaaagaaaacagtctaatagggagtctgcacgcagatctaggttgcgtaaacaggctgaatgtgaggagttggctcaacgtgctgatgttttaaagcaggaaaatgcttcacttagagatgaagtaaaccgtatcagaaaagagtatgaggaacttctatcaaagaataattcactaaaggaaaaacttgaaggcaaacaacacaaaactgatgaggcaggacttaacaacaagctgcaacattctggcaatgacatccagaaaaaaggaaactaatcgagctatcatgcaatgcttgcatagcatggccctaactagattattgggaggcgcaattgtagtatgcgtgttaactccttactttattgcagttaattgttaccaggttgtgataatgttgatgccaaccttgtgtgtgggtgtttcctgtttcagatctatcttggcttatcttttagaagtcaagatgtgactgaagatgtaggctgtgacccagttcactgtatctgaaatagtggataaactcaaatttacaatttgtattgctgactaatattgttatgtatacctggcaaaaggttttctttgaattcagtctctggttgaacattttgctggtctaccactgctgcata

SEQ ID NO: 115083 - DNA, 1873 bp, Zea Mays
acagcactccacctcactgctccagtcgcgagccgcagctgcgcgtcgcgtcgcatcgcacgcatctctcctgccctccagctccaaagcttcgtcgtctgcgtcgccccgcgccccgtcttgctcgctccaagctagacaccataccacccaggtgacttcgcgcgccactccttccttccctccctttccccacagctttactctcccctcccgtgtccagatcccgaggcccctctccctcgatcgccgcctcccggtagcggatccggcgccggctcgcgccccccgacaggttttgttttatgcttgttcatttgtctatggacaatggactagttgctgcactgcttttgtgagtcaccatgggaagcagtggagcagatacatcgtctaagccaaacaaggcatccgccccacaggagcagcaacaacctgctacctcaggtgctgcaacaccggctgtttatccagactggtccagcttccaggcatatcctccaatcccaccacatgggttcttcccctcacctgtggcatcaagtccacagggtcatccttacatgtggggagctcagcctatgattccaccatatggagcaccgccatatgtcatgtaccctcctggagtgtatgcacacccatctatggcctcgggtgcacatccatttactccttatgccattacttctccaaatggcaatgctgatgctactggaactactgctgtagcttgtgatactgatggcaagccctctgaaggcaaagataaaagtccaactaagagacccaaaggaactttgggcagcttgaacatgcttactggaaagaaccccagtgaacatggtaagacctcaggtgcatcagctaatggagccacttctcaaagtggcgaaagtggcagtgacagttcaagcgaagggagtgaaggaaattctcataatgattcatacaagcatagtggacaggaacaagatggagacgtacgaagttcccagaatggtgcatcacgttctccatctgagggaaaatttaaccaagctatggcaatcatgcccatgccatcaagtggcccagtaactggtccaactacaaacctgaatattgggatggactattgggccaacacagcaagctctgctcctgtaattcatggcaaagtgaccccaacaacagttccaggggctgtggtcccagcagagcaatggatacaggatgaacgtgaactcaaaaggcaaaaaagaaaacagtctaatagggagtctgcacgcagatctaggttgcgtaaacaggctgaatgtgaggagttggctcaacgtgctgatgttttaaagcaggaaaatgcttcacttagagatgaagtaaaccgtatcagaaaagagtatgaggaacttctatcaaagaataattcactaaaggaaaaacttgaaggcaaacaacacaaaactgatgaggcaggacttaacaacaagctgcaacattctggcaatgacatccagaaaaaaggaaactaatcgagctatcatgcaatgcttgcatagcatggccctaactagattattgggaggcgcaattgtagtatgcgtgttaactccttactttattgcagttaattgttaccaggttgtgataatgttgatgccaaccttgtgtgtgggtgtttcctgtttcagatctatcttggcttatcttttagaagtcaagatgtgactgaagatgtaggctgtgacccagttcactgtatctgaaatagtggataaactcaaatttacaatttgtattgctgactaatattgttatgtatacctggcaaaaggttttctttgaattcagtctctggttgaacattttgctggtctaccactgctgcata

SEQ ID NO: 115084 - DNA, 84 bp, Zea Mays
ccaaaattctcataaatacacaactgacattaaatcacatgcatgtacacaaagatataggaaagcatgaaattcacacagtac

SEQ ID NO: 115085 - DNA, 924 bp, Zea Mays
atagctaccgcaatgagttatcaccttaatcagggtacgcagtgagttatcaccttaatcagaataaaattgaaacctccaaggatgccaaacttgtactcacaactgaaagccttaagcatgggctcaacatgctccaaagcatgcaaaatggtaacaagagctccaaaaactcactgaaggatgttgtcacagagaatgagtttgagaaaaggcttttggcagatgttatacctccaaatgacattggagttacctttgatgatattggagccttggagaatgtaaaggacacgttaaaggagctggtgatgctccctttgcaaagacctgagttgttctgcaaagggcagttaacaaagccttgcaaggggatattgcttttcggatctcctggcactggaaaaactatgcttgccaaagcagtagcaactaaagtaggcgctaatttcatcaatatatcaatgtcgagcattacatgtaagtggtttggtgaaggggagaagtatgtaaaggctattttctcactagcaagtaaaatagcacccagtgttatattttattgatgaggtatgcaagcacacaagttttactttagtaaccactaccttgctgatgcatgaacaagacgacaggttagactttgtcgaaaccctcttcaacagtggaggtatcgaccatcactcttcattgtaaccccgatggtgatcggcgaccgtgagcttccatgttattgtgttctgatacttgagactttttattatgactatgtatgagatattgtctcttattagtactggatgatgagatgtgtcttattatgactatggatgagactttttgtgatgtaattgatgagactatggatttaaatattgttatgtgattgtgtgtgagatgttttatatgaaaatatgatgtgct

SEQ ID NO: 115086 - DNA, 1185 bp, Zea Mays
tttgcatgcttgcttgatcaagtgagccaatacttaactgaagggcttgaccgtgctagagagagtttaaatgaggccgcagctttgcgggatagatatgtcatcgggacaagtgttagtaggagagtggcagctgctgctgcttctgcacaagaggtggcagcttcagctggtgagagcagctttagatcctttatgattgctgtgcagcgttgtaccagtagcgtagctattcttcagcagtacttctcaaataccatatctcggctcttgctacctgttgatggtgctcatccgtctgcttgtgaagatatggggtcagcagtatcagtagttgaggctgctgctcacaaaggactgctacaatgtattgatactgttatgtctgaggttgaaagattgttgtcttcggaacagaaggctacagattatcgaacaccagatgatggagctgcaccagatcatcggccaactaatgcttgtataagaattgtagcctatctctctcgtgttcttgaggttgcattcagtgcccttgaaggcctcaacaaacagtcctttttgactgagctgggaaatcgcttgcataaggggctgcttaatcattggcagaagttcacatttagtcccagtggtggcctacggttgaaacgtgacataactgaatatggggatttcgttcgtagcttcaatgccccctccatagatgagaagttcgaactgttgggaattgtggcgaacgtcttcattgttgctccagaaagtttagcatccctgtttgaaggaacccccagcatccgaaaggatgccttgaggttcattcagctccgggatgattataagacagcgaaaatcgcttcgatgctcaactatatcatgtccgagtaatgagtgaagtggaaccgttagaccgttacactttgctgctctcgtggactattgatgccgtttgtataaatgaccttcgaaattatgtttattcttggttccaatttatttgttttcctatcctttttctttttgggctttgctcaatttgagctgtacatgtggttcaggtcctttagacctctacttgtataaatgatgagaaatttctgtggctgtttacgtgcgaaaatttacgcaaacgctgtctgatcttttgaaatggaaaatctggagaaacgggaatacactaataaa

SEQ ID NO: 115087 - DNA, 699 bp, Zea Mays
atttttatgctatattgattacagttcaaccggggaaccagtgctatgcaacactatgttgcaatacgaccaatgtttattgatgtggaaatcatgaacactgatattcaagttgttctgggtgatgaggggttgcaagctgattgcgacagtattgcagatggtctctctacattgtataaggaaattgcagatactgtgaggaaagaggcagctacaataacggctgtctttccttctccgaatgaggtcatggcaattcttgtccagcgagtgctagaacaaagggtaacgaccattcttgacagaattatagtaaagccctctcttgctagtttgcctcctctcgaaggaggccttctacaatacctaagaattctggcagttgcatatgacaaaacaaaagaactggctaaggatttgcagtctattggttgtggggatttggatattgaagctgcaacaatcgttgaccttcttcgccacatggtcgggccttcttgggcggccatcaccgccgacgcccatgcaccaggcgcggttgcgtggctacccacgctccccaacgccggcgacctcctttttgttcatgctatcacggacgtcatccccggtgacacgctcctcccttccatccttggcatcaccctccttactggcgtcgcggacgacctccccgacgtcccctccctcccctag

SEQ ID NO: 115088 - DNA, 453 bp, Zea Mays
ttctccgacaagggaagggaaccccagatctccgccgccccgccagccgctatgccgactgccgccaaccccgccgccgcgctgcccctcaccctcgacctcgaggacttcaagggagacttctcattcgacgctctgtttgggggactggtggacgagctgctcccggagtaccgcggggaggacgacgccgcgcccgcgccacctcctccgccgcccgtgctcggggcggccccgcccgtcttccccgctgtcgacgagcttcttgggctgttcaagcactcatgcaaggagctcgtcgacctccgtaggcagattgataagcggctccagaatcttaagaaggaggtggcggtgcaggatgccaagcatcgcaagacgctaggggaggttagttataatgctcgcaggattttatatttgtcaccgattactgcagagatattgttgtag

SEQ ID NO: 115089 - DNA, 3438 bp, Zea Mays
atggtgacctactggctacttttgttggtactgctttggatgggtagaaaaaagttattaactcctcctgaaactccactttttcgatctttggatgacgaagaaaaccaatccatcactcaggtttctaggggcagagctcagagcaagcctatacaaatttcaagatcatccatggtagataataatcaaagagctagtagaagcagtgcaagctcaagtaggcttagcccatcgccatgctctatgggaaggacaagatcatctagttcagcttctcgctctagtccaccacttgctgaaacacaaacaccatcacgaagattgtcaacccctccgattgctaagacattaacacctcctcgaaggtctccaagtcctgtctcaagaaggatgagtactggttcaagtggcccaactttgaatggaacaagaggagcttcaccagtgaaatctaatcacaggtcttcttcaccaaagctgcatggatggcaatcaaatgttcctggtttctctttcgatgcgcctttgaaccttcgcacatctctaactgatcgtccagtatgccggtcaaggggtggatcgccttcatcttttagtggactagaaaagggttcaagaggtagaagactgtcaatgtctcccactccacctagaagagccagttcatctcacagcattgaacgggaccgaatgagctcttatagcaaagcttctgcaacatcatctggtgaggatgatctggagtctatgcagtctgtaccaattagctactccagtagcccagttgtgaaaaagagcttggttgtgatgaaaaccagaaccattgcatcatcaaagaatctgtccaaaaaattgacacctagttctgtcccaaagcggtcatttgactctgcactttggttaatggatcatcgcaaagctccacaagataggtttcggccacttctatcaggtgcccctgccaacacatttggtgctgggaatggaaatgatgtgcacaaacctatgttctcacacaattcttctttgacaactagcagcactgcaagctcttaccatggtgccacttttggctcttatatgcatggcagccaagaacaacatgattttgctggtgaatgggaagcagatgatatttctcagggtcatgaggatatatttatgtttgataaattggatgagctaaatgaagacattcattacaagagcatggaatctacggataattcactggtaatagtaaaacatctagtaagtggcagacaggacttggaaggaagcagaagacctaatcagtccttatgccattctactgatatttctcatgttagctttaaggctacttgctctagatgtgggaagtttttcgatgcgatggatgttgatgaagagggtgtctattgtgatgcatgtgctacaaaggatgggaatatcctcaccagtcctattgtacaaactataggagaagaaaaccaacaatatggtaaaactgcaaatttgaaaccttgcatcgcatctgattctcctgtacccacagattgtgaaatctatagcaaagaagtatctcttgatcatcaactagtgaacaatgaatcttacgctgattgcctggaccaggcccctccaattcactcaatggggcacacacctcaggaaatgctactggggcaggaggaaaacattgacgctgagcatagaaataaacatgttggggattcgttaggaaatacaaacgataattcctttcatcgatctagtgtggatgaatgtgaacaaacagaaccaacatctgtagggcaggacctttttatcatagaccaaatgaataaccataatcgtggactatcccaatgtaatgaaaatgtctctgaatctgtgacctgtgacaattctcatcaactgggatcaactacatatcagaaccctaagcttgaaactaccgaggatactgggatatcagtattgttagtccctaagcccaacagtaataaatggccaaatatgctctgttcagaaccctattatgcaagagatggtgtcagtatgatgaagcgtagctttggactgggcagctcttcagctgcttcttccagtgatcttgggtcttcaagacagtcaatcatatgttttgagcgccttaggagtggtaagaagggtgactttgagaagtcccagataagcagtactattagttgtcaaagcattgcttctgtgtcagatatgtcaatttgtagctcttcagcttcactttgccctcagagtgatgcagtaggagattcctgtttcccaattgacactttggaaagcggcacttcaggaactctgatctcttctcaagaaaatgatgatgctttttgtaaggatactttgccaagtgctatggaatgtccgtcttcttcacagtttattgctgatgatgacagtcccggtgacatgaaaatccagagctacttaagtgaggtaggatatacaacagttgagaaccatagtgcttgcagaatgactgacatggattgtaccagtacaaatatgtattctttagatactgaaatgccaagtgataccctagaatcatcaggcccagtggaaagtagcatgcctgaaactgaagaggatgcttacactatcagtcagtgtaataaaggtagtgctccagaacattcaagtgatgagaataactttgataatattcaaatgcagtctgaaatagttcagggttcagcggaggaaaacagattggatgattgttgcatgtctgctatctcggaggaggacgtattgatttctggacaagaagatgacataaggaatcttcccaatgatgaagaattatgtgcggaggtagaaggaccaaggaaacaaatccagagatgttttacattggaagaagctgctgatacaattctcttctgtagttccattgtccacgaccttgcatacaaggctgcgactattgcgttggaaaacaagaaggaaccaaagtttgtggactctattcgtccaactgttgcaattgttagaggatcttttgctaaggaagagagtttaccaaagctgcctcacagacgaaccccaaaccgtaaggtcaaaaggaaaagattggaaggcgaaacaactacaacggaaactacagagaaagacgttgtcgcgaatgactccccccctgtatgttctgcatcgggtattacaaggaattccgataatatgaagccgccaaagctggagtccaagtgcaactgtataattatgtaactcggtcacatccaagattgaaattcctacatgcttggttaaccccgtcatcagcagcgatggagttcagcacaatggatcttccgctagattattttgcaaaggtgcatttgctgtgttttaggtgacagaatgcactgccagctgctattcttttgtaaagtcttttcttctcttttctgc

SEQ ID NO: 115090 - DNA, 366 bp, Zea Mays
atggctgctagatttcaaaagaggtgtgaagaggagaccaaaggttatgatccattggtgttggatgagtttgattgggacaatgaatgggttaatgcatcatctaatcaaaccaatgatattgaaggtcgtaacttccctaggagagctcatggtcaaccattatactacacaaggaaggcccgacaagtggaggatcaggaagactcagaagaggatggtgattcaagtatgggagaaggggatgagcatgagatcgaaacacttcatgatatcgcaaaacacaaccacaatctagatccgtcaaaatatggagatgttttccatgtggcgttgcttaagaagtatgaaaggaaaggctcctga

SEQ ID NO: 115091 - DNA, 1916 bp, Zea Mays
cccctctaaagttttgctctggccaaacacgtcaatagtagagattttggactacgattcgtgcaaaacactaaaaaagaaaaggccatcgaaaacgccgccgccgcctctgatgctttccgccgtgcgatgtggtgcccttcgccggtggcgcccgccgccgcacctcctcccacgcatcctttcctcctcctttggtacatctcccgcgcgaccacaggtgggggcgctgctggagctcccggaggtggagaaggtactgcgcgacgtacgagcgggtgacgtgcgcgtattccccgtcggcgagagcggtctgcacggcggggcctgcgccgactacatggtcgtcgccacaggccgctccgattggcacgtccgtaacatcgcgcaggcgctcctctacaagataaagcaaaagcagaagggctctgatagaatattgatgccaagtgtagaaggtcagcaagcgggaaaatgggttgtcattgattctggtaatctgagcatctcatattttcgtccttctcactttgtgatttgattatggcaatttatttggtaaagctgtgacattgaaaataatcttttttctcgaaccacgcaggagagtagcacgtcatttcattaagaaaacaaagtcaaggtcctgggagaaaagaatcccccatggccaaacagtacaacaccaccacccttacacaaacacaaaggaaaacaaccgaccatgacctctaagagtcaacccttaggactaaatcctagagggctttagcccccgccaaacaccacaagtgtccctcggtcgctacagcctggacaaccaactgtgcatttggcctgatattctaaaaaatgcaggcattcctgtgcttccacagctcccaggacactagaatcaccggggagttaaaaccttttcgcatttccttgggaagggagctagcagccctaacccaccacgagttcaagcgactgtcatgttcaggtggcctcacaacatgattaaacctttgcagcaccaaggtccataccttcctggccaacacataggaagagaggacatggttgattgattcagtagcctggtcacacaaggggcaagccgactgatgggacaacccctttttggccggcgatccaaggtccaacatcggttattgagggccagcggccagccacataaaaaacttgcactttccaggagcccaaaccttccacactcgcttccaagggtagaatttgatggtgccaatgaacatagtttcataagcagatttgctgctatatagcagcccgaagaagaaagcctccaaacaagagtatctggggtgtcgggctggattatcacctcctccagcagctcccagatgtggagatattcaaacagcacctggaccgtgagagcacccttgatattggagacccaacttctgttgtgaacagcctgactcactgtacgccttttagccactagtttggggattgcacggaagaggttaggggccatatctgccactctcttaccatgcagccaccgatctgtccagaatttagtgttctcaccattgcccacaatgactttagttgccatgtcaaacaaggccctagcctgccacgggatctgtacattgagaccagcccacggtctcgaggtgtctgttttcatgaaccagagccaacgtatgcgtagcgcccagcccaatcgctccagatcacggaccccaaggccaccgtacagcaacggcttctgtacctttgcccaggagacgaccatgcaattaccactgttggcttgttcatggtctttccaaaggaaaccccgtctcctcttgtcaatggccttaataacccacttaggcagatccaacgccaacattaaggtgaataggggttgaagagaggactgatttaaccac

SEQ ID NO: 115092 - DNA, 183 bp, Zea Mays
atggcggagcagaagaaagggattcaaagcaagcgggtgacaggaggagacggcggaggaagatcaggagagagcgtccggctggacctgctgcacagggggatgaaggcggcgtgcgagtgggactcgatggcggcggtcggcggcctagcctattattccttcgtgtgggtaactgggtag

SEQ ID NO: 115093 - DNA, 15628 bp, Zea Mays
gtttttttttttttttctggattcagaaacagtcggcaggtataataacaaatgaattgttgtgcttggaaattgccacctcatataggaatataggattgaccctctcaatcccctcaagttcattttctccctcaatcctctcctcaaatccccagtttccaaagtagcaccaaatgttgatggcaccgattctgcaaacatcaatcgacaggctgccaaaagcgagggctggtacagtactacctctactggtactcaaactatgccaaccatcgatatcgaacttcgatgagctccctctagtggaacacgggcagtcgacatcggaccaagttactagtactgaaggaacacaatcagatatccattgcctgagagattgacgatgtgcccttcttcctcctgcttttcttgtccttggaaaccttcccctgcttccccgctgcgtcgtccttctttgcagctgcaggcggctgcgttgccagcaggtgctgatggatcgcagcgaatgggtcaagctggaactgcgggttgtccagtacagccttaagatgagcagactcctgcaccctggacaagaaatttgggtttagagacagttgaagagcatgaccacctgaagcaaggaacaagggaggattacactaatgtctgtcttgacttgcagttcagctttgcttcagtcttctgctctggtgcagctggttctgggaggaactcagaaagtgccgacagatcgtatgctttaagcttcttctggcgccgactctgtttatttttctgctttacgggaaaaaaaaattgtaaaacaccaggatcataatagaaaatgaaaagcatattacgtacgatggcaagtgtacgtgaatttagatattggatccatagcaaatgcgtgtggtgaacattgtgatagcaacacaagagaaaataaataagccaggctgcaggggtctctactttcgaatggagcagacattctccgaaaatatccacaaacatataaatagctagcgtcaaaaggattttgagttaattttaagttctcatcaattgacagatcatgactgtaaatatcagtttatggcgacatggctatttgcttttatggtcaacggatatacatgaacatgcaaatgacataagaattttgctcttccgtagcatctgttcacagcatcagggatacacatacaagaaactgaggcgatgcgcccatgccatcagattgaccaaacacatgccacaataaggacttaaggcccatttggtgcggctcctgcaccggcttcaccaccagctctgcggctctgctgcaccaaacgccctcgtgtggagtgcttctggacagcaaaaggaaagaacagagccagtgccattttcatgtacgctatggagcgagcgtggaggaaccacaccaaacaagcccttattacaatagagccaatacacctgtcacaacagagccaaataggggtgaaaacggggtgggtaccaaggtcgggtaccggatacgggtagtgaaataacccgaaattttggacaccgatacgggtatttttgttggcgggacgaatacagtcatacgggtactatccgtataatatacatactattttttaaactagccctaagttataatctacgtgtggagaaccccgacatactatgttttttcacttttcgaccataaaagtacatactatttttttaaaaaaatatagaagaattgtatacttcatattagcaacatatgctgtaagccaaaagtatatgttgtagcaaaagataatgtctcgcattgagcccttagatggtttatatagagtacatggcgtaggagataaggtaacccacaaatacatacgacagtctataaaacactatctaagctaccaaatatactttatcatatatatggcatgtctactagacacaatatctagactaccaaatatgttatacctctcgcagtcgaaactgtagccactgcaaatattgacactggacgtgaactcattgaacaccgataaggggaggcccttcgtgaagatgtatgcgaactaggatgtcatacgtggtgtcactggtgcaggagccaggggtgccagagttatgggcaagtgcgagcgacgagtgtaggcaatcagcgaagatggccacactcggggcaccgaagccgcgtgtagcgtggcaagaggcacaggtgctacttacgacgcgtcaggggtgtcggtgtcactcacgatccaactagcaggggagttgcgcatagcataacgaagttggcgctgccgcatagggcagaaatgctagagggaccgtaaggtggaaaccgaggaaccagactcacagagaaaatcaaagttatttagatgggatgagggcatggcagcgagcgggaagctgtcctcatcaaaaaccacatggcaagagatgaagagatgagcatgtggttagaagatagatcaagacaatgatagcctttgtgatcgtcggagtagccgagaaagacactaggtggatcaaggagcgagcttgtgcgaagcagtagaggcagtgttagggtaacatgcgcaacccaaaactcaggtggtcatgcgaaggtgcagaaccagacaaagcgacacgaggacaaccaacatcgatcatctttgtggggagaagttcagtaggtaagtggaagtgtggagcccctcaaccaagtaccgtccacaaagggatgcctggatcagtaacgagagaatgacattgttaatggtacgaataatacgcttggctttactgttttgaggggacgtgtaaacgcaggacatccacaactgagtgcctttggagagctgaaaaaactgggtagaagaactattaaattcatgcccattgtcgcattggatcgccttgatagtgcagctaaactaagtggcaacataagcaaaaaaaagttggacggggtggtgaaggtgtcagatttaagttttaacggaaaagtctagagataatgagtaaaatcatccaagaggattaaatagtacttatagctagcgtagggtggacgtatgttgaccacgagggcgtaaaatcatccagagataaggagtaaaatcatccgaggtacatagcaatgtgccccatgccatgggtggacgtatgttgaccacgagggcgtcaccttgccgtcggtgctcccagctcccacagaaagtgtggcagatgtgctagagaagccaccacaatcattgttgaggctgtgtgtgacgccgccaatgccgctattgcggtagttgttgcccttgtttcggttgtcgtcgaaattggtgttgccaatgctagtgtcgtttctgatgccagagtcgggcgaacgagacaatgttgaggatggcaactttgaagcaaatagtgtgcttttggagtagaccactgtcgaagtcgtcgctagaccggagatgtccagatggatctccagcaaaagatcatcacgaacctttagaaatatcaggaacgacaaatagcgacggatgatgatgccgaggtgctcgaaacgctggttgatccctcgcaggatgttgaggacaaggaccatgtcatcgatgggagatcccagatgagttagggcatcgaccatgcgttttgttagacaacctatttgcttccatgtttaggaggtttccttccctattaggtgttggctgattgcccctaattaggtgatacccttccctatcaggcgttggatgatatcccctgattaggtgctaatgggtgattctttcctatatggttgtttcctacttagtgtgagatctccctgatcattgtttctacaaatcaggtggagcacaatctggtagaggtctatatattgtaatcctgttaatcaatgcaatacaacacacaatattccacgctatcatggtatcacgagacagtcacagtcctgtgacctatcgctttcgctaaactcttccctacctacactgcctgccactgcctgtgttgcgccaccatggcctctgcagagcctccgcccgtcgttgatgctgcgcaggagacagctcgctaggtcctggtcgccgccgcccaggacgccctcgccagggaacgctaggctgcctccaaccttgagcgcgttgcgatcgtcgcccacaacgccgctttcccaccaccccagggcggtgtcccgaacaacaacgtcgatgttgttgaagacctcgactacgaggccaccctcattgccaaccttcacgcgcaggcgacgagtatccagaacctatgtgcccttgtgcccgtggttttggatcccctttctccccactacaatcgctaacacgatctcgttttgctcgccctcgagcgatacgccctcaccgaccatgtcctctcggacgcttgccccgccatgccatcctggcggcgcatgaatgtcgttgtgttgtcctgggtgttgggcacactctcccccgagctgatggagtctgctcgcacctctgatggcactgcgcgccgcgcctggctgtccatcgaggagcagttcctcggcaatcgcgaagctcgcgcatttcgcctcgacgccgagtttcatgttttcatgtagggcgatctctccgtcggcgactattgtcgcaagatgaaggggatggctgaggcccttggtgatcttggagaggtcatccacgaccgtaccatcgtcctgaacatgttgcgtggcctgaatgagaagttcacccacatgaagctccacttagggcgctcgaagccgttcccctccttcaccgacgtccacaatgatctcatcctcgaggagatcgactcccgcgcgcctcacctccgcctccgtccaccgctctcgtcgccagtaccactgcttcctccatcgcccctccccctggaggtgtcacggcgcccgctggtgcaacacccatggcgaggctcctctgctagtggttgtcgacggcgttgccccaacagtggaggaggcaaggctcggttgccctggccttcactatacaatccatggaccaggcaaatcgcgatgtggcccgaccccacagacagcagcatggcggacgtccgcctgcacaccagggcgcaccacagcaggcgctcttcgctactccgacccagtacacccctctactgtgtcactttacccaccctgtcgggctggttcagcatcaactcggtccgccactgcatcagctcaggactccgtagcagccccctgcagttcctacctccccgactgcgccatggactccatggactagatcctgggatcaccagtctctcgccaacaacttcagcaccatgaccctcagtcctcctggcatcacagattgggtcatggattctggtgcttctagtcacatgactcccgacagtggtaacatctctatttcgtcctccgcgctccacttccatcatggttggaaacggatccactttacctatcacaacttctggccactccattatactgggtcccttttatcttaataacattcttgttgccctcgatattgtttaaaacctcatttcagttcgtcagctgtcaaatttgaccctcttggcctttctgtgaaggatcttcattccaggagcgtgatcgccaggtacaatagctccgggcccttgttgctccaacatgttccccgatatcccgtgcccttgttgccagtgtctcctccactacttggcatcgccgccttggccatcctggacatgaggctctgtccaaactcactagtacttctgccatcggttgtaataaaattactagtgattccatatgtcatgcttgtcaagttgggtgtcacactcgcgagctctcaagaattttgatttaatccattgtgatctgtggacctctcccatttccagtgtgtccggttacaaatattatcttattattcttgatgattgctcacattttctttggacgtttcctcttcgccttgaatccgaaacattcactaccttggctaattttttctcttatgtgaagacacggttcggctgcaccatctgaagcattcaatgtgacaacggtcgtgagttcgacaactcttccactcgcaccttctttctcactcaaggtgttttgctccggatgtcatgcccctacacgtcctcccaaaacggtaaagccgagcatatgattcgttccattaacaacatcattcgttcccttttatgtcaggcctccctcgccccatcctattgggtcgaaggtcttcacaccgctacatacctccttaatcggctacccatacaaacccttatttatggcaccccgtattttgccctcttcggctctcaccctacctatgaccacctccgcgttttcggttgtgcgtgttaccccaacatgtccgccaccgctcctcacaagcttgccccccgctctagccattgtgtctttcttggctattccagcaatcacaaaggctatcgttgtttggacctttccaccaaaaaattctcacctcgcgccatgtggtttttaatgaggcctcgtttccccttgccgactctcgagcctcgatcactaaccttgactttttgtctgagcttgaggagtcgatcttgccgatcgagccctccactgcaggtactcgcctcacctcgcctgtcgcggttgctgccctagtgcgcctgctgctgaacagggctccgtgttgttgccactgccatcagtcgcaactgcactacgtccggctcccgctcggcactagacattcgtgtcttcgcccgcaccacgcgcaacctcgccgcctatgccagctgcagccccaacggccctgtcggctgcacccttgaaggtgtaccatcgacaaccacgcgttgtcttggagacgcccgtggctcctacgccgactggactacccacttgtgttgttcccatcacaccgatggtcaaccatcacaggatggccacccgcggcaaggctagttttcgagtgcctgttgcgttcaatgccacgacgccctcgctcgtcctaaagacctatcgcagcgcccttgccaatcccaattggcgccacgtgatgcaagaagagtacgacgctctgctctccaacaacacctgggatctcgttccccgaccacctggcaccaacatcgtcaccgacaagtggattttccgtcataaattcaatgttgatggttctcttgacagatacaaggctcgttgggtcctctgtggttttactcagcgtctcgacatggattatgatgagaccttcagcccagtggtcaagtcggtcacagtccgcactgttttgtccttggcattctctcagcactggccagttcatcaacttgatgtcaagaatgcattcttacatggcactctcactgggacggtctactgctctcaacccactggccagttcatcaacttgatgtcaagaatgcattcttacatggcactctcactgggacggtctactgctctcaacccacaggttttgttgatcccactcagccttatgttgtctgtcggctcaataagtctatggtctgaagcaggcgcctcgtgcttggtatagctgctttgctactcactcactctggggtttgtcgaagccaagtcagatacttcgctgtttatatatcatcgtcggactgatatggcttacttgctgctttatgtggacaacattgttctcactgcttccagccaagaccttctgcgtcgcattatcactgctctttagaagccattctccatgaaggatctcggtactctccatcatttcttaggtgtggctattcaacaacattcagagggccccttcctttcacagcagcagtatgctctctatattcttgagcgtgctgatatgtccgattgcaagccgtgcagtactcctgtcaacactcatgctaaggtctttgccatgaccggtaccactgtcagcgacctcactcagtattgcagcctggttggtgctctgcagtacttgactttcacccggaatgacatctcctatgttgttcagcaagtgtgtcttaatatgcatgatcctcgggatgttcacctattggtactcaagtgtatcctgcgctacctacgtgggacacttagtcatggtctcctacttcgcccatgcatgatctctgctctgctcgtctacacagatgttgattgggccggatgcccgaacactcgcagatctacttcagggtacgatgttttccttgaagacaaccttgtctcctgatcctccaagcggcagcctacggtgcctcgctctagtgcagaggtcgaatacagggcaattgctaacggtgtcgccaaagcttcctggttgcgtcagttactacaggagcttcacagtcccttgaccaagagctccttagtttattgtgacaatgtcagtgttgtctacttgtccactaaccaggttcagcatcagcacacgaagcatatcgagattgatctccacttcgtccgcgagtgcgttgccattggtgatgttcgtgttcatgtcccaacgacgtctcattttgcggacacttctccgagtttcgctccagtcttaacgtctgcgccatcgacgtttcgactgcgagagggtgttagcttatttccttccatgtttaggaggtttccttccctattaggtgttggttgattgcccctaattaggtgatacccttccctatcaggcgttggctgattgcccctgattaggtgctaatgggtgactctttcctatatggttgtttcctatttagtgtgagatctccctgattgattgactccctgatcattgtttctataaatcaggtggagcacaatctggttgaggtctatatattgtaatcctgctactcattgcaatacaacacacaatattccacactatcactttttaacttgcggcagtacatgatcacagagaggtcaccatgtactatgttgtggaaggcggcatgcaggtcaatagtacgggtctcgcgattacctacaaacttgttctcaaggccaagccataggtgacgcgcggtgtggccacattctcgaacgacatcctaaagattaggggagatcgtgttggtgagccaacagaggacgacagcctccatgcggttctagccagggttgttggagaaggcgtcgtcggactcaacgtggtcaaagagggcatatcgcgtcaagaccagcaacatgagatcatgccaacgagcgtagttgaacgatgaggtgttcataatgatattcaccagttggcgaatgttcgggacaactaggcctggatgtggaggccgtcgatggtgaacgcctcgtcgtaggaggcgtctagcgaggcatccaaggtcgaggaagatggcagcggttgtttgacaacgactgtttggcagtggtgaccttccgttccaggtcggcagcgatggcctgctcctattcaaagagctggagggtggtctacacacgtttgcgtgcgtcggcggccttctcctttgcaatgtcggtggcaacgattaggtcgttgagccactgcttgagggcagcaacgtcaggtacggtgacatgacgaggaggggtggtggctgcccgcaatggagcggcgaccctgagggttgtggccagggggcggcaaaggatctaggctcggattgccatgttagacaaaggaaggtatatgttgtagcaaaagatgatgtcttgcattgaacccttcagcgacttatatagagtatatgacataggagataggcaacccatggatacacatgacagtattgaaacacaatatctagacaaccaaatatactctaacatatatgacagtctactagacacaatatctagactaccaaatacaatctaacagatgcatttaacatcaggttcttaaaatagtaaagtgattcacctatacagtcatcacatctatgttgaagatggagaatctaccaatacgagaattgcatagcaacctagaaacaatcaatcagagctcattctagaattcatgatagaacatttagcatcctgatattgattatgcttgttcgactcagctatgagtagctaatactatccctaacttcttttcaaatttctaggaaaagacagagttcgaagttctaaacatcttgtttttcttcagcacaattcacaaaaattaggcctggttgtgctcaattcctatgcaggttgaatatgaggttcaaaagccttgaggacatgaatatttaggagcaggcctatgtttaactgatataaacactgaaacactatattaaattatttagtaaacaagcgaatgcacatgctgacatcaaccatggtcagggcatctgaccctgtaactgacgtgtggtatccttcagaatagctacactacagattaaccaatactaaaatattgaatgtggtcgtaagttaatttgtggcatacacaacttctatgataaggaggtgattagaactatagaagcttacagaataacttttatcagatgtttacattaaacaaaatgaatcctcgcaattggcagggcagtaaacaatatgattttctttatgtgggcagaaaactgatgtttaaactaatgttcataactgcagagttaacagatatggaaaatccaggaagaaatcaattatatatggtaatgatggagaggagtttgaagtaccttactgacagtcttcttagcatttaaggaagtaactgcatcttttacttctgaaataacaaaacaactctttcaagagttcgagcccaaatcatggtatgtaagtagagggactctaactctcatcaagaggatgacactatgagttggggcaattttctgtttatttcctcaaacactacacaatgccatacccttagaggggttggggacacatatttatagccctaggggctgcactacactgcactacacactacactacacgctgcagcacacaggtgctgtcctttagatactaaagtgcagtcaaaactgttgtgctgctactgctgtcctctgctgtgctgctactgctgtcctgcgcagtcaaaagactgcagctgcatgctgtcctgctgcaactgctgctgtcctgcagcagtcaaaaggttgctgctgctgcgcagtcaaaaaactgctgctactgctgtcctgcgcagtcaaaagactgctgcatgttgtcgctgcaactgctgctgtcctgcagcagtcaaaactgcaactgctgctgaccacatgacttattccatcattctccccctaagtcttgtgcgtcgtcttgtgggaaagttggaccatcccggacctggagcaaagctcaacaaacttgatcttcccaaggggcttggtgagcaggtctgcaagctgatccttggtgttgatgtagcgcgccttgatgctcccttctgccaagcagtctcggatgaagtggtatcttagccggatgtgcttgctccgttcatggaacacggggttcttggccaatgccagagcggactggttgtccaccctgagttccaccgctccagtgtctctcccgaggagatcaccgagcagtcgagccagccagagcgcctgagtcgaagcagtggacgccgctatgtactcggcctcgcagctggacatggccaccacctgctgcttgaccgactgccagctaatgaggcacttgccgaggaagaagaggatcccgcttgtgctcttgctagtgtcgatgtcaccggcgtggtcgttgtcgctgtacccgacaaggtgtgcctccccagggcacctcgggtagtagagaccgtggtcgagagtccccgcaacatagcggatgatcctcttcacagcctgctcatgctccgtcgtcggtcgctgcaagaaccgactaacgtagccgacggagtatgccaagtcaggccgtgtgtggacgaggtagcgaaggctccccacaagacgccggtactgtgtagcatccacctcctccgtcgtgctgtcgcgactcagcttcagcctctcctccatcggagtgagagctgggttgcagtcggtgagcccagccagctcaacaatgcgcttggcataggcggtctggcgaagtgtgatcccggagtctccctggtgcacctcaatccccaggtagaaggagagatgccccaggtcactcatttggaaggtggccttcatctcgtccttgaacgctgccacctctgcgtccttggcgccggtgatcaccaagtcgtcgacgtagacacccaccagcagggcacttcctccattgccccgccgatagatggccgcctcgtgcgggcttggcgtgaaacccattcctttgagcgtggaatccagcttggcattccacgccctcggtgcctgtcgcaggccatagagagccttgcgcaggcgcaacaccttgccctccttgccagggatcgcaaaacctggcggctggtgtacgtagacctcctcctttaagtcgccgttaagaaacgccgacttgacatccatgtgatgaacatgccagccctccagggctgccagcgcgaggaggagtcgcacggattccatccgtgctacaggggcgaaggcatcgtcaaagtcgatcccctcctgctgcaagaaaccgcgtgccaccaagcgagccttatgcttgacgatggcgccggcttcatccctcttcagtttgaacacccacttaagggtgatcgcgcgatgaccatgagggagatcaacgagctcccaagtgcggttcgtctcaaccgcgtccatctccgactgcatcgcggcacgccaagccgcatgtttctcggcctccgcgaaagaccgaggctcaccatcgtcgcatgcaagatgcaactctcctgccagaatgcgagatgcagggcctggcaccgacgggtcgatgagaaggccctccacccttcgataccgcaacggctcgccgtcgtagcacgcgtcgacgcgctcctcgtcgcgggacagaggggtcacgagctccactgggtcgtgctcgacacgagctggtgtcggagaggacgttcccggagagggtaccgtcggtgctggagtacgtggtggcgaagagctcgctgtagccggggtcgtggctggagtgcgtggtggcgaagagctcgttgtagcaggagctggagagtgtggcgctggagtcggtggagacttgggggctggggtagacctgctcggagaagagttgcctactcccccagctccctcaaagtggacgtactcgatggtgaagtcgtacgtcggagtcgtgccgtcgtccaccgccttgtcccacgcccatcctcgcccttcgtcgaacactacgtcgcgcgccgtgcgcacacgctgtgttcttgggtcaaggatgcggtaggccttcgagccctccgcgtagccaatgaacacccccggggtgctcctatcgtcgagcttgctgatgtggccaagctccttggtgaacgcgaggcagccgaagacccgtaggtgagagaccgccggcttgcgcccatgccaagcctcgtacggtgtcatcccgttgagagccttggtgggcgagcggttgaggatgtaaaccgctgtcaccaccgcctctccccagaagacagctggcattcctctctgcttgaggagagcccgagccatccccacaaccgtctggttgcgccgctcgacgacgccgttctgctgcgggctgtacggcgcggagtagtgacgctgaacgccctcatccgcgcagtacgatgcgaactcagccgccgtgaattcgccgccgttgtcggtgcgcagcacgcgcagcttgcggccgcactccgcctccgcagcgacctgcacacgcctgatggcgttcgcagcctctcccttgctgccaaggatcatcacccacatgtagcgggagagatcgtcgacgagcagcaagaagtagcgtcgtcctcctggtgtggctggtgtcaccgggccacacaagtccccatgcacgagctcgagcctctccttggctcggaagctcgactgctggggaaaggggagtcgtctctgctttgtcaacacgcagacatcgcagaattgctccacatggtcaaggcacggcaggcctcgtaccatctccttggcgctgagccgcttcagggcttcgaagttaaggtgcccgaagcgctcgtgccactgccatgccccgtcgtctcgacgagcagcaaggcagcaaggttgtgccaccttcacattgaggatgtaaagccgatttgcactcctgcgtaccttggcaagaaggcgacgagagggatcccagatcctcatgactccgtgctggacctccacgcgcgaaccgttctcatccagctgtcccaagctgatgatagagttcctcaacgcggggatgtagtagactccggtgagcagcatgtgctcaccagacgcggcggtgaagacgactgagccggcgcccttgatctctacgccggaggcgtccccaaacttgacggagcctcggacgctagagtcaagctcggtgaagaactcccgtcggccggtcatgtgatgagtggcgccggtgtcgaggcaccatccttcgatcatgtccttgttggagccgtcgccgaggaaagcgcgtgctttcgactcatcaaggtggaggagtgccgctggagatggctcgatgcttgcatgtgccaggagcagggcctcctcctccgcctccgcctgtgcgacattggcctgaccacgtcgtggctgccgacaatccctggcccagtggccaagcttgccgcagttgtggcagccgttgtctcgtgcgggcttcttgttgccgacggcgccgccttgggcacctccacgtgcaccaccctcagcatgtcctcgcgccccggcctgggcacctccacgcgccttgcgcggcttgccgcgtttgcggcctcgtgtcgaggaggactccccctgcttcttgtcaccctggcaggcctcccactgctcccgagtgagatgtagcttcccgccgatggtgataggcccagagagagcctgtggttcgtcgccgtcgaccaccttgaggcgaccaatcgcctcttcgatcgtcattgtggagaggtctagcagagactcgatcgagcgagcaatctgcctgtacttctcggggatgcaacggaagagcttctcaacagctctctcctcatcgtaggtgtcgtcgccgaactgcaccatcttctgcaacagagtgttgaggcggagagcaaagtcatcaacatcctcacctggcttgaaggccaggttctcccactccttgcgaagtgcctgcagtgtggtcttgcgggcacgatcgctgccgatgcgggtcgcagcgatggcgtcccaggcctccttggcagtccgcttctgggaaagcgaaaactgcatctcgggcgggactgcagcaatgagagcatccagcgcccgccgatcctcgtggtagtcgacgtcgtcgtaacgaactgcttcccacatgtggcgaacctggagccgtaccctcatcaccgcggcccactcgacgtagttggtcttggtgagggtaggccacccaccgccgggaccgatgtccctgacaatggcttgggccatgcgacgaccatggtaccgatccggggagggagaaccgcgccgcctgtagaggccgcgacctccgtcgactcggtcgccg

SEQ ID NO: 115094 - DNA, 707 bp, Zea Mays
gtttttttttttttttctggattcagaaacagtcggcaggtataataacaaatgaattgttgtgcttggaaattgccacctcatataggaatataggattgaccctctcaatcccctcaagttcattttctccctcaatcctctcctcaaatccccagtttccaaagtagcaccaaatgttgatggcaccgattctgcaaacatcaatcgacaggctgccaaaagcgagggctggtacagtactacctctactggtactcaaactatgccaaccatcgatatcgaacttcgatgagctccctctagtggaacacgggcagtcgacatcggaccaagttactagtactgaaggaacacaatcagatatccattgcctgagagattgacgatgtgcccttcttcctcctgcttttcttgtccttggaaaccttcccctgcttccccgctgcgtcgtccttctttgcagctgcaggcggctgcgttgccagcaggtgctgatggatcgcagcgaatgggtcaagctggaactgcgggttgtccagtacagccttaagatgagcagactcctgcaccctggacaagaaatttgggtttagagacagttgaagagcatgaccacctgaagcaaggaacaagggaggattacactaatgtctgtcttgacttgcagttcagctttgcttcagtcttctgctctggtgcagctg

SEQ ID NO: 115095 - DNA, 103 bp, Zea Mays
tgtacttttaccccattatctaaaaatgtaggaactcgatactcacttctcaagaatatgagcttgttggttaagatatgccgctaattgtcatcttgatctc

SEQ ID NO: 115096 - DNA, 631 bp, Zea Mays
gttggtttcgattcaacttaccatggtgccatcattattagctcagagtttgcttttccgccttattacttatttacttgcatgattttggttcatgtatgcaatgcgctcatcttttttacacgaaatatgtctgagcatctcttcgaggaagcctccatcgttaccaggctacaccttgatagcaaaaaagtttgataaaggttctgaacgtccagcacattcagaagctagataatccaactgtaccaagggatgtcgactgaccaccatggtctgatgagtgtggatgacattgcctcgaggtacacagtagaagcctctgctgtccaacacatttggataactggagattggatctgtttatacgggagttgaattttgcattaaactctttgcagtgtctattgttcaaagagctgatgaactacaaacagtgcttatggagatggtaaagcaagacagtaggcaccaattaagtgcaaagggtgaattgaaggaactctagacgtgcttgtgcccatcctcagcgcaaaacacagtggcagcgaaagatttaaggatgcatgaatatatacttcgaactttctttgtaataaacctggcgctcccatgttgcggcactttttgt

SEQ ID NO: 115097 - DNA, 2565 bp, Zea Mays
gcacaactccaccctaggcagcgccctgccccgtcccttcctctgcacactccccagactgcccactcgtccgccacccaacgcgacgcgtcgccaactcgccatggcgctccgtcttctgctcctcctcgtcactgttactaccgccgccgacgcgctcacgccggacgggcaggcgctgctggcgttcaaggcggccgttctccaagatcccacgggggcgctcgccaactgggtcgccaccgccgcggacccctgctcatggaacggggtcacctgctcctcccctgaccccggctccgcgcagcaccgccgcgtcgttgcgctctccctccctaagaagcgcctcgtcgcggagctccctagggccccgctcccgtcctcgcttcgccacctcaacctccgcagcaaccgcctcttcgggcccatcccacccgcgctcgtcgctggcgcacccgcgctccagagcctcgtcctctacgggaacgcgctcgacggccagctccccgaggacctcggtgacctggccttcctccagatcctcgacctctcctccaacgccatcaacggctccctcccggcctcgatcctcaaatgccgcaggctccgcgctcttgcgctcgcgcggaacaatctcacaggctcgctccccgctgggttcggcgcccgcctcggggcgctggaacggctcgacctctccttcaacggcttctacggcaccatcccggaggacatcgggaacctgtccaggctccaggggacggtcgacctctcgcacaaccacttctcgggccccatcccggcgagtcttgggaggctaccggagaaggtctacatcgatctcacctacaataacctctccggtccgatcccgcagaacggggcgttggagaaccggggacccacggcgttcgttggcaacccgggcctctgcgggcccccgcttaagaacccctgcgcgccagacaccatgccttcctccaatccttccctgcccaatgatggggactcgtcggcacctgaggcagccggtggtggcaaggggaagaacaaggggctggggaagattgccattgtggccatcgtgctgagtgatgtgatgggtattttgatcattgcactggtgttcttctactgctactggagggcggtttcatccaagggcagcaaggggcacggtgtggctgctggttcaaaagggtccatgtgtggcaaggattgtggatgtttcagcagggatgattctgagactccatccgagcatgtggagcagtacgatctcgtggcattggaccaacatgtgaggtttgatttggatgaactgctcaaggcatctgcttttgtgctggggaagagtgggattggaatcgtgtataaggtggttcttgaggatgggctcacaatggcagttaggcggcttggtgaggggggattgcagaggtttaaggagtttcagactgaggtggaggcgattggcaaggtccggcattccaacattgttaccttgagggcttattattggtcttttgacgagaagctgctaatatatgattacattcctaatggcagcctctctgcagcaattcatggtaaacctgggttgatgacattcatcccgttgccatgggaagcccgaataaagatcatgaaaggagttgccaaggggatgtctgtcctgcatgaattcagccccaaaaagtatgtccatggtgacttgaggccaaacaatgtcctccttgggacaaatatggagccgttcatttcagatttcggccttgggcgacttgcaaacattgctggcgcatcaccatttttgcaatcagaccaagttgaattagaaaaggagcagattcagcaaatagatgcctcagtgagccctctcatgagcaaagggtcatgctaccaagctccggaagcgctgaagacactgaagccctcccagaaatgggacgtttactcctatggcgtggtgttgcttgaaatgatcactggccggtcgccctctgttctcttggaaaccatgcagatggatcttgttcaatgggtccaattctgcatcgaagacaagaaaccttctgccgatgtgctggacccttttcttgcccaggattctgaacaggaaggtgagatgatcgcagtgctgaaagtcgcccttgcatgcgttcaggcgaatccagagcggaggccgtcgatgaggcatgttgcggagaccttggagcgcctcaatggttgacgctaatgaagtgttcccctgataaagttgtgcgattttcggtggaatgggttctagaactcagttgttggacagaagcctaggaggagagggcatgatgctgccttagtgtactccatgtaaaattatcatttccctagtggccactgactgtactggactactgggttgttaacgtgtgaggtagtagctagttaaggtaattagtttgctgttgagacttggaaggtggtagtatcgcgtgcttacttaatattgtgggtatatgaataatgaattagtttaaccatttgtgtgctctctgttatactaattgtgtatcatcttgggca

SEQ ID NO: 115098 - DNA, 276 bp, Zea Mays
catgccaatagtggaccgaggactgttttgcgagaaaagaaagagataaaccccaggggcctcagcgtaaacctgttttcttttccattttcgaatttatttttcttttgttatgacagataactaaataaatgcataacttgaagaataatcatccaaaattgttcaaaccaattttgctagattctggaaattatgaactatcagataaaaataataaaacccatggtttctgtatttctttctgaagttttaaattaaataagaaaactactc

SEQ ID NO: 115099 - DNA, 82 bp, Zea Mays
caatttttgcactgacagtatctcaagcacatgattgtagaaactccctaatcacgttagtgataccacttgtcctcgccac

SEQ ID NO: 115100 - DNA, 99 bp, Zea Mays
gtttatttatcaggctggatcatgatccaacatactaagatacttgtttttacatttacacataagacaagacctgattccacattagtcatggcctga

SEQ ID NO: 115101 - DNA, 3269 bp, Zea Mays
ccaatctttgcgtgtgtggaatggctcccgcactcaccctgcggtgatcgagcgctcatgcacgcgcgtaggaaacattggttgtgttagagagcccgacgattcgccggagatgacatcatcggcggggtacgcggatggcggcacaggaggtctgggggacggggaccccccggtgccgccattgaggaagcagccgtcacggatcgcttcggggatgcgtcggctggcgtccaaggtatcggcggcggtgccagagatgcgtggcctcaagcgtacacactccggcacacagtcaggtttgcgcggtctacgcttcctcgacaagacgtctgccggcaaagacggctggaagtccgtcgagaagcggttcgacgagatgaacaccgaaggccggctgcagagggagaacttcgccaagtgcatcggtatggctgattcaaacgagtttgcaagcgaggtgtttgtggcattggctaggagaacacacatcaatccggacgatggcgtaacaaaagaacaactgaagcaattttgggaggagatgacagaccagaactttgattctcggctacgaattttctttgacatgtgtgacaagaacggtgatggtaagcttacagaagatgaggtcaaggaggtcattgtgctaagtgcctcagcaaacaagcttgctaaactgaagaaacacgctgcgacgtacgcctctctgatcatggaagagctggatcctgatcaccgcggctacattgaggtgcacctagctttgtttgcgtgtctctctaggagcagcatactgacagaagacagaaaacagatctggcagctggagaccttgctacgcgggatggtgaccgcctcagcgccgccagagaagatgaacatggcgtcagcgtccctcgcgaggacgatggtgccctctagccaccggagcccgctgcagcggcgcatcaacaaggccgtggactttgtccacgagaactggaagaggatatgggtgctctccctctggggcgtcctctgcatcgccctcttcgtattcaagttcatccagtaccggaggcgcgcggtgttcgaggtgatgggctactgcgtctgcatcgccaagggcgcagcggagaccctcaagctcaacatggcgctcatattgcttccggtgtgccggaacacgctcacaaggctgcgttccaccgcgctcagcaaggtggtgccgttcgacgacaacataaacttccacaaggtcatcgcgctcgcaatcgccatcgggtctgcgacccatacgctcgcgcacgtgctctgcgacttccccaggctggtggcgtgccccaaggacaagttcatggagaagctggggcccttcttcaactacgtccaaccgacatggccgactctgctggcgagcatcccgggatggaccggaatcctgctcatcctcataatgtccttctccttcacgctcgcgacgcactccttccggaggagcgtggtgaagctgccgtcgccgctgcatcacctggccggcttcaacgccttctggtatgcccaccacctgctggtgatcgcctatgtcctactggtgatgcactcctacttcatattcctcaccaagcagtggtacaagagaacgacgtggatgtacttggcagtccctgtcgtcttctatgcctccgagagaagtatcagaaaaattcgtgagcaaagctatcgcgtgagcatcataaaggcggcaatctacccgggaaacgtgctctcactttacatgacgaagccaccaggcttcaagtacaaaagcgggatgtacatgtttgtaaaatgcccagacgtttcgcctttcgaatggcaccccttctccatcacttcggctcctggagatgactacttgagcgtgcatatccgtacgttaggtgattggacatcagaactcaggaatctgtttgggaaggcttgtgaagctgaagtaacttcaaagaaggctacactagctagactcgaaacaactgttgtggcacatggtctggcagaggatactaggtttcctaaagtcttcatagatggcccttacggtgcaccggctcaaaactacaggaaatacgacattcttttgcttattgggctcgggattggtgcgactcctttcatcagcatactcaaggatctcctgaacaacataaagtccaacgaggagatgcatgacgccgagttaggttgcagtttgaagaccaatgggccaggaagagcctacttctactgggttacaagagagcaaggctccttcgagtggttcaaaggtgttatgaacgacgttgccgagagtgatcgcgacgatgtaatcgagatgcacaattacctgaccagcgtgtacgaggaaggcgacgccaggtcagccctgattgccatggtccagtcacttcagcatgctaagaatggcgtggatatcgtctcaggcagcaagattcgaacgcattttgcaaggccaaactggagaaaagtgttctctgatttggccaatgcccacaagaactcacgcatcggcgttttctactgtggatctccaacactgaccaagaccctgagagatctttcgatagagttcagcagtaccacgacgactcggttccatttccacaaagagaatttctaagaagcaacggcacggctcgtgtggcccgccggtgcattcattggtgatcaacgggcacaaggctgtgtgcctatgcaagccagatttgagtccttggttactttggggaacagggagcggggctttaccggaccaagagccatgagctagccttttgcttcgtccgcttgctgggagctagctgcttgttcagatttggtgttggaggaggcgtgcatgcgcaagctgaaccggaaattcagcatgggaagttccatgtaggaaactgataattgtaatgcaatttttttctctctagccatgtctttagttgaatgccgaattgggacgagatcaagtgtgactgtttggatagggactcgaagtagacttgagcatgggccacccgacccgtccaaaaaaatctgactcggtcgggtcgggtctgtgtgttgggcgtcgttggtacatgtaacctgtcaaattttttaggtcaggatcaggcgttaaaattaagcttgcgggctggcccgttggcccgtaatctgtactggtgatctgcgttttgaaatctgaacttttgatagcatttatcattctggaagctggataactagcagactactttagtagtacttagagcatctcc

SEQ ID NO: 115102 - DNA, 2529 bp, Zea Mays
atgacatcatcggcggggtacgcggatggcggcacaggaggtctgggggacggggaccccccggtgccgccattgaggaagcagccgtcacggatcgcttcggggatgcgtcggctggcgtccaaggtatcggcggcggtgccagagatgcgtggcctcaagcgtacacactccggcacacagtcaggtttgcgcggtctacgcttcctcgacaagacgtctgccggcaaagacggctggaagtccgtcgagaagcggttcgacgagatgaacaccgaaggccggctgcagagggagaacttcgccaagtgcatcggtatggctgattcaaacgagtttgcaagcgaggtgtttgtggcattggctaggagaacacacatcaatccggacgatggcgtaacaaaagaacaactgaagcaattttgggaggagatgacagaccagaactttgattctcggctacgaattttctttgacatgtgtgacaagaacggtgatggtaagcttacagaagatgaggtcaaggaggtcattgtgctaagtgcctcagcaaacaagcttgctaaactgaagaaacacgctgcgacgtacgcctctctgatcatggaagagctggatcctgatcaccgcggctacattgaggtgcacctagctttgtttgcgtgtctctctaggagcagcatactgacagaagacagaaaacagatctggcagctggagaccttgctacgcgggatggtgaccgcctcagcgccgccagagaagatgaacatggcgtcagcgtccctcgcgaggacgatggtgccctctagccaccggagcccgctgcagcggcgcatcaacaaggccgtggactttgtccacgagaactggaagaggatatgggtgctctccctctggggcgtcctctgcatcgccctcttcgtattcaagttcatccagtaccggaggcgcgcggtgttcgaggtgatgggctactgcgtctgcatcgccaagggcgcagcggagaccctcaagctcaacatggcgctcatattgcttccggtgtgccggaacacgctcacaaggctgcgttccaccgcgctcagcaaggtggtgccgttcgacgacaacataaacttccacaaggtcatcgcgctcgcaatcgccatcgggtctgcgacccatacgctcgcgcacgtgctctgcgacttccccaggctggtggcgtgccccaaggacaagttcatggagaagctggggcccttcttcaactacgtccaaccgacatggccgactctgctggcgagcatcccgggatggaccggaatcctgctcatcctcataatgtccttctccttcacgctcgcgacgcactccttccggaggagcgtggtgaagctgccgtcgccgctgcatcacctggccggcttcaacgccttctggtatgcccaccacctgctggtgatcgcctatgtcctactggtgatgcactcctacttcatattcctcaccaagcagtggtacaagagaacgacgtggatgtacttggcagtccctgtcgtcttctatgcctccgagagaagtatcagaaaaattcgtgagcaaagctatcgcgtgagcatcataaaggcggcaatctacccgggaaacgtgctctcactttacatgacgaagccaccaggcttcaagtacaaaagcgggatgtacatgtttgtaaaatgcccagacgtttcgcctttcgaatggcaccccttctccatcacttcggctcctggagatgactacttgagcgtgcatatccgtacgttaggtgattggacatcagaactcaggaatctgtttgggaaggcttgtgaagctgaagtaacttcaaagaaggctacactagctagactcgaaacaactgttgtggcacatggtctggcagaggatactaggtttcctaaagtcttcatagatggcccttacggtgcaccggctcaaaactacaggaaatacgacattcttttgcttattgggctcgggattggtgcgactcctttcatcagcatactcaaggatctcctgaacaacataaagtccaacgaggagatgcatgacgccgagttaggttgcagtttgaagaccaatgggccaggaagagcctacttctactgggttacaagagagcaaggctccttcgagtggttcaaaggtgttatgaacgacgttgccgagagtgatcgcgacgatgtaatcgagatgcacaattacctgaccagcgtgtacgaggaaggcgacgccaggtcagccctgattgccatggtccagtcacttcagcatgctaagaatggcgtggatatcgtctcaggcagcaagattcgaacgcattttgcaaggccaaactggagaaaagtgttctctgatttggccaatgcccacaagaactcacgcatcggcgttttctactgtggatctccaacactgaccaagaccctgagagatctttcgatagagttcagcagtaccacgacgactcggttccatttccacaaagagaatttctaa

SEQ ID NO: 115103 - DNA, 157 bp, Zea Mays
tctgtttgaatgcttcaaacctttgtggtggaacctttgtatgttggaacctctgttgtggaagaactagtgtgctggaattgtgtatgacttgtgatgagaatgttgtgtatgatggcttttctgtgtattatgattctgtgagctatcatgagag

SEQ ID NO: 115104 - DNA, 1237 bp, Zea Mays
gagctgccatgaggcccgaacagttgaagctactagcgtgtagctagggaagagaagcgcgcgagtagctagcagacgtacgtaggcagaagcctagctgggtttgaagggccccgatcgatgatcccctacgcgactgcggcggaggcggagggagcactggggcgcaccatgacgtgggctgagacagcatggtacgagtactcggcggtgatgccagattcctggctgcactgccacaccacatttatcctgttcgtcatctacagcatcgccccgctgcccctgctactcctagagcagttcgctccgtccgtcgtgctgccgtacaagctgcagccccgggtacggctgcccccggcagcctccctcagctgctacatggacgcggcctgcatctttccgctcgccgttggccttcagttcgtctcctatcctgcggtcgccaagatactaaggacccgaatgggactgccgttgccgtcggtgagggagaccatcgcgcagctagtcgtatactctctagtggaggattacctcagctactggatgcaccgtctgctgcacacccagtggtgctacgagaagatccaccgcgtccaccacgagttcacggctcctacaggcttcgccatgtcgtacagccactgggccgagaacgtcgtcctttctatcccggccttggccggcccagtgctcgtgccatgccatgtcaccacgcagtggctatggttctccatccgcctaattgagggcattaacacgcacagcggttaccatttcccgttcagcccttgcaggctgattccattctacggaggggctgcataccatgactaccatcactatgcaggaggccgtagccaaagcaactttgcacccctgttcacctactgtgattatttatataggacagacaaaggctacagataccacaagctaaagcaagagaagctgaagagtctagcagaaaatagtgcggataaaggaggcaactactcattcgacgaagggaaaaagaacagatatttttgtgcctgagcgtacgaagaataatcaaggctattacttcgtcctgttcgaagggaagatttgcaaataaataattcgaatttactgcagaagctcttgattggtcgacgaacaaatatattgttgcaatccgtttcgtgtattctatatatctaatatgaaacttttttgtcggaatatatggatcatcccgatacattacttt

SEQ ID NO: 115105 - DNA, 112 bp, Zea Mays
aatgtcttagtgagaacttaataagatttctagttgaacttattggagcgaggtttattattttccttgcttcttcttatttcactactacaaatcatgtgatataagacgg

SEQ ID NO: 115106 - DNA, 1173 bp, Zea Mays
acaggatattgttggtttcttcttgaagaacatggtaaatgagaaactgggtccaataagcaatgctcatgttgttcacgctgatatgagcgagtatggagcaatggatgagaagtgtattcagttggcagaactagcagcaactgctgtggacttccccaagacaggcaaaattgtgtcaatgccagcatcccttcgaccaaaattatatcctgacttcatgggaaaggaggatgctatctcctatagatcagagaagatccttggaaggctttatcggtcaatccaagaagcctccagcgatgatttggttccagaagaaacttgcacatctaacaatctgccttatgatgcagatatggaagttgctggtgcagctgattttctctcgagtgcttggcagtgcaagtgctcatatgaaacacaactgaacgcactgctcaaccaatatggcgtgcgcactgaagcagagcttgtgacagagcatatatggtcgcttcccaagtacagcagcagaaggcagggggacataaaggagaggttgaagaatgcatactatgctcttcacaaggagtttaggagcattttcgaaagcattgtgacagatcaaacagagatctctgatgatgagaaaagtcggttttacgagatgaaggcctccgcttggtaccaggtaacctaccatcctgaatgggtccagaagtcaagggaaatgttcaagtctgactgtgaggacatgccagcaaggcttagctttgcatggatcgcggttgagcacctggcacggattaagataaggtgccgtggagaagtgaaagtggacagcccaaggcctgttgagaggctcgcagcctacatatctgggagcatgtgagttgacgtgaagctccaagcaattgtgaagcaagaccactctgccctctttgccatgccatctgaactctgatgcatggctctgtctagtcacttctttttacgaattattacatagttgagacacagccactctataagcggctaaagcgtacgcacatttctacgaacgataatgcttttaagtctgaactgttcaatctctattactaccagaatgtttgtggacataaatattagttcgtggtgtctcaattccaaaacggttttcttggttgtgaagggtgttggtcacttatt

SEQ ID NO: 115107 - DNA, 570 bp, Zea Mays
gcctcctatcacatgataggggtcgcccaaacctggtatggagttggacgctccagcgtgatgcatcaccgttgtcgtggaatcacttcaaacaactcaggcagcaaaggtttggaccgccatttcgcatcaatcccttgggtgaactggcacgactacccttttgcccaacattggatgattatcaggaaagattttgggatctactagcccaaacaacaccactctcccaggagcaacaagtgctgctgttcactgtaggacttccggatcatatcaagattgatgtggagctcatggcgccacaggactttaatcaagcactgaatttagcgcgggcatatgaaaggaggtcccaggcacttgacaacctccacaccaacacctagaatgtccctgaggcagccccagcgcccatcagtcactgtcccatcaccatagccaacacttctaacatcagctaacacaacgccacagtgaccattcaagcaacttcccccggtcgagatggtcgagcgccgacgttaggggctgtgttacaatcgtgacgagaagtatgtccgagtacac

SEQ ID NO: 115108 - DNA, 2863 bp, Zea Mays
gctatctcctccagcatccacccaacggatccgcggcaaccgaccacccatgggatcgctccggggcgcggcagcctcctccgcggcgccgcgcgcgggcgacctggtgaccacgcaggttagccttggtggatttgatgccaccgtcaaggcgctcgatctcgccgacttcctcgagttgaatgcgggctcggtctggcgctgccgcctcaagacctcctggactccgccggacgcctatcccgacttccttctccccaccgtcacctccgccgccgcgccgccgccacagtacgatcgcgtgcctccgcacgccttcgtccactttgcgcgcccggagggcgcgcgcgccgccgccgacgcagcgggccgatccgagctcatcctctccggcaaacccctgcgcgccgcctccgcacaggacagctcccttcgggcatcccgccgccgtagtgtctcgccattccgcttccctggctcgcgcctcgaggtcggggatctcccggcctcggacgccttcatcgccgcctggcgcggcccggcctctgggctcgagttctccgtcgacccgttcgacgggtcttgccacttcatcttcgcccgcgacaccgctttcaaagtccgggagttccgcgagtctgtggtgatgcgctgcgacgtcaagctccagttccccgtccgcgatgttgcggaagtcagggtgttccggctcgactgctcgctgctgatccggctatcggccgcaccgctggtctgttaccgcacggcggatgacgacatccacgtgtccgtgccgttcgacctgctcgacgacgatgacccgtggatacggaccacggacatcactccaagtggtgcgattgggcggtgcggtgcgtatagaatcacattctcgccgcggttctggccaaagatggaacgcgcgctgacgtacatgagggataggagggtggcgatccttgattgcgttggagggtggggggccaggagggggctcaccgtgcgtgatgagcctgagtttggggagcggatgcaggacctgttcttctgcgtgcagcacgccgagggtctcaagtttccggtgttgttcctcgtgaatgctctggtgcacaagggagtaataagtcaacaccacctcacgcctgaattcttcggtttgctccagaggaaggaggatgatgtgaatgtggctgccttgagggaattttggggggacaaatttccagtttttgatgcatgtgggaggctgaagaatctgcaggatagggttgccaggtacctgaaacatcttcgcaacaagattggggatgtcaattctgaggtgaggaggctggtaatcacgcccaccaaggcttattgcatgccaccagaagtggagcgctctaatcgcgtcatccggcattatagtgaagtctcagaccggtttctgagggttacttttatggatgagagaatgcagatgctcaacagtaatgtgctgaatttctctgctgcacaaatcgtcaaagatttgatgtcaaactcgttcctgcataagacaacagtgtacaagcgtgttaaaacgtttttgacagagggattccacatgtgtggcaggaagtactcgtttcttgcattctcatctaaccagctgagggacaggtcagcatggttcttcgcagaggacagaacgacaacagtggaaaccattaggaaatggatggggcggttcacaagtaagaatgtagcaaagcatgccgctcggatggggcagtgcttctcctctacatatgctacggtggtgctgcagccgcatgaggtaaatgagtgtcttgatgaagttgaacataacgggtacattttctctgatggaattggcaagattacgtgcgaccttgcactcgaagttgctcagaagctgcaattgacagataatcccccatctgcttaccagattaggtatgcaggcttcaagggtgttatatctgtctgggaaggaaaaaatgatgggatacgactttccctgaggccgagcatgcacaagtttgagtctaaccatactgtgttagaggtggtctcgtggacaaagtttcagccaggattcttaaatcgtcagattattacattactgtcctccttgaatgtcccggatgctatctttgctcaaatgcaggaagccatgttatctaatctcaacaatattttgtcagactctgatgttgcttttgacattgtaaccgcctcttgtgctgagcaaggaaccactgcagcactgatgttgagtgctggcatttcacctggaactgagccacacctgaaagcaatgctgttagctataaggtcctcacagctgctaggtcttttggagaagacaaggatttttgtgcccaagggaaggtggttgatgggctgccttgatgaacttgggatccttgagcaagggcagtgctttatccgggcatcatctccatcactcaataattgtctggtgaagtatggatcaagattgtctgcagcaaacacaaatgcagagaccattctgggtactatcgtaatggcaaagaatccatgccttcatccaggggatgtccgaatccttgaagctgttgatgtgcctgaactgcatcaccttgttgattgcttggtcttccccaagaaaggtgagaggccgcacgcgaatgaagcatctgggagtgatcttgatggggatctatacttcgtaacatgggatgaaaaccttataccacctggtaaaaagagttggaaccctatggactactccccagctgaagcaaaacaactgccacgcgcagtatcccaacatttttggactatgtctttatatggttatatcgtcttctactccctccagtctggtttctaa

SEQ ID NO: 115109 - DNA, 459 bp, Zea Mays
atgcagcagcagggacaggggtggaggaggcggcagatcccggcgttcgggaggtggaaccagcataccgacgaggcggggtacttggagtcggcggtgcaggctggcctcgtcaggcccggccactgctaccacgacgacggcggcaacgaggttgtgctgttcaggtcctccgcctcgccgcctccgcacaagccagccaagaaggtgcgaagcacgatggagggtcacggtcaccaccatcaggttcaggttgaggcggggagcaggaagcagcggccgttcgtggcgggcgacgggtcccgctcccgcgcggccaagccgaggccgagggtcgttagggcggcggtggacgaggacctgtacattgtcccttccgatatgtcgcgcaagaagaaagggaggaaacacgtgaggagcatgtggatggggtgcgtgggcctcaactgcgtcgcctga

SEQ ID NO: 115110 - DNA, 2482 bp, Zea Mays
atgggcaacgtctgcgtcgggcctcgattctcgaagaactgtggcttcttcggcaacttctccctgtggccctcccgctcccgcaactccggcaccccctccaaccccaccaccacctcccgctccgttcccgtggtccaggtccagccgagcgaatccgacgccaagccgcagcccgcgcagagcaccgcggctccggcacccgtcgtcatatccgagccggcacagctttcccagccgcagccagcaagcaaacccgacccgtcaccaccactgccggcgtcgcaacagcatgctcaagctcagcagcagcaggcgtcggcgccgcgtcagcagtcccggaagaaagcggcgcacatcaagcgcatctccagcgcggggctgcaggtggagtcggtgctccggcgcaagaccgacaacctcaaggacatgtacagcctgggacggaagctcgggcaggggcagttcggcaccacgtacctgtgcgtggacaaggcgacggggctggagtacgcgtgcaagtcaatcgcgaagcggaagctggtcaccgacgaggacgtggaggacgtccggcgcgagatccagatcatgcaccacctcgcggggcaccccaacatcatcgccatccgcggcgcgtacgaggactccgtggccgtgcacgtcgtcatggagctctgcgccggcggggagctgttcgaccgcatcgtgcggagggggcactacacggagcggcaggcgggggagctggcccgcgtcatcgtcgccgtcgtggaatcgtgccactcgctcggggtcatgcaccgggacctcaagccggagaacttcctcttcgtcggcaacgacgaggagtcgccgctgaagaccatcgacttcggcctctccatgttcttccgcccaggtgcctgtctgtctgtctgtccacgcgaggagttcacggacgtcgtcgggagcccgtactacgtggcgccggaggtgctgaagaagcgctacgggcaggaggccgacgtgtggagcgccggcgtaatcatctacatccttctctgcggggtgccgccgttctgggcggagacggagcagggcatcttcgagcaggtgctgcacggctcgctggacttcgactccgacccctggccgagcgtgtcgggggacgccaaggacctgcttcggaaggtgctcgtcagggaccccaagaagcgcctcaccgcgcaccaagtgctatgccacccgtggctgcagaccatcgcctctgcgcctgataagccgctggactctgcggtgttgtcccggctgaagcagttctcggcgatgaacaagctcaagaagatggcgttgagggtgaacaagctgcttctttcctgcgatacgatatataggtttcagggaacgaacatggatgtcagtcatcttcaattcgttgcgcaggtgatcgcggagaacctgtcggaggaggagatcgcggggctcaaggagatgttcaagatgatggacaccgacaacagtgggcagatcaatttcgaggagctcaaggccggacttgagaaagtcggtgctaacatgaaggagtccgagatatatcagctcatgcaagctgcggatatcgacaacagtggcaccatagattatggagagttcatagctgccacactgcatctcaacaaaattgaaagggaagaccatctctttgccgccttccaatactttgataaagacggcagtggatacatcacagctgatgagctgcagcaagcatgtgacgagttcggaatagaggatatcagactcgaagacatgattggcgaagtggatcaagacaatgatgggcgcatagattacaacgagttcgtcgccatgatgcaaaaaccaacagccggatatggcaagaaaggtcatcggtataaccttagcattggttttagggatgctttgaaggcaaatagctgacaatgttgcccatcatactaagtgacgtggtgttgtgcatacgtgttgtaattgtaaacggaactcgggttctgattaattcataggatctttttttgatcaaagtcctgaacccagctttattagaaagtcgccgagtttaaacgaaggaaggccacaccaacaaaccgggtgccagatggagacagacgcggaaaagttctaagacaactgaacccttctttcctcaaggctccagcagatccaaggctagcttctcagtcaccgactccgccaacaccttggacttgggtttggaaagtggcttctaggatttgatcagcattaacaagatgtttggtccggcctttttttttgttttggcccgcaaccgttcacagcgctacccgatagcgttgtttttagtttggttggaccagctggtaatcgatcacgtcgactgtcagcccatatcaactcgttaccgctcaacagagaccgtatcgattccctcacgtcgcccctcacctttcctcgtgccgcctgttgcccctccccttcc

SEQ ID NO: 115111 - DNA, 1581 bp, Zea Mays
attactgtgcctttatcttcaacccaaaccatccattaccatattcctaagctatcatggtgcaccggacttccatagccgatgtgcatgtgatgtgcatggatctaagcccaaagaaacccaacaaggccagcgccagcgacggcggagcctactacgactggtcccccgccgatctgcccatgctcggcgttgcctccattggtgccgccaagctctgcctcaccgccggaggtcttgccctacccagctactccgactctgccaagatcgcctacgtcctccaaggcaaaggtatattcggcgtggttctcccggaggcgaccaaggagaaggtcatctccgtcaaggaaggcgacgcgctggcgctccccttcggcgtcgtcacctggtggcacaacaacgccgacgccgctatctccgacctcgtggtgctcttcctcggcgacacctccacgggccacaagccgggccagttcacaaacttccagctcaccggctccacgggcatcttcacgggcttctccacagagttcgttgcccgcgcatgggacctcacccaggacgacgccgccaagctcgtctccacccagcccggatccggcattgtcagggtcaaggacgggcacaagatgcccgaggcgcgcgacgaggacaggcagggcctggtcctcaactgcctagaggcgccgcttgacgtcgacatcaagaacggagggcgcgtcgtggtcctcaacacccagaacctgccgctcgtcaaggaggtcgggctcggtgctgaccttgtcaggatcgacgcccactccatgtgctcgcccggcttctcctgcgactccgcctaccaggtcacctacatcgtgcgcggcagtggccgcgtccaggttgttgggatcgacggcacgcgagtgctcgagacccgcgccgagggaggctgcctcttcatcgtgccaaggttcttcgttgtctcaaagatcgccgacgaaaccggcatggagtggttctccatcatcaccacccccaacccaatctttagccacttggcgggccggacatcggtgtggaaggcaatatctccggcggtcttgcagtcgtcgttcaacaccacgccggagatggagaagctgttccgtagcaagaggcttgactcggagatcttctttgcgccttcaaactgattcattcgccggtggaaattggtccatccatctcgagtaaacttggtgtcctgggtgtgttcttagcagcttcagtttagaataatcaggttatgtcttcatcatcagttttttagatcgcttcatgtaataataaacttgagatggtacacatgtttcttaattagttctcttggtattttttatttgtttctcattaaacacaaaacaccgaataaacactgaatatagagcactatcaaattaataaataattagaattttctcacttaaaacatcgtatgcttgttataattacccatgttgtctataaattataaacaaaagcataaaaagcacaccattttcttttgtaacggtaggatgtctaataagggcccataaactggatcacagataacatatg

SEQ ID NO: 115112 - DNA, 1659 bp, Zea Mays
attactgtgcctttatcttcaacccaaaccatccattaccatattcctaagctatcatggtgcaccggacttccatagccgatgtgcatgtgatgtgcatggatctaagcccaaagaaacccaacaaggccagcgccagcgacggcggagcctactacgactggtcccccgccgatctgcccatgctcggcgttgcctccattggtgccgccaagctctgcctcaccgccggaggtcttgccctacccagctactccgactctgccaagatcgcctacgtcctccaaggcaagaattcgtttttttaatcctataaaaaaagcatctccgtgtcacatgcatgcgtgcgtcttgatgtatgcacaggcaaaggtatattcggcgtggttctcccggaggcgaccaaggagaaggtcatctccgtcaaggaaggcgacgcgctggcgctccccttcggcgtcgtcacctggtggcacaacaacgccgacgccgctatctccgacctcgtggtgctcttcctcggcgacacctccacgggccacaagccgggccagttcacaaacttccagctcaccggctccacgggcatcttcacgggcttctccacagagttcgttgcccgcgcatgggacctcacccaggacgacgccgccaagctcgtctccacccagcccggatccggcattgtcagggtcaaggacgggcacaagatgcccgaggcgcgcgacgaggacaggcagggcctggtcctcaactgcctagaggcgccgcttgacgtcgacatcaagaacggagggcgcgtcgtggtcctcaacacccagaacctgccgctcgtcaaggaggtcgggctcggtgctgaccttgtcaggatcgacgcccactccatgtgctcgcccggcttctcctgcgactccgcctaccaggtcacctacatcgtgcgcggcagtggccgcgtccaggttgttgggatcgacggcacgcgagtgctcgagacccgcgccgagggaggctgcctcttcatcgtgccaaggttcttcgttgtctcaaagatcgccgacgaaaccggcatggagtggttctccatcatcaccacccccaacccaatctttagccacttggcgggccggacatcggtgtggaaggcaatatctccggcggtcttgcagtcgtcgttcaacaccacgccggagatggagaagctgttccgtagcaagaggcttgactcggagatcttctttgcgccttcaaactgattcattcgccggtggaaattggtccatccatctcgagtaaacttggtgtcctgggtgtgttcttagcagcttcagtttagaataatcaggttatgtcttcatcatcagttttttagatcgcttcatgtaataataaacttgagatggtacacatgtttcttaattagttctcttggtattttttatttgtttctcattaaacacaaaacaccgaataaacactgaatatagagcactatcaaattaataaataattagaattttctcacttaaaacatcgtatgcttgttataattacccatgttgtctataaattataaacaaaagcataaaaagcacaccattttcttttgtaacggtaggatgtctaataagggcccataaactggatcacagataacatatg

SEQ ID NO: 115113 - DNA, 570 bp, Zea Mays
atgggggcggctggaggacaggagctggtgcgagattgggaaagggagcgagaaaacgcggctgctgcagggcatcacggcggggacgaccggctccaagagcagcgaggggaaacgacggccggctacaggaaggggaccgagcgcgtctgggaaggatcctgggcgctgcggccatcagtagagaggggaaggggatgggatgccgacctgctgcagaaaaggaccagagagccgccatgggggaggctgcagccaggacgagcgccagagagatggctggcgagcagggaaatgcgagagggagatgggcgcgagaggaagggaaactccctggacgagtgccagagagatggctggcgagcagggaaatgcgagagggagatgggcgcgagaggaagggaaactccctggccgagcactagggagcagcgaggacgagcagaggcgcgaccaccatggcgaggagggccgacggccatgggagaggacgccgtgagggagagggaatcggctgggaaagatgaagacggcaagcgagcgtggctggtaaaaatcccagggagatag

SEQ ID NO: 115114 - DNA, 82 bp, Zea Mays
cctcctagccgcattaagaaaccccctagcagtgtgctttgttttcctaccactcatcctgttcaatagaaaaacattaagg

SEQ ID NO: 115115 - DNA, 360 bp, Zea Mays
ctcaccgtggaccgtgcagcgtgatggtctggcgacagtcaagcgcaaccagcggcggtggctatgcaccggtgagaatttccgggcacacagatggaccccccgcgacccacaccgccatgttccgatgagcaaactggatcagtgccccagacgcatccgcgactggaacaatggtcgagtctgcccacattgcactatcttcatgcgaagatgcaccactgttggcgacgacatcaacacccaagcgaaaactggagaagcggcctcgtatgcggcggtagagccgaggctaatgcctgcgacgttcgtggcccactccgaccgcagaccgaccgtgtggcacaggcaggaagctta

SEQ ID NO: 115116 - DNA, 237 bp, Zea Mays
atggccgacctcctatttctccgttggcccaggcgctgccctcaccctggccgagtccctcgtgctcctccctctgcccttggcgcagggagccatcgtggcctcgtcgagctccagcgcttctgcacgctctccagcgataatgcccaggtcgagccatgtgatgctccatgctgttacatgatgaggaagaagcccctttatctctatgacatgtgggcccaaggccatgggtaa

SEQ ID NO: 115117 - DNA, 115 bp, Zea Mays
atgacttcaccctccgtgctgacactctgggcccgccggggcctcacgcccggcgcccgtgcaactaacatcaaatcacacgtaccttaatgtttagaaataaataataattata

SEQ ID NO: 115118 - DNA, 396 bp, Zea Mays
atggggttttaccggagtttgacaacatcgcgtcgggactgcgtagattggcggtggagctcgctgagcgacgatgacgaggcggctactgcagcccgaaaccagatggagggggctcgacatgtgagagcactcgcgcgcagtcaaggggtagcaagggtgtgtggtggctgcgacggccatggagacggaggtgcggcccagagctcaggcgtgagctgggcatctccggcgcccacgggagtttctgcaggacaaaacaaaacaccaggagagttcggatttgaggggaaacaggggggtcggattccaaccattggggtgccgagcacaaggggcataagtccggccatggctgctggccgagcagagaactcgccgggagaaacaccgtag

SEQ ID NO: 115119 - DNA, 174 bp, Zea Mays
taggtgttgataaatattatatgcactctcaggatgaggaacaatttcaatataaccttcatttttcatgatagaaagcacaatctccatgtcacttatattcatttggcaaccatacgtcttgtgatagatgcgtcccttggttgaagttgaagttgttgaaccagacactaa

SEQ ID NO: 115120 - DNA, 1862 bp, Zea Mays
atggcccgtggcgaggtgtccatgtgcacgccgggtttcgcgttaagggtagtgcagagccggtgcgtccgggtcgacctacatcttcgcgctctactccaaggtgctccgctccaagctgggctacaaccaggagacgctcaacaagctctccttcttcaaggacctcggcaccaacgtgggcatcatatctgggctggtgcagcaggtagccccgacgtggctggtgctgctcatcggcgccggcatgaacctggccggctacctcatgatctacctggcgctgacacgggacgcacggcgccgccgcccgtctggctcatgtgcttctacatctgcttcggcgccaacgcgctcaccttctccaacaccggcgcgctcgtcgcctgcgtcaagaacttcccggagagccggggcatcgtcatcggcctactcaagtcctttgtcggcctcagcggcgccatctacacgcagctctacctcgccatctacggcgacgacgccgcgtcgctcgtcctcctcgtcgcctggctccccgccgccttcaacatcttcaccgtctacaccatccgcgtactgccgtatgcccgccgccgcgacggcgggaagccatacaacacgcccttctaccacttcctgtacctctccctcgccctcgcctcctacctcctcgtcatgatcgtggtggagaagcaggtgcagttctcccacgccgcgtacgtcgtcacctccacggctctgctcatcgtcctcttcagtcccgtcggcgtggtcgtcaaggaggagtacaaggccgtatcccagctagaggagtcactgcagcagccgccggccatcgctgtcgaagaaccaaaagcaggcactgctggcaaaggcgacgacgagtcatcgtcgcctcccttgtgtggcggcggcggcatggcctgcctcaccaacatgttcaagccgcctgcgctcggggaggactattcaatcatgcaggctctggtcagcgtggagatgctggtgctgttcgtcatctccgtgttcggcatcggcggcacgctgacagccatcgacaacatggcgcagatcgggcagtcgctgggctacccggccaagagcatcaacaccttcgtctcgctcatcagcatctggaactacgccggccgcgccggcgcgggctacatctcggaattcctcctcgcgcggtacaggctaccgcggccgttggtgctgaccgccgtgctcctcgtctcctgcatcggccacctattcatcgcattcggcgtgccgcagtctctgtacgccgcgtcggtgatcatcggcttctgcttcggcgcgcagtggccgctgctgttcgccatcatctccgaggtgttcgggctcaagtactactcgtcgctcttcaacttcggctccgcggccagccccgccggcgcctacgtgctcaacgtgatcatcaccgggcgcatgtacgacgccgaggcgaccaggcagcacggcggcgtggccgccgtgggggacaagatctgcaagggggtggtgtgcttcaagcgccccttcatcatcatcacgggcgtcacgttcgccggcgcgctcgtgtcgctggtgttggtctggaggacaaggaacttctacaggggggatatctacgccaagttcaaggtgacaccggcggcggcttctgagtctgagtccctggacggcaaaaacgtcgagatggcggaggagacggagggaaagaggaagaaacaggtggtcaacgacgacttgtactagcttcgtttgattggagcagtgtttggagtgtaatcgtcagtcctcaggctatccgcactcgggcaactctaaatttctactctaaaaagaatattctatcc

SEQ ID NO: 115121 - DNA, 112 bp, Zea Mays
gcctcaccaagtcatcatctccagtaacgatgttagcgaaagtcaatttaatctggtgttgaacattgagttgcaacaaatcatagattcagactgagtcaccgcagctaga

SEQ ID NO: 115122 - DNA, 201 bp, Zea Mays
atggccgagccgtgttgggctgcgcgtgccacactggccagctgcgagaccgcgcagggctcggactgccacgtcgcgggccgagccgaccgttccctggcccctgtatcgaggatcgtgccatgtcggggccacgccatggccgcgagccacaccatgggtcgtagttgcgagcacgacgcgggcgggctagccgcgtag

SEQ ID NO: 115123 - DNA, 114 bp, Zea Mays
tattcattttcttttctatttcagatttacttttaggttttaaatttcaattcagttttgagtttgagattctaattttaaatgcgcaaccaaaatccagaatgatgcaatatc

SEQ ID NO: 115124 - DNA, 342 bp, Zea Mays
atggagacaacatcagtcctacttacttcacttgttgtgctaagcatgcacccagaatggcaagagggagcaagcgaagaagttttgagccactttggaagaaccagaccagattttgatagcttgagccgtaagtgcaaaaccaaggtaaccatgattctccatgaggcccttaggttgtacccaccggcaacctttctaaccagaagaacttataagaaaatggagctcattggaattaaatatcttgcaggagtggacctctttctgcctgtcatcttcattcacagtgatcccaacatttgggggaagatccagaaagaaaagtcaagaatgtcttaa

SEQ ID NO: 115125 - DNA, 697 bp, Zea Mays
aggcaatcaaatggagatgcaagcctaggattgacaacagaagatgtgatcgaggaatggaagctatttttctttgcaggcatggagacaacatcagtcctacttacttcacttgttgtgctaagcatgcacccagaatggcaagagggagcaagcgaagaagttttgagccactttggaagaaccagaccagattttgatagcttgagccgtaagtgcaaaaccaaggtcaggctttatttcaagattccaaaattgtgaattattaaagggatgtgtagtatccatttttatcgaattaatggagactaagtaaaaaataaataactaaatagaaatgatttgtttttattcaattcaataatagctaattaacataaatctcataatgtgattctggtgcacaactgtgggtttaaatctaaaaggtagtcgtggttaaatctcagtgatacattatatatatgccacatgttatcgctttctgagtctgaatatgctaaaaggatgatatggatagaaatgccgctaagtgttaaacaggaacattacttgaggaagagtaaataatccagtgttttccataccatataattgaagcaacaatttggtcatctgttatatatttgcaggtaaccatgattctccatgaggcccttaggttgtacccaccggcaacctttctaaccagaagaac

SEQ ID NO: 115126 - DNA, 609 bp, Zea Mays
atgggcaggggtgagctcggtaggagcgtgcgcgcgcagggaaacttcaaggcgctggaatctgcaggacgcgcggcgagctggagcagagggcagggcacggcggccagcagagaaacgagagggagagggcgcaccgtggggaagggagtagagcgcgcaggggagctgggcaccaagctggagctcgcggcaacagggagcagggcgaaccatggcagaaaggtccgagccgaggaaactccggccgggcgcgcgctggaagttccatggctggggagggcaagtagagaagcatggcgcacagactgggtgagctccatgctggggccagggatgcgcggagggagtcgccatgggagagggagctgggtcggcgcacaggggaggaggctggaggccgggcttgaagacgcggctgcgcgccatgggctagagagcactgagcagaggggccagggcgcggaggccaggaagctcggccaggtgctggggcgagcgagagaggaacgagctgagggggcgcggcatgagagcaggcgcgcacgcagggaagctctggccagggagatgaagcgcgcagagggtagagagaggagggacggctga

SEQ ID NO: 115127 - DNA, 1470 bp, Zea Mays
catcgaactaattcaataattaagctaacggaaatatggatcgacttaccatactaaatcaaacttgcaaccacgaaatcgatgacgcctttcagctctagtatttcaccgaacacatggtgagtgctgcatcgaatcgcactcttctccatccacatcgagaatcctccggtcgcgtactgatttatttccttctgtgcctaatcttctaggatttttggcgtagacgaggatgacgattgatgacttgttcgagctttttgtcaagcacttggtgaacatcacgctgccagcttcatcttcacccaacgctttgtatttcttgatgatgcacagaacgacgacaagattgataacgcacgtgtgtgatgaggcagggtctgtggatatgtgcgcaagggaaggtgagcttgtggtgccgagagtcgacggcgagcaggacgtggatcagggagtttgcttgggagtcgagtaagggatgacgggttcgacgactcgacggcaaacacaaacacgccgaaacccgatggatgaggagcaagcgcacgtggtgcgagcagcacggattttaagcgtggagaaattgcccacggcgaaacgaatagattaaggagcgctcgtgaactctatggaggaaccggcggcagtcgatgccagagcgcacggcgagggagcttcgcagttcgatgaggtcgtggccgggcgaattctacggcgcggactgcttcacgaccaggacggctgccacgacgtgcacgacgtcgccatgccacaacaccaccatggccagggaacaggaggagcggccaagcagagctcgcagctgcgcgcagggacgaccaaggaagcgcgtggcatgggcaggggcgagctcggcaggagcgcgcacgcgcagggaaacttcacggtgctggaatccgctgggcgcacggcaagctagagcagagggcagggcacgacggcaagtagagaaacgagagggcgagggcgcactatggggaagggagcagagcgcgcaggggagctaggcgccgagttggagttcgcggcaatagggagcagggcgcgccatggcagaaaggtccgagccgaggaaactccggccgggcgcgcataggaagttccatggctagggagggcgagcagaggagcacgacacgcagattgggcgagctccatgctagggccagggacgcgcggagggagccgccatgggagagggagctgggtcgtcgtgcaggggaggaggctggaggccgggcttgaagacgcggttgcgcgccatgggcgagagagcaccgagtagaggggccagggcgcaaaggccaggaagctcggccaggtgctggggcgagcgagagaggaacgaggtgaggggacgcggcatgggagcaggcgcgcgcagggaagttctagccagggagatgaagcgcacagagggtagagagaggagggacgactgagcgctcg

SEQ ID NO: 115128 - DNA, 192 bp, Zea Mays
aactgcgaagcttcctcgccgtgcgctttggcatcggctgctgtcgattccgccataaagttcacggatgctccttgctcagtatgtttcgcagtgggcaaattctccacgtttcaaatccgtgttgcttgccccgtgtgcgctcgctcttcatccatcggattttgcgcgtgctcgcgtttaccgtcgagt

SEQ ID NO: 115129 - DNA, 2207 bp, Zea Mays
ctcctctttcgatagctggcgaaggcgcggcgcgcagggccagtagcaaccctcccatggcctacgctgcgcctcccatggcgtcgtccctcaccgcctcccacccccctctttccccgtcccacctcataacccatccgcatcgctgccctgcgcgccccaaccccaccaccggcctcctccgcctcaccccgtctcgccgccgcggtcgtccccccgtggccgtccgcctcgcaatatctgcctcgtccacctcagccccgcccccgtcggcggatcggtcggaggccgcgtcgtcgctggagagatacctctcggcgacggtgacgggagcggtgatgggaacgggggcggccccaccagcttcggccccgccgcgcgccccgccggcgatgaaggggggacggaagcagtatagcgcgttgggggctgtcacgctcgagaaggccaagctcgatctctcccagcgccgcaagaatatcatgcccgagctggcgacaggtggtggtggtggagatattggaaaaaggatcggtcatggtgggggtgatggtggtgatgatgatggtgacgatgatgactactttgatgattttgatgagggagaggaagaaggtgggcttttcaggaggcgaattgttgtacaagagctattcaatagggagttcgtagaagctgtgttgcaagaatggtacaagacgatgagtgatttgcctaccggtcttcgccaagcttgtgagatgggtttggtgagttctgcacagatggtacgttacttgtcaatatttgcaagacctacaaacgctaggtccttctcaagagctcttccaggctggctttccagaggtcttgttggaaggacacttgcagatccatcattcccacataaaatgtctttggagtttatagctaccattgcgtcatctatttggtgtgaaatgaatattcgcaaagagaggtttaaacaagaatgggatttggtgattgttaatgctttgactgcagcttgttgcaacttgatggttcttggacttttagcaccatgccgttcatatgcgagtacatctcgatttgacttccaaaatgcaattgagaaacttccgaacaacatatttgagaagagctatcctttgagagagtttgatctagcaaaacgaatcagtgcattcttttataaagctgctgagcttagtctggtcgggtttgtagctggctctgtgcaagggggtatgtcaatagtcttgtccgcaagaaaagaaaggaggttatcggtgactattccctctatcagcaccaatgctcttggttatggagctttcctaggactctatgctaacttgcgttatcaattgctatgtggagtagaccaatatatggtcaagcgcttcgatgttttgggtgtggcaatcttcttcagcacagcagcaagactgatgaatattcagattggtgaggcatcaaggaggacttggcttggcgaggaagctgatccacagtactcagatcgactgttgagagcatacaagagacctgtggaggttgacgcggaccaatcaaggtggtttatatccaaggatgcaattgtatctggccttggtcttctaggtatcaagcagggtggacctgaggcaacattttctaagtctcgtcgaaagagagtcatccgcaaaaaggtcacttcaggttgagtttagtggatttggatagcaatgctggaacaattttgcttctgttccactatgccagagggaggtctacccaaattatggtaaatgagaaaaaggtatcaagtcaaccagcacgtggtctgtcggcgaagggatcaaagggtttgttactgggaagggttagttaaaaggtgccaattactattttataatttaattgcagttatttaaggtaagaaaatatgttgttttcttgtattgctgtgaggcaaatagacacgtttagtggtagttttgtaagattgttaatgtactgactttacatgagaaatggattctgcatttttatatagatcaagtagctgccacatgcttgtatctatcttttgaggtcaattaggtcagggtcctgctttgttgctggttaggactacgcttttataaaaacttattttaagtacgaaggccgatctctgtggaagtttcatcgtgctatttccaagactactacattttctaaagaggaatgaacctcaatgg

SEQ ID NO: 115130 - DNA, 547 bp, Zea Mays
tcaggacagaacagaaatcaggtccaagccagaaaacagtaaaatggcccaatgtaagaccatcgtcgcagcagtcctcgtggttgctctcgtggtttcgacgatcccagccagcgccgatacgaacctggaacctgcaggaggctctacggagggcagtgcccgcacctccggcatgcagaaggaagagacccgaggcaacaagaagccagcgacgctcgctggatctcttggttcaggcaagaatgccatctacgggtaaatgattagaaggaatcctgcttcggaaggtatgaaaacaatggggatgtgctcaacaatcaatctcaaccccaggtgacggcaatgagtcacccacaggaatgtaaccggatatagatggacattgctcgttccatatttctttttcatattttctcttcaaattcaattgaaatacggataatattgtgtgaggtcggataaaatttaaatgaatatcagtatcttatccaactttaaatatatgtatactgataaaaatcggatacaaattagatactggata

SEQ ID NO: 115131 - DNA, 1331 bp, Zea Mays
tccccctcacgactcctattcttcacgcatgccggcgctcctcctctctagttgttgccatctccctcctcggccacctctactggcaccctctcttccctggctcccgagcttcaaccatggagcacgacccctccttgcctctccgtagcgccaggacctcctccgagctcgacatggatgtgctgtgtcttccccagtaccgaccatgtcaagctccggtgacccccttcccacggcacagcagaccggcgccagacgttagcgccgtctcagatctttgcctcctcacactgctcttctccaccatgcagcttgtgccctctctgcttgccgacgacttgcgtcttctctagccaagccacagccaagctccactccatggtcgcacccccctccatggcttcttccagctggagctcgtcgccgtcctctggtgaacgcccgaacctccaacctcgccatggacgctgtcctgcacgcaccagcggtgcttcctccctcgccggagctcgccggccaacctcgcctcaccttccatggccgcgtgcgagctccgctaccgggcgtcgttcccttgtgccacagtggccccgcaatctccgcgtctcttgcgacgtcccgatctacgcagccctgccccgtgccattgatctgtgcagccttgacgtgccatcgtcgttaacagtttgcctctcctacgctgcgccatccttattccctctggtcgcgacaaaatcctgttccaccaggtcgtcgggcgctgctctcagctcgctatggggcttgctgggctcgccatgttttaaaatgtcgtcgaatttgcctgcaaccgcggtctcgtcgagtccgtcgctcttcaacttcggcgaccactatcatcttcattagcgcgccatcgtctagtccctgctctctggtgagcttggccctgcagcttgaaccaggaagtcatcgctgttcatgtgctcgccatcaaccgccgctggtgctcgacgaatggcttgaacccagagttcattgtcgtttctcatctgcgatctcgtcagcctctactcgataagtgtttggtgaagggcctgagccaagtgttgttgctgcttccacagatttctaatcaatttggtaatagtactctggctcgctaatcctactaattaattcggtgaatagattagatggatattaatcgcgacgttcgaatcagatacttgtgatgtgttgtagtaattatccgtatctcattacatatgtttgttgttaggttatttctctacggggtaggatattgtgtttcgcttatttaatctcgtctggtacgtagacctatt

SEQ ID NO: 115132 - DNA, 95 bp, Zea Mays
gaagaacatatagcccatggtgaaattgtactaattatcgatggtgttagtaatgtatttcaatattcagaagaaatgcaacagaatatagcaac

SEQ ID NO: 115133 - DNA, 157 bp, Zea Mays
tctgtttgaatgcttcaaacctttgtggtggaacctttatatgtttgaacctctgttgtggaagaactagtgtgctggaattgtgtatgacttgtgatgagaatgttgtgtatgatggcttttctgtgtattatgattctgtgagctatcatgagag

SEQ ID NO: 115134 - DNA, 823 bp, Zea Mays
cccaccacgccacccgcgcccaccaccggcggcgcaggggaggagccggccatcctcagggcggcgctgggctccagcaagctgcacatcgaggggtattgtagattcatatcagcgggacaccccgcaaggccgcaagaagaaacagcgcagcaacaaatacgctgaagagtggaaagcgagagcctgtgctggtcgactgtgagtttttccccctttcgcctctcctgctgggccgtgggccgtgggccgcggccccggcgcatggcgtcgtcacgggtgatggcgtcgtcgtctccaccgcagcacgccggggcgggctcgtccgcggacctcgcgcgattcaagagcagcggcgtcggatcgatgaacatggacgacatcatccataacatctatgaccccgaggccgtcaacactgccaccgccgaaagcgccggcctcggcccggcggagccctccctggcagccctagaggctgcggctcggcggacgtcggaggaggtgtggaaggagatctccgccgctggagggctccccacgctcgtcctccctacccctcccgctggggttccctgacggtgatggagatgcggcagggagcgtggcggggggagtgggcggcgtgaggggaggcgggaagcgggcgcttctggatcctgcgaactgcaccatgatgcagcggcagaagcgcatgatcaagaaccgagagtccgcagcgagttccagggacaggaaacaggaagagttgcaagcacaactacaagctcaacaggccacacttgaagaaaaccaaagtttgctgcgccagacccaagaggaa

SEQ ID NO: 115135 - DNA, 149 bp, Zea Mays
catgttttcttctttcaatttgtagatttaaatgagattcaaaatcagttcaaacttcgactcaattttagttgtgcacttaaaactccagtatgaagtataaagtttaattttattaattttatttattatcttactttaccattaat

SEQ ID NO: 115136 - DNA, 579 bp, Zea Mays
atgggcgactccggcggaccccaccaccaccgcccttcgccgccgcctctgctggacgccggcaagcgacggcgcatccccaacgtccgcctcgctggctccgtcccgctcccttcccacctgccccacccgcgccgcgtccccattgcccccgccaccaggtcccgcaaacccctccaacttcagcataacagcaaccagcatgaccacccctccgcggagccacccaataccctcctaaaacccttcgtcgacagcggcgacgacgtcgtcttggccgccgcttttccccgcaaggtcagggccccgaagtccacagcatgggaggattcggagatggagacggagacggaaatggaggagcaggaggaagtggtggacgtgccgagctggctatgggggatgggtatggggcgctacgcggcggcgttcgaggcgcacgaggtggatgctgaggtgctcccctggctcactatggacgacctccgggacatgggcattggtgctgtcggagcacgccgcaagctcttctgcgccatccagaggctcaatttgcagccgcctccatcacggaggtga

SEQ ID NO: 115137 - DNA, 1076 bp, Zea Mays
aactttttctccttcctctgcctgcaccttcctcctcctgctcttgtgtcggccgcgggccaccggagagggggaggcatgagaggatggtgacgttgctccggccgcaccgccacgcccatgggccggccgccgtcagcgttcgccgcctcagcacaagacacagccaacaccagctgccgccgccgccgccgctccctggccccggcagcgtcgtcgtcgtcctgaggcccatggcacaggacccctcccacccgcaccgccagagcaaggacgacaccgccgcgccaccgcagcagccagagataccgcgcgacgtccgggaagcagcggccagcaccagcgcaagcagcggcggaagcgacgccggttcctcctggctccagctcgggatcggcggcccgtcttcggcgtccccgccgccgtcacccccgcaccggctgaaacggccgaggcccgatgacgacgcaggcccttcggtgtccgtatccgtacagccggcggctgcgcccctgctcccgccgccgcagctgcaactgcagctttctctgcaaccagggccttcgtcctcgtcctcggcagcgccggtgggggcagtggtggcggcggcgccgccacctcccgcccacgaggccggcctgtggttcctgctccgggcagcccagaaccagaggagggagccgccattgctgcagatccccaggagcttcttgagggttagagaggggaggatgacagttagagtagtgatgaggtaccttgttaacaagctgggccttgacgacgattcacaggtatgacatgcattgtctgatgccgtttttttttttttttgcttgccatagttttaaattttttccccttcttgattgattaccatctatgcatatatgcgtgtgtgtgtttttgtttgtgcaatgggtggtgaacttcttgcttgtgttttaaacaataacctttacttactagctagctactacacgacttatatgttctaggtttatcgtttgtaggattagtatgagaaatcaaaataaagtttaaatcaaaatataggaagagaagaggtttcctga

SEQ ID NO: 115138 - DNA, 3181 bp, Zea Mays
cgctgcgagaggggtaaagaacttagaagggcaggcaggagaagcgacacaggaaactgacgtcgccttcggcggcctgctacttaaataaatcccctcgcctcgcctccggctgcctcttccctttttccttccgcgcaaatcactcaggtgccagttgcgcggcggagatcgcgacgaattccggacggcagggaggtggtcgggggaactgggaagtgcatgtgagatccgatggcggcggctgcctgcgccggtgcggaagcaggacgcggatgcggagggaaggacgcgctgttcgtcgagctgtggaaggcctgcgcggggccgctgtcctgcgtgccgccgcttggggagaaggtctactacctcccgcagggccacatcgagcaggtggaggcatcgacgaaccagcttgccgagcagcagggcacgcccctctacaacctgccatggaagattccctgcaagctcatgaacatcgaactgaaggttgagccggatactgatgaggtgtacgcccagctcaccctgctccctgataagaagcaagatgagaatacatctacaacagtggaggaagaggaggtggtggtgcctcctgcgctaccagccacaaatgagggtcctcacatccattccttctgcaagacattgactgcctcagacacaagcacacatggtggtttctcagtgttgcgccggcatgcagatgagtgcctcccaccattggatatgagtcaacatcccccaaatcaagaattggtggccaaggacctgcatggggccgagtggcggttccgtcacatctttcgaggtcagccacggagacatctcctgcaaagtggttggagtgtttttgtgagcgccaagcgtcttgtcgcgggggatgccttcatatttctcagaggtgagaatggggagctccgtgttggagttcggcgtgcactgaggcaccaaaccactatcccatcttcagtcatatcaagccacaatatgcatcttggtgttcttgcaacagcatggcatgcagtgaacactgatagtatgttcactgtctactacaagccaaggactagtccagctgaatttgtggtttcgcgagataggtactatgaatcactgaaacgaaattattcaatagggatgagatttaagatgagatttgaaggtgaagaggcagcagagcaaagattcactggcacaatagttggaataggtgcttctgatccatctggttgggctgactcaaaatggcgttcccttaaggtgagatgggatgaaccttcttctatttctcgtcctgaaagagtttctccttggcaaatagaaccttctgttagcccatgtcatgtgaaccctcttccagttagattcaagaggtctcgatcaagcgttaatgctttgccatctgacgtgtctactgtaaccagagaagtcacttctaaagtcatggcagactcgcagcaaaatagtctcacaagagccttgcacaatcaaggaaggacacaattgacagttcgataccatgataacagtgatgtgaagactactcaggatcttaccgtgtggtcttcaggaactgagcaacagagaaacaatattgctgcccagacaaagctatgtctggagggttggacgccaactagaagtcctgaaggctacaatcagatattctcggcatttaaaccactgaaagatatacataacccacttggtccttttcctagtcaaatatctgggactcactcaaatagctgggacacagctgatgctcgttatccagtccaacaagctaattacagcatgttacctggcacatggtctttgaggcctcataacagtggttttaggatgaatcaacaaaattatctagtgatgcctgaaggtgcaaattttacggggaaatcagctttcacttcacttcaggaccatggcactgataaatgctccacaggctgctttggtcatattgagtcaagttcccacacagaccatgcatcctcaagtttgatcaggccccagcctttggtccttggaaatggtgttcagaaaagcaaaggcacttcatttaaattatttgggattccccttggcagcccagaaaaatctgaacctctggtatccccaccaagtgtcgcatatgacgggaaacttcaaacttctccatcagaaaaagggaatcagctagacgtagttgaagtggataattgttctcatccttctaagactgtgaagccacttgatggtcctcagtcagattctattacagagaataatcagccttctccagaagctacccttaatatccagaacaaagtgcaaagtagttccaccagaagctgcaagaaggcctgacacaatataccgagtaaaggccttgggttcgacgcagcttttctgcaaaaatgtagggatatggcgtgcctcggttattacttcatcggactccactcaagtgtgagccgcctgttcataagcaaggtagtgccctcggcaggtcgattgatctaacaaagttcgcttgctatgatgagctgattgctgaactggatcagatgtttgacttcgatggtgagctgaagagtccatgcaaaagttggttagttgtctacactgacaatgaaggcgatataatgctggttggtgatgacccctggaatgaattctgcgatatggtccacaagatcttcatctacacgagagaggaagtcgaaaggatgaacccaggtgccctgaactcaaggtctgaagatagtctatctgactcgctgggaagaggggtagcttccagagatccccgaggaggcgggtctacttcggctctcgattccgagaactgctagtttgttcagtcagtgaggcctttggaagtgaagcagacaaaaggcgtgaatcttgcggtgtagagtgtagttggtacattgtgtgtatgcctccgggtaagccctgcggtacccagtttgtgtcctggcgccagtttaccatttaagctaagtttttgggtgtgccctgtgctggggtctgggctctagttattgtagcagagcaggcaatgcatgcaagaaactgatgatgcgcctgtttggccctctttcccttcccaagccatgtaaatagccttggctctgaagcgtagtattgtattgtcgacagccgtacttgagatagtactccaaga

SEQ ID NO: 115139 - DNA, 3090 bp, Zea Mays
cgctgcgagaggggtaaagaacttagaagggcaggcaggagaagcgacacaggaaactgacgtcgccttcggcggcctgctacttaaataaatcccctcgcctcgcctccggctgcctcttccctttttccttccgcgcaaatcactcaggtgccagttgcgcggcggagatcgcgacgaattccggacggcagggaggtggtcgggggaactgggaagtgcatgtgagatccgatggcggcggctgcctgcgccggtgggtgcggaagcaggacgcggatgcggagggaaggacgcgctgttcgtcgagctgtggaaggcctgcgcggggccgctgtcctgcgtgccgccgcttggggagaaggtctactacctcccgcagggccacatcgagcaggtggaggcatcgacgaaccagcttgccgagcagcagggcacgcccctctacaacctgccatggaagattccctgcaagctcatgaacatcgaactgaaggttgagccggatactgatgaggtgtacgcccagctcaccctgctccctgataagaagcaagatgagaatacatctacaacagtggaggaagaggaggtggtggtgcctcctgcgctaccagccacaaatgagggtcctcacatccattccttctgcaagacattgactgcctcagacacaagcacacatggtggtttctcagtgttgcgccggcatgcagatgagtgcctcccaccattggatatgagtcaacatcccccaaatcaagaattggtggccaaggacctgcatggggccgagtggcggttccgtcacatctttcgaggtcagccacggagacatctcctgcaaagtggttggagtgtttttgtgagcgccaagcgtcttgtcgcgggggatgccttcatatttctcagaggtgagaatggggagctccgtgttggagttcggcgtgcactgaggcaccaaaccactatcccatcttcagtcatatcaagccacaatatgcatcttggtgttcttgcaacagcatggcatgcagtgaacactgatagtatgttcactgtctactacaagccaaggactagtccagctgaatttgtggtttcgcgagataggtactatgaatcactgaaacgaaattattcaatagggatgagatttaagatgagatttgaaggtgaagaggcagcagagcaaagattcactggcacaatagttggaataggtgcttctgatccatctggttgggctgactcaaaatggcgttcccttaaggtgagatgggatgaaccttcttctatttctcgtcctgaaagagtttctccttggcaaatagaaccttctgttagcccatgtcatgtgaaccctcttccagttagattcaagaggtctcgatcaagcgttaatgctttgccatctgacgtgtctactgtaaccagagaagtcacttctaaagtcatggcagactcgcagcaaaatagtctcacaagagccttgcacaatcaaggaaggacacaattgacagttcgataccatgataacagtgatgtgaagactactcaggatcttaccgtgtggtcttcaggaactgagcaacagagaaacaatattgctgcccagacaaagctatgtctggagggttggacgccaactagaagtcctgaaggctacaatcagatattctcggcatttaaaccactgaaagatatacataacccacttggtccttttcctagtcaaatatctgggactcactcaaatagctgggacacagctgatgctcgttatccagtccaacaagctaattacagcatgttacctggcacatggtctttgaggcctcataacagtggttttaggatgaatcaacaaaattatctagtgatgcctgaaggtgcaaattttacggggaaatcagctttcacttcacttcaggaccatggcactgataaatgctccacaggctgctttggtcatattgagtcaagttcccacacagaccatgcatcctcaagtttgatcaggccccagcctttggtccttggaaatggtgttcagaaaagcaaaggcacttcatttaaattatttgggattccccttggcagcccagaaaaatctgaacctctggtatccccaccaagtgtcgcatatgacgggaaacttcaaacttctccatcagaaaaagggaatcagctagacgtagttgaagtggataattgttctcatccttctaagactgtgaagccacttgatggtcctcagtcagattctattacagagaataatcagccttctccagaagctacccttaatatccagaacaaagtgcaaagtagttccaccagaagctgcaagaaggttcataagcaaggtagtgccctcggcaggtcgattgatctaacaaagttcgcttgctatgatgagctgattgctgaactggatcagatgtttgacttcgatggtgagctgaagagtccatgcaaaagttggttagttgtctacactgacaatgaaggcgatataatgctggttggtgatgacccctggaatgaattctgcgatatggtccacaagatcttcatctacacgagagaggaagtcgaaaggatgaacccaggtgccctgaactcaaggtctgaagatagtctatctgactcgctgggaagaggggtagcttccagagatccccgaggaggcgggtctacttcggctctcgattccgagaactgctagtttgttcagtcagtgaggtaatcccgtgtttgctttgcttctcgcaggcctttggaagtgaagcagacaaaaggcgtgaatcttgcggtgtagagtgtagttggtacattgtgtgtatgcctccgggtaagccctgcggtacccagtttgtgtcctggcgccagtttaccatttaagctaagtttttgggtgtgccctgtgctggggtctgggctctagttattgtagcagagcaggcaatgcatgcaagaaactgatgatgcgcctgtttggccctctttcccttcccaagccatgtaaatagccttggctctgaagcgtagtattgtattgtcgacagccgtacttgagatagtact

SEQ ID NO: 115140 - DNA, 2927 bp, Zea Mays
cgctgcgagaggggtaaagaacttagaagggcaggcaggagaagcgacacaggaaactgacgtcgccttcggcggcctgctacttaaataaatcccctcgcctcgcctccggctgcctcttccctttttccttccgcgcaaatcactcaggtgccagttgcgcggcggagatcgcgacgaattccggacggcagggaggtggtcgggggaactgggaagtgcatgtgagatccgatggcggcggctgcctgcgccggtgggtgtgcggaagcaggacgcggatgcggagggaaggacgcgctgttcgtcgagctgtggaaggcctgcgcggggccgctgtcctgcgtgccgccgcttggggagaaggtctactacctcccgcagggccacatcgagcaggtggaggcatcgacgaaccagcttgccgagcagcagggcacgcccctctacaacctgccatggaagattccctgcaagctcatgaacatcgaactgaaggttgagccggatactgatgaggtgtacgcccagctcaccctgctccctgataagaagcaagatgagaatacatctacaacagtggaggaagaggaggtggtggtgcctcctgcgctaccagccacaaatgagggtcctcacatccattccttctgcaagacattgactgcctcagacacaagcacacatggtggtttctcagtgttgcgccggcatgcagatgagtgcctcccaccattggatatgagtcaacatcccccaaatcaagaattggtggccaaggacctgcatggggccgagtggcggttccgtcacatctttcgaggtcagccacggagacatctcctgcaaagtggttggagtgtttttgtgagcgccaagcgtcttgtcgcgggggatgccttcatatttctcaggactagtccagctgaatttgtggtttcgcgagataggtactatgaatcactgaaacgaaattattcaatagggatgagatttaagatgagatttgaaggtgaagaggcagcagagcaaagattcactggcacaatagttggaataggtgcttctgatccatctggttgggctgactcaaaatggcgttcccttaaggtgagatgggatgaaccttcttctatttctcgtcctgaaagagtttctccttggcaaatagaaccttctgttagcccatgtcatgtgaaccctcttccagttagattcaagaggtctcgatcaagcgttaatgctttgccatctgacgtgtctactgtaaccagagaagtcacttctaaagtcatggcagactcgcagcaaaatagtctcacaagagccttgcacaatcaaggaaggacacaattgacagttcgataccatgataacagtgatgtgaagactactcaggatcttaccgtgtggtcttcaggaactgagcaacagagaaacaatattgctgcccagacaaagctatgtctggagggttggacgccaactagaagtcctgaaggctacaatcagatattctcggcatttaaaccactgaaagatatacataacccacttggtccttttcctagtcaaatatctgggactcactcaaatagctgggacacagctgatgctcgttatccagtccaacaagctaattacagcatgttacctggcacatggtctttgaggcctcataacagtggttttaggatgaatcaacaaaattatctagtgatgcctgaaggtgcaaattttacggggaaatcagctttcacttcacttcaggaccatggcactgataaatgctccacaggctgctttggtcatattgagtcaagttcccacacagaccatgcatcctcaagtttgatcaggccccagcctttggtccttggaaatggtgttcagaaaagcaaaggcacttcatttaaattatttgggattccccttggcagcccagaaaaatctgaacctctggtatccccaccaagtgtcgcatatgacgggaaacttcaaacttctccatcagaaaaagggaatcagctagacgtagttgaagtggataattgttctcatccttctaagactgtgaagccacttgatggtcctcagtcagattctattacagagaataatcagccttctccagaagctacccttaatatccagaacaaagtgcaaagtagttccaccagaagctgcaagaaggttcataagcaaggtagtgccctcggcaggtcgattgatctaacaaagttcgcttgctatgatgagctgattgctgaactggatcagatgtttgacttcgatggtgagctgaagagtccatgcaaaagttggttagttgtctacactgacaatgaaggcgatataatgctggttggtgatgacccctggaatgaattctgcgatatggtccacaagatcttcatctacacgagagaggaagtcgaaaggatgaacccaggtgccctgaactcaaggtctgaagatagtctatctgactcgctgggaagaggggtagcttccagagatccccgaggaggcgggtctacttcggctctcgattccgagaactgctagtttgttcagtcagtgaggtaatcccgtgtttgctttgcttctcgcaggcctttggaagtgaagcagacaaaaggcgtgaatcttgcggtgtagagtgtagttggtacattgtgtgtatgcctccgggtaagccctgcggtacccagtttgtgtcctggcgccagtttaccatttaagctaagtttttgggtgtgccctgtgctggggtctgggctctagttattgtagcagagcaggcaatgcatgcaagaaactgatgatgcgcctgtttggccctctttcccttcccaagccatgtaaatagccttggctctgaagcgtagtattgtattgtcgacagccgtacttgagatagtact

SEQ ID NO: 115141 - DNA, 2909 bp, Zea Mays
cgctgcgagaggggtaaagaacttagaagggcaggcaggagaagcgacacaggaaactgacgtcgccttcggcggcctgctacttaaataaatcccctcgcctcgcctccggctgcctcttccctttttccttccgcgcaaatcactcaggtgccagttgcgcggcggagatcgcgacgaattccggacggcagggaggtggtcgggggaactgggaagtgcatgtgagatccgatggcggcggctgcctgcgccggtgcggaagcaggacgcggatgcggagggaaggacgcgctgttcgtcgagctgtggaaggcctgcgcggggccgctgtcctgcgtgccgccgcttggggagaaggtctactacctcccgcagggccacatcgagcaggtggaggcatcgacgaaccagcttgccgagcagcagggcacgcccctctacaacctgccatggaagattccctgcaagctcatgaacatcgaactgaaggttgagccggatactgatgaggtgtacgcccagctcaccctgctccctgataagaagcaagatgagaatacatctacaacagtggaggaagaggaggtggtggtgcctcctgcgctaccagccacaaatgagggtcctcacatccattccttctgcaagacattgactgcctcagacacaagcacacatggtggtttctcagtgttgcgccggcatgcagatgagtgcctcccaccattggatatgagtcaacatcccccaaatcaagaattggtggccaaggacctgcatggggccgagtggcggttccgtcacatctttcgaggtcagccacggagacatctcctgcaaagtggttggagtgtttttgtgagcgccaagcgtcttgtcgcgggggatgccttcatatttctcaggactagtccagctgaatttgtggtttcgcgagataggtactatgaatcactgaaacgaaattattcaatagggatgagatttaagatgagatttgaaggtgaagaggcagcagagcaaagattcactggcacaatagttggaataggtgcttctgatccatctggttgggctgactcaaaatggcgttcccttaaggtgagatgggatgaaccttcttctatttctcgtcctgaaagagtttctccttggcaaatagaaccttctgttagcccatgtcatgtgaaccctcttccagttagattcaagaggtctcgatcaagcgttaatgctttgccatctgacgtgtctactgtaaccagagaagtcatggcagactcgcagcaaaatagtctcacaagagccttgcacaatcaaggaaggacacaattgacagttcgataccatgataacagtgatgtgaagactactcaggatcttaccgtgtggtcttcaggaactgagcaacagagaaacaatattgctgcccagacaaagctatgtctggagggttggacgccaactagaagtcctgaaggctacaatcagatattctcggcatttaaaccactgaaagatatacataacccacttggtccttttcctagtcaaatatctgggactcactcaaatagctgggacacagctgatgctcgttatccagtccaacaagctaattacagcatgttacctggcacatggtctttgaggcctcataacagtggttttaggatgaatcaacaaaattatctagtgatgcctgaaggtgcaaattttacggggaaatcagctttcacttcacttcaggaccatggcactgataaatgctccacaggctgctttggtcatattgagtcaagttcccacacagaccatgcatcctcaagtttgatcaggccccagcctttggtccttggaaatggtgttcagaaaagcaaaggcacttcatttaaattatttgggattccccttggcagcccagaaaaatctgaacctctggtatccccaccaagtgtcgcatatgacgggaaacttcaaacttctccatcagaaaaagggaatcagctagacgtagttgaagtggataattgttctcatccttctaagactgtgaagccacttgatggtcctcagtcagattctattacagagaataatcagccttctccagaagctacccttaatatccagaacaaagtgcaaagtagttccaccagaagctgcaagaaggttcataagcaaggtagtgccctcggcaggtcgattgatctaacaaagttcgcttgctatgatgagctgattgctgaactggatcagatgtttgacttcgatggtgagctgaagagtccatgcaaaagttggttagttgtctacactgacaatgaaggcgatataatgctggttggtgatgacccctggaatgaattctgcgatatggtccacaagatcttcatctacacgagagaggaagtcgaaaggatgaacccaggtgccctgaactcaaggtctgaagatagtctatctgactcgctgggaagaggggtagcttccagagatccccgaggaggcgggtctacttcggctctcgattccgagaactgctagtttgttcagtcagtgaggtaatcccgtgtttgctttgcttctcgcaggcctttggaagtgaagcagacaaaaggcgtgaatcttgcggtgtagagtgtagttggtacattgtgtgtatgcctccgggtaagccctgcggtacccagtttgtgtcctggcgccagtttaccatttaagctaagtttttgggtgtgccctgtgctggggtctgggctctagttattgtagcagagcaggcaatgcatgcaagaaactgatgatgcgcctgtttggccctctttcccttcccaagccatgtaaatagccttggctctgaagcgtagtattgtattgtcgacagccgtacttgagatagtact

SEQ ID NO: 115142 - DNA, 2661 bp, Zea Mays
cgctgcgagaggggtaaagaacttagaagggcaggcaggagaagcgacacaggaaactgacgtcgccttcggcggcctgctacttaaataaatcccctcgcctcgcctccggctgcctcttccctttttccttccgcgcaaatcactcaggtgccagttgcgcggcggagatcgcgacgaattccggacggcagggaggtggtcgggggaactgggaagtgcatgtgagatccgatggcggcggctgcctgcgccggtgcggaagcaggacgcggatgcggagggaaggacgcgctgttcgtcgagctgtggaaggcctgcgcggggccgctgtcctgcgtgccgccgcttggggagaaggtctactacctcccgcagggccacatcgagcaggtggaggcatcgacgaaccagcttgccgagcagcagggcacgcccctctacaacctgccatggaagattccctgcaagctcatgaacatcgaactgaaggttgagccggatactgatgaggtgtacgcccagctcaccctgctccctgataagaagcaagatgagaatacatctacaacagtggaggaagaggaggtggtggtgcctcctgcgctaccagccacaaatgagggtcctcacatccattccttctgcaagacattgactgcctcagacacaagcacacatggtggtttctcagtgttgcgccggcatgcagatgagtgcctcccaccattggatatgagtcaacatcccccaaatcaagaattggtggccaaggacctgcatggggccgagtggcggttccgtcacatctttcgaggtcagccacggagacatctcctgcaaagtggttggagtgtttttgtgagcgccaagcgtcttgtcgcgggggatgccttcatatttctcaggactagtccagctgaatttgtggtttcgcgagataggtactatgaatcactgaaacgaaattattcaatagggatgagatttaagatgagatttgaaggtgaagaggcagcagagcaaagattcactggcacaatagttggaataggtgcttctgatccatctggttgggctgactcaaaatggcgttcccttaaggtgagatgggatgaaccttcttctatttctcgtcctgaaagagtttctccttggcaaatagaaccttctgttagcccatgtcatgtgaaccctcttccagttagattcaagaggtctcgatcaagcgttaatgctttgccatctgacgtgtctactgtaaccagagaagtcacttctaaagtcatggcagactcgcagcaaaatagtctcacaagagccttgcacaatcaaggaaggacacaattgacagttcgataccatgataacagtgatgtgaagactactcaggatcttaccgtgtggtcttcaggaactgagcaacagagaaacaatattgctgcccagacaaagctatgtctggagggttggacgccaactagaagtcctgaaggctacaatcagatattctcggcatttaaaccactgaaagatatacataacccacttggtccttttcctagtcaaatatctgggactcactcaaatagctgggacacagctgatgctcgttatccagtccaacaagctaattacagcatgttacctggcacatggtctttgaggcctcataacagtggttttaggatgaatcaacaaaattatctagtgatgcctgaaggtgcaaattttacggggaaatcagctttcacttcacttcaggaccatggcactgataaatgctccacaggctgctttggtcatattgagtcaagttcccacacagaccatgcatcctcaagtttgatcaggccccagcctttggtccttggaaatggtgttcagaaaagcaaaggcacttcatttaaattatttgggattccccttggcagcccagaaaaatctgaacctctggtatccccaccaagtgtcgcatatgacgggaaacttcaaacttctccatcagaaaaagggaatcagctagacgtagttgaagtggataattgttctcatccttctaagactgtgaagccacttgatggtcctcagtcagattctattacagagaataatcagccttctccagaagctacccttaatatccagaacaaagtgcaaagtagttccaccagaagctgcaagaaggttcataagcaaggtagtgccctcggcaggtcgattgatctaacaaagttcgcttgctatgatgagctgattgctgaactggatcagatgtttgacttcgatggtgagctgaagagtccatgcaaaagttggttagttgtctacactgacaatgaaggcgatataatgctggttggtgatgacccctggaatgaattctgcgatatggtccacaagatcttcatctacacgagagaggaagtcgaaaggatgaacccaggtgccctgaactcaaggtctgaagatagtctatctgactcgctgggaagaggggtagcttccagagatccccgaggaggcgggtctacttcggctctcgattccgagaactgctagtttgttcagtcagtgaggtagctccagctggaatatgttgcccttgttgtacggaagaattgtttgttcatcatgaggtaatcccgtgtttgctttgct

SEQ ID NO: 115143 - DNA, 2364 bp, Zea Mays
cgctgcgagaggggtaaagaacttagaagggcaggcaggagaagcgacacaggaaactgacgtcgccttcggcggcctgctacttaaataaatcccctcgcctcgcctccggctgcctcttccctttttccttccgcgcaaatcactcaggtgccagttgcgcggcggagatcgcgacgaattccggacggcagggaggtggtcgggggaactgggaagtgcatgtgagatccgatggcggcggctgcctgcgccggtgcggaagcaggacgcggatgcggagggaaggacgcgctgttcgtcgagctgtggaaggcctgcgcggggccgctgtcctgcgtgccgccgcttggggagaaggtctactacctcccgcagggccacatcgagcaggtggaggcatcgacgaaccagcttgccgagcagcagggcacgcccctctacaacctgccatggaagattccctgcaagctcatgaacatcgaactgaaggttgagccggatactgatgaggtgtacgcccagctcaccctgctccctgataagaagcaagatgagaatacatctacaacagtggaggaagaggaggtggtggtgcctcctgcgctaccagccacaaatgagggtcctcacatccattccttctgcaagacattgactgcctcagacacaagcacacatggtggtttctcagtgttgcgccggcatgcagatgagtgcctcccaccattggatatgagtcaacatcccccaaatcaagaattggtggccaaggacctgcatggggccgagtggcggttccgtcacatctttcgaggtcagccacggagacatctcctgcaaagtggttggagtgtttttgtgagcgccaagcgtcttgtcgcgggggatgccttcatatttctcaggactagtccagctgaatttgtggtttcgcgagataggtactatgaatcactgaaacgaaattattcaatagggatgagatttaagatgagatttgaaggtgaagaggcagcagagcaaagattcactggcacaatagttggaataggtgcttctgatccatctggttgggctgactcaaaatggcgttcccttaaggtgagatgggatgaaccttcttctatttctcgtcctgaaagagtttctccttggcaaatagaaccttctgttagcccatgtcatgtgaaccctcttccagttagattcaagaggtctcgatcaagcgttaatgctttgccatctgacgtgtctactgtaaccagagaagtcacttctaaagtcatggcagactcgcagcaaaatagtctcacaagagccttgcacaatcaaggaaggacacaattgacagttcgataccatgataacagtgatgtgaagactactcaggatcttaccgtgtggtcttcaggaactgagcaacagagaaacaatattgctgcccagacaaagctatgtctggagggttggacgccaactagaagtcctgaaggctacaatcagatattctcggcatttaaaccactgaaagatatacataacccacttggtccttttcctagtcaaatatctgggactcactcaaatagctgggacacagctgatgctcgttatccagtccaacaagctaattacagcatgttacctggcacatggtctttgaggcctcataacagtggttttaggatgaatcaacaaaattatctagtgatgcctgaaggtgcaaattttacggggaaatcagctttcacttcacttcaggaccatggcactgataaatgctccacaggctgctttggtcatattgagtcaagttcccacacagaccatgcatcctcaagtttgatcaggccccagcctttggtccttggaaatggtgttcagaaaagcaaaggcacttcatttaaattatttgggattccccttggcagcccagaaaaatctgaacctctggtatccccaccaagtgtcgcatatgacgggaaacttcaaacttctccatcagaaaaagggaatcagctagacgtagttgaagtggataattgttctcatccttctaagactgtgaagccacttgatggtcctcagtcagattctattacagagaataatcagccttctccagaagctacccttaatatccagaacaaagtgcaaagtagttccaccagaagctgcaagaaggttcatcatatgttgcacctttttccttgctagtagtcattccttgatacataaatgcttactaggcccaaaccttcaattgaatacttctcaaagtatgctccaaagaagtttatgtactcttgatcccttttggcaacttgttttatgtatctagaagcaccggtccaataaaac

SEQ ID NO: 115144 - DNA, 110 bp, Zea Mays
cataccatgctcttggggcttgcttaagtccatagagcgccttagagagtgtaacacctcaaaattttgtgggtggaattcgttagaaattattcaaaggaataaaaaaa

SEQ ID NO: 115145 - DNA, 114 bp, Zea Mays
tacggaatccagtctgtactacaacttagggcagccaagttacattgaagaaaagagtgggaatttccatttcattattccaatttgctagcaacatgtctcaactaaaaaaaa

SEQ ID NO: 115146 - DNA, 905 bp, Zea Mays
aacagttcatgtccggtgcgcaccggacacccaggcgggcccacaagtcagaagcttcaacggtcagaatccaacggcagtgatgacgtggcgggggcaccggacatgtccggtgtgcaccggactgtccggtgcaccatcgaacagacagcctcccaacgaccacttttggtggttgggactataaataccccaaatgctttctttgttggctctatctcttttgtcccttggcgacgtgtctggaagacctgggcccttttaagatgcaaattctttgtatggttggcaatcaaaaacagggtttggacagctgatagactggcaaaaagaggtctgccccatccagttgtttgtcctctgtgtgatcagaccgaggaatccatccaacatattcttgtctcctgcgtgtttgcttggcaaatatggaagtccattctacacaatttaggcctcctagccattgtccctcagcctggatgcactcgattctcgaactggtggtgccaaagtatcaaaaaaattgaggagagtctaagaaaaggtcttaattccctaatcattttggtcgcttgggagatttggaagcaccataacgcttgtgtgtttgaggggttgtaccctgcacccaacaagttaggagtgttgtgattgaggagggcagtgcttggtgcttggctggtgcatcaggtctgcaagacctcctccagcgctagctccctaggggaccctagcagtttggctgctggttgtcgctttggtcatgatgttgctctgtgtgcgtggcgcgttgtgttaatgtcatgggggtcttggcctatgagcctttgtattaggggttgacaagtcttgtctctcctatgtttttttcttcttaatataatgacacgcaactctcctgcgtt

SEQ ID NO: 115147 - DNA, 387 bp, Zea Mays
ctgggcctttaggtttttctgcgtatgtgttggacgcacgccaccctcctctctcctctcctccaacggctcagccggccgccgccctcttctctcggtctctcctctcctccaacggctcagccggcgccaccgccctcctccctcctatcctccaacatctccgacgcgtctctcctcagccgtggaggcacaaccgaccgccggccgtggaggcacaacagacctgcgccaccgctggccgcctaccccatagcagatctgcacccaagaccaacagccagccagccagccatcctctgcggctccactctgccagcgcccaagaccagcactagcagccagccatcctccacctccactgctctccatttgatcatttggtga

SEQ ID NO: 115148 - DNA, 2972 bp, Zea Mays
ctacccctttctctctcctctgtgtgctccttgccctctatacaccagtacacctccgaagccgccattccagcagctgagctcgtcctgccaggacgcagtgccaagtgccaacggcaccactattccaccgcctgtgccccttccacgcgtggagatctgagccggcatttcctgggtgtgcgctggttgctgcgcttgccattaaaaggctacttttctgggagctccctggtgctctcatcttggaagacgttcagtggaaggtgcaggcttgcctgcccaggatgcccctgccggcgacggactgagttggcgtattccttgtctgccagtgttgaattagtctaattgggccatggagtcatctggctgtagctctgagatagttgagtccaccgaggaattcgatactacaccctctggtggatccagcttgctgcatattaaactcaaagatgaggagaaacgcggcaaaagtcatgattattctgtggaagatgacctcgaccagctccttaaagctatcgatagcaggaccttccgacgcgcgcttagtcctggcagtacaggtggagatgcgctgggtaagagtgttctgaagaaaccagctaggtctgggttgtctcaaaatgcaggcattgggatatcctccaaggctgttaatatgaagcaagcgctaagaaggctatgcatttcccaggcatcagaaatggctgcaatgaagaggttgtcgatgtcacctggatcttcaagttcatccgaagctgggactatccacaggctttatgcctctttgatggtccaaagtagttctgagggtcttctgcatgatgatgagaagatgaacctgattgaagtatcgatcactccagagaagattgataagagttcatctagaggtacaagtgagttcagtgaagactgtgaatttgagacagctgatggaagtgcagtcacctctacctctatctgttctgcttcgtcaacctacaccgatattaggaagatcagaatccaagatgtcatcattggtgaccctatggataacgagagttccttgggggaaaatggcaacctaggaaataaattttctgcagctactgatgatggctctcccaaagtcccaatcttgagcaaacctatcactacatctcgacttgtcaagccagtctttcgatgcaagccttccggtaagaagaaagtgaaacaagaaccatcttcgttgggtgattcctccaatagtactaaattctgctcttcaaaggagtcaatctccctcacatcaaccagctgctcttcaacatctagttttacaaatcccgccaaccgtgcagaagagaaatcatctcctgggccagaaaaatctgatggcacatcttctgagtggttggcagagcaaaatgaatgttcccagaactcaaagagcagcattagtgagtatggttgcagcacaagtatcagcggtgagagccaatttggattgtgtggctatagtaacaggccacacatggcgaaggatctgcgctggctaaccattcgtcagttggcactgcaacagggttccttaggactcgacaatttcaagcttctgaagaggcttggttgtggtgacattggaactgtatatcttgctgagttggttgattcagattgcttatttgctttgaaggttatggacatcgagtaccttattaatagaaagaagatgctacgagcacaggctgagagggagatactagaaatgctagatcatccatttctcccgactctttatgcccattttaccacagacaatctctcatgcttggtcatggagtactgtccaggcggtgatttgcatgttcttcgccaaaggcaacctggaaaaagctttccagagccagcagcaaggttttatgttgcagaagttctccttgctttggaatatcttcacatgttaggggtcatataccgtgatctaaagccggagaacattttagtccgtgaagatgggcatataatgttatcggacttcgacctttcactgaggtgctcagtgaatcctgtgctccttcggtcatcttctgttactgcgaaccaccaaccgaggaaacatacaggaccttgtgcagagaactactgcataaattcgtcttgcctccagcaaccctcttgtgcccaaacatcttgcttcacaccacgcctaccatcaattccaaagcctcggaaacctaaatcctcccagaaaaggcttccacagcttgttgtagagcctactgatgcacgttctaattcctttgttggcacacatgagtaccttgcaccagaaatcatcaaaggggatggccatggaagcgctgttgactggtggacgtttggtgtcttcctttatgaacttctatacggcaagacacccttcagaggacctgggaatgatgaaacattggcaaatgtggtctcgcagaatctccggttcccagaccatccagctgtgagcagcaacaccaaagatctcatcagaggtttactggttaaggagcctgagaacagatttggatcgttgagaggagctgctgagatcaagcagcaccccttctttgaaggcttgaattgggctctgattcggtctgctgctccaccagagacacaaccttgcaacatcgtgactcttgccaaagagcggaagaaagaaggcaagtgcctggagttcagaagcaactcagaggaccttgagtttgaagttttttagtttcgttctggtacagtttagcactatttccgctgatataagcctacatttttttttctatgaatagccaaaggcttgggggtgtacatgtagatccttgtatttcagtaattgctatgtccctgtcaatagcatcaccaaattgaaaagaataagcagcttatgctattattatcattgctgctgcatatgaattggttcctattggagacccagtaaattttactcgtgtatttgcatg

SEQ ID NO: 115149 - DNA, 162 bp, Zea Mays
atggcgaaaacaatggttccgcatgatgtgaaacgtccttgtggacgtgcaataaccactacgcgagtcggtgtcggggctggtgtcgaacaaatacggggaggaggcacatgctcctatgccctctgccgagaatatggtgccacggaggtggaggtatga

SEQ ID NO: 115150 - DNA, 597 bp, Zea Mays
aaaccttcccaaaaccctttccccgttctggtctttctctcccgtctccgagcgctgccaccgcccgccgccagcgccggcgcgcgagaaacaagaggaagaagaagccaaccgatccagcagcgatggcagtcgggggcctgttggggggcgctttctgggcgacgcgggcgctggaggtggtcaagcggaacgattccccgggcctgctgtggaagcgcatcaagctcacgaccacccgcaagaacaacgccaagaagcgccttaagcggctctggcagaatgaggcggttataagggcttgtggtgaatcagaatccagatcagcgtctaacgtggcttccaccactgagaaacaacagtagcctttgactatttcccccagtttgctgtcatcagattgaaagccaagtgcgtgtataaatcttactttcttcaacatcattcgttgctaccatatgcaaccttgccccctcccgaactccggcgttatttttatttcactgttttcatgttacttctggaaaaactacttgggattgttttctttcctcaattattctgcatatgctgattgatattgcctgcggtaatgta

SEQ ID NO: 115151 - DNA, 656 bp, Zea Mays
attgcaagagtttgagacagcagaggacactcctcctcagaactctcccttccctcttgtaggggccaaaagggtcagagatctaggaagaagagaactagtccccaagcctaacaagaaagcaagctcttctgcaactgttggcattcgccttaatttgtatccatatcccaatggcaggcctatctctgcaacacccctgggcattcactttcggcctcctaggcaacgtcatctccttcatgaccttcctggccccgataccgacgttctaccgcatctacaagagcaagtcgacggagggcttccagtcggttccgtacgtggtggccctgttcagcgccatgctgtggatcttctacgcgctgatcaagtccaacgagacgttcctcatcaccatcaacgcggccggctgcgtgatcgagaccgtctacgtggtcatgtacttcgtctacgcgaccaagaagggcaggatgttcaccgccaaaatcatgctcctcctcaacgtcggcgccttcggggccatccttctcctcacccttctcctcttcaagggtgacaagcgcgtcgtcatgcttggctggatctgcgtcggcttctccgtcagcgtcttcgtcgcgccgctcagcatcatgagagtctatattcatgtttaa

SEQ ID NO: 115152 - DNA, 700 bp, Zea Mays
aacgtaagcagacttggccatagtccactgtccaccgcagctccgtcgaccgtcgtacagacgctgccggcgacgcgcgaagaagaggccgcgaagatggccgactcgccaacgatcgatgccgtctttcacaacgcggtcatcgtcaccatggatgatgcgttccgcgtcctccaggacggcgcggtcgccgtcgccggcgaccgcatcgccgctgtgggcccctccgctgatgtcctcgccgccttcccctgcgccgtgcagaccctcgacctgggtggccgcattgtccttccagcagctggcgcgagggatcgccgacgacgttgatctgatgacgtggctgcacgggaggatctggccctatgagtcacacatgacggaggaagactcctatgcctccaccctcctctgcggcattgaactcatccggtctggggtgacatgctttgcagaagcaggtgggcagtttgtttcagaaatggcacgtgcagtggagttattaggctttagagcgtgtttgacaaagtcaacaatggattgtggtgacggtttgcctccaaattggagttgctgctccactgatgattgcattcaggtatagaaataccttttgaagcagtatctacctgagggcttaggatattggaactgtgttctggggtggttttctttataaatttaagtttgcatgtactgc

SEQ ID NO: 115153 - DNA, 738 bp, Zea Mays
ttagtcaacgtaagcagacttggccatagtccactgtccaccgcagctccgtcgaccgtcgtacagacgctgccggcgacgcgcgaagaagaggccgcgaagatggccgactcgccaacgatcgatgccgtctttcacaacgcggtcatcgtcaccatggatgatgcgttccgcgtcctccaggacggcgcggtcgccgtcgccggcgaccgcatcgccgctgtgggcccctccgctgatgtcctcgccgccttcccctgcgccgtgcagaccctcgacctgggtggccgcattgtccttccagggctcgtaaacacacacgtgcacacatcgcagcagctggcgcgagggatcgccgacgacgttgatctgatgacgtggctgcacgggaggatctggccctatgagtcacacatgacggaggaagactcctatgcctccaccctcctctgcggcattgaactcatccggtctggggtgacatgctttgcagaagcaggtgggcagtttgtttcagaaatggcacgtgcagtggagttattaggctttagagcgtgtttgacaaagtcaacaatggattgtggtgacggtttgcctccaaattggagttgctgctccactgatgattgcattcaggtatagaaataccttttgaagcagtatctacctgagggcttaggatattggaactgtgttctggggtggttttctttataaatttaagtttgcatgtactgc

SEQ ID NO: 115154 - DNA, 1222 bp, Zea Mays
agctcccctacgcgcgtcttcctccctggctgtgcctacttcctctgcttctccctcgcggtgccttgtcctgctcgcggcgctcggtctctgctccagctcgccgagatctccctctccttgagtcccttccccagctccctggctcgccggcatttctccctgcacgctccctctgcctggcgcgcccctctccctggtctcccatggcgcctcctgcttttctctctcccccatggcaggcgctccttcaagctcattcccatggccgccgtcgagcttcgtgcgcgcacgtccatctcttctgctcctccggtgccgtggcttcccagttccttccagctggcgcgcgccctcgtcttctccctctgctcgttcgcgcccagccgggctcggcctccatctccacctcgcctccatggcgttgccgtagaacttcctcgccgcgccctgccatggtctctccctgggcgcgcgcagccgtgccctctgctcggattccacttggccgcgccccctgttccgtcgggccgatcaagttcttcccagccgcgaagctccctcgtgtgcacgctcagccgaggccccttcctcgcgctgctctttatctctctgcttggtcgcccgctgtttccatggcgcccagctcagatttttgcttggtcgcccgctgtttccctgtgccgtggtctcgcctgaccgcgtcctgtcaaggttcttcctgcacgcgcgccctagtaccccttctcgctgtcgggccgaccgtcggcagctccccggcctccgtcgtgctcggcagcaagtacttcatatcggtgctgcagctgcaacgccctcctttgcatcgtgctcgccagcctcgcgtcgtcgatctacgcagttcatgtccagctatcggttccgcttcggtcgatctcctattcgccatggcgtcgagctccttcaacactaccctacaccgttgtcgttgttccatcgcctcgcttcgatgccagtccctacgtgatgcctctgaattatgatcacgctgacaaaagaatccccaagagaagatgtccaaaggttggatggtggtgtgcgtgaagttcgtgtagtacctgccaaacgctcgacaaattgcctgaatcggagaatcattaccgatctcagggattcaagtcagatattggaacggtgagctgatttgctattcttattgactggtttgatggatggattgata

SEQ ID NO: 115155 - DNA, 435 bp, Zea Mays
tcggccctcgctcccattcctacagcgcttgggccaggatggcgatgaacatgatttttttttcctgcatcccacgagccgagtcattttgcaccagtgtagggaacttatcacgcactaaacgactattgtactactaaccagaaggctcacggactctactgtccagtgcatctttttggtttgccaagtctagtcgtggcgtgttttgcttagactgaaagctatacagttgagtttgattgccgattttatccagggagaagcagccaaaacaagttcgaaagaataatacggtgcacacatgtgtgcatcaaatttgcatgcacgggctagctggagggattagtctaatactatatgcatttattttttaaaagataccgaatttggatggaatcagatgacatttacagaaggctaaatagaacacat

SEQ ID NO: 115156 - DNA, 732 bp, Zea Mays
ctgcctcggctctctgccgccccgccctgctcgccatcgctggctccacatctatttggtaatgacatgggcactctttgcatgttgggcacagaagtcgcagagcccatcatccgccggatgccccctccctgctcttctgggtttggagagcaacattgaggggcatctgactggtgatttgggcggaaatggggagtttatgtggccttcgagtttagggatggaggatctcatttatcttggcaaggatgttcttaaggtttaggtgcggcaatggcggtggtgatccactccctttgcaatcatcgagagaccgggaccgacaagttcatggctgttgggggccttcctcttccgaaggtcctcaaaggtcctcgatacgaagacattgtttgaaaacgataacaacgaatgccgaagctacaactgaaggataacagcttcaacttaggatagcaacgaaggtcaagcataatgccgagccgaagaagaaaagactagttgatccctggtgatttatgttacgattatgtgtatatgttaaggtcataaatgtattgttatccgggctgcgtcccgtgcctataaattggtgaatagtaccacgtaccgtttacgttggattgtaatcattctcgcatcagcaccttcaaacaagtcgaaggtatcaatgtaatataaatcctattaatattcatatgtttatcatgaaataaatataggcttctg

SEQ ID NO: 115157 - DNA, 937 bp, Zea Mays
ctgcctcggctctctgccgccccgccctgctcgccatcgctggctccacatctatttggtaatgacatgggcactctttgcatgttgggcacagaagtcgcagagcccatcatccgccggatgccccctccctgctcttctggcttacaaatagatgcaaacaaagtgttcgatgaaatggccaaaaggaagaaccgtcaaattttctacgctctaggtctgaccatggcagccatgacagcaagctgctcaagaccttcagccacgtggagcccacaagtttatgaactaacaagcatgccatggttggttgatgaagttcatgtttcttctattgttctatttgttccaatcaggtttggagagcaacattgaggggcatctgactggtgatttgggcggaaatggggagtttatgtggccttcgagtttagggatggaggatctcatttatcttggcaaggatgttcttaaggtttaggtgcggcaatggcggtggtgatccactccctttgcaatcatcgagagaccgggaccgacaagttcatggctgttgggggccttcctcttccgaaggtcctcaaaggtcctcgatacgaagacattgtttgaaaacgataacaacgaatgccgaagctacaactgaaggataacagcttcaacttaggatagcaacgaaggtcaagcataatgccgagccgaagaagaaaagactagttgatccctggtgatttatgttacgattatgtgtatatgttaaggtcataaatgtattgttatccgggctgcgtcccgtgcctataaattggtgaatagtaccacgtaccgtttacgttggattgtaatcattctcgcatcagcaccttcaaacaagtcgaaggtatcaatgtaatataaatcctattaatattcatatgtttatcatgaaataaatata

SEQ ID NO: 115158 - DNA, 1028 bp, Zea Mays
tgcaaaaattcatccagaccacaacagaaaatctttgagttcattactgccacgcctacactattaccagggtggtaactgtatggtacatgacatgtttggccatgaggttgtggggaaaataaaggaacaatattgtgatgcatttctaacagcacactttgaggtccctggagaaatgttctctttggcaatggaagcaaaacggagagcaatgggagttgttggatccactcagaatatcttggatttcattaaggatcatgtgatgggagctctggacagaaatgtagatgaacaccttcagtttgtgctaggaacagaatcagggatgatcacttcaattgttgctgctgttcaggaattacttcatttgtattcttctcaagagagagcaaacatcgaagtagaaattgtgtttccagtatcttcggatgcaatttctaagacatcgaatggttctcatcatgttggttcttcaatggctactgatttgaatagtcttactattgttcctggtgtgagttctggcgaaggctgctccattcatggtggttgtgcctcgtgtccctacatgaagatgaataccctggggtcgctacttaaagtttgccatcagcttcctgataaaaacaacaaattatctgtataccaagctaacagaattaatgttaggactcctctcggaaaatcagttgcagaggttgggtgtgagcctattctgcatatgcggcatttccagaaaacaaggaggttacccgacaagcttgttcaccaggttgtaaatggtaatggtgacaaacccttgcaatagctgttcatcaatacttgtatttattttataaaggtggtatggaggatgaatatatctcaagtgaatgccatgttgagctggcataccgaagataagattatttgccctgtacggtagacatgtggacttgccctgtacgtcagacatgttgacatctgcaggcaaattaatgttgaacaaatgtgattggtctaattgaaaaataattattctg

SEQ ID NO: 115159 - DNA, 388 bp, Zea Mays
gtgagctcagccaaatcgcgagctaccactcttaacaaaatcagggagggggtcactccacacagaagattgacccatgtcccaactcatagcaaccttactgatcttgtttgcagacgaattacaaaaacgtgtgatatttaggatctttgtacatctaaagtaatcatagaagagctcacaaatacaattgtagagaacacccccctcccccgtgctaggtctcttctctcttgtgttggaggtgatcgcctctcgcaactgccttgagtccatctccagctcaattctggaaatgacatacatctcttctgtttccagggcaaacatacgtgcctccatctctgccgacagagcgtccagggactaatctttgtcgcccctgcta

SEQ ID NO: 115160 - DNA, 750 bp, Zea Mays
cgcagcgacatggacaccgccgccgcctcactcttgccccgcgccgccgccgtgaagacccgacgcgttttctctcctctccatgtttcccggagcggtctccttccccgtcaaagctccttcctcgctgctcgctgtgcccactcccgtgcccctcctccacctccgcctctccctcgcgccgattgcgatgatgctgccgccaaggcgcacccgcgcctccgtctccgcctgcttgcggaggagttccgcgcactcccatctgacgcagaccgcgcgcgccggctcctctccctcgcggccgcgctgccgcggctcccggagcccgaccgcgcccagggcaaccgcgtcatgggctgcgtcgcgcgggtgtggctcgtcgcccgctgcaacgcggcaacgggctggcggatgtggttcgcggcggactccgactctgacctctcgcgtgggtactgcgcctgcctcgtcgccgcgctggacggggccgaacctgaggacgtcctcgccgtcgaccccgccgatcccgacctcgcgccgctcggggcggggacaacggcggcccggtcgcgggccagcacgtggcataacgtgcttgtcggcatgcagaagcgggcgcgcacggccatcgcggcgcgcgagggtagacaccccgggaagccgtttccgtcgctcgtcatcgcccgcgacggcgccatccgcgcgcagggcagctatgcggaggcccaggtgagctccttcagttcctga

SEQ ID NO: 115161 - DNA, 852 bp, Zea Mays
atgttgctgaccctcgccacgagtgctgtacccgctgccaagttcctgcccgcgctcggagttcatcgtcgatgcagcttgctggtgggttcacgaccttcgtctcgtgtccacgccgatgtcacacagccatccaaacttgcacgccagcactgtgatgacctagacaccagagtctgtctgcccatgatgctccgacatgctctgctcttctactatctacgagaacgaagtgtttgtcaaatgtacatacaggaagctagcactggtgcagtgcccagtgatgttcaaatataccttagggggcacagaggaccagatcctacaaatccagatgtgttgtgcaaccaaaaggcaacagatcgtgtggctgcatatggcgaggcgatgtctagtcagcacggactagactatgactggaggacctcacctattgatcctcaggctatgtatgcaagtggtggaaaagctcatggaaggtacacaaagtttgctaacgtcatcgactcgagccaggtgagggttcagcgtggaggttcatcgaggtctgctgctcgtagctcccgtcgctccactcaagatccagcagaagtggagcaactgcgagaagaacttaggcgacatcaggattacttgaagcaacaagctgtgcaacctgaatattatgctacacagattcagcaacagcaaacactcatacaacaactagcacaagcccaagggatacacgtcccggtgccccccaccaccacccgttcattatccttggtcttcacctccacctatacctacatctccatctaccgaacatcagctgttgatatatttgttatgttgtggaatgtggtgtaa

SEQ ID NO: 115162 - DNA, 2772 bp, Zea Mays
gagagcctcctcccaggagcaggagaagctatgacgccgttgaggtacgccgcctcacctcacctgcagccgcccttcctgggctacaaatcctccaacgttgatggccgatcaagaacgcggcagcaggccatgatcgccgagcgcagcagcagcagcagcacaagtgggcgaggaggacagctggaggacaggatcagggagcagctcctcaacgccgagctctcgccgtcgtcgtacgacacggcctgggccgccatggttccggcgccggggtcccttgcggcgtcgcggtacccgcagtgcgtggattggatcttgcggaaccagcgcagcgacgggtcgtgggggttggacccttcgctgcgcaaggacgcgctctcgtccacgttggcgtgcgtcctcgcgctcaggacctggggcgtcggggaggagcacgtcgggaaagggctccgcttcatcggacacaactccacctctgtgacggactgcgacaagtgcgacacgccagcagggttcaacgtcatcttccccggcatgctcgagcgcggcattggcatggggctggagatccctctggcccatgcggaccttgacgccatcctccggctgcgtgacacggagctaaaaagcatagctgcttccggaagaagtaaagcttacatgtcctacgtagcagaaggtctgggggacctactggactgggatcaggccgccatggcttaccagaggaagaacgggtccttcttcaactcgccggccacaacggccgcagctgccatccacaacggctacaacaagagagccatcggttacttggatgctctcatcagcgagtctggcagcagctcgtcagtaccggctgtgtatccacggaaggtgcacagccagctccgcatggtggacaccttggagaggatggggatctctcccagcttttcctatgaaataaacgccatacttgacatgacatacagttcgtggctgcgcaatgacgacgaggtaatgctggacatggcgacctgtgcgatggcgttccggctccttcgtatgcacggataccacgtctcatccgatgcgctagctcaattcagcgaagaatccagtttccacgactccatcgaagcgcatctgaacggcacggaggcgttgctagaactgtacaaggcgtcgcaggttcagatcttggaggaggagccggtcctagagagcatcttttcatggtcaggaaaactgctgaggcgaaaacagtgttccgattccgacgatccggcagaggtagaacatgtgctcaagttcccctcctacgcgaccctggaccggctggagcacaggaggaacatagagcgtttcaagacaggcggcttccagatgctgaaatcagcattccgcgtttctcacgcagatgaggaaattctgacgctggcaaccgacggattccactcctcccaggctgtgtaccaacaagagattgagcagctcaacaggtgggtgaaagaggtgaggctgccggagctggagttcgcgagagtactgcctctgcccatccttttctcggcagcagccaccatgttccccgccgaactgtcggaggctcgcatcgcgtggagcaagagctccgtgctcaccaccatcgtggacgacctgttcgacaccggggactccatggaggagctggagaatctcgtcacgctgttcgacctgtgggacgcgcaccaggaggctggcttctactcggagcgggtggagatcgtcttccgcgccgtctacgacacgtgcaagcatctggtgggcaaggccgcggcggtgcagaaccgcggggtcatggaccacatcgccgacctttgggtggacgtcgtgagggccatgatgcccgaggcggagtggaggatgagcggccgggtgccgtccatggaggagtacctgccgatcggggaggtgtcgttcgcgatcggccccatcgtccccatggccgcctacctggttgggccagagctcccggaggacgtggtggggagcgccgagtacgaggagatgctcagcctcgtcaacctctcggggcgcctcctcaacgacctccagacgtacgagagggagaggaagcaagggaagatcaacagcgtcctgctgctcgccgatccgtcctactgcggctccgtcgaggcggcaacccgggaggtgaggagcgtcatcgaggcctccaggaggaagctgctgaggctggtgctcagagacggggccgcggtgccccgccctgcgaggcagctgttctggaacatgtccaaggtgctccacctgttctacatggacagggacggctactcatctccgctcacgaatgccatcgacgaggtgttgatcaagccgctccagatgggaaggagacgagaagaagatcaactccccggtcgcgtccggtcaaaccaaaactaggcgcatcttccgcgacgtacggcatacaaatgctgaccggaggcgttcaggttaatttgtagtcccaaaataaatattttttaaaataaaaaaaacattcgagaggcgatagcaaaaaagtatgtagcgtaatctacatttctttctccaaggatctgttaaatttggcagttggcgtaattatttttttataaacaggaggggaggctcccttactgcatttcattgcaaaaaggaaattatgtacaaacaaagaagaagacaattacacgtttcacctatatatgtatccactctagtattacagcttgaatgttagtctttgttccattcataagc

SEQ ID NO: 115163 - DNA, 2336 bp, Zea Mays
ggcggatgagcggctgcggcgcctccactccctcctcttcggcgccgacgccgcactcgagcacggggacgccacggtggcgcaggcgctcgcgctccgcctcctcggcttcctcgactctcaggcgctagccgcaggcgcgggccccgaggacgccgccttcgtcgcgcccattcgcaccgcggcttccgctcggctagccgccgcctcacgcgcccgcgcctctgactccgaccgtgcagcttttgagcttgcaagaacggatgttggctgtgtttttgcaaatcagggtgacaataatgttgaaagaatccagcgttcgaagtatttccaagctcttcttcagaagtctaaagcaaatgtttctgaacaacggaatgcaacatgtcaagagttctcagttcaatgggctccatgcgtcgatgaaagccaagctgaaatggaaaatgagaagctaagcatcagggcttcaaagttaatgatgcaaacgaagttgacatcattgtatagcagtaagtccttgaagacaaatggcgtacccaacaaaaatatgttcaaatcagagaactcatctaaagtgtgtgccggtgttgaaaatagaacaagtcaaaatagtaacaggcggcatgcttacctggacgttgaggaggatgagaaatcccatgggcaattgcagaatgcaaagtggaaacatacagggttcagaagtcctatatttgaggttgcaaattctccatcaagtaatgatgaagctgatgctcctgccaatgagtttacgactgccaagagaatgatggggttggatgttgtgcaaaagccagcacaaaatggtccacaaggtgcttctgtatcaccacaatgtgataacaactatagtacacggaattatggcgtgagaccaagttggaattctcgtcgtggaccacgtggtagttttataccccctatcagaaacaatggaggatcaggtacaacgatctcacgggtcactggtaaaaatgacgagtccatggaagattcaacaaggaaatgtattgaaatgctttgtgctcctgatggtgagcttcctgagaagctgaggaatctagaacctcgccttattgaacatgtcagtaatgaaataatggatagggatcctaatgtccgctggaatgacatagaagtgtgtgacagagatggtgatatggccactgctacgtcctgatatattccgtggttgtcggtctcctggaagaggtctactgttgtttggacctcctggaacaggcaaaaccatgattggaaaggcaatagctggtgaagccaaggcaacatttttctacatatctgctagttcactaacaagcaaatggattggtgagggtgaaaaacttgttcgggcactttttggtgtggccagttgtcgtcaacctgctgtcatatttgtggatgagatagactcattattatctcagcgcaaatcagatggtgaacatgaatcaagcaggagactgaaaacacagtttctaattgagatggaaggttttgacaccggaaatgaacagatcttacttataggagcaacaaacagaccccaggaactggatgaagcagcgcgcaggcgactcacgaaacgtctatacatcccccttccttcattaggtaacactatttcttttcttttatacttatcatttcagaaaccttagtgcaccatggttgtgaagaagcacgggcttggataattcgcaatctattggagaaagatggacttttcatgctctcggaagaagaaacaagtgccatctgtaaattaactgaaggctactcaggatctgacatgaaaaacttggtgaaagatgcctcaatgggaccactaagagaggctcttcagacgggcgttgaaatcgcaaagctcagcaaggaggatatgcggccagtgatgctgaaggatttcgagaatgctatgcgggaggtaagaccttctgtttcctcaagcgagctggggacttatgaagaatggaacaggcagtttgggagcctatcgatctagtctgtcggcaggcatcaacgaatacaatcatgtcggcactatagaaaaaggagctcaacgattttagccggaacatgacatgcataacacagctctacagtttaacaatcttttgaagcatcaaaatttgaactgtctatttggagtgctgagtaatatccaggagcctacatatcaaatagtttcaattgtttttaaatcttcacttttctgtaaatttgtttgccttggttttgattgacatatgactagcgcggaagtcaaatactccgttccaaattataaaatgttttagcttttccgc

SEQ ID NO: 115164 - DNA, 2286 bp, Zea Mays
ggcggatgagcggctgcggcgcctccactccctcctcttcggcgccgacgccgcactcgagcacggggacgccacggtggcgcaggcgctcgcgctccgcctcctcggcttcctcgactctcaggcgctagccgcaggcgcgggccccgaggacgccgccttcgtcgcgcccattcgcaccgcggcttccgctcggctagccgccgcctcacgcgcccgcgcctctgactccgaccgcttttgagcttgcaagaacggatgttggctgtgtttttgcaaatcagggtgacaataatgttgaaagaatccagcgttcgaagtatttccaagctcttcttcagaagtctaaagcaaatgtttctgaacaacggaatgcaacatgtcaagagttctcagttcaatgggctccatgcgtcgatgaaagccaagctgaaatggaaaatgagaagctaagcatcagggcttcaaagttaatgatgcaaacgaagttgacatcattgtatagcagtaagtccttgaagacaaatggcgtacccaacaaaaatatgttcaaatcagagaactcatctaaagtgtgtgccggtgttgaaaatagaacaagtcaaaatagtaacaggcggcatgcttacctggacgttgaggaggatgagaaatcccatgggcaattgcagaatgcaaagtggaaacatacagggttcagaagtcctatatttgaggttgcaaattctccatcaagtaatgatgaagctgatgctcctgccaatgagtttacgactgccaagagaatgatggggttggatgttgtgcaaaagccagcacaaaatggtccacaaggtgcttctgtatcaccacaatgtgataacaactatagtacacggaattatggcgtgagaccaagttggaattctcgtcgtggaccacgtggtagttttataccccctatcagaaacaatggaggatcaggtacaacgatctcacgggtcactggtaaaaatgacgagtccatggaagattcaacaaggaaatgtattgaaatgctttgtgctcctgatggtgagcttcctgagaagctgaggaatctagaacctcgccttattgaacatgtcagtaatgaaataatggatagggatcctaatgtccgctggaatgacatagctggtttggaacatgcaaagaagtgtgtgacagagatggtgatatggccactgctacgtcctgatatattccgtggttgtcggtctcctggaagaggtctactgttgtttggacctcctggaacaggcaaaaccatgattggaaaggcaatagctggtgaagccaaggcaacatttttctacatatctgctagttcactaacaagcaaatggattggtgagggtgaaaaacttgttcgggcactttttggtgtggccagttgtcgtcaacctgctgtcatatttgtggatgagatagactcattattatctcagcgcaaatcagatggtgaacatgaatcaagcaggagactgaaaacacagtttctaattgagatggaaggttttgacaccggaaatgaacagatcttacttataggagcaacaaacagaccccaggaactggatgaagcagcgcgcaggcgactcacgaaacgtctatacatcccccttccttcattagaagcacgggcttggataattcgcaatctattggagaaagatggacttttcatgctctcggaagaagaaacaagtgccatctgtaaattaactgaaggctactcaggatctgacatgaaaaacttggtgaaagatgcctcaatgggaccactaagagaggctcttcagacgggcgttgaaatcgcaaagctcagcaaggaggatatgcggccagtgatgctgaaggatttcgagaatgctatgcgggaggtaagaccttctgtttcctcaagcgagctggggacttatgaagaatggaacaggcagtttgggagcctatcgatctagtctgtcggcaggcatcaacgaatacaatcatgtcggcactatagaaaaaggagctcaacgattttagccggaacatgacatgcataacacagctctacagtttaacaatcttttgaagcatcaaaatttgaactgtctatttggagtgctgagtaatatccaggagcctacatatcaaatagtttcaattgtttttaaatcttcacttttctgtaaatttgtttgccttggttttgattgacatatgactagcgcggaagtcaaatactccgttccaaattataaaatgttttagcttttccgc

SEQ ID NO: 115165 - DNA, 2356 bp, Zea Mays
ggcggatgagcggctgcggcgcctccactccctcctcttcggcgccgacgccgcactcgagcacggggacgccacggtggcgcaggcgctcgcgctccgcctcctcggcttcctcgactctcaggcgctagccgcaggcgcgggccccgaggacgccgccttcgtcgcgcccattcgcaccgcggcttccgctcggctagccgccgcctcacgcgcccgcgcctctgactccgaccgtgcagcttttgagcttgcaagaacggatgttggctgtgtttttgcaaatcagggtgacaataatgttgaaagaatccagcgttcgaagtatttccaagctcttcttcagaagtctaaagcaaatgtttctgaacaacggaatgcaacatgtcaagagttctcagttcaatgggctccatgcgtcgatgaaagccaagctgaaatggaaaatgagaagctaagcatcagggcttcaaagttaatgatgcaaacgaagttgacatcattgtatagcagtaagtccttgaagacaaatggcgtacccaacaaaaatatgttcaaatcagagaactcatctaaagtgtgtgccggtgttgaaaatagaacaagtcaaaatagtaacaggcggcatgcttacctggacgttgaggaggatgagaaatcccatgggcaattgcagaatgcaaagtggaaacatacagggttcagaagtcctatatttgaggttgcaaattctccatcaagtaatgatgaagctgatgctcctgccaatgagtttacgactgccaagagaatgatggggttggatgttgtgcaaaagccagcacaaaatggtccacaaggtgcttctgtatcaccacaatgtgataacaactatagtacacggaattatggcgtgagaccaagttggaattctcgtcgtggaccacgtggtagttttataccccctatcagaaacaatggaggatcaggtacaacgatctcacgggtcactggtaaaaatgacgagtccatggaagattcaacaaggaaatgtattgaaatgctttgtgctcctgatggtgagcttcctgagaagctgaggaatctagaacctcgccttattgaacatgtcagtaatgaaataatggatagggatcctaatgtccgctggaatgacatagctggtttggaacatgcaaagaagtgtgtgacagagatggtgatatggccactgctacgtcctgatatattccgtggttgtcggtctcctggaagaggtctactgttgtttggacctcctggaacaggcaaaaccatgattggaaaggcaatagctggtgaagccaaggcaacatttttctacatatctgctagttcactaacaagcaaatggattggtgagggtgaaaaacttgttcgggcactttttggtgtggccagttgtcgtcaacctgctgtcatatttgtggatgagatagactcattattatctcagcgcaaatcagatggtgaacatgaatcaagcaggagactgaaaacacagtttctaattgagatggaaggttttgacaccggaaatgaacagatcttacttataggagcaacaaacagaccccaggaactggatgaagcagcgcgcaggcgactcacgaaacgtctatacatcccccttccttcattaggtaacactatttcttttcttttatacttatcatttcagaaaccttagtgcaccatggttgtgaagaagcacgggcttggataattcgcaatctattggagaaagatggacttttcatgctctcggaagaagaaacaagtgccatctgtaaattaactgaaggctactcaggatctgacatgaaaaacttggtgaaagatgcctcaatgggaccactaagagaggctcttcagacgggcgttgaaatcgcaaagctcagcaaggaggatatgcggccagtgatgctgaaggatttcgagaatgctatgcgggaggtaagaccttctgtttcctcaagcgagctggggacttatgaagaatggaacaggcagtttgggagcctatcgatctagtctgtcggcaggcatcaacgaatacaatcatgtcggcactatagaaaaaggagctcaacgattttagccggaacatgacatgcataacacagctctacagtttaacaatcttttgaagcatcaaaatttgaactgtctatttggagtgctgagtaatatccaggagcctacatatcaaatagtttcaattgtttttaaatcttcacttttctgtaaatttgtttgccttggttttgattgacatatgactagcgcggaagtcaaatactccgttccaaattataaaatgttttagcttttccgc

SEQ ID NO: 115166 - DNA, 614 bp, Zea Mays
gaattgatccatcaccacctcattcctcatagttagttagtactaatatgagaaatggagtcatcctaccaaatttgagaaatggactcatgatgcactatctcattttggatagagtgatttctcaaaccaaacaccctattaaagttttaaacaacatacacttcggttctctcatgacaactactaattatcaagagtaatcaagaaaacttagaaagtgtttgctttgaggaatcactccatcaaagattaggtggtgcatcataagtccatttcttaaatttaggaatgaccccattcgttatgagcaacgactaatatgcaagcatccattatgtgcaagcgtgcaagcagatcttttggtccgctagatctaaccgtatgctatatttaatatttaaatcctcccaccaccactcgtgtacttttataaaaaaagtccctaacaaaccacaattacacatatagttggatttagatccaatgtattaaaagagctgcttgcacgcttgcatctaatgaatgcttgcatattaatatgccttcattatgttagtactaactaactatgatgaatgagatgctgatgaatcaactcatttatttctaca

SEQ ID NO: 115167 - DNA, 796 bp, Zea Mays
tacaatgaacacgaaagtcattattatttttagccttggcgctatatgtttgttagcagaggttacatgattcttctttcggaataggcggaaaaatgagagccttcactgttgtttatttagtagaggttgagatcgtatttcaaattattaagaacactattgttttagattctttcacatattcatacgtttgaaaaaaaaccgcattctccatgatgttttggtcatagagaatgtaataaaagtccattaaatagcattgatactcccatactatagtattttcctttgtgttgaggattaatgcaaccacagtgttgtggtttgaacactaatcgagaaggcctctttactgttgtctaggtcagttataactttcatatatgtgcttccatacactttaatgttagtagtacaattgctgttagcagattaaaaacttagttaaacatatgcgtactcacatatttattatttctctttacatcaaggattcccatggacatgtggttgtccattacacagatgttgatacaaatgttcagctcctttttaggtaccgttgctcatgttgcagcccgaggttgtagctacacaggaacacaaattcagaaagataaaagtacaagcgtgaagcacgagccagtacaagtcagcgtgaacagtacgggggtactgtttcatctatttataggcacaggacagagcatgtgaggaattacagttatgccctttacatttactattgacttatagaaaatctatgaggactagatagccttttcctctttaa

SEQ ID NO: 115168 - DNA, 89 bp, Zea Mays
gtaataaaaatacaaaacaacttaagactacgtatgaatggctcaaaataatcattagtcacaaagctgaaaatacaccgtgacctaac

SEQ ID NO: 115169 - DNA, 724 bp, Zea Mays
tcgaagttggcgaccgcgttcacgcctttctactctatcgccgcgatgtcgtatgcgcaggcgccttcttcttgagtgactggaacggaacaggcagaggtcgttggcgaagagcgcgaagtcgaggatctgcaggccggggttgtcgctgctgaacgaggacagcgtcagtgcgtcaccgccgtggtgttgccgtggctgtactggaagtggagctggccctgcgggagcaccatcagtcgccggcgtacagcgtcttggtgtacaccctgttgagcgtggcgctgatgaagccggagacgacgctgccctcgatgacgaagatgagctcggtgcctcccgggtgggagtgcagcggcgcgacgccgcccgggaccatcaccatccgcgcggtggagatgcccgaggaagagcagcgctcggggagaggagctccgtggatccgttgtaagaaacggactgccgtaaaaacgaggattactgcagctaaatctgacgcagatactacaattccgaagttcaacgaattataatactaaaattccaattgctctgttcgggatacctattttcagaagcccagtgttagcgatatcacggttccaaaaagctctccacccaccgcctccccgtcaaacggcgccgcgccgcaaggggcgtccaaggtttcctcgtccttcacccgccgtgagtttgacactccctcccagacctctcgtccctg

SEQ ID NO: 115170 - DNA, 486 bp, Zea Mays
atggcggccacggcagagtggaggacgagtttgaggggcgcgcgcagggacgagctcggcgcgcagagagcagcgcggtcggccgagcggagcagggaccgagctggagcgaactgcggcgcgcaggagcagaggggatggacgcgcggtaccatggagatccggtcgggcgctgaacgatggagggcgcgcaggaactccagggcgcgacaacagggagacggaggaagacacggctggggaaggggctgggcgtcggccaacaggggagctctggccacgggcgagctcgggcagaggggccaggggcacggcgcagaggaggctgaggaggagcggctgcgcgcggcgatgggagctcggggaaagccgcggagcaggaagttgggcaccgagcgcgacgcaggaaggagaagctgccgaggaggagcgcggtcaggccaggggcgagccgacaaatttaaaggacacgtactaaacttctaa

SEQ ID NO: 115171 - DNA, 2001 bp, Zea Mays
atggggtggggaagagcagaaaggttgggagcaggcgtgttgttttttgtgctgcatgcaaatatgggcacaaaagctcgtccaccatctgctgatgcagaaaaaggggagattggcgaaatagatacaagggctccaattcaatctgttaaagctgcagtgagtttatttggtgaggtccgcttttcatctgacaaatcagctgaaagaaagcccaaggctcctcaaacagagagggttttagccaaggagacagagttgcacatggcccagaaagagttgaataaatacaaggaacagctcagtaatgctgagacaacgagagtacaggctctctctgagctagagaaagctaaaaaaactgttgaggagctaacagccaagctggatctgattaacaagtccaaacagttggccatccaggcaacagaggatgcaaagactcaaatcaagcagcttgaaggtggcagcacaagtgaaggtctaggaacagatggtgctctgaagcaggaactggaaagtgcaagggagcagtatgctgttgctttggcagaccttgatgcagcaaaacaagagcttagaaagctcaagaaggattttgaaacatctttggatatgaggttgtctgctgcccagcaggaagaggaatcactgcatacaactgaagccaacatagaaaaagctaaccaacttcgtagtgagattgccgaaattcaagaatcccttatgcatgttaaggcagctaccgtgcaagcacacgaagaagaggcacaaatccttgctgagaaggatgttgctaggaccacgtataaacaagctttggaagaaacacagaagaaacttttgtctttgaggaatgattttgaccctgctgcctacgatagtctgaaacaaaaactagaacaaaccaattctgagatcgcatctatgcaaaaaaaaatagaagaggctcgggctcgggatttagagtctgttgccgttgtcagcacagagttggatgatgctaaggaaatgttgcaaaaagtagcagaggagaaaagttctcttcgaagtttggtggaatcactgaaagtggaattggaagctgtaaaacaggagcacaatcagctcaaagagaaggatacagaaaccgaatctattgtcggagatttacatgtcaagcttcagaaatgtaaatctgagctggaggctgctgtggctgctgaatcaaaagctatgtcagcttctgatgacctaatgctggcccttcagcaactgtcctcggagtcaaagaatgctttgcaagaagctgaaatgatggagaagagtgcagcagagctaagagaggaaggcgaaaaagctcgggttgaactagcagaagccgaacaaaagatgcaattggctttaaaggaagcagaagaggctaaagcagctgaagcaagagcccttgatcagatcaagcaactctcggatagagcaagtgctgctagatcctcaacatccgagtctggagcaattatcacaatttctaaagaggagtttgtatctctcagccgaaaggttgaggagtcagagaagttgagtgatatgaaagttgctgctgctatggctcaagtggaagccatcagagccagtgagaatgaggcaatcaagaaactagaaactgcccgcaaggaaatggaggacatggaattggcaacagaagaggccctaaagagggcagagatggctgaggcagccaaaaaggctgtagaaggtgagctcaagagatggcgcgagaaggagaagaaaaccgcagaggctcagccgtcggcaggggcagaagaacttggaagtggatcgcctcctgtacctcagacttcagctgggaaagcttctgagaagaacgacgggcataggaacagcagaacgctactgaggaggagcttcatgctgccaaacatcacgagcatgttccataagaagaaaaaccaacctggcagcagttctccctcctaccttcctggggaaaaatctgtgtaa

SEQ ID NO: 115172 - DNA, 150 bp, Zea Mays
atgggatcgaggaacgggaacgtggtacgcggtacgctactaaaactaggatttaacactactggaacgagattgttcccatgttcccggaacggaacgaacgttcccggaacgaggaacgtggctaagttcccagttcccggttactaa

SEQ ID NO: 115173 - DNA, 598 bp, Zea Mays
gaccaggggttataatgcaaatttagggacctatatgcactgatctttatatactgatggattgcgggttagttttcctaaagtacagggtcgcttaagtaaaagagcaaccgcgaaggggtattcttcccggtaatcgccgccgttgttggctagatcaatgattcttgcgagactcccatcaaccactctcttctaggttgcgcgacccagttaaacggggcggcacggcggtgccattgccggagtacggccgcccgatgactcggcgcacaaacctcaccgaaaactactacacaacgttaaggtccaacataaatcaagtcccagcttcttatcgatgattgtggcacaggttgtcatggccacggtgaaggcgtcgcggcgacggaagacctccatcggcgagaaattcacagcgcacaggtggacttcacacccaaatacggttgcgccccggttcctggtgccgcagcgaagctctacgagtcatgctcatgccctggatgatggtcgtggagggagcgaccgcggcggccaattcctcgctcccgcccatggcggtgctcggcgacggggttcaccagggcacggctag

SEQ ID NO: 115174 - DNA, 186 bp, Zea Mays
atggacgctgagctcgcgtgcgtgacgctgggaagacgacgagggcacgctgcaggggcacacgacggccggcccccgaccatcgcggccacggccatgggggcgctccatggacgatcggagctgagcgactgggcagaggggaagtccgagctggggcgggccgtgcgcagggaagaaggctag

SEQ ID NO: 115175 - DNA, 2142 bp, Zea Mays
gcaggatattctagacgcactggcgcgcatggaggcacgcttgaccgatgcgctggtgggtcgctgcggcgagccgtacgcacgcgagcacacttcccccttcgatggatccgcgcctccttcttccatcgtcaacacacagtaccgcgacgaggcaatccttccgcctctcgtccacgacgacgctgcgaaggtggcgtccttggattcgggaaacgactttggcctgcagcagaccgccacggtgcttgcgtccctggggtccgacgagatgtcttcgtcgaccacgctcctcgccggctccatatccgaccgctacattccgccgttctacgacgacgactgctacaccatgccacagccgtttgtcgatactctcgccaaccccgacgatgacctcctccaggagctcgacgtgttggacgaggatgccgcgagcgccaacgcggctgacgacgattcaggcgctgtcctcgtctatgcgccgctcgactcgaacatcgacagcagcggatcaccgcgctacccgtgcctccccgagggtgcggtgttgttccatcgggacccggacgagaaggtcctcatcggcgggacggagttgtccggcgaagtccgccgcctccgtttctccttgccgtcaccagaccaggcgatgaaccccgcgctcgtccccaacaccgacgcagaggaggaggaggttctcaccatcacgcccaccaagtgtttgatgagagtcctcaaccggcgcacctactccgtccccaacctcccggaggaaaaggtgcagaacttgatccgcgtcggcggcgacaagctcaggtttcccgatgacaggaccatgtttcccaacagcgccaacgcctacaccgacgacattggcaggcttgtcctgtcccacggctccatccacatcgcgctcgacatcgaatgcggggtgacgagctgggccgcctacctgttgtcatgggacatcctagccatgtcgttcgcgctgcgggactctcacgaggcgcggatgcagttcacgctggtgcgcggtgtgccagtcatgattggtgtgctcgcgtccaaatgcttcgcctacccgacccgtgccttacatatggcgcactgcttctgctgctacagccctttgcaactctacgatggactgtacttgatcgaggatgatcgtgtactgcatcccagagggtactggatcctgtccggcccgccaatcaactggaagaagtactggaaggggtgggagcggacgaaggaggatgcagctaacaactgtgccccatggctactacactgctggaaagggaactgtgctggtagctaacaattttggtgatgacctctttgctggcagcaatgagatcaaacaaccatggcctccacctctggagttagcgtgcttggattggaacatcatggtcttctttgtgtttcgtgtttccacgaccctcttcatcgacattgactcagctggctttggcactggtctcgagctgtggtctagcagggccagcgacaaaaacaagttcatgcttgaacaactgcataggaacaagatgtccaatagggccacccatgggtgttatgcctgtcgacggccaatccaccttcgtggacaggataccatttgttccggctgcaatgatggttttatccaggaaagcagtgagatgggtggcgtactgaacacttatgggctccttgaaccagactttgaagagcgtcgagccaaaagaattggaatgatggacgccatatctgcccttatccagcaacagatggcagaaataggaagagatagtttgtttgatatacatggtcgacaagggacttgtactgaacatagaaggagatcaactgctattcatactctcataattgggtgcatcccttctcctgcagttggtagtagtgaatctagtgatgtcaatattatcatgaggggaggctctggagttcgcgctgtccatccaaatttcagtagtctagttgttggttcaagtctggaagctctatttgagcatctactactccaaaacaatcgtcaagccacacctcctgctccacagtcagctattgactccatgtcgattgggtacaataccaccatatcagtgccacaaatgcatgcagtttgcc

SEQ ID NO: 115176 - DNA, 1289 bp, Zea Mays
cagggtgtgtgtgtgctgctaaaccaccaaggtcgaagtatcccttactgcttggtatacgtacgagtagcgtgtccctgtccattgtacgtacgtcgatggctgaggaggtgccaacgacgccgccgccggcaccattgtacgtcgatggctgtccgggatgcgccatggaccggaagaaggcggccaacaagggcatcccctacaaggagttcttcttcgtcgcagtcaccaccattgcctctgctttgccaatatcgtccctgtttcccttcttgtatttcatgatcgaagatctacacgtggccaaaaaagaacaagatattggactgtacgctggttttcttggtgcatcttactttgtcggtcgatttttggtctcgttcttctggggtgtggtggctgatcgtgtcggaaggaagcccatcattatattttcagtcgcttcagtggttgtattcaacacactgtttggattaagtgtacaatattggatggccatcaccacaagattgcttctaggtgctctcaatggcatgcttgcaccaataaaggcttactcaatcgagatttgtcgacctgagcaccatgctcttgggttatcagttgacacggtctcaagagccacaaacatactataccgtcttgggcttattgtgtatcaaatgttcatctacaggccagtccacagatatctcggaagtgtaaattcatgccgtgctgcatctgcgctatccataccacttatcgctgcttttcccttcatgacacacctgtcaggatcaaaacttggactagctctttattttgctactattttgaaagctgctcttgggataactatcctgacaggcacttcacttctgcagaactatgctgtgccacagcatcaaagaggcgccgcaaacggcgtagcggcgactgcaatgtccttctttaaggctattggacctgcaggagcaggcgctttattctcatggacccaaaaacgccaagatgctgccttctttccaggggatcacatgttgttcttcattctgaatttggtccaatgtattgggctcgtgctgacccttaaaccattcctagcagtaccgaaacactataaatgacagctgctcgaacccaagcaatggaataatgatggattagcaaaacatatgtgcccaaaaatacgtttttgagtggcatacaacggaattatgtaaaagctgtcaagaaaaagtagctacaatgattgtgtccgctatctttacatctccttacattgaagttttaatttgagcaca

SEQ ID NO: 115177 - DNA, 657 bp, Zea Mays
cagggtgtgtgtgtgctgctaaaccaccaaggtcgaagtatcccttactgcttggtatacgtacgagtagcgtgtccctgtccattgtacgtacgtcgatggctgaggaggtgccaacgacgccgccgccggcaccattgtacgtcgatggctgtccgggatgcgccatggaccggaagaaggcggccaacaagggcatcccctacaaggagttcttcttcgtcgcagtcaccaccattgcctctgctttgccaatatcgtccctgtttcccttcttgtatttcatgatcgaagatctacacgtggccaaaaaagaacaagatattggactgtacgctggttttcttggtgcatcttactttgtcggtcgatttttggtctcgttcttctggggtgtggtggctgatcgtgtcggaaggaagcccatcattatattttcagtcgcttcagtggttgtattcaacacactgtttggattaagtgtacaatattggatggccatcaccacaagattgcttctaggtgctctcaatggcatgcttgcaccaataaaggcttactcaatcgagatttgtcgacctgagcaccatgctcttgggttatcagttgtaagcacggcttggggcctaggtcttattgttggcccgtccattggag

SEQ ID NO: 115178 - DNA, 1283 bp, Zea Mays
aaccccagcacagtgacgaaaaggcccaacaaccccccgacccgtcacctgacccagccgatcgagaatacccggaaggccggaacccacctgctgcgcacctgcaagcctcgagtggagctcttccacggccgcggtggagatggcggcgaatctggaggacgtgccgtcactggatctgatgcacgagctgctccgccgcatgaagtgcagctccaagcccgacaagcgcctcatcctcatcggtccacctggctctggaaagggaactcagtctcctattatcaaggatgaatattgcttgtgccatttagccactggtgacatgctgagggctgctgtggcggccaagacacctctaggtatcaaagctaaagaagctatgaataagggagagcttgtttcagatgatttggttgtgggcattattgatgaagctatgaagaaaccctcatgccagaaaggtttcattcttgatggctttcctagaactgtgactcaagcacagaagcttgatgagatgttggcaaagcaaggtgccaatgttgacaaagtcctgaactttgcaattgatgatgctgtattggaagaacggattactggtcgttggatccactcagccagtggtaggacttaccactcaaaatttgcacctccaaagtctccaggagttgatgatgtaactggagagccattgattcaaaggagagatgacaccgctgaggtcttgaagtcaaggcttgaagctttccacagacaaaccgaacctgtgattgattattactccaagaagggcttagtggtgaacctgcctgcagagaaaccaccgaaggaagtgactgctgaggtgcagaaagccctctcgtgatgaaatgtccactcttgaggttaaacatgacatctaccaaaacccctttgtttgggtttcttcaaaatttgcactaggccaacatcatgaggttttttattttcagtatccttattgtgcggatgcaccattttttgttatcacacctttcacaagctcggcaattgtctgaataatttctgtgtctaatgatggaactgttttcagtaacaaactgatatgattacaacaattcatctttgggaaaatttccctgcaaaccttgttccagttcttacaagactgctatgttactggctataataatcaggaagataccttgctctgtcgagccttgagcggagagattgatgtgctgcgaggtcaaataaatgtttcatgttgtatggttctgaacttgtggtgatgtttattc

SEQ ID NO: 115179 - DNA, 213 bp, Zea Mays
ggcatgttgggaaggcgggagaaccctagagaacatgaagccatgaggtggatgaaaattgagtttgtagtgaactcggatggtctcagaacaaaggagaaggaacgtgcatcagtacttgttgcaactaacatgccatttgatcttgatgaggctgttgatagacagcttccaaggaggttgatggtgaatttgcaagatgcatcaaatagg

SEQ ID NO: 115180 - DNA, 156 bp, Zea Mays
tttttgttttcttttgtagtttgtaatagtcagccatatgatgtaattttatttttcttttatgtatttatgttggaactcttaatcaggggttttctctacggagatgtaattaacataatttttatgcaaatataagaattatggaagtatgag

SEQ ID NO: 115181 - DNA, 177 bp, Zea Mays
atgggagcacaacacagggagccaagagcagttggcggccaccaccatggaaccccaccggcgtctgcaattggagagcatgagatggtcagggagctacgtcgggtcacgctggggcgaattgagctctcttcagaagagtgggcaccgtggaggcctaggatagctcgccattga

SEQ ID NO: 115182 - DNA, 435 bp, Zea Mays
  misc_feature (435)..(435): n is a, c, g, or t
ttgtcaaatactagtatttaaaaaaagtacgccaaggatatagacaggcaactgatctgttcaatacttctgttgcaacaattcgatcgatcaactaaaatttgaataaaaaccttgtgcccttctttgaactttatatagcattcagccaattgttgagtcaaaatcacgagaaaagttcgcgaaacactaccgctatcaactccatactagatagcctacagtaaaaatcccaacacaaaaaaggaactatttgctcactctcctttatgccaaccatgctcaacacatggtcatgcatcgatcacccctcaattgctatctgtgaagtccgcatcaatgacatccccatcattctgcgctggtccggtaccaggggtaggcccagcctcagcaccgggagtagacccagcagcactggcaccagactggttn

SEQ ID NO: 115183 - DNA, 434 bp, Zea Mays
ttgtcaaatactagtatttaaaaaaagtacgccaaggatatagacaggcaactgatctgttcaatacttctgttgcaacaattcgatcgatcaactaaaatttgaataaaaaccttgtgcccttctttgaactttatatagcattcagccaattgttgagtcaaaatcacgagaaaagttcgcgaaacactaccgctatcaactccatactagatagcctacagtaaaaatcccaacacaaaaaaggaactatttgctcactctcctttatgccaaccatgctcaacacatggtcatgcatcgatcacccctcaattgctatctgtgaagtccgcatcaatgacatccccatcattctgcgctggtccggtaccaggggtaggcccagcctcagcaccgggagtagacccagcagcactggcaccagactggtt

SEQ ID NO: 115184 - DNA, 534 bp, Zea Mays
atggagattagatgccgcatgtcagacatgcgcgattacttcaagtcacagcgtttctctaggagaaatatcagggaaaaagaaaggctcaggccgactgttggggaggggtctcacggaggagcagccccatcggagaagacacgaccggctcaccagctgcaggtctgggcagcaaccatggctgcgtggcgtgcccagattccgccccagcagcaagcgcggtcgcggcgaggcatcaccagactcagcaccggaggggcgcgagcaaggccagtgccccggcgaagtggggcccagcgggcagcagcgcgcgtccgtgcaaggcgagcctacgcgaaggggaagccgaagaggagcagggccctgcgccatggctgggaggaggccggtccgacgactggggagatggagaccgagcagaggtgcgtgccaacacagggctcacgccatgggaaggaggtgcaattggtggagctcggcgctggtgggggatgggagcatgagcggtcgaccaccaggcggcttgggtga

SEQ ID NO: 115185 - DNA, 822 bp, Zea Mays
atggctgcgtggcgtgcccagattccgccccagcagcaaacgcggccgcggcgaggcatcaccagactcagcaccggaggggcgcgagcaaggccagtgccccggcgaagtggggcccagcgggcagcagcgcgcgtccgtgcaaggtgtggggcgcgtgacactgtaaccggcaggcgcgagcggcaaacagagaagatgagacgaggagtgctcaccggaatggagaggtggtcggagaagacaacgttggcagcgcgcgaggtcgggtttggggcagcggcgcctagagatggtggccagccagagtcggagcacgatcgttcggatctggagcctgctggtgtcctcacgacggccgaaggcgagcctacgcgaaggggaagccgaagaggagcagggccctgtgccatggctgggaggaggccggtccgacgactggggagatggagaccgagcagaggtgtgcgccaacacagggctcacgccatgggaaggaggtgcaattggtggagctcggcgctggtggggggtgggagcatgagcggtcgaccaccaggcggcttgggtgattttctcagccgcaacgacgatccctggagactaggagcagacggggatggggagggtcttataccccgcggccagatcttaatcttctcttgctgttgcggatttgaccgagaatcacggcagcatcgcgaacggagtccgctcaggcagatacgagatacatggctgaaccggcaaggacccacacgtcattgggttaaggatgacatcagccacgatgtcatggtgacctcatcgaataaagaatga

SEQ ID NO: 115186 - DNA, 3455 bp, Zea Mays
gtttctgattggctgttgactccaccagagaccccactttttcgttcattggatgatgaagatcaacacattggtatggctcataggggcagggcgcaggttaagccaatatcaatttcgaggtcttccacaatggaaaatactcaaagttttaacagaagaagtgcaagcccaagtaggcttagcccagcaccacgctcatgtagcagcactatgttgacaaggataagatcatcaaattcttcttcacgatgcagccctgcacttcatttgcaaccagcggcaccatcacgaaggtcttcgactcctccagcttctaggacatcaacacctccacaaaggtcaccaagtcctgcttcaaggaggttgagtactggctcaagtgacccaattttaaacagaaaaggaggaacttcgcctgttaaaaccagtaacaggccatcgtcaccaaaacttcaaggttggcaatcaagtgaccctggtttctcttttgacgcacctccgaatctacgcacatctctgtcagatcgtctagtatcccattcaaggggtggatctccttcatctttcagtggattggacatgaattggagaggtagaaggcaatctgtgtctcccactccatcaagaagagccagttcatcgcatagcaatgatcgattcagctcatacagcaaagcatctgcaacatcttctgctgaagacgacctagagtctatgcagtctgtgctgattagttactccagtagcccagctctaagaaagaacatgccagtaataaaatccagaactattgcatcacctaagaagccgtccaagagtttctcccctagttctggtccaaagaggtcctttgattctgcagtttggttaatggatcgtcgcaaagctcctcaagataagttcaggccacttctatcaagtgttccttgcaccacatttggtgttggcaaaggggataatgtacactcatctatgttgtctcataattcctcactcacaacaagcagtaatttaagctctgaccatggtgtcacttttagcccttgtatgggtaatgaacaaggaccaagtgatatagccggtgactgtgaagcaacacctacttacagtttgtctgctactcaaagtagcccaaaatctccaagcacagaaaaaaatgcggaaagtaacatggaagacctcaatatggaaagaagtagaatagtcgagacttcaggtaatgttgcaagtggttccaaggctgggctaactaaaatggcaacatgcactaggtgtgaaaagttatttaatgcgataaaagatgatggagaaattgatttgtgtgaagaatgtggtttagtagatgaggttctttttgtgaaccccaagatagagactttggaagaacatcaaaaagaccacaaaactagaatttctaaaccttgtgttgccttggaagctcctcacattactcccgatcatggtgaagataccaagaagtcatttcttgatagtcagctgttgaatgatgaacctccagctgattgtctgcaaaagtgtcctcagtctcagtcaacaatatatacaaccgacagaatgcttttaatgctgcatggagagaatgttaatgaaaatttaaggccagatgatgttggcaactcttcccaaggaagtagcctcgatatttcatcccatcaatgtaacataaataattatcaacaatcggaactagcatctgtagttgagtgtgataatttaagagatcaaactgccaaccaccagaatgaggtgttccaacgcctgccagggtcagtgtatcaaagcattgaatttgcctctaatacacttacctatgacagttgttgtaaacagggatcggctgggcattcaaatctaaaggttgaaaatacggagggtgctgggatttcagtactgctgcagaagtcaagcagtaacaaatggcctgttatagaagggcgacccttagctggtacaaatattatctgttcagaaccctactatacaagagatggtgttactatgctaaagcgtaccattggatgggatagttcatcagcgtcttccattgatcaagggtctacaaggcaatctggacatttggaacaccttaaaagtagtaatcgtcatgactttgagaagtctcaaataagtagtaccatgagttgtaaaagcattgcatccatgtcagacatgtcaagtagcaattgttcagtttcagtttgtcctcgggatgatgcaattgcagatactggcttcctaaccgacaattcagaaagcagtgctcctcgatccataatttgtactgaagaacttaatgagtcgtgtaagtacacactctcaagtgctatagagtgctggtctgctgcacaggctattgttaatgttggcattggttcaactgaagatgtagtgattcagaaactatgtacaggtaggatggttcacaaagattacacaagtgataactcatgttcatcagatactgaaacatgtagcaatatctcactctctctggctcctgaggaacgatgcatacagaaaattgaagaaggtacctcagttggcactccagaacacccagatggtgattgtggcatcagtaattatcaaatgcagcatgaaacaattcctgaggcagataggttggatgatggttgtgcgtctgttatctctgaggaggccaacataatggggcttcctggtaatgttgagggaccaagagaacaaactcaaagatgcttcaccttagaagaggctacggatacaattctcttctgcagctccattgcccatgacattgcatacagggctgcaacaattggactggagcatgaacagcattcagaacttgcttctgctcgtcgcccagcagttcccatggcaggacaatccattcccaggggtgatggttcacggaaaccaccccacagactagtgccaagacataggaaaagatcagaaggtgaaacagttacagaacctgacaagatggaagtggtcgctgaagatcctatacctgttcggccagttcctgaattttcaaggacatcaggcagcttcaagtctccaaaggtcgattcaaagtgcaactgtgcaattatgtagagttatgcatcaactcaagttggcaactatacttattatgatcactaaaatccatggttgcttgttattatttcagcgcatgtgagttaacaaatgaatctgcacccacctggttcagtaagcagcagcgacctacaattttttttggttgtggtgcatttgccctttatttctgggtcatagagtgctcaacgagccattcttttgtaaattcttgcttctccagtcagttctatggtttgtctatttttttttcctgagagtcaacatctcaagcttaagcatatttatataataaaataataacatttatgataccaaataagcatcattagatttttcgttaa

SEQ ID NO: 115187 - DNA, 3934 bp, Zea Mays
cgcatagggaggggaggaacattagcctggaccctggaaagagcaagcaagtcggcgacgggcaacccgtttcggcggcggcgctagggcgcggacccccagcaagtagccaccgcaggcaagctcctcctcccgcccgcccattggaatgcggagagatccacccgggagtgggtggattggtttcttcctctgttgatacttcaaatggactattatggactcagcttggtatctgaaaaagaaccagcatagctacactccctttgcaagactaatagactctaaagatgcctccctcaccatcacctaggagatctctgaaagaagtttgccacgcaagggggcatagttttgtcagtattctgcctgctaaatcgaaggatgatgaactcacgttgttcaaggatatgcagaaatatgagagggataacttcttactggaagcaacagaggattttgatgaatccatctcaaagttgagatattttcgagattcaaagattggtgtcaacattgctgcacgcggagaaaatcgtgatttacttaatactgatggtgaaagaaatgactatgattggctgttgactccaccagagaccccactttttcgttcattggatgatgaagatcaacacattggtatggctcataggggcagggcgcaggttaagccaatatcaatttcgaggtcttccacaatggaaaatactcaaagttttaacagaagaagtgcaagcccaagtaggcttagcccagcaccacgctcatgtagcagcactatgttgacaaggataagatcatcaaattcttcttcacgatgcagccctgcacttcatttgcaaccagcggcaccatcacgaaggtcttcgactcctccagcttctaggacatcaacacctccacaaaggtcaccaagtcctgcttcaaggaggttgagtactggctcaagtgacccaattttaaacagaaaaggaggaacttcgcctgttaaaaccagtaacaggccatcgtcaccaaaacttcaaggttggcaatcaagtgaccctggtttctcttttgacgcacctccgaatctacgcacatctctgtcagatcgtctagtatcccattcaaggggtggatctccttcatctttcagtggattggacatgaattggagaggtagaaggcaatctgtgtctcccactccatcaagaagagccagttcatcgcatagcaatgatcgattcagctcatacagcaaagcatctgcaacatcttctgctgaagacgacctagagtctatgcagtctgtgctgattagttactccagtagcccagctctaagaaagaacatgccagtaataaaatccagaactattgcatcacctaagaagccgtccaagagtttctcccctagttctggtccaaagaggtcctttgattctgcagtttggttaatggatcgtcgcaaagctcctcaagataagttcaggccacttctatcaagtgttccttgcaccacatttggtgttggcaaaggggataatgtacactcatctatgttgtctcataattcctcactcacaacaagcagtaatttaagctctgaccatggtgtcacttttagcccttgtatgggtaatgaacaaggaccaagtgatatagccggtgactgtgaagcaacacctacttacagtttgtctgctactcaaagtagcccaaaatctccaagcacagaaaaaaatgcggaaagtaacatggaagacctcaatatggaaagaagtagaatagtcgagacttcaggtaatgttgcaagtggttccaaggctgggctaactaaaatggcaacatgcactaggtgtgaaaagttatttaatgcgataaaagatgatggagaaattgatttgtgtgaagaatgtggtttagtagatgaggttctttttgtgaaccccaagatagagactttggaagaacatcaaaaagaccacaaaactagaatttctaaaccttgtgttgccttggaagctcctcacattactcccgatcatggtgaagataccaagaagtcatttcttgatagtcagctgttgaatgatgaacctccagctgattgtctgcaaaagtgtcctcagtctcagtcaacaatatatacaaccgacagaatgcttttaatgctgcatggagagaatgttaatgaaaatttaaggccagatgatgttggcaactcttcccaaggaagtagcctcgatatttcatcccatcaatgtaacataaataattatcaacaatcggaactagcatctgtagttgagtgtgataatttaagagatcaaactgccaaccaccagaatgaggtgttccaacgcctgccagggtcagtgtatcaaagcattgaatttgcctctaatacacttacctatgacagttgttgtaaacagggatcggctgggcattcaaatctaaaggttgaaaatacggagggtgctgggatttcagtactgctgcagaagtcaagcagtaacaaatggcctgttatagaagggcgacccttagctggtacaaatattatctgttcagaaccctactatacaagagatggtgttactatgctaaagcgtaccattggatgggatagttcatcagcgtcttccattgatcaagggtctacaaggcaatctggacatttggaacaccttaaaagtagtaatcgtcatgactttgagaagtctcaaataagtagtaccatgagttgtaaaagcattgcatccatgtcagacatgtcaagtagcaattgttcagtttcagtttgtcctcgggatgatgcaattgcagatactggcttcctaaccgacaattcagaaagcagtgctcctcgatccataatttgtactgaagaacttaatgagtcgtgtaagtacacactctcaagtgctatagagtgctggtctgctgcacaggctattgttaatgttggcattggttcaactgaagatgtagtgattcagaaactatgtacaggtaggatggttcacaaagattacacaagtgataactcatgttcatcagatactgaaacatgtagcaatatctcactctctctggctcctgaggaacgatgcatacagaaaattgaagaaggtacctcagttggcactccagaacacccagatggtgattgtggcatcagtaattatcaaatgcagcatgaaacaattcctgaggcagataggttggatgatggttgtgcgtctgttatctctgaggaggccaacataatggggcttcctggtaatgaatcactggctacagttgagggaccaagagaacaaactcaaagatgcttcaccttagaagaggctacggatacaattctcttctgcagctccattgcccatgacattgcatacagggctgcaacaattggactggagcatgaacagcattcagaacttgcttctgctcgtcgcccagcagttcccatggcaggacaatccattcccaggggtgatggttcacggaaaccaccccacagactagtgccaagacataggaaaagatcagaaggtgaaacagttacagaacctgacaagatggaagtggtcgctgaagatcctatacctgttcggccagttcctgaattttcaaggacatcaggcagcttcaagtctccaaaggtcgattcaaagtgcaactgtgcaattatgtagagttatgcatcaactcaagttggcaactatacttattatgatcactaaaatccatggttgcttgttattatttcagcgcatgtgagttaacaaatgaatctgcacccacctggttcagtaagcagcagcgacctacaattttttttggttgtggtgcatttgccctttatttctgggtcatagagtgctcaacgagccattcttttgtaaattcttgcttctccagtcagttctatggtttg

SEQ ID NO: 115188 - DNA, 861 bp, Zea Mays
cctgtctgtttgctttctaggaaggtagtacctatgtcagcatgaggtattgggtaattttgtgtggtggtgagatcgcttggttactttgggcaatgcatggttcacaacttaagagttcttttattactttccatttcttgccctctgttcgctgtgtcagcaactctcttcgtatatttgacaaggatatgtgtcgaatgccttttgaattttggagcattttatgtttgtgttctttaatctttactaacaaaagcctatttgcagatacttcaaatggactattatggactcagcttggtatctgaaaaagaaccagcatagctacactccctttgcaagactaatagactctaaagatgcctccctcaccatcacctaggagatctctgaaagaagtttgccacgcaagggggcatagttttgtcagtattctgcctgctaaatcgaaggatgatgaactcacgttgttcaaggatatgcagaaatatgagagggataacttcttactggaagcaacagaggattttgatgaatccatctgtaaggctcataaatattatcgctgtaatctgtccccgttcttgtaacattgtacttcctagtgtgaactttgtgatttaactcatatttttctctcgaacacttaactgatatgtactgtctgttctttatttctgggcctttttatcagcaaagttgagatattttcgagattcaaagattggtgtcaacattgctgcacgcggagaaaatcgtgatttacttaatactgatggtgaaagaaatgactatgattggtatgcacacttaatagtacatgtttctttgttttgctccatgcttaataggcacatt

SEQ ID NO: 115189 - DNA, 727 bp, Zea Mays
cgcatagggaggggaggaacattagcctggaccctggaaagagcaagcaagtcggcgacgggcaacccgtttcggcggcggcgctagggcgcggacccccagcaagtagccaccgcaggcaagctcctcctcccgcccgcccattggaatgcggagagatccacccgggagtgggtggattggtttcttcctctgttggtaagtgattcctggccgggctttgcttggacggattccgtcctaggagcttttgtttctttgtcgccaggcgaactgaatcttgcttcttccccacacgttgtgctgtggataagcctgctgcttggtgtctatccgttcaggacctggtgaggttcttcttcctctcctccggtgcgcaagaatgaaattaggttccacaatggcacattggtgtctcattcgtccccaatctgaagttcattttctaacaatttttccgggttcagtttttttactcaattctcgagggtttatagtcagaaatcttaggggacgttattggcgtttgagttttgctattgcggtagattaatattggatcctagagtgtggttgagtgaagtgtgtaattctttctttttccctttttaagggtttcttgaattgtgaggttagtagttcatttagatcatctcactgtttgatccaccagatgcggctaatggtgtttgtgtattgcgaaatgatgagcttgaatgtgagcttt

SEQ ID NO: 115190 - DNA, 807 bp, Zea Mays
atggggtccaagaactattttcacaagttttgcagaaaaagagtgggcaacggtggcaaggcagagtccagcccccacgatcatctttctagtcggtgcaagggcaagtactcctccagcaagtacaagtccaaaggaggattcgacaaggaggtgctcaagaagaagtaccatcagaaggcaaagatcaaggagcgtgccttcctcgcctccctcagcgacctcaaccacgacttcaacgatgtcatatcttcctcaagcgatgaggagactaagaggcaggtcaaggacaaggtgaacgagatgtgcttcatcaccgacaccgcaggagacctctgcaacatggcacttggtgaggacgcggtcgacaccagcgacgacaaagacatcagcgacaacactacttctgaggtactaccttctgccgatgatctcgcctctaagatagaagagttgaacactactttggcttgtcaggataggttgcttaggaaagctgctcgtgagaggagagagtttagatccaattacgagagcactcttatggaacttgagtctgctagaccttcagttgtggtgtccgacgagactgaatgtgatgagtgcgctctacacttgtcgaacatcaccactttgctgaccaagtattccaccttgctagatgagcgagatgagttgagatctaggtctagcttgttgggtgtgtgtactgtttgtcctggcttgcagactgagctaggagaaagaaatgctaggatagctttgcttgagaaggctagctcagtgagtgcctttgcacctacgtag

SEQ ID NO: 115191 - DNA, 1840 bp, Zea Mays
tctcactctcgccatcacgtcggcctcttccacggccgccgccgtcgtcgccgccgccgccacctcgccgccgaccaccataccatcagatatttcagagctcgcgcccctcacgcatggttcttggcttcttgcttcttgctcgacgtgcgccgtaactaatcgactataagcgtggtgacacgtctgacgagatgatgccggtggcggcggtggatgactggtcggagcgcggtttctcgctgacctgcgaggaagactgcgccgacctcggcaacggcgtcgtagacgacgacgagttcctcccgctctacaatgccggcgaagaggaggaagaggagtatttggagcagctggtgtttaaggagaccagcctctgctcctcctccgactcagccgcggactgcgacggcgacggcgaaggagacgaagaatacccctcgctcgcctctgaggagtggtttcggcaagctcgcctcgccgccgtcaagtggattcttgaaacccgcgggtgcttcggcttcggccaccggacggcgtacctcgccatcgcctacttcgatagcttcctcctccggcgacgcgtcgatagggaggcgatgccgtgggcggcgcagctgctgtccgtggcgtgcgtgtccgtggccgccaagatggaggagtgccaggtgccggcgctgtcggagttccacgccggcggctacgatttcgactcggcgtccatccggcggatggagctgctggtgctgtccacgctcggatggcgcatgggcgccgtcacgcccttggacttcctcccctgcttctcctcccgggtccacccgcacggcggcgccggcgccggcggccacgtcgcccacaaggccatcggtttcatctttgccacggctgaagctggtagcgtgcttgatcacaggccgtccactgtggctgcagctgcaatcttggctgcaacctatggacctctactgaccaaagaagcactcgattccaagatgagctacctttctccatcttgtcttattgagaaggaacatgtacatgcctgctacagtatgatggttggggacaataacaggagaggtagcaagagatcattgccatgttcagtctccaacgagattgccactagtacatatcattctgttcttgttgatgatgttacggacaccgccgccgcctttgccacggcggtatcggccaggaataagcggatcaggctggagctgacgggcatcagttgagaaagctagcaccaccggggacacagtttttagccagatgtctaggggggcttggtttgatcttccctttcattttcttcccttctttttgaacttatatgtttgcgaaaaagaagatatttttttaggttctttgagccattgccatgggttggcattggctgttgtcagatttgattggtttggtttgtgagaggtggaagagatgaacaaagcagagggctgagctttcctatggagaggagagcttaggttaataagcccaatgccagcgcccaaacagggcacacttcacattcagtgaactttacttcaaaggttgatgcaatgttgcattgcatgtggtgagagatgctgctgcagagaagatgcaaaacaagtggtaacaacactgagaggttgagggttttgccattgtttatagaacgagtgagcgagagagggagatgtttccctttttcacctgtgcaagtggatgtgagagtggtgtttcactctgcacttgcgagggttacatcgatttgtaacaaaccctgtgtacttgtgtaaccccctcttgttcctgaggaatggaatcagattgcgttttgcgtcaa

SEQ ID NO: 115192 - DNA, 2049 bp, Zea Mays
ggaatcccaaattcccaattcccaaacccctagtagacccacgtctccggtccccctctcctcgcgccccgccatggcagcctgcggcggcgccggctgcgggccgcagtgctcctcgtcctcctccgcgggcggccaggaggatgctctggtggagagcatgggacgcctttcgaccgcctccgccgccgccgcgtgcggcaagtgcgacggcggcggcgcggccgtcgcggtggccggcggcgtcggcatgtgcgccggctgcttccgggctcacctcttcggcaagttcaagctctccgtcacgagcaacgccatggtgcgccccacagacgccgtcctcctcgccttctccggcggtcccgcctccagggtggctctgcagttcatacacgagatgcagtccaaggcgatccagagctgggaggcgagcaactcccaggccctgccggtcttcagcctcggcgtcgcgttcgtcgacgagaggagcgtcatctcagcgagtcttccggggcacgaaatccaagctgcgatagaagatatcaggtccgtcgtgtcgggtctgtcaccgggggataagcgagtgcacatcgcctctctcgaggaggtgttctcgtccgggtcagacgacaaggcggccaggctgaaggaggtggtcggcgtgatcagtgacgagacgggcagggacgactttgttaggcgcctgcgcatgctttcactgcagaaggttgcactggagaacagatacaccaagatcatgctgggaacgtgtgcttccggaatagcatgccatgtgctatctgcaaccgtgaaggggcaaggctacgctttaccagctgatgtccagtatgttgatacgcgatgggaagtacccgtggttcttccacttcatgattgcctggcccaagagcttaacttgctctgtgaaattgatagtttgaagacacagcaacttctcgataggccttgcagtggcatcaatggcttagtttcatcctttgtttcacggctaagggaagagaactcttctcgagagcataccattttaagaactgctcaaaagcttaagccattctcgtttaacaagttctcagcaaacggctaccatgatttcctgccatcgcggcttcgtcccaagtttcagaacattgatgccaacgagtgtactttctctgagattctttgcctaatatgtggaagcccgttcagtgaatcagagctcctgaatttggaaaacacaaagctcaaggctcagaagaaaattgatctttatactgcccattgttgtcaaagttgccatttccagattctcccagcagctacagatatgtatggacatttcttttcgctactaccgaagttttggactgagaaagtggacgctgcatctgccagccatagctcactaagagatcagatagcggactacctgctggatgaagatgatggaaactgactttattctctggtttcgtgacataatttcatggagtcaaatgtttaactcacatggaattcccgaatgcctgtctgtactgacatgttttgtttgttgtactataagacatcgcattctaattgggcctcacacaggcatatgccaaacttatggataacagtgtttcttctttttttgtttctgacaaaaccagtatcactagcatgacactgctactggtattcttcaactcatctgggatctgtatagtggtgaggcaaaccatcactagccagcaagtttccactgattttacagagacagcacgggttggagagctgaacgtttcccacttaaaatgtgatttcatatgaactggtctcatctcctgtgctgtgcgagctattctgccagcaaacattgtaacaagatgaatttatccggtggtttggacaattcgttttctctacaaattctgtacgaactgtggttacactcagttaccctgttgtattcgactcgaagatactttggggatgttgtgcagacaagcgctgcatctttcagcctgttcgttgtttttaattcgtatcggctcctactgtttctat

SEQ ID NO: 115193 - DNA, 2697 bp, Zea Mays
atggaggacggagggttggtcagcgaggccggcgcctgggccgagctcggcaccggcggcgacgagtcggaggagctggtggcgcagctgctgggcgccttcttccggtcccacggcgaggaaggccggcaccagctgctttggtctgacgaccaagcttcttccgacgacgtgcacggcgacggcagccttgccgtgccgctcgcatacgacggctgctgcggctatctgagctactcaggtagcaactcggacgagctccccctcgggagcagctcccgcgctgcgccagcaggtggcccaccggaggagctgctcggtgcagctgagactgagtacctgaataatgtggccgccgcagaccatcccttcttcaaatggtgtgggaatggtgagggtctggatggtccgacgagcgtcgtgggcacgcttgggcttggctcgggccggaaacgcgcgcgcaagaagagcggggacgaagacgaagacccgagcacggccatcgccagcggaagcggccccacgagctgctgcactacctccgacagcgactcaaacgcgtctcctctggagtccgcggacgccggcgctcgtcgccccaagggcaacgagaatgcccgggcagctggccgcggcgcggcggcggcgacgacgacgacagcggagccccagagcatctacgcaaggaagcggagggagcggatcaacgagaggctcaaggtgctgcagagcctggtgcccaacggcaccaaggtggacatgagcaccatgctcgaggaggccgtccactacgtcaagttcctgcagcttcagatcaggttaatcctctgtgaggcctcaccacagcttacagattcaagaaatggaggtgatacttcgaatgaggcccataaaaggaattctacagatggcaacaataaacaaacatgtgaattggatgcattcatctacaagagtcttgagggcatccaagatcaagaattctgtaatataattgaactactctctgtccgtcctcctattgatgccaagttgaaactgatgaaagaaatagctgaggaacatgaaattgggccgacctacttcaatggctccacactacctcttcccaaggagaaacatgacgaaacagtagctgcaagcgctaccaagctgcctgatgaagactacgagtcaaataccggtcttgactcactggatttgcctgaagtcccaaaagctgcaatttgtccaccttctctaaatcacattttcaatctatcattttctttttccgttgttatctttctggctgtcgatgttctcttggataacatccgaagcatagacagggctgaggagtttgccttccgtgctgaagaagacgctgtttggagccaggttgctaaagcccagttacgtgaaggtctggtcagtgaagcaattgagtccttcattcgtgcagatgatgcagcacacttccttgatgtcatccgtgcggctgaggaagccaatgtgtacaatgatttagtgaaattgacagactcaatgccaaatgttgccgaccttcaaaatgttggtgaccgtctatatgatgaagaactatatgaagctgcaaagatcatatatgctttcatctcaaactgggctaagctggctgttaccctggttaagctgaagcaataccaaggtgctgtggatgctgctcgcaaggctaacagtgctaaaacgtggaaggaggttgatgacctcgaagaagtcagtgagtactaccagaacagaggatgcttcagtgaacttattgctctcatggagagtggtcttggacttgaacgtgcacacatgggcatcttcacagaattgggagttctatatgctagataccgctctgagaagcttatggagcacatcaaacttttctccacccgactcaacattcctaagcttattcgagcttgtgacgaacaacaacactggaaagaacttacctacctgtacatacaatatgatgaatttgacaatgctgccaccacaattatgaaccactcttcagatgcatgggatcacatgcagttcaaggatgtctgtgttaaagtttcaaatgtcgagctatattacaaggcagttcagttttatttgcaagagcatcctgatctcatcaatgatatgctaaacgtgcttgcacttcgtttagatcacaccagagttgtagacataatgcgcaaggaggactatgagagactccgtgaatcagttgacacgcatgacaactttgaccagattggtcttgcccagaagcttcagaagcatgaattgctggagatgaggaggatcgccgcctacatttacaagaaggctgacaggtggaagcagtcgattgctctatcgaagaaagacaacatgtacaaggactgcatggagacatgctcacaatctggcgaccgtgaactgtcagaggactttctcgtgtatttcattgagcagggtaagaaagaatgttttgtttcttgcctcttcatttgctacgacctgatccggccggatgtcgctcttgagcttgcatggatgaacaacatggtggactttgccttcccgtacctgttacagttcattcgtgaatacactagcaaggtggatgatttagtgaaggacaagatcgagtcgcagaaggaagaaagagctaaggagaaggaggagaaagaccttgtggctcagtag

SEQ ID NO: 115194 - DNA, 1007 bp, Zea Mays
aaggcccagatcaaaagaaaagagcagcggagcggagcatgctcttcctccggtgccagcctcgcgtcccgtccgcgtccgcgccgccttttcgtccccgcgtccgcgtcgcggctccactgggcgtgcgcgtcaccggcgggaggcgagggcaggcggtggtcgcgatggcgtccgccgacgcgcgcttggcggggattgcctcctccatccgcgtcatccccgacttccccaagccagggatcatgttccaggacatcacgacactgctgctcgaccccaaggcgttccgtgacaccatcgacctcttcgttgagcggtacaaggaccaagggatcaccgtagttgctggtgtggaagctagagggttcatttttggtcctcctatcgctctagccatcggtgctaaatttgtacctttgaggaagccgaagaagttgccaggcgaggtgatctccgaagaatattctctggaatacggaactgacaagatagagatgcatgttggagctgtacaggccaacgatcgggctcttgtagtcgatgatcttattgccaccggtggaacactctgtgcagctgtcaaacttattgaacgtgttggagcaaaggttgttgagtgtgcttgcgtcattgaattgccagaactgaagggccgagacaaacttggggacaggccagtttttgttcttgtggaagcagatgcttgagcggaacttgggacttctcttctcagagagttagagttggtgctgttgatgctacctctctgtcaacaacaaagtttcccatgttggctatattcttgctgacacgtaataaagtttcattccaaattgtgatcccctgaatgatttgtcaatgtagacatgattgctggtccttgtatactgtggcttattattcacatcaattaaggataatcctgattggagcttatcggtgcaactattggtgttatgtggggccaccactactagcgcagatcgtgcggccagaagcaacaa

SEQ ID NO: 115195 - DNA, 955 bp, Zea Mays
gagcggcaaaatgctgaggttctttgccaacatagcaaagaaatggagcttgcagttcaaggaatgcagataatgcagtctcaaatgactaaacttcttcaagaaaaagaaaatgcgaaggagtttaatttggagagtcaaagaacaattaaagatctaagtgatgaggtccttagattgaattcacatataattgaaaaagaaagatcctatgaagctaaattggaagagctgaatacaaaaatccacgaacacgatgcatcatttatttcatggaatgaagagaacgaggcacttcgaattgaggtttcggaggcaaaacttgttgtggcccagaaatcttttgagtctgcaactcttacagccaaatttgaagaagcgcaggcaactataagagatgcagactctacggtcaaggcattggtcgaagcaaacgaaaaggcaaaattcgaagcagataagtatgaagagaaggaggctttgtttagtgctgaaacagaaagcatgctaagtgaaattagtagtctgaaaatgctgctggatatgaaggaacaaagttacaagcttatggaaaagcaattccagtcaggcttgcttgaagcaaatgagctagctcttgagctggaagatggcattagacttacgcagaatttattacagcagaagcttgagtttgtttcttctgatgttgagtggatgaaggaaagggtccagcagtttgcagggttgactagaaaatggttagaggagaattggctggagataattggcaaagattgtgctatctctgtgttgcacctctgtcacatggagattcttttggagagaatcactgggttgaatgcagaaaatggtttcccttcagcacgggctgtgtgaatctaattctttgatatctaaactgcgagagcacaatgaaaaagccaagaatgaactggagaatgtgcagtgttct

SEQ ID NO: 115196 - DNA, 650 bp, Zea Mays
attcacctttgcagaggaagtttaaaagaatgcaagcttcacttgaaaaggcacggaacctaaatacaaggtaccaaatagatcaggcatcacactgttttgctgagaaagaaatggatgaagttcgtaaacaggttgaggttgaaacagctaaggtgattcaatgcttagaagaagatctgatatcagtccaacagcaactaaatgcaagcaacaaaaatgacttgttagccaaacaaagcataaatgaacttcaactagaaatcaagcagttgaatgataagttacttgaggtgttgaaagagaacgaaatattttcttctgtgaccaaggaaaaagaaaaggaaattgaactattgtccaatgactggaacagattagctgccgacattggaaaatgtcttgtggatggaaatgcagctttaggtgaagcttctgatcaggttgcctttatttccaaatctttatctcaaagaaaatggatcgagaaacaagttcgaaagctgtgtagtggtatatctgaaagagatgagctactcgaagagcttcagaacaggttgaaagaggcagatgatataagacgtgacttagacttgaaattaaggtccttaagaggagcaatgcaggttgtaaatgaagagcatcagcag

SEQ ID NO: 115197 - DNA, 818 bp, Zea Mays
ccccgctcgacctcgtcttcgcccttctggtggccatcgtcattatggtactggactacactcctttatctggtcgcactagctgtcgaccttgttggtcctttccatggcaaaccagcaagctccgccatcgtcactcaattgctcgccccgcgtgtgctcgtaatttttcttggtcgtatatgctgagctgaccaacgctccagctcgtcgttatcgccaagtctcacgcggctgtgttgttctctcgtcgtcgttcattcctatttttccctgccatatgccgcctcgtcatgacgtgtgtcgtcgtctttaatctcaatagctcttccgatacgcgccttgccatgcttcgcctccttgtgatcagccccatctgggtcatgtgggcggaagatcttaacacctgtcagatgtccgatgacaagcccgagccagaatttatcaacattctcacaagtattgattcgttttttgctggtacgtttattgaccacgtgatgcggagaaccaaagctgagtcgaccccaagatgacgtaacaggtggaccaattcgcaagatgatgctggtggattaacctgaagatggataatcggaacaagtatcagaacaaaagatgatcgccaagtggacgacgtctaacaaacactaacctagtgtttattccaggcaagcttcggtgcatgcaaccccttccttatgtttttaaatgatttttacacactttaagtctagtgaaatgtgcattaggtttataggaatttcttggaaaccctttgatgcattggctaccttgaaatccattccttttataga

SEQ ID NO: 115198 - DNA, 1033 bp, Zea Mays
atgcatcttcctgggtgctgtccatggtatcgtggaggcacagaacaaggaatggatgaagagtcagcgcacaaaaacaccgtcgagggcataactaggatcatctcgaaaaccatctcaaagaaagggatgcttgaactgtacaactctttgagtgaggaaggcaaaaaggagtttaacaaggcttatagtgcatcgttttacctgtgcatggatatactctacaaatgctatgaagatgtggcctctagaagtgaaatccggggtgtggtgttgactaggcggaggttttatgagaaagagggcctcccaatttttccaatgggcaacatcgaccatgtggaagctacgaactctttctactttctgcaatatgaaatctgtgtcaatcttagtttctggtgcttcgaagtcatgaatttggctggtagcttgatacactatacacctattttattttgtgtttacacaatttttgtccatatgatgcacatgatgagtaagctatttttcttaataaggaatgaggctgatgagctatctcgggatgagtttgagcgtctcatgagtcatgactgtcgttggatgcttgccaacccccaacagttgaaggtccatggcttgttcctcaataggaaaaatgactgcaaggatggtaggttctctcaagttgtttccaacgccctcgacatgaagctcagctcagggatgaccttgagaggttgaagaagatcaggaaccactgtggtctgcgtcactactaggacatgtttgtctgcggcagcacatcaagactactgggaggcgtgaaaatactgtagatgataaaactaatttggcgcctatcttggaagtttattatctgtaggatagatgaaccgttctggtttatgaaacttttgctgcccgtgtgctaagctagttgaattgaatgtttcttaggaaccaatgtcattagaaaagctaaaacatctataatttggaacggtattgctacacggatttagcatatcatgatgatgtttgtcgtttt

SEQ ID NO: 115199 - DNA, 545 bp, Zea Mays
accgtggcagttcagtgtcctcccaggataacacttgcgaccatactgaacgggtcaatgggcagagtgaatagagatgcaggctaccattgcaggggtacaggaggattgatgtggcgaaccccgcagggaagttaggagtttactctgcagatggtgtctgtgctctgaaccagtttcagtttctctgtaacctcagatatcgatttctgcttgctccacacgaagacagagtttgcagaagcagccagacatgaacacacaagatggcagaagaagtcctggtgcattctgctattggcatttggcattgcgttgcatttgcattcagctcgctgctcttcttgccttgttgtgtgtgatctgggccaatctgacggcattttgggcacagttggtggtcgcgtatcccgtcggcccgtgttctcagttgctgagccaagcatattcagaatgggtcgcatcgcaacctaacatgtgctccatgttcacaaaaagctgggcccggatgttctctcaatataaagaaaaaaatatattttatg

SEQ ID NO: 115200 - DNA, 1311 bp, Zea Mays
atggggtacgagcaaggaagggacacagacaaagtttgtttgaagaaaaagaatggcatacggaaattgtcgttggattggtattcaagatgggaggatcagccaaatgacatggaagaagagttatcattaaatatggagaaggaattgcatttgctcgacaatcttgaaccaccatcaaaaatcgagaagctgagaattcgtggctaccggggttcacaattgccatgttggatggcaaagcaaagtgactcttgtggtccagccgatgatacacatatagtaatgcaaagaaatccatctgaattctcccatctgactaaactagtattggacaacttaccaaacttggagcatcttggggagcttgtggaactgccactgataaagatccttaagctcaaaagactgccaaagttgggagagctgcttacgaccacaactggggaggaaggagtggaagcgcaatgttgtttccatcacgtttccactctagtaataattgattgcccgaaacttgttgtgaagccgtactttcctccgtccttgcagagattgacactagaaggaaacaatatgcagttggtttcttcaggatgcttcttccatccacgtcatcatcatgcatctcatgctcatggtgacgagtcttcatcttcctcctattttgcggatgagacgggtactcacctcgagagacttgaacttcgtcggttgacaggatcatcatctggttgggaggtgctgcagcatctcactgggcttcataccctagaaatattcaagtgcacaggccttacgcatttacctgagagcatccactgccccaccaatctctgtagactggtgataacacagtgtgataatcttcgtgtgctgcctgactggcttgtggaactgaaatctctacagagtctggaagtacggttatgtgatgctctccagcagcttcctgaacaaataggagaactctgctcactccagcacctcaccatatcttctttgacttccctgacttgccttcccgagagcatgcagcacctcacctcgcttcgaactctcaacttgtgtctttgtaacgcgttgacccatctgccggagtggctaggcgaactctctgtacttcaaaaactctggctccagggctgccgtggccttacatccttgccccaatccatacaacgccttactgctctagaggacttacttataagctacaaccctgacctagataggcgttgcacggaaggattgggggaggattggcaccttgtctcacatattcaaaatttaaggctacgggactagggg

SEQ ID NO: 115201 - DNA, 306 bp, Zea Mays
cacaaagccttcaaaaaatacagaaagctctctgtagacctgcagtctgagctacactccttcaatgtttctgcaacccaagcctccgtatgctcgacaaaaacatttggaggttgcacagaacacatcatttggtcagatcccaaggggaactctatttacaggaggctggaaactagtctgtagaagaacgaagcagttaatctattcttctctgataccagcgcttggaaacaagaataacataagagtttccttgcgaaggaacacctcaagagtctaaagtctaaagggtgttgtcccagg

SEQ ID NO: 115202 - DNA, 4422 bp, Zea Mays
atggccctgacccgccagcgcgcttccctccccaccgttgacggccccgacccgccggtggactgcgctcctcatcgaccagcgtggccatattttgcatttgttcctgtttcagcttgtgagcaactgatactactgtcccggcccatcgttactggaccaagaactttgagatgtgaatcaatcatttttggctctttcatgcaccacatatttcagcagcacagaaagtttatgggtgaaaatggtcatttggggaactctatttacaggaggctggaaactagtctgtacaagaacgaagcagttaatctattcttctctgataccagcgcttggggtacgagcaaggaagggacttcaagaaatacgggtgggatggaagttgccttggtatcaactgtattgaaggttttggggacgaagttagctcctcttgcactcaaagagttgagctctaaagcaggtgtggccaaagatcttcaggaactccaggacctagttgaggagatcaacaattggttgcaaacagttggtgataaagaccgatcatctaaatggctcaaaaaattgaaagaagttgcttatgatgctgaagatttagtccatgagttccacatcgaggctgaaaaacaagacagagaaattactggtggcaagaataccttggtcaaatacttcatcacaaaacctaaagcaactgtgactgaatttaagatagctcacaagatcaagaaaataaaaaacagatttgatgcaattgtgaaaggaaggagtgactatagcacaatagcaaatagcatgccagtggattatcctgttgagcatacaagaaagacaattggagaggtgccattgtatactattgtggatgagacatcaatatttggcagggatcaagcaaagaatcagataatatctaagctgatagagactgatagccaacaaagaataaagatagtttcagtaattgggctaggtggctctggtaaaactactctcgcgaaacaagtatttaatgatggtaacattataaagcattttgaagttatattgtgggttcatgtgtcaagagaatttgctgttgaaaagcttgtggcgaagttgtttgaagccattgctggtgacatgtctgaccacctcctattgcagcatgtgagcagaactatctcagacaagttagttggaaagaggttcctagctgtcttggatgacgtttggacagaggatcgtgttgagtgggagcgattcatggtacatttaaagtgcggtgcacctggaagtagtattttactcactactcgtagtagaaaagttgcagaagcagtggattctagttatgcatacgacctaccactcttgtctatggaagatagctggaaagtgttccaacaatgttttggaattgccatgaaagctctagaccctgaattcctacagtccgggatagagattgtggagaaatgcggaggtgtgccccttgcaattaaagttattgcaggcatcctccatggaatgaaaggaattgaagaatggcagtccatatgcaatagtaatttattagatgtccaggatgacgaacatagagtatttgcatgcttgtggttgagttttgttcatttaccggaccatctaaagccttgttttctacactgctctatatttccaagaggctatgtaatcaacaggtgtcatttgatttctcaatggatagctcatggcttcgtcccgacaaaccaagctcgacaagcagaagatgttggaattggctactttgattcccttcttaaagtggggttccttcaagaccatgatcgagaccaaatttggtccacaaggggtgaagtaacatgcaaaatgcatgacctggttcatgatctcgctagacaaattctacgggatgaatttgagtctgagatagaaacaaacaagcaaataaagagatgcagatacctatctttgacttcatgcactgggaagcttgataacaaattatgtggcaaggtccgtgcactctatgtttgtggccgtgcactcgaatttgacaagacaatgagcaagcagtgttgtgtccgtaccattatattgaagtatataactgctgactcattgcctctgtttgtgtcaaaatttgaatacctggggtatcttgaaatatccgatgttaactgtgaagcactaccagaagctctctcgcgttgttggaacttgcaggcccttcatatattaaattgctcaagacttgcagttgtacctgaaagtatcggcaagcttaagaagcttagaactctggaactgaatggtgtttctagtatcaagagtttaccacagtctattggcgattgtgataatcttcgaagattatacctagaaggttgtcatagattcgaagatataccaaattccttgggaaaattggaaaatttaaggatacttagtattgttcattgctttagttttgaaaaactttcgccatcagcatcatttgggaagcttttgaacttacaaactatcacctttaactgttgcttcaatctccgaaacctacctcagtgcatgacttctttgagtcatctagagatggtggatcttggatattgttacgagcttgttgaattgcctgaaggcatagggaatttaagaaaccttaaagttttgaatctgaagcaatgcacacaattgcgtggactaccagctggttgtgggcagctaactcgtttacaacagttgagcttgtttgttattggagacagtgccaaacacgcaaggatctctgagcttggtaatcttgataagttggatggtgagctgcagattaaaaacattagatatgtgaaagatccaagtgacacagacaaagttcgtttgaagaaaaagattggcatccggaaattgtcgttggattggtattcaagattggaggttcagcctgatgatgtggaagaagagttatcattaaatatggagaaggaattgcatttgctcgacagtcttgaaccaccatcaaaaattgagaagctgagaattcgtggctaccggggttcacaattgccacgttggatggcaaagcaaagtgactcttgtggtccagcggatgatacacacatagtaatgcaaagaaatccatctgaattctcccatctgactgaattagtactggacaacttaccaaacttggagcaccttggggaacttgtggaactgccactggtaaagatccttaagctcaaaagactgccaaagttggtagagctgcttacgaccacaacgggggaggaaggagtggaagtgctatgtcgtttccatcacgtttccactctagtaataattgattgccggaaacttgttgtgaagccgtactttcctccgtccttgcagagattgacactagaaggaaacaatatgcagttggtttcttcaggatgcttcttccatccacgtcatcatcatgcatctcatgctcatggtgacgagtcttcatcttcctcctattttgcggatgagacgggtactcacctcgagagacttgaacttcgtcggttgacaggatcatcatctggttgggaggtgctgcagcatctcactgggcttcataccctagaaatatacatgtgcacagaccttacacatttacctgagagcatccactgccccaccactctctgtagactgatgataagaagttgtgataatcttcgtgtgctgcctgactggcttgtggaactgaaatctctacagagtctggacatagactcatgtgatgctctccagcagcttcctgaacaaataggagaactctgctcactccagcacctccaaataatttctatgcctttcctgacttgccttcccgagagcatgcagcacctcacctcgcttcgaattctcaacttgtgtgaatgtaacgcgctgacccatcttccggagtggctaggcgaactctctgcgcttaaaaaactcttgatccagagctgccgtggccttacatctttgccccgctccatacaatgccttactgctctcgaggaattatatataagcggcaaccccaaactgcttcagatcagtgcatcatattctaaggaagacaaggatggccagctgcaaccgttccgatgttgcaggcctgacgaccagcattgcagtgaggcccaagagttcgatctggtccggaacatgctcatcgtcgcagtagaagaacgctacaaggatgctggtaaacgtctaagaaaacaccatgtaaatatggaggccttttttttgctgaagcgcatgaagcttcggcaaacatctaaagaacaccatgcaaatggctgtggtgtcctgcgattggtctacgcgatgtacatgtgcgcaagctgctttgaagagaatttaaccaccttgaattttaggtacccatacagttcgctcatgtattga

SEQ ID NO: 115203 - DNA, 2499 bp, Zea Mays
ttccttccttatgtgccttcaggtgagagttatcaacatctcttctgtatcagatgttatcaagatttctattgtcggaatttttactactggcataacatggatctgccagaaaatgagctacaaagatacataaaggacaatggcaaaccaatgtggacagcacataacaatcacaacataaggtatttcaaagaagaagatataagaataatcactaacaactataacactttccttgggaaaggggcatttggagaagtttataaaggggttcttgatgataacagtttagttgctgtaaagaagtacatccataatgtaaaggaggactttgccaaagaagtgattgtccattgccaaatcaatcaccggaatgtagttagactcattggttattgtataggtgaaaatgcactaatgatggtgactgaatatatctctagaggaaacctcagtgatattcttcactccagtgaaatttctatatctttggaaacacgattgagtattgctatagggtgtgcagaagcattaagctatatgcattcgcaaatgtatgggaaagtcatccatggagacattaagcctgccaacatacttctcgatgacaacctcactgcaaaaatatcagactttgggatatcaaagttactttcaacggataataccttatacaccacacatgtactggggagcatagggtatatggatcctttgtttgcacggagcggacgcctcacctcaaagagtgatgtttatagttttggagttgttctcttggaactgattacaagaagaaaggctgtcgatggtggtcaaattagccttactgaaaacttcactcaagctctagcgaaacggaataagatacgggaattttatgatgtaaaagttgcagatgagaacagtttgaggattcttgatggaattgggaaactagcagcaaaatgcttagcaatggaaatagagaaacgtccagaaatgaaagatgttgcagaacagcttcggatgtttagaaaaactcaatatcagtcacaagaaaaaatatttttctttggctgggtacggagaagcaaacagccaccccaaaatatggtccagattcacaaaaatcgtggaaatcaagttcttaaagcggaggtacaaacacaggaagtcagtaaagtagataaagatgttcataatgtcacagtagtgagagataggagttcaaaactttacagctttggttcatcgcaggggatagaattagaaaagctgttggaagcatctgccgaggttcttgggaaaggcaagtatggaacaacatacaagactacactgcatgatggttccacgttaattataaagagactgaagactctagacgtgccagaggcagtgttcaagaaacgaatagtagcaataggaacaattgagcatgagcttgtagtcccactacgtcagtactactacagcaaggatgagaagctactggtgtatgattattttcccaatggtagcctagcttcaaatcttcatggaaaagatgtgaagccagtaggctgggagactcggtctgccattgcactctctgtagctcgtgctgttgccttcatccactcaaccaatgctgcagcttcccatggcaacatcagctcctccaacgttcttctcaccagtaactacgagggacttgtctcagaacacggcctcaaaactcttgtcagtatcccaacgttacttgctgacaacaacattgcacaaaaggatgatgtgtacagttttggcgtcatactgcttgagatgctcacaagcaagtcaccaatcgtcacagacgagccagatttggtcgattgggttttatcaataccccatgagcactgggcaacacaagcattcgataagaagctccttacaaacaaaactgtggtagaggagctggttcagtttctcaaacttgcaattcattgctgtgacaagaaccccacaatgagaccagcaatggcagaagttgttcaacggattgaggggatacgacgtttctacagctgggaataggcaccttatgtggaacagcagtgcaggttgagaggaacaaactttgagccaaggaacacgaggatacaaattttactgtgagcatacactactgttacaagcatttcttgttgtctgaaaaagacactcacgttccatcacttggttgtttgcgataccgtttccgtttgaaatatagagccctttttcaccaacattttgttctagtacacatgacacatattgtatattgagggtgctattttgttgcaattatgtcagggacgtgacaaaccgacttagttctatggaagcgggaagatgtgattcatttgtaatccatttgtgtgtttggaccctatgatggtcgtattagtagtgggccgtattggcctagtgttgtaatacaaatactggacaagtagtgaagaaagacagaaaaatagaatatcgaaaattacacatacctgttttctc

SEQ ID NO: 115204 - DNA, 367 bp, Zea Mays
ttttatcattaactattatatgaaaacatcgtcacatgtaagtttaacgggtccccgcggggaacggggatgcttccccatccccgtccccgtttacccgtcgggggagaattttccctcgtttacatccccgtgggggaagaaatttccccatccccgtcccctaaggactaatttggtggacagggatcacaaggggatccatgggtgaggaatcccctttctattcaaaattgaatagcaagggaattactcccccatggatcccctcgtttgaatagcaaggggattcctcacccatggatcccctcgtgatccctatccaccaaatcagccccaatagaggaattccccgtggggaatcggg

SEQ ID NO: 115205 - DNA, 285 bp, Zea Mays
atgccgttgttagatagcttcacagtcgatcatacccggatggaagcgcctgcagttcgggtggcgaaaacaatgaacaccccgcatggcgacgcaatcaccgtgttcgatctgcgcttctgcgtgccgaacaaagaagtgatgccagaaagagggatccataccctggagcacctgtttgctggttttatgcgtaaccatcttaacggtaatggtgtagagattatcgatatctcgccaatgggctgccgcaccggtttttatatgagactgattggaacgccc

SEQ ID NO: 115206 - DNA, 1662 bp, Zea Mays
ctggctgactgaaccaggaagaagccaacaagcacttgctgcagtccagctcagtacagtccagtgcgcctgctacaaatcaaagctcctgcactgcagcaccatgctctgatccccatttagagctgatcgtcgcgtcgaggtactctactcatgcacccagccactacgtactatttgctcatcaagctaccaaggatttcttggttacgctagctcgccggtttcttggttgttactagcacccggcggcgtctgttcgtccacagctagccaatctctctctccgggggacgagacgatggacatcatcaacggggccgtgctccctcgctgccacgccgcccccgtcacgggcgccgcggcggcctccgtcgccgacgcgagagtgagcggacacctccagcttctccggcgcgtgcgctgcagaggaagcggaagcgccagtgccgggctgctgcatgcgacgacgccccgagccggcgtggcagcgcgcaggttcttctccccaccgctggggaacgggaacgggaatgggaggaccatcggctggcggccggctcgctgcacccacggcggctcctcctccgacggcgacggcgccgccgccgcggacttcgacgcccgtgaggaggagttcgttgactccagcgtcatggaggccgttgagctcaggagcgtgtcagacggcggtttcgtcatcaagatgcgcgacggcaggaacctgagatgcgtccagaacaacccccgggtgctgaggctccgggactccgcgccgcaccacgcgatcgtgctcaagatggaagacggcagcgaccttctgctccccatcatcgtcatggagacgccaagcatcatgcttctggctgcgcttcggaacatccgaattccaaggccaaccatctacaatgtggtgctggagatgactacaaggatgggatatgaggtgcgtttggtgcggatcacagaaatggtccatgacgcatactattctcgactatatctcgcaaaggttgggaatgaccaagacactatcagtttcgacctcaagccatcggatgctatcaacattgctttccgctgcaaggtccctatacaagtgaacaggcgtatcgcgtataacaacggattgaaagtcctacagccaaaggcggccgggagttatttaggctccgacgacattcaaatcacaaggcttgacaggcctgacgaccagcattgcagcgaggcccaagagttcgatctggtccggaacatgctcattgctgccgtagaagaacgctacaaggatgctgctcaatacagagaccaactttccatgttgcggtcaaagaaaaagaacgcgatatagccagatgggtgcaaagcttcaacttgttagagcttgatgggggtgtacagaggaggccttttttgctgaagcacgtgaagcttcggcaaacatctaaggaacaccatgtaaatacgtacgtattacagaatttatgtatagacacacacatacacggagagcctaattctggattctttagctcatagttgcactgttgcagtgattgtactctaaaatgcaaatgactgttgtgtacgccatgtgcagctccaaccaagttgcatcaccgctgtttgtcttcaaatcggcaatcggttttgaagaaaaat

SEQ ID NO: 115207 - DNA, 1902 bp, Zea Mays
cccggacagacttgtttctcatgctggcggcacgctagtagctggacctcccctcccgggacccgggctcggcatgtccggcgagggaccgttcgaggagagctttgggccaagctggttggtgcgtttttcttctctcgtgcgtgcgcagcgcgcagcaggaacggcggagcaatgcctgcctgcggctgccgcgctggtgccagggcggcatacgggcatggaacgcgcgcgtgcccacaacctgtttgtgacaatgtcttgcagagggctgtattgtaccagcaaacggacgggtatcataccaagttgggccggagtcggctcatcgccgatgaaggtgacaactgacaagaggaagaagccaacaagcacttgctgcagtccagctcagtacagtccagtgcgcctgctacaaatcaaagctcctgcactgcagcaccatgctctgatccccatttagagctgatcgtcgcgtcgagcacccggcggcgtctgttcgtccacagctagccaatctctctctccgggggacgagacgatggacatcatcaacggggccgtgctccctcgctgccacgccgcccccgtcacgggcgccgcggcggcctccgtcgccgacgcgagagtgagcggacacctccagcttctccggcgcgtgcgctgcagaggaagcggaagcgccagtgccgggctgctgcatgcgacgacgccccgagccggcgtggcagcgcgcaggttcttctccccaccgctggggaacgggaacgggaatgggaggaccatcggctggcggccggctcgctgcacccacggcggctcctcctccgacggcgacggcgccgccgccgcggacttcgacgcccgtgaggaggagttcgttgactccagcgtcatggaggccgttgagctcaggagcgtgtcagacggcggtttcgtcatcaagatgcgcgacggcaggaacctgagatgcgtccagaacaacccccgggtgctgaggctccgggactccgcgccgcaccacgcgatcgtgctcaagatggaagacggcagcgaccttctgctccccatcatcgtcatggagacgccaagcatcatgcttctggctgcgcttcggaacatccgaattccaaggccaaccatctacaatgtggtgctggagatgactacaaggatgggatatgaggtgcgtttggtgcggatcacagaaatggtccatgacgcatactattctcgactatatctcgcaaaggttgggaatgaccaagacactatcagtttcgacctcaagccatcggatgctatcaacattgctttccgctgcaaggtccctatacaagtgaacaggcgtatcgcgtataacaacggattgaaagtcctacagccaaaggcggccgggagttatttaggctccgacgacattcaaatcacaaggcttgacaggcctgacgaccagcattgcagcgaggcccaagagttcgatctggtccggaacatgctcattgctgccgtagaagaacgctacaaggatgctgctcaatacagagaccaactttccatgttgcggtcaaagaaaaagaacgcgatatagccagatgggtgcaaagcttcaacttgttagagcttgatgggggtgtacagaggaggccttttttgctgaagcacgtgaagcttcggcaaacatctaaggaacaccatgtaaatacgtacgtattacagaatttatgtatagacacacacatacacggagagcctaattctggattctttagctcatagttgcactgttgcagtgattgtactctaaaatgcaaatgactgttgtgtacgccatgtgcagctccaaccaagttgcatcaccgctgtttgtcttcaaatcggcaatcggttttgaagaaaaat

SEQ ID NO: 115208 - DNA, 2096 bp, Zea Mays
cccggacagacttgtttctcatgctggcggcacgctagtagctggacctcccctcccgggacccgggctcggcatgtccggcgagggaccgttcgaggagagctttgggccaagctggttggtgcgtttttcttctctcgtgcgtgcgcagcgcgcagcaggaacggcggagcaatgcctgcctgcggctgccgcgctggtgccagggcggcatacgggcatggaacgcgcgcgtgcccacaacctgtttgtgacaatgtcttgcagagggctgtattgtaccagcaaacggacgggtatcataccaagttgggccggagtcggctcatcgccgatgaaggtgacaactgacaagaggaagaagccaacaagcacttgctgcagtccagctcagtacagtccagtgcgcctgctacaaatcaaagctcctgcactgcagcaccatgctctgatccccatttagagctgatcgtcgcgtcgaggtactctactcatgcacccagccactacgtactatttgctcatcaagctaccaaggatttcttggttacgctagctcgccggtttcttggttgttactagcacccggcggcgtctgttcgtccacagctagccaatctctctctccgggggacgagacgatggacatcatcaacggggccgtgctccctcgctgccacgccgcccccgtcacgggcgccgcggcggcctccgtcgccgacgcgagagtgagcggacacctccagcttctccggcgcgtgcgctgcagaggaagcggaagcgccagtgccgggctgctgcatgcgacgacgccccgagccggcgtggcagcgcgcaggttcttctccccaccgctggggaacgggaacgggaatgggaggaccatcggctggcggccggctcgctgcacccacggcggctcctcctccgacggcgacggcgccgccgccgcggacttcgacgcccgtgaggaggagttcgttgactccagcgtcatggaggccgttgagctcaggagcgtgtcagacggcggtttcgtcatcaagatgcgcgacggcaggaacctgagatgcgtccagaacaacccccgggtgctgaggctccgggactccgcgccgcaccacgcgatcgtgctcaagatggaagacggcagcgaccttctgctccccatcatcgtcagtacgtaccagttccccgcctgctgcctggacgaatgcctcattgacgtcattaatcgctgctgcagatgctttttttttcttcttcttgtacttaatcttgttgcttgctcatgctacttcaatcatattcctccccagtggagacgccaagcatcatgcttctggctgcgcttcggaacatccgaattccaaggccaaccatctacaatgtggtgctggagatgactacaaggatgggatatgaggtgcgtttggtgcggatcacagaaatggtccatgacgcatactattctcgactatatctcgcaaaggttgggaatgaccaagacactatcagtttcgacctcaagccatcggatgctatcaacattgctttccgctgcaaggtccctatacaagtgaacaggcgtatcgcgtataacaacggattgaaagtcctacagccaaaggcggccgggagttatttaggctccgacgacattcaaatcacaaggcttgacaggcctgacgaccagcattgcagcgaggcccaagagttcgatctggtccggaacatgctcattgctgccgtagaagaacgctacaaggatgctgctcaatacagagaccaactttccatgttgcggtcaaagaaaaagaacgcgatatagccagatgggtgcaaagcttcaacttgttagagcttgatgggggtgtacagaggaggccttttttgctgaagcacgtgaagcttcggcaaacatctaaggaacaccatgtaaatacgtacgtattacagaatttatgtatagacacacacatacacggagagcctaattctggattctttagctcatagttgcactgttgcagtgattgtactctaaaatgcaaatgactgttgtgtacgccatgtgcagctccaaccaagttgca

SEQ ID NO: 115209 - DNA, 97 bp, Zea Mays
caaaactcatatagcttcaatatggaaaacacataaacaatgggtattgtgcaacgctagatctcagctaccacaatcaagtagcttagtggagtgg

SEQ ID NO: 115210 - DNA, 2081 bp, Zea Mays
aacatctttccggaaagaaaccggtggtgctggtgcgcagctagcagtagcagttgaatcatcgccctcgtcgcccgtttttgtgactatggttgtacgtctcctaaatgctaggctgtgaaattaatagcttgtttggttgccctcgtcgcccgtttttgtgattgtgactatagtagaagccctgcagcgcagtgaacaatctggtacgtgtccctgcttcacctctttcctatcctcagtctctcactcttccctaggttcgccacacctgtggcgcatactctcgtgtcccaaaaccaaacacggcggtgctggtgcgcgcgcagctagcagttgagtgctcgcccttgtcgtcagtcgagtcgagcgatggagaagacgacggtcgtgctgtacccgggcgcgggcgtcggccatctcgcgccgatgctcgagctagccaaggcgttgctccgccacgcaggtgaccaggtggacgtcgccatcgtggtcgtcgagccgcccgtctacgcggacggcttcgccgccacggtcgcgcgcgccaaggcctccaacgcctccgtcgcctgccacgtgctacccccgccggcctccgacggcggcgccgagcctgacgaccccctgacccgactgctccgcttcctccgcgccacgaacgcgccgctccgggacttcctccgcgcgctgtcggcgtcgcgccgcgtccaggcgatcgtcctcgacatgttctgcgccggcgcgctcgacgtcgcggcggacctcggcctgcccgcctacttccacttcgcctcgggcgccgccggcctcgcctacttcctcggcctgcccgccatgcgggccagcgtgggcacgagcttcgccgagctcggcgggtcgaccgtcctgtcgttcccgggcgtccctccgctcacggtcgcggacctgccacagggggtgctcaacgacagcgaggcgtgccgggtcatcatgggcgcggctgcccggatgcccgacgcccgcgggatcctcatcaactcgttcgagtcgctggagccgcgcgcgatgcgggcgctaagggatgggctgtgtgtgccgggccgcgccacgccgccggtctactgcgtcgggccgatggtctcgcccggcggcgacggtgccggccacgagtgcctccgctggctggacgcgcagccggaccgcagcgtcgtgttcctctgcttcgggagtttgggcacgttccccaagaggcagctggaggagatcgccgtgggtctggagaggtccgggcagaggttcctctgggtggtgcggagccctcccggcgggccaccagccgacgacgtgcgcgcgctgctcccggcagggttcgcggagcgcaccgagggcagggggctcgtagtcgcgtcgtgggcgccgcaggtggacgtgctgcgtcacagggcggccggcgcgttcgtgacgcactgcgggtggaactccacgctagagggcgtcgtggcgggactgccgctgctgtgctggccgctgtacgcggagcagaggatgaacaaggtgcggatcgtggaggagatgaagctcggggtggaggtgaggagggacggcgagggcctggtgacggctcaagaggtcgaggcgaaggtgaggtgggtgatgcaggactccgacggcgcgcgggagctcaaggaacgcgcggaggcggcgagggcgagagcggccgaggcgctggcggaagggggtccgtcgcgtgcagctttcctcgagttcgtcctagacctgttggcttccgaaggcatggttaacgtttgaagtttgacgagtgtatttacttgtaataaaaaacaataattttgtaagcttcgttccagaaaatatacaacaatagagttaaaaaacaatttcaatttaactaaatttataataaataatccttactaatataaacagcacatggtctctagagagagcactcgtctgatcgtctctaatcaatgcaccttatgttgtacaaagaaaccatattatataactacaatagaaatatgtttcagaattatttaataattactttgtattatatctattaccattttaatatataa

SEQ ID NO: 115211 - DNA, 507 bp, Zea Mays
ataccccgccagccgccatcccctccgaccaaaccctagccggccatggcgtggcgtggccccgcctcccgggccgtccttgccgccgtccgccgcccagccgcagcgcccgcggccgcacgcctccacgccccgcgacctttcgcggccccgcgccgccgcgtcccgtccgccttcgccacctcctcgctcccgtccgcgcggcctctggcggcgatgatggggtccccggtgacggtggccgcggtgatggcgcgtctcacggcgcaccccggtgccagcgcgcgggcgtgctgcgagctctcccagggtacttgaagctgctgtgtagatcccatccttttcgaaaggataaaaggtgtctttttttttgggggggggggggggggaaatgctattgtggcacttcttccactgcaaagttggaagaatttacccacccagcgatagccagttccctcgttaggatgttagaatatactggaataattttaatgttattcatgg

SEQ ID NO: 115212 - DNA, 587 bp, Zea Mays
ataccccgccagccgccatcccctccgaccaaaccctagccggccatggcgtggcgtggccccgcctcccgggccgtccttgccgccgtccgccgcccagccgcagcgcccgcggccgcacgcctccacgccccgcgacctttcgcggccccgcgccgccgcgtcccgtccgccttcgccacctcctcgctcccgtccgcgcggcctctggcggcgatgatggggtccccggtgacggtggccgcggtgatggcgcgtctcacggcgcaccccggtgccagcgcgcgggcgtgctgcgagctctcccagggaaacggaaaggatgggtgatgcaagaaaggccgttgtagagcctgccaaagaagctggtttgaagcatgtactcctttggtacttgaagctgctgtgtagatcccatccttttcgaaaggataaaaggtgtctttttttttgggggggggggggggggaaatgctattgtggcacttcttccactgcaaagttggaagaatttacccacccagcgatagccagttccctcgttaggatgttagaatatactggaataattttaatgttattcatgg

SEQ ID NO: 115213 - DNA, 4472 bp, Zea Mays
ccgcagccgcccaaaccctagccctagcccctagccccgctgccggcaaggccggagcgcccggagcccccgctggccggccccggagaagacgtcccatgcggctgtatcgcgcaggggaaatttaggtgaatgttacaagcatgatgactcaaaccctgcaagggaaagttatggcctacacaccgagcagttttcctgttcagcaacagattctgccggaggatcttgaaatgcttcagctggataacatggaccagggtacctctccggttcgtgctgtcatcattaaaagaattgaaacatgcctgagaaatagagaagaattttgtaacttgtgcccagattcattactgaaagcttcagaaatcattgacaacctgctatacaaaattgatccgcagccccaatacatggatcttgacacaatagaagccagggtgaatgatttgctgagatcgttcctgtatggaaaccaaagagacccatggatatcttcagcagttccatcaacaaaagatttgaggcagctgcctgggatacaaatgacagactctagtgtatatcataatagagttgtccctggttttactaatttgcctgcacgcccaggaggcataccttcacatgctgtgttcactgctcagagatatgtaccactgaatcacaacatgactgctgccagttttgctctagttgaaaggcctgaaagctttatgagtaccgtagttgctccatctgtgtcaggacttcctaactgtatttctggccctggtgggattgatagttctggattgcaaaatggctattcaaaggaccattttccagccttatgtgatccaatcacaagttcgggtgcaatgataagatcatcaatggattttatccctaaagcaagtgggcaaaaactctttactggcaaaggacaaatgtttcaacaatacagagaatatgagaaagagttagatggtgcatggagccaccccacagagaagccagttcactcaaataggacaactcagagcgatgaaatatatctcaaaggagaatgcggacctgatacactcacagaaatgaaggaaaactatgggcgcatctcagactctagagatccttgtgaccctgagagagaaattgttgagagatctgaacagacatcaaatatcacagtatcaaaggcaacttcaccaatttcagatgaatcttctggcaggcgtccagcaaaacgcctgaaggctgatgctccccgtcttgtcaatgtcaatcaagtagagagtccacaggagcaaaaacctgttgtgaatgagaatcatgtatctggtggtgaaacagtacaatcggaaatcacagaattacctgcaaaaccaccttgcagttcattgggagacattaatgctgagagcaataatatgcttgaacagggtagtgaagatgtacccaacatggatattgttaaggaagaggaattgtcccgtgcaaaaggtgacattgagatgaaagatgctaagactgttgcattggatcatacaccaaaaggggtcaatttaagttcaagacgaaagagaggggcttctatactttatggattaactgctgaggagcttagagatcacatgagtagtctaataaaccggcatacttgtcagagcaaggtgacatctcaagaattcccatcaattgatggattgcctgatcagaacacatgcagtttgtgtgggatggagaagcttctttttgaacctcctccacgattttgtgcgctctgtttcaaaataataaattctgcagggtgctattatgttgaagttgaaaatggaactgagaaatcttctatatgtagcaaatgccaccatcttagcagtttaagagctaaatatcagaagaaatttaattatgcagaaacagatgctgaggctgaatggtgggtccagtgcgacaagtgcaaagcttggcaacatgaaatctgtgctctttttaacagaaagtgtgaaggggcaaaggctgagtatacttgtgcaaaatgttttttgaaggaaaaggatagtggagatattcaggcactggagtcatccactgttcttggggcacaggagttacaaagaaccaagctaagtgatcatattgagcaaagactttcagagaggcttgagcaggacaggcaacagagggcgagcgcctctggaaaagttgctgaagaggtaccaggtgtgaaagggcttacagttagagtagtttcttcagccgaaagattactgcaagtccaaccacgttttcgtggtttttttaaacaaggaaagtatcctggggaatttccatacaaatcgaaggccattctcttgtttcaaaagatcgaaggtgtggatgtttgcctctttgccatgtatgtacaagagtatggctcagattgcccaccaccaaatcaaagacatgtttatcttgcatatattgattctgtcaaatacttccggcctgaaatcaaatctgcaactggagaagctctccgcacctttgtgtatcatgaaattttgattggttatctggactactgcaagaaacgagggtttgtaagctgttcaatatgggcttgcccatctacgaagcgagatgattatgttttatattgccatccaacagtacaaaagatgcccaagtctgacaagcttcgaagctggtaccagaacctgatcaagaaggccattaaggagggtgttgttgtggagcgtaatacactctctgacttcttccttcagcctacaaatgagtgcaaggccaatatttcggcagcatgcttgccatattgtgagaacgatttctggcctggagaagcagagaggctgcttgagaagaaagatgataatgcttcacagaaggaagagacacaggtaggaaggctcttgcgtgttgccaaacgcgacgacagaaaaggaaaccttgatgatattttgcttgtgcataagcttggggaaaggatgcgcacaatgaaagaagacttcattatgctttgtctgcaacagttttgcaagcactgccaccatcctatcctatctggcaaaagttgggtttgcactagctgtaaaaatttccatctatgtgacaagtgtcatgcagaggagcagaatacagcacagaaggacaggcatccggccaccacaaaacagaagcatgcattcgaaagaatggaggtacaacctcttccagagactgatgatggagatccgacaatggaaagtaagtattttgacagcaggatcgatttcttgaagcactgccaagacaatcaattccagtttgataccatccggcgggcaaagcactctacaatgatgattctgtattacctacacaattcaacctgctctgcttgccatcgtgccgtggaccaatgcttggtgtggcggtgcctagagtgcctaggctgcaccttttgtggtcaatgctataaacaaaatggtcaaggcttgcatattcatgaattaaggcagattgacactagagaaacttcacagaagcacactctacaggactacattgatggccttgtgcatgcatcgaggtgctatgatccacgtaactgcacccatccactctgtttaaccctgaagaaactgttcgcccatggtgcacgatgccatgtccgtgcctgcaatagcggcggttgcaaaaagtgtctctttatgtggaaactcctgttccgccactcaaaagattgcaacgacggagactgcgcggttcctagatgcagggatgtaaaggcattcatagctgaaaagatgaagcttaaaatctagtaatggaccccctcccccttctcccccttccttaaccagtcaaattcgttgatgaagatgcaataaactgcggttggccattgctggtggatggaactgcaaggtaaataatgtggtgacttactgcttctggtgtggttgcatgtgctccatgccacagaggatcacccaaccgaagcttacataggcaatctgacattggtttttagtgcccgtacataccttgtacatatagtttttctctccaacacaaataggggtttgttttaatttcttcatcgtcaaagttttgttctccataatgtctgcctcatttttgttcagtgttgcagtgctgcggtggcatccaaatattcaatgaatgggtaactaacaagtcagcgactagatagtttactagggtaaacaagagctaacagggaccagttagtcccatagatcaaacaagacctgacaaccatcctataagcttgttattcaagtggcaatttgcaaggcacggactactaattagtgctataacttgagaagttacacaatgatcttatccagggacccattgcgccgttcattttcttttccattcgaaccattggcttcatagagccgttgtctaaactcacgtatgatagattctagatagctataaaggggtaaataacgtataaaatatttttttataaa

SEQ ID NO: 115214 - DNA, 1524 bp, Zea Mays
gacaattgcttaaaacactaagcctatcatactcactgacaattattagacgatgcgatttaaatcatcctataccgctcttgctaaaaatatgagaatcatcataattactatatatctaattaatccactcataaacccaaataacataaataataaactagcttaccatgaccgaatcgatccgatatttgtaagaacgacgatgaacatccgttcaagtgctttgtcgagccccaagagagtgcttacaggcctcgcttctctcgaacatcagggatttctcatccaaagtaagtccgactcaaagcttgcaagaatgtcgatagtctccgaataaagtcttcgatcgaacacttggcgagtgacgcatcagaacgtcaccttcttctaatcccagacactctgatatttttcattagtaaaatccgacacgaactccgcaagaaccacgatgatttctagtacaggctttttgtcgagtacttgataaatttcacgctgctagcttcgttttcaccggatttcttgatgacgcacagaacgacgacgaaatcgatgacgcacatgcgtgatgaggcagggtctggagacatgtgcgcaagggaaggtgagctctggtgccgagaatcgacggcgtggttcaagacggctgggcacgcaggcgagctacggacagtcccatcgcacatcacgacgttgagggtctggtgacgcagctgctgttggaggaagcgtggctgcagagctcagtacaggagctggcgcggttctgtacggatgcgagtagggagcatcacacgcagatgggtcgcgcagcatggatgagcagagacgacgctgcacggatgagggaggtcagaggcgaggcaaggtccgagcacaagggcgagctcggggcggccgacgaagtgagctctaggaggaaatcgagggaaggacgctctgctccccctcgctcgtctccacatggccggacggctgccgtgctgaccaccacgaccaggcccgcgccggccgtcgcggaaccacgggagcagcgcgccgtccgccagcgccagacaggggattatgacacggtggagggccgagacggcgaggaggtcgggaggagcagggcgtcaccatgacctgccgccgagctcgaggaggaactcgacttgcgcacgacgttcggtgtcctagccggaccggggtgactcacctgcgcaggggcgagcgcacggcggttgaggaaaatggagaggagcagggagccgagagggtgagggcgcgaccacggcaaggtggaggacgagcgagatggagggagcgtcgcgagggagagatgccgcgggggaggagctcggcaaggcgcggcggccatgggaaagacctcggcgggcgcgcgtgggagatggatcttgcaggggagggcgccatgggagggaccaagctggagccggcgctggggctgggtgcgagacctgtagaggaggcgaggaagagccgtgcggggaagaagatgagggacagagagaaaaa

SEQ ID NO: 115215 - DNA, 243 bp, Zea Mays
aggacaccaaagcagcggcggcgggcactggcccactgggaaaggcaggggcgctgtcagctcggccacggtgcagctgtgctggaggatggagacgggcggcctagcggagtccagctccggcggcaccgcagcgtggaggcgaaggcgcttgagtggacggcgtcggggtcacggcagatgggccggaatcggcttctcatctgtcagcattgcggcggctcggttgggcaactttatgag

SEQ ID NO: 115216 - DNA, 1419 bp, Zea Mays
atggggaatcacaagaagcttctccagttcctgcggccagacccggcggtggcagcagcgccggcgaggtcgtccacgacgtcggacgacgaggacgacggcacgtcgggttccacgccggtgactccgaccacgagcgcgagcgcggcggcgtcgccgtacgcctcgtccccgtggacgcatctcccggggctcggccccggtcccgcggcggaggcgaccgagctcctcggctcgctcgtcaaggaggacgggggccacgtctactcgctggcggcggcgggggacctgctgtacacgggcacggactcgcggaccgtgcgggtgtggcgggagcgggaccgccgcgagctgggcggcttccgctcgggcagcggcctggtgaaggccatcgtggtgggcggggacggccgcgtctacacggggcaccaggacgggaaggtgcgcgtgtggcgcgcgccgcaatcggcggacgaggtcgtcgaggacccctccgcgctccgccgcgtggggacgctgccccggctccgcgacgtgctccgcagctccctcctccgcccgtcgcagcccatgctgcggcactccgacgccgtgtcggcgctcagcctggacgccgcggcggggctcatctactcggcctcctgggaccgcaccttcaaggtgtggcgcgtgtccgacttccggtgcctcgagtccgtggtgcgcgcccacggcgacgccgtcaacgccgtcgccgccgcgggcttcgacgcgctcgtgctcacgggctccgccgacggcacggtcaaggcgtggcggcggcgcgcggccgagggcaagggccgggccacgcggcacgtcatggagcgcgtgctgcgggagggcgacggcgccgtcaccgccatcgcggtgtgcgcgcaggcccgcgtggcgtacgccggctcctcggacggcgccgtcgcgcactggcagtggccgcggggcgccgcgcccaggagcggcgccgcgcccaggagcggcgccgcgctgcggggccacaagatggccgtgctgtgcctcgcggtggccggtcgcgtcgtcgtcagcgggtccgccgaccggaccatctccgtgtggcggcgcggtgagggcgccagccacgcgctcctcgccgtgctgacggggcacacggggcccgtcaagtgcgtcgccatggaccagaaggaggaggaggaggaggaggaggaggaggaggatgatgagggcgccgccccacgccggtgggtcgtgtacagcggcagcctcgatgggtccgtcaaggtgtggcgcgtctccgagtcggacggcggcggcggcttcgcgcccgacctgacgatgtcgacccccgcactccactggaagggcttctcgccttcgccgccgccccgcgcgcaccgtgtgcaaccgagaatagaagaatag

SEQ ID NO: 115217 - DNA, 2795 bp, Zea Mays
cttccgttccctttctcccgttcgcacgccgcctcgtgcactcctcctcctcctcctcctcccagatctcgtgaccattgccattccctccctccgctacacgccgagcgcccccgtccggaccaggcgtctccgcggctcctagtcctcgccccctccctctcccgtggaggactgccgcggggcggcgagggagaggagatccgtcggtgctggctgctggttggtcggctggtcaatccctttccatcgtttgctgattgcgcgagacggtgcttcaggactgccccctggcgcggaggccgcacaggctcggcggcgccggcggcgagatgaagggcgcgaccatcccctcggtcgcgatcatgccctcgccgctcttcctctggcggtttaaggttgtgttgtttcttctatggggcttatgttgttgcaagataagttgggactcggttatgagaatgagtgttgatctcagagacttatttctttatgaggctttcttgtactataatcctcttcttcttgtggccttgatgatttggttgtggggagtaaatctatgggtttttgcacaatcatctgtgaattatgcaaaagtgtttgatcttccacaaacacatttatctcaccgagagatatggaggtgtgctacttggctgactttaattgtccctactagcatgacagcctacctatatctgtactcacatggagaagtgtctcttgcagcatctcaaccagttctcttgtatgctattcttctgatgatcctcctttctcctttcgatatgttttacttatcatcacgcttttactttctgaggacagtctggcgtataatactgcctttacaagcaattacatttcccgatttctttttggctgatatttttacatccatgtcaaaggtgttctcagatctggagcgctcagtttgtcgtatggtgaatcgccaggttgcaacaatcgcttggtttgaagcagattctatttgtggcagtcattcagtagcgattccgcttgttctcatgttaccctacttgtggcgtttattccaatgtctccggcaatacaaggatacaaaggagaagacatgtctcctcaatgctctcaagtactcgacagcaattcctgtgattttcctttctgctctcaagtaccatgtacatcctgatcaatgggttggcttctaccggcccctctggcttatctctagtgttgtaaattcactgtattccttctactgggatataaagcgagattgggatttgagcatcctaaccaggattttcatgttcaaaaacccaagcatatggacatatcttctttacgggcagaactgggtactctactgggtactgggcagcaatttggtcctgcgatgcacatggacgtacaagctctcggcgcatctccggcacaactacctgacagtgttcaccatagcagctctggagatactgagacggtggcagtgggtgttcttccgggtcgagaacgagtggaacaagatgacagccaaacagaacatggagatgtcatccgacatgccttccgaaggagacaggctactggattccagtaaccatacagtatgagttgaacagcagtctcataatttttgcgatacacagattcagcaccattcttttagcgtgacccatttttacgtcgacggtttagattttgtatgtagagctcaaaaggccagggatacgtaacaggtttctatataaaaagttgaaatttgttggcactacggatgtaatcctcttggaggatgtgtacttttgtaacccacttgcatccaacaggaggcatttgttgacacattaaagaaaaatagtaatgctgaaaatcatgagtttttggaaccgtaattatctcttttatcttgttcattatcatattcttggtgagtaccgtatatcagacagactgctcgtgtgggcatgacatttcacgtcaccagtttatcggatggctgagacctgatgaagtaacatacaagaagctgggtctagtggtatatgatttgatgatccaatcattgtatccatccacccacagaatgaagatattttggaaataaaaaaaaggcctgaacccagaacacaaatggaacatttaatacaaacatactttgtctaattactagctagagcatgatccataaaaacattaagacaccaagcacaagcaggtaagcaattatgcagaaatgctagctcccaaaacaatccttgcatatatccatggctccatccttgcagtaacttgcatacatacatctactgcactagcactacatcggcgagattatttaacttgcatctgttcttgacagtctacacaagaagaggcgaactggatcatgttccatgtgcatttgcttaatctgcacaagagactaattctatattacaaaagctacggcgccgagaaggcgtcgtcgagcggccacgggaggtgccgttcggtgccgtccatgccgtccggctcagcggaccgcggcggcgcctgcaccatggagcgcagcgtgtcgtggaggcggtcgtggcgcctccggtggcggatgcggcgcagcacggcgtccctgtccagcgcccccgccccggggcgcaggtacaggcagctcgtcaccggcgcggcctcgacgacgctgccttcgccgtcgccgtacccggccggcggcggcgcgttcttggacaccatggaggacgacatggcaaggcaggtgctggttcctccccctgatgagctagctggagaacagagagagcaggtacgct

SEQ ID NO: 115218 - DNA, 2876 bp, Zea Mays
cttccgttccctttctcccgttcgcacgccgcctcgtgcactcctcctcctcctcctcctcccagatctcgtgaccattgccattccctccctccgctacacgccgagcgcccccgtccggaccaggcgtctccgcggctcctagtcctcgccccctccctctcccgtggaggactgccgcggggcggcgagggagaggagatccgtcggtgctggctgctggttggtcggctggtcaatccctttccatcgtttgctgattgcgcgagacggtgcttcaggactgccccctggcgcggaggccgcacaggctcggcggcgccggcggcgagatgaagggcgcgaccatcccctcggtcgcgatcatgccctcgccgctcttcctctggcggtttaaggttgtgttgtttcttctatggggcttatgttgttgcaagataagttgggactcggttatgagaatgagtgttgatctcagagacttatttctttatgaggctttcttgtactataatcctcttcttcttgtggccttgatgatttggttgtggggagtaaatctatgggtttttgcacaatcatctgtgaattatgcaaaagtgtttgatcttccacaaacacatttatctcaccgagagatatggaggtgtgctacttggctgactttaattgtccctactagcatgacagcctacctatatctgtactcacatggagaagtgtctcttgcagcatctcaaccagttctcttgtatgctattcttctgatgatcctcctttctcctttcgatatgttttacttatcatcacgcttttactttctgaggacagtctggcgtataatactgcctttacaagcaattacatttcccgatttctttttggctgatatttttacatccatgtcaaaggtgttctcagatctggagcgctcagtttgtcgtatggtgaatcgccaggttgcaacaatcgcttggtttgaagcagattctatttgtggcagtcattcagtagcgattccgcttgttctcatgttaccctacttgtggcgtttattccaatgtctccggcaatacaaggatacaaaggagaagacatgtctcctcaatggtattcattcatcaagcattaactatgattttttatctgtctctggaataaacttgccatttttttatatcttaaatccagctctcaagtactcgacagcaattcctgtgattttcctttctgctctcaagtaccatgtacatcctgatcaatgggttggcttctaccggcccctctggcttatctctagtgttgtaaattcactgtattccttctactgggatataaagcgagattgggatttgagcatcctaaccaggattttcatgttcaaaaacccaagcatatggacatatcttctttacgggcagaactgggtactctactgggtactgggcagcaatttggtcctgcgatgcacatggacgtacaagctctcggcgcatctccggcacaactacctgacagtgttcaccatagcagctctggagatactgagacggtggcagtgggtgttcttccgggtcgagaacgagtggaacaagatgacagccaaacagaacatggagatgtcatccgacatgccttccgaaggagacaggctactggattccagtaaccatacagtatgagttgaacagcagtctcataatttttgcgatacacagattcagcaccattcttttagcgtgacccatttttacgtcgacggtttagattttgtatgtagagctcaaaaggccagggatacgtaacaggtttctatataaaaagttgaaatttgttggcactacggatgtaatcctcttggaggatgtgtacttttgtaacccacttgcatccaacaggaggcatttgttgacacattaaagaaaaatagtaatgctgaaaatcatgagtttttggaaccgtaattatctcttttatcttgttcattatcatattcttggtgagtaccgtatatcagacagactgctcgtgtgggcatgacatttcacgtcaccagtttatcggatggctgagacctgatgaagtaacatacaagaagctgggtctagtggtatatgatttgatgatccaatcattgtatccatccacccacagaatgaagatattttggaaataaaaaaaaggcctgaacccagaacacaaatggaacatttaatacaaacatactttgtctaattactagctagagcatgatccataaaaacattaagacaccaagcacaagcaggtaagcaattatgcagaaatgctagctcccaaaacaatccttgcatatatccatggctccatccttgcagtaacttgcatacatacatctactgcactagcactacatcggcgagattatttaacttgcatctgttcttgacagtctacacaagaagaggcgaactggatcatgttccatgtgcatttgcttaatctgcacaagagactaattctatattacaaaagctacggcgccgagaaggcgtcgtcgagcggccacgggaggtgccgttcggtgccgtccatgccgtccggctcagcggaccgcggcggcgcctgcaccatggagcgcagcgtgtcgtggaggcggtcgtggcgcctccggtggcggatgcggcgcagcacggcgtccctgtccagcgcccccgccccggggcgcaggtacaggcagctcgtcaccggcgcggcctcgacgacgctgccttcgccgtcgccgtacccggccggcggcggcgcgttcttggacaccatggaggacgacatggcaaggcaggtgctggttcctccccctgatgagctagctggagaacagagagagcaggtacgct

SEQ ID NO: 115219 - DNA, 3216 bp, Zea Mays
tctcaacaaaattgtaaaattcttagttggaacgtgaggggccttaatgaaatggacgtgactcggttcaagaactgatccaggacaccggaagcaccatcgtttgcatacaagagactaagctagctgcacttgataatgcagccatcttacgcaccttgggaccaaaatttctcaacaatgttgcaatcctgtccgcgaataacaccaggggagggattctgttagcagcctctgatgatttttttctccctctcacaagtctacaccacacctcacactatctcagcctcgatcactatgaaggccgataactcagtttggtggattacaggggtctatggcccgcagtctgttgcggagaagcacaatttcctccaggagctcaaaaacctagcgtcacagagatgggagaaatggcttgtgcttggggatttcaacctcatctatcagacttcagataaaaacaatagaaacttaaaccgacatctcatgggggcgttcaaatcagctttggacagcctgttgctcaaagaaatctgcctcaatggccatcgttacacttggagcaatggccatgctagtccaactcttacaaggattgacagaatcttctgcacttctgaatgggagatgctcttccccaattgctacctgcactccctcgtgtccctcatgtctgaccacactccgcttctcctacagggagagctgacgagaacatgtagcccctccttccgtttcgaaaactcttgggtaaagatggagggatttaaagaggccatccaagatgcatggtccaaacctgtatgctcctcctgtgcgccactaaaacgcctccatatcaagctagcacgcactgcaaaaggcatcaaggcgtggcacaaaaccaaggttggagacacgaaactgcagcttgcaattactaaagagttaatcctcaggttggaaactgcccaagaagatagattgttcatgtcggaagaatcggacttcctgaaggtgctcaaggcccgctcccttggactggcggtgattgagaaatcgaggattcgccaacgggcccgacttacccgcattcgattaggcgatgcaaacactaaattctttcatctcactgccagctccagagcaaggaagaactatatccaatacctgcagcccaccattgggaatctggcagtggcccataatgacaaaaaaaactatttatgaccatttcaagtcacatctggggacaaccccacccagagagctcaccctcaactggttggcgctggccttaccgcgacacgatctctcggccttggaagcgtcgttctccctagatgaggtgaaggaaaccatcttccccatgccaagcgataaggccccgggaccagacggttttacaggaatttttttcaaggagtgctgggacatcatcaaagtggatgtgttggaggcctttcaccaactccatgccatggatggagctgaattcaagttcctgaactctgtgaatatcgtgctcattccaaagaagccagatgctaagtcagtgggagactaccgccctattagcttgatccatagcatagcaaaaatattctccaaattacttgctaatcggctgccccccttcctgaacaacttagtctccaaatcccagtctgcattcattagaaaaaggtgcattcaagacaacttcttgtatgttcaaaacgtggtcaggaggctacataagcaaaaaaaagtcggcgctcttcctgaagctcgacatccagaaggccttcgactatgtgaactggggatatcctgttcggtacggcctcttctagggccctactcaatggcacccaagggccaggtatcctgcacaggagaggggtgaggtagggagaccccctctcccctatgttgttcattctcaccattgacccggtgcagcgcatctttgagctggcaacccgacaaggaatcctctcccccctttcgctgaacacaaccaatcttaggacgtctctttatgctgctgatgctgctatcttcatcaacccctctagggatgaaattgtggcagttaaagacatcctacacgcctttggatgcgcctcgggcttggttactaaccttgaaaaaagctccatccacccgatccggtgtgaagacatcgaccttgatcatgtgctccagccattccacgggactcgggggaatttcccctgtcgttacctaggtctccaactccatacccgaccacttcggaaaatccacatccaaccactcattgaaaaaaccggcaaccgtctcgcaggatggaaaggaaatcttctaaaccgagctggccggctcacgctcgtatcttctgttctgtcctccatgcccacctaccacttatcggtttttcccctcgcggtttgggcacacaaatgcattgacaggatccggcgctcctttctttggaaagggaaggccgagtcaaatggtggtcactgcctcgtcgcatggccactagtttgcaagcccaaagccctcggcggcttgggggttctcaaccttgacaagttcacacgcgcccttcgccttcgctggctttggaaggaatggacgagagacgatcacccttggaaaggtttcgatgcgccttgtaaccgggttgacagattgctctttagcgcctccactactgtcacaattggggacggtaagacggccaagttctggcatgatagttggctcgatggcatggctccaaggaatatagccccgcacctcttcgacctaatcccgagaaagaacaatttggttgcccacgaacttagcggacaacattggatcaaaacactaagaagtaggatcacttccagtgttcagattgaggagtttgtctctctttggactagactctgggatttccagctgcaacctgactcaccggataccattgcctagaatcggtctcctgatggtatcttctcagttaaatcggcctatagagcacaattcattggctcgtacagtcaccttaatgctaaccttgtctggaaggcacgcgcagaaccaaaatgcaaaatttttgcttggattctcctgcaggaaaaactactcatggccaacaatctcgccacccgtgggtggcctcatcagccgttttgtgccttctgcaacgaaacccttgagactggtattcacctgtgcctacattgtcctttcgcccgtgcggcgtggagacaa

SEQ ID NO: 115220 - DNA, 179 bp, Zea Mays
gatggactttgggatgtatacaatgactgtgccatgggaatatgtgccgagctttgtgctaacaatgatgccctcacaagagaaaaaaggatgcttttgctatcccaagcaacgagcgtggaattgctgctcgtgacagtggtgcttttgcatgggagattgttctggtgatttccttt

SEQ ID NO: 115221 - DNA, 110 bp, Zea Mays
ctttttgtttaatatatgcaattttcatgtttatttgttgagtgtcaaactttatatctatatatcaaattgtttaccaaatttactatgaaattatatgtataatagat

SEQ ID NO: 115222 - DNA, 2121 bp, Zea Mays
gctggtgccggcggtgcgtgccctggtgcaccgcatcacactcgaccacgtccacgcatcatggcccgccgcccgccgctagtgccacactttcactagccacccgcacccgcagctcttggcctcttgccgccgcaccatgcctgcgcatccgactcctgctgcgcactgacccgccccgccccgcccagctagaggacgacagcgccgccatgcgcccgccgcgcagacggccgtcgcctgctccttcggccgcctcgccttcgggcgccatcagctcgccaccttctccctacgcggcattcgcgccgctgggaccaggtccggcgcccgagccgtctgccgcggcggcggcggcgtcgttcgcgggcagcaggcgtcgcggaggcgccggatcgagcctgagcccgccgctcatcgcgatgctggcggtggtgggcgcggcgctgctggtggtgctgtacgcgcggcttgtgagccgcgtgctccgcgcggcgcggcgtcggtggcggcgccgccgcctgcggctgctgctgatcccgggctccccctcggcgcgccgcagcggggacgactccttcgcgtccttcaccacctacgacaactactaccacaccttctcaccctactacggcctggacgacgccgtcatcaagtcgctgccgtcggcgcagtacctggccggcgccggcgcgtcgtcgcggggctccggcgcgtcgtcgcggggctccggcgcgtccagggagtgcgcggtgtgcctgctggagttcgcggacggcgacgagctgcgcacgctgccgcactgcgcgcacgcgttccacgccgactgcatcgacgtgtggctccgcgcgcacgcgtcctgcccactctgccgcgccgccgtggcgctgccgccgcccgtgccatcgccgccgcaaagggcggcgcggcggacgcgacccagcctggacgacctgctcttcttccacccggtaccgcagccgctgacggcggcggcggagatcgcgccggccagcccggaccagcagctcgcggccggcgccagggatttcctgctcaagcgctcctactcattgggcttcgagcgcagcctcgccttggaggcggcgtccacggcgtcccctccgtggcgctaccgcgtgtccgccgcagccgacggcgcggcctcccgcggtcgcggcttctggagcaagcgctggccatccccgttcggcggcggcggcggcgggggcgcgggcggatccgcggccgcccgcgtcttctccttccggtcgtactaccgcggcgcggcgtgcaagccgtccccgttctcgcgccggtgccgcggcgggagcggctttttcatgtcgctggcgtcggagcccccggcgatgcggagccgcgcggccgccgcttcgagccggctccggtgcggggaccctgaggcgctgctctcgccggaccggctgagccgctgaggcagacggggccgggatcggcggcggtgagcggatctcggtctccggcccgctccgggctccaggctgcggtcctcccctcgaccgtcgtggtgggtgggcctggcgcctgcgtggagacggggggctggcagtaatggcgcgattaatgcgaggccctgccgcggttttaatggcgggaggacgtgtgcccagaccgcgtggtgtcgcactgtcgcttctgcttcctgcagccagctagcagagcagctcagggcccctcactcccactggccacttcgctttggctcggctcggctcggctccgtgtcatcaccttttcaaatcttcctcgcttccgtccgcaccgctgtcactttttcaaatctcctcgtcgtcgcccggcttgaccaagggcagtgcaggcgtgtagggctggcggcgcacaaggatgtctgggccgtccgatcagaaaacgacggcatcccggtggagcctttgttttctcgccggacggctcgtagtcataggcgggaacgggtcatgcttcaaccgttcgggttgtctcttgatttcgactctatttccacggtgctaagtactatattgtaataatattattatacgaacttgttttttgtaagttataaaacgcaaagggaggattccggctcggttggatttt

SEQ ID NO: 115223 - DNA, 372 bp, Zea Mays
atgcgagatccactacggccacataaacaggctgctcctacacactgtctcctccaccatctgactcatccacttcacttattcaacatcgggacactggagttgtcgctcagcctcgtcgttactggaaccgtggcggcaaacaggagcgaggcggctgggcctgtgcaggggcacgcccgagcggggcagggcggagctcagtgcctcggctgggggcgggttcacgccttcgcgggaggagctcagctgctcagcgtccgcggaggtgaccttggtcatccagagcaggcgggcgacctaggcagatctcgggtcggcggcggctccgcctgggcgcgggcaggtccagacgagggcactgccgcctag

SEQ ID NO: 115224 - DNA, 477 bp, Zea Mays
atgcgagatccactacggccacataaacaggctgctcctacacactgtctcctccaccatctgactcatccacttcacttattcaacctacaggtcaaaattcatcccacatcacgttgcgagaaggtagctgtgtatcatagtacctgggatctcgaggtcgacgaaagaggagttgaactcgggtcacacatcgggacactggagttgtcgctcagcctcgtcgttactggaaccgtggcggcaaacaggagcgaggcggctgggcctgtgcaggggcacgcccgagcggggcagggcggagctcagtgcctcggctgggggcgggttcacgccttcgcgggaggagctcagctgctcagcgtccgcggaggtgaccttggtcatccagagcaggcgggcgacctaggcagatctcgggtcggcggcggctccgcctgggcgcgggcaggtccagacgagggcactgccgcctag

SEQ ID NO: 115225 - DNA, 924 bp, Zea Mays
cctaacgatcctcttcccagtctttcatcccagttcatcatgagtgatacacaaagctccgtccacaatacccccacaggcaatcttcctctgtcccaggcgattcacagcgtcaacatcaagtcactggtgccatataccctcgatactcaaattcacaactacggcaagtggagccagttgttcaccattgtcctcgggcgttttgatcttctccaccatgtcaccacctccaacgatctctcggaggatcctgcctgggttcgtgagaacctgactgtcctctcctggattttcgccaccatctccgaggacctcgtcgacatggtgattcgtccacccggccgccaagcgcatgccatctggcgtcacctcgagaacatcttctctggaaacaaggccagccgcgctgttcaccttgaggctgcgtttcattccctcactcatggtgatctttcggcgcacgattactgtcatcgtcttcagcaactcgccaacaacctcgccgactgcgatgctcctgtcgacgaccgcacccttgtccaccagctagtcgctggcatgaacactaagtaccacacccttcgtaccttgctgcctgctcttcctgtcttccccaacttcatgcaggctcgcgacatgcttctgcttgaggaacgctcccagtccgtgtcaaatcgccatgcggccgatgcggcactcgttgctgctgctacctcgtcgcgctcgccagctcctctccccgccacctgaaaggatcacgatgcccaagaggggggggtgaaccaaggtgctggaataaatgtggagtgcaagacattgaatatggtgggtggagggggtataaatagcactcacccaccaactagccgttacaggcaatgtgctgcgcgatggcgcaccggacagtccggtgcgccaccg

SEQ ID NO: 115226 - DNA, 136 bp, Zea Mays
attttattttatttactttctgtgatcataattactgtattttaagtaggctaatcactgtttatgctatgggaaaataggaagtttaatttaaaattccgttatgttattgattcacgtagttaattgtttaccc

SEQ ID NO: 115227 - DNA, 438 bp, Zea Mays
accgatgattttctggaacccaaatcccgaactctccccctctgccctaccctacctcgctggcggcggcgcacagatcgcaatccccgcaccgattcacccgtgccccctctcctcgtcacctgcagaggacctcgtgggcgtgcaaccgaagctcttgtgcatgtcatcccatccctctgggacgctcgcccctcaggtgttcggtaattggccatcgggaccgctgggagccgccggcccagtttcgtgtccaccgccgttcgggtcaagaaaatcaacgttgaagcttcgtgattgcgtgtgggagcttgggaaggcgttgtctggtgagggctcggtcggctttggccggaattgctcatcggcgttccaaacccgctgccgaccgctctcctccttgggcagccgattctactgcgtgatagtcggtgagat

SEQ ID NO: 115228 - DNA, 2305 bp, Zea Mays
agccagcccctcacatatacctccgccgcgcgctcccctcttccccccgctggccgctgctctcttcctccctcctcctcggtccactccaaccccaggcctgccgcggccacagacgggccgcgccgccgccgcagcttccgattccgcttccgccggccgttctgccgcgcgcgcgcctgtggcgcttgagcgggcggatttgttcggcccgttctttggccgccgccgttgcgctgcgccgtgttggcttccagttcccatccaggcgtcttgagattccccggccggagatctgcttaattcgtacctctctctggttctgaggcccctccgaggtggaggaggagctcgtgggtcgacgaaagaacaatcgtttctttgcccactcctgcggctgcttctccgtcccaggctttccagccatggaggaggtggaggtggccaacatggccgcggtggagagctgccaccgggtgctggctctgctctcgcagcagcaggacccagccctgctcaagagcgtagcttcagagacggctgaagcctgcgccaagttcaggaaggtagcggccctcctcggcagtgccagtggcggaggtggctgtggccatgctagaggcaggttctccagacgagtccggcctctggggctcgtcaaccagaagagccccttggggatcgccaccggcagcggcaacccgctggagatgatgcccagcacagctgctgctgctgggtctccatctccacctcagtcgactagctatgcgcaaatgcgcgctcggcttagcagtgcgccagagtcctcacgagggctggatttggcctgctccagcagcaggtgtagccctcatccatttggagcccccaagctggtccagccactgtctgtgcagttccagattgggagtgttgcgcataggtacccgttccaccagcagcagtcgaggcagaagctgcaggccgagatgttcaggaggagcaacagtgggatcagcctcaagttcgatagccctagccccagcggtggtgctgctggcaccatgtcgtctgcgagatcattcatgtcgtcgttgagtatagacaggagcatggcgagcttggatgggaagcggccgttccatttggtaggcaccccggtggcgagcgacccagcagatgcgcaccgtgcgcccaaacggcgatgcacgggtagaggggaggatggaagaggcaagtgtgccaccactggcagatgccattgctcaaagagaaggaaactgcggattaagaggtcgattagagtgccagccattagcaacaaaatcgctgatatccctcctgatgagtactcgtggcgcaagtacgggcagaagccaattaagggttccccacacccgaggggttactacaaatgcagcagcgtcaggggctgcccagcaaggaagcacgtcgagcgatgtgtagacgacccggcgatgctaatcgtgacatacgaaggcgagcacagccacacccagctgccagcacagcctgcccagacctagaagatcagtaaatcgtcgctccattctggaagcgcggggagcatgcctttgcacctagatggtcatgtagaatctcaggccttcgattttcgattgcagcagcagcaatgaccatggagagaatcttatgagctgcttggcccccctcctgagtcactctgttacagatgcaagagtggggactgctgccaagttgttcatctttcttgtgagctgtggcatgtatgtataattgaaagatggtgcaggaaggaaggaaaatgcagcgtccgacagcgaccggtgagctttgccggtgagcctgaagggttgaaagcaaagactgacaagaggaagtgaacaaccgcgcattgttgtgagggtggattaggatgggaagatttggcttttagcgtgcacaagttcacttgccatggactagcctctgtatgttgcttttgctttttctgaaatatcgcatcacctcttttgttgacaaaataaaaaagggtggggttgcatcccagtatcaaaggagggagctccgtactgaccccgctgcaagttaggaccatctgggttttccaggtgtaagcattccagaagggaaggtgcaaagctgttgttggtgtgatttgccacccccagtactgttgctcttgtgtaaagcattctgtgtaattaatgatttgtgccatctgcaatcttgaggatgaatggatgctctaactgaaactttgtacgcgggctaaagattatttattttgaaaaatcttctaaaccttttttcgcagcct

SEQ ID NO: 115229 - DNA, 2292 bp, Zea Mays
agccagcccctcacatatacctccgccgcgcgctcccctcttccccccgctggccgctgctctcttcctccctcctcctcggtccactccaaccccaggcctgccgcggccacagacgggccgcgccgccgccgcagcttccgattccgcttccgccggccgttctgccgcgcgcgcgcctgtggcgcttgagcgggcggatttgttcggcccgttctttggccgccgccgttgcgctgcgccgtgttggcttccaggtgcgcaatccggtcccgtgctctgttcgtgagctgaggatttgagtagtccgccaccctggatcctgatggggccgttcctgtgcagttcccatccaggcgtcttgagattccccggccggagatctgcttaattcgtacctctctctggttctgaggcccctccgaggtggaggaggagctcgtgggtcgacgaaagaacaatcgtttctttgcccactcctgcggctgcttctccgtcccaggctttccagccatggaggaggtggaggtggccaacatggccgcggtggagagctgccaccgggtgctggctctgctctcgcagcagcaggacccagccctgctcaagagcgtagcttcagagacggctgaagcctgcgccaagttcaggaaggtagcggccctcctcggcagtgccagtggcggaggtggctgtggccatgctagaggcaggttctccagacgagtccggcctctggggctcgtcaaccagaagagccccttggggatcgccaccggcagcggcaacccgctggagatgatgcccagcacagctgctgctgctgggtctccatctccacctcagtcgactagctatgcgcaaatgcgcgctcggcttagcagtgcgccagagtcctcacgagggctggatttggcctgctccagcagcaggtgtagccctcatccatttggagcccccaagctggtccagccactgtctgtgcagttccagattgggagtgttgcgcataggtacccgttccaccagcagcagtcgaggcagaagctgcaggccgagatgttcaggaggagcaacagtgggatcagcctcaagttcgatagccctagccccagcggtggtgctgctggcaccatgtcgtctgcgagatcattcatgtcgtcgttgagtatagacaggagcatggcgagcttggatgggaagcggccgttccatttggtaggcaccccggtggcgagcgacccagcagatgcgcaccgtgcgcccaaacggcgatgcacgggtagaggggaggatggaagaggcaagtgtgccaccactggcagatgccattgctcaaagagaaggaaactgcggattaagaggtcgattagagtgccagccattagcaacaaaatcgctgatatccctcctgatgagtactcgtggcgcaagtacgggcagaagccaattaagggttccccacacccgaggggttactacaaatgcagcagcgtcaggggctgcccagcaaggaagcacgtcgagcgatgtgtagacgacccggcgatgctaatcgtgacatacgaaggcgagcacagccacacccagctgccagcacagcctgcccagacctagaagatcagtaaatcgtcgctccattctggaagcgcggggagcatgcctttgcacctagatggtcatgtagaatctcaggccttcgattttcgattgcagcagcagcaatgaccatggagagaatcttatgagctgcttggcccccctcctgagtcactctgttacagatgcaagagtggggactgctgccaagttgttcatctttcttgtgagctgtggcatgtatgtataattgaaagatggtgcaggaaggaaggaaaatgcagcgtccgacagcgaccggtgagctttgccggtgagcctgaagggttgaaagcaaagactgacaagaggaagtgaacaaccgcgcattgttgtgagggtggattaggatgggaagatttggcttttagcgtgcacaagttcacttgccatggactagcctctgtatgttgcttttgctttttctgaaatatcgcatcacctcttttgttgacaaaataaaaaagggtggggttgcatcccagtatcaaaggagggagctccgtactgaccccgctgcaagttaggaccatctgggttttccaggtgtaagcattccagaagggaaggtgcaaagctgttgttggtgtgatttgccacccccagtactgttgctcttgtgtaaagcattctgtgtaattaatgatttgtgcc

SEQ ID NO: 115230 - DNA, 615 bp, Zea Mays
agtattggaggtggtcctagcaaaggaagatgaggtattttcagcattggaaaagctacagtgacgaagatggacaaaaactccaaaaataaggataagcagttgaagtctcatcctccaaagaacgttgaatcggaaatcttgcgtgagcatatcaagaaagagagggaggcagcaaaggctggaaaaagaccatattatctgaagaaatatcgcgcgtgcctttctgtgtttgtgcagttggtgatcagcgagatcgactcgtcagccgctacctcgctgcaggtcgtgaagctgctcgctctgtacctcactggagacaaggaaggtgctatctccagtctcaaggaatggttgagtgattcagcaattggaagcaatcctgttctgcgattgattgccggaattatatttatgcatgagcaggactacaatgaggctctcaagcacacacactctggaggaactctggatttggaagcgataattgatcctgcagcaatttttgaacagttagaaaagagaaaattgatcccccaaccattagcagcaaaaaggtttctggaacagaaaattacagtattgatgctaagcatgctaaatagagaattctga

SEQ ID NO: 115231 - DNA, 569 bp, Zea Mays
agtattggaggtggtcctagcaaaggaagatgaggtattttcagcattggaaaagctacagtgacgaagatggacaaaaactccaaaaataaggataagcagttgaagtctcatcctccaaagaacgttgaatcggaaatcttgcgtgagcatatcaagaaagagagggaggcagcaaaggctggaaaaagaccatattatctgaagaaatttggtgatcagcgagatcgactcgtcagccgctacctcgctgcaggtcgtgaagctgctcgctctgtacctcactggagacaaggaaggtgctatctccagtctcaaggaatggttgagtgattcagcaattggaagcaatcctgttctgcgattgattgccggaattatatttatgcatgagcaggactacaatgaggctctcaagcacacacactctggaggaactctggatttgtatgtttaccttttccctcgatctttgggtcgtgtataatttcagtatttaaccatatgtccatatggatgaaattggacaactgcaaatgttctatggattttaattgccatacagcaaa

SEQ ID NO: 115232 - DNA, 1497 bp, Zea Mays
ttaatcatataatttaacctactttcgcgttactaactcatcatacctcacataggtttatccatatattcctcgcataataaatatttaaacctaaccctcccattattaattcgatcattcatcggatatgaatcaccgatttaatcttctcacataacctatgtcgttaatcctgaacttagctacgcagcacgacgacttcgcagtcgtggacacaattgtcatgctacctgtaaccccgtattcctacaagcgttatataaatacgtgcttagctacaagcaggatattcatcgcgacgtacacacctatcaattcatccatcaaaccagtcaataaaatagcaaattagctcaccatttcaatatttgactcgaatccgtgaggttggtaatgattttccgatccagtcaatttgtcgagcgcttggcaggtactatacgaacttcacgcacatcttcatccgacgctcaacaagtttctccataacaggctaagatctttttgtctgtatctccccgtcatacaccacatgacgaactctcaacaccggtcaaaagtaatccgagtaacccggcgaaaccaaactcaactcacagccggcgtggtcaactgaaacgacaacgccggggttagagaaacccgcgcgacatgggtaggggcgagctggactgaatccgagctggagctcgcgacaacagggagcagggcgctggttccagccttccagggagcctattggtgttgccaagctgggctactactgctcctaagcatccatggccagagaagggacagaacagggaggaatgcgctgaacaggggagcacagccggaggagctcgacaacagagagcttagccgaggaacgacgtcgagctgggtgcgagcagaggcgcggttcggcgaggtcacgacctgggcgagcctggtcggagaaggacgtgaggaatggcgtagccgagagagagagagcagcgtggagagagaaatgccatggggacgagcgcggcagggaacagcgccggcagaggaggagctcggccggacgccatggggcgagcagagagctcggagcggagctgggacgacgcgcagaggagccggctgcgcgcggctgccaagacaagcgtagaggaaactccgaccgggcgccagaaagaagaggccgccggggcgaagctccatggtcaggagctgggggcgaactcgagcagaaggaagggagcaggcacggcgtaaaaattctgagcaggggaggtactgccgtgagctgagggagggagagataacgacggctggaaggatataagggagaagaacgatggagaaggcctgcttagcggtgagatattttctgtgaaatacttcaacgacacagaaaaatcccagcggctgtcctgcttgaggataaggaagaagagagaaacagggaacacgacggaagggataagtgcggccaggttcatggacacttgcgcgcggcagctgctg

SEQ ID NO: 115233 - DNA, 370 bp, Zea Mays
ctcagagcataggggggaaagtcaatttatggatggaaacaaatacgcagtatttacagaaaagagtctttgtttattgggaaagaatcaatatacttttaatgtcgaatcgggattcactaagacagaaataaagcattgggttgaactcttctttggtgttaaggtagtagctatgaatagccatcgactacccggaaagggtagaagaatgggacctattatgggacatacaatgcattacagacgtatgatcattacccttcaaccgggttattctattccacttctagatagagaaacaaactaaaggagaatacttaataatacgacgaaacatttatacaaaacacctatcccgagcacacac

SEQ ID NO: 115234 - DNA, 2337 bp, Zea Mays
gtagatctaagaaaacagcacagcagcagggcatatagttccaaacacgttggttttattcgtcacacgaaaagcgccgcaaaaggtaaagaaagaaaaaaacaaaagaaaaagaaaaggaatggcgaaataacaaaaccacctctgcacctccataactccattgcctttcgtccttcgtcttctcgttcctcgataagcacgtaataaataaacaaatttcatttttttctcggtcgtcctcctctgcttcgactctcttctccaactccgcctcggcgtcgtcgtgcgcttcgatctttcccatttccaaccggaggggaggcgtcggcgcaataataggaggcgcctttgtttcgcccatcgccggcatggggaactagcttcgtggctgggccccacgccatgcaaaccagtgagaccaccgggaccgcatcgccgccggctgttgagccggaggccgaggacaaggtggaagagggggcgcgggcgaatgaggaggcggcggcgaaggtgggcggcgacgacgaggatgactgggaatcggagcatgaggggaggagaggcaggcggcagcggtgccggcgaggcggtgcggcgggggacagcgccgtggccatggtgaagcgggagctgctcacgcgctgcttgacgtgcccgctctgcgaccacctgctccggcaggccaccaccatctccgagtgcctccatacattttgtagaaagtgtatctataaaaagctcaatgatgaggatctggaccactgtccagtatgtaaaattgatctgggctgcactccagtcgagaagcttagagctgatcataatatacaagatgtgaggtcaaaattttttccattcaaaagaaagaaggttaatgctgaagaagccgaatctcctattatgctgcctgttaaagttaaagagaggtctatctcatcgttggtggtcaatacacctagagtaaccccagcagctttgacagggaggcgaacaagagcggttaccaggaaggctgccgcattgcgtggccttggtcctatcattgtggatcctttaaaaaaggacaacgataacccaaataagcaaactgataattcaagcttgctagatagcttgaacaaaatacctcaaacaagaagacagttattgtcgaatggggacacaacaagtcatctctctgttaaagataaagcaggtgataataaggacctggataagtccgagttctggaaacctttgaattgtcttgtagaagctgcaagcaaaacaaagcccctgacaagtgcaccaaggccagctttgaagggagataagcccagaaaatctccgagtagtgatagcgaacattctagcagaacaaagactagggagcctcttcagaagtccaaagctgaagttgacaaaagcgatcccgggccaatagtgatgcttagaaagagagggcggcctggccggaagaggaaaaatcccctacctgaaacaaatgcagattccactgctacagctatccaggccaggaaggcattgagcccaatatggttttcattgattgcctcgtttgaccagaaaggtgtccctcctttgcctcagatacctgcacactatttgagaataaaggatgggagcatacccgcgtcatctattcaaaagtacattgtgcagaagctcagtcttctaagcgaatccgaggtcgaaataagctgctgcgggcagaccgtgaaccctgggcaacctgtgcgcaacttggtggagcggtggctgagggttggcccggcgcgcccgctgcacacggtgatcggctcctccgggggagattatgtgatggtgataagctatgggcggcccaagtccgcgtcctgttaaaaccatatcaccatcgacggcctggcgaggtcgattcctagttcgaacaagggttggtgccgccgccgctgccgccgccggggaagaggccgtcgacagataaactcaagcagcggtagcgggctgctctgccgcagcagctcgtcctctcaccggcgtgttctttaaggatctgttcgttcgttcgttgttgccatacatgcacatgtgatggaagtcgctgtaatttggtagtacttggtaggctgtgagtgagaactgacgtttaggttggaggcgagatcgttaacctgagcttaagtgttgggggcgatgagtccgccgtgtatgggagaggcgctgctggttcagttctttttcctccgttttttttttcacttcttgaagggaaaaacacacacaaatacataatgtactacctccgtttatttgtcctgaactaatatccagccgtgactgattcggatcgtt

SEQ ID NO: 115235 - DNA, 1836 bp, Zea Mays
atccagcgcggctccactcaaagcttgagccttccttttcttttcttgtttttgttttattttcttggtaggggggagtcgtcttctccatctctccttagcctaggagaaggagagatccagaggcaaaagcttcagggtttgtacaaattctagatctaaccggactaaccagaaaacaaaacaaaaaaagacgaaagcatgagccacttcgccgccgccatgaagagcccccttgcggtcgccgtcgccgcgcccgccggcgccgccgacgctaagagcccgctcttctgccccaagccgcggcgccccgcggcgccgctgcggtgccatcagagcggcggcttctccgacgccggcacggatctgctcgacctcctcctctcgaagggcgacgagagcggcctgtcgtcggcgtccccgcagccgccgctgttctgcggctcgccgccgcggcgagcgtcgaacccggtggtccacgacagcaggttcggcgcggactgcccgcccatgcccgtgccagggctgcccgtgcaccggccaagcccgcgcccgtcgacggcggcgccgtccatgtcgccgcgcgggtgtgcccgcgcgcggttcgcgttccagcccgccgcggtccgcgtcgagggttttgactgcctcgaccgcggccgcggcggccgtggccatggcatcaccgccatggcctagactgtgcacatacaacagccagcaccctgagaccctcctcccccgcccttccatccatggcacgcaagagccacgagcaccttgttggaggtagaagaagaggagggggtaggggaggaattgagagggatcggtttgtcctaaatcttacccccctaaaaagtaaaaaaaaactagtacttttatataaacccgtcccatccttccacccccaacaattacagcgagtttaggtaattttatcacagatcctttttgtatgtaaataaagttcgaggttcagaaattatgtagaaaaaatgtagaggggaggaggagcagggacaaaagggcttaaaaaagcagagaagggatgattaatcagagtttcctctctcatgtgtcactgcccctcctctcttgaaggattaattagccattgggtttagtgggtgggagggagggagttcgggaatagttaggtagtatgtcctagttcgccaattaatgatgctttcttttttggtttttgatggggaattgttttttctttgttgtccgtccgtccatgcaaccaagaaatttcatggagaatctgtacaaaagagtggctagctactacacgagagtccgttctgagagaagcaacacgaggtcagtcagtggatgagtttagagtgagacattcacacgctgagagggttgataatttgtgatattttcctcttttttttttcttcctgattttgtatattgtaatatcctgctggattttccaatgaatgagtgaatgaaccaatcaatctttataatagtagtagtattgttaggcatgctatacgaatgatttgatatcttcagctgctaccagcagcagcgccctgggattcaggctgtgctgatgtgattatggtggttgaatggtcccatgcccggccctcacctcacatggtttccatgtgccgaagcaacacggaggcgataacgacggtgacgtgtcagtggctcactgactcctgctatagaaaattaatttttattgttgcgttgaggactccgtcaggaaccgagccggatctcttgtggtctcagtgtgccgtctctcgtcgtgaaggtgcgtgccaactgccatccgtaaagagggacataatatactta

SEQ ID NO: 115236 - DNA, 1812 bp, Zea Mays
acattattgccccctcttcccttcccaacccaacccattgcatttgcaagcccttttacattgcagagcgccagagcctcgctcgctctcggaacagagctaggcagctaacagacgaagaagaagcaagccaagcagaattgagagagaggcgaggacgtggcgacgacggcagccgcgatggcgacgacgacggacctggggttcgaggcgacggagctccgcctgggcctgcccggcgggggaggtggaggggagccggcgctgggcggcgaggggaggagctcttcctccgcctccggcaagaggggcttcgccgagaccatcgacctgaagctgaagctggagccagcggccgtcgtggaggcggaggaggaggaggaggaccacggcgttgctgttgcccttgagaaggaggaggaggccgggaagatgaagcggtccccgagccagagcagcgtcgccgccgccgccgccgccgtgctggctgaccccgccgagaagccgcgcgccgccaaggctcaggtggtgggatggccaccggtccggtcgttccggaagaacatcatgtccgtgcagtccgacaagggcgccgccgccgccaacggcgacaagtcctcgccggcggcaggcggcggtgccgcgttcgtgaaggtgagcttggacggcgcgccctacctgcgcaaagtggacctcaagatgtacaggagctaccagcagctgtccaaggcgctcgagaacatgttcagctccttcaccatcggaagctgtgggtctcaagggatgaacggcatgaacgagagcaagctggtggatctgctcaacggctccgagtacgtgccgacctacgaggacaaggacggggactggatgctcgtcggcgatgtgccgtgggagtgagcactgcatgcatgcgcttcttcctgcactatactccttattatattattgcctaatcggaaaataataataatttccatttcattttcaggatgttcgtcgaatcatgcaagcgccttcggatcatgaaaggatcagaagccattggcctggcgccaagggccatggagaaatgcaagaacagaagctgaggagaagacggacggacggaagcttgcatctcagcaccaccaggggtggatggatgcaagaagaacaaatctccatggcttttgcagctctgctcgtctctgtatcatactcgtcgtccctgcccttcaggcctctgtatctccctgatcaatgaagtcgttttggtgtgtcaactgttctctccgtgcccagcttgtcagtgaaagagtcagtcagtgtccatcaagtctcatcttgtcctatacagaagagagaagccatgcatgaacatgtacctgtcctataacaatgtctttttttgctacctgtttttttttctctctctctctttttttggcacaagatgcaaaggcaccctgctcctgatcaaagggccttttgcatcataagctgtttgattataattaccatggtgtgtcagtggaacaaataactgttgcaaggtgttaaaaaaaagttgtattgtaatatgatcacctctcttccttgttgttttcattgtctttggtattagctgttccatggaacaggattatatatataagctcagtgatgaaatatactgagctgctctgttgtgtgttgggttgcatagacgttgcactgctgtgcatacctgtctctgtgttttttttaacatgtggagccaagccaacttggagacagccagacagaaatacaggatccttcagaaaaaaaaaaaaacatggagacagaagc

SEQ ID NO: 115237 - DNA, 1718 bp, Zea Mays
gacattattgccccctcttcccttcccaacccaacccattgcatttgcaagcccttttacattgcagagcgccagagcctcgctcgctctcggaacagagctaggcagctaacagacgaagaagaagcaagccaagcagaattgagagagaggcgaggacgtggcgacgacggcagccgcgatggcgacgacgacggacctggggttcgaggcgacggagctccgcctgggcctgcccggcgggggaggtggaggggagccggcgctgggcggcgaggggaggagctcttcctccgcctccggcaagaggggcttcgccgagaccatcgacctgaagctgaagctggagccagcggccgtcgtggaggcggaggaggaggaggaggaccacggcgttgctgttgcccttgagaaggaggaggaggccgggaagatgaagcggtccccgagccagagcagcgtcgccgccgccgccgccgccgtgctggctgaccccgccgagaagccgcgcgccgccaaggctcaggtggtgggatggccaccggtccggtcgttccggaagaacatcatgtccgtgcagtccgacaagggcgccgccgccgccaacggcgacaagtcctcgccggcggcaggcggcggtgccgcgttcgtgaaggtgagcttggacggcgcgccctacctgcgcaaagtggacctcaagatgtacaggagctaccagcagctgtccaaggcgctcgagaacatgttcagctccttcaccatcggaagctgtgggtctcaagggatgaacggcatgaacgagagcaagctggtggatctgctcaacggctccgagtacgtgccgacctacgaggacaaggacggggactggatgctcgtcggcgatgtgccgtgggagatgttcgtcgaatcatgcaagcgccttcggatcatgaaaggatcagaagccattggcctggcgccaagggccatggagaaatgcaagaacagaagctgaggagaagacggacggacggaagcttgcatctcagcaccaccaggggtggatggatgcaagaagaacaaatctccatggcttttgcagctctgctcgtctctgtatcatactcgtcgtccctgcccttcaggcctctgtatctccctgatcaatgaagtcgttttggtgtgtcaactgttctctccgtgcccagcttgtcagtgaaagagtcagtcagtgtccatcaagtctcatcttgtcctatacagaagagagaagccatgcatgaacatgtacctgtcctataacaatgtctttttttgctacctgtttttttttctctctctctctttttttggcacaagatgcaaaggcaccctgctcctgatcaaagggccttttgcatcataagctgtttgattataattaccatggtgtgtcagtggaacaaataactgttgcaaggtgttaaaaaaaagttgtattgtaatatgatcacctctcttccttgttgttttcattgtctttggtattagctgttccatggaacaggattatatatataagctcagtgatgaaatatactgagctgctctgttgtgtgttgggttgcatagacgttgcactgctgtgcatacctgtctctgtgttttttttaacatgtggagccaagccaacttggagacagccagacagaaatacaggatccttcagaaaaaaaaaaaaacatggagacagaagc

SEQ ID NO: 115238 - DNA, 836 bp, Zea Mays
gacattattgccccctcttcccttcccaacccaacccattgcatttgcaagcccttttacattgcagagcgccagagcctcgctcgctctcggaacagagctaggcagctaacagacgaagaagaagcaagccaagcagaattgagagagaggcgaggacgtggcgacgacggcagccgcgatggcgacgacgacggacctggggttcgaggcgacggagctccgcctgggcctgcccggcgggggaggtggaggggagccggcgctgggcggcgaggggaggagctcttcctccgcctccggcaagaggggcttcgccgagaccatcgacctgaagctgaagctggagccagcggccgtcgtggaggcggaggaggaggaggaggaccacggcgttgctgttgcccttgagaaggaggaggaggccgggaagatgaagcggtccccgagccagagcagcgtcgccgccgccgccgccgccgtgctggctgaccccgccgagaagccgcgcgccgccaaggctcaggtggtgggatggccaccggtccggtcgttccggaagaacatcatgtccgtgcagtccgacaagggcgccgccgccgccaacggcgacaagtcctcgccggcggcaggcggcggtgccgcgttcgtgaaggtgagcttggacggcgcgccctacctgcgcaaagtggacctcaagatgtacaggagctaccagcagctgtccaaggcgctcgagaacatgttcagctccttcaccatcggtactaaatttaatttgacagctgctactactactaccataattactacatcgcggtaaaaacacagcgcac

SEQ ID NO: 115239 - DNA, 407 bp, Zea Mays
ggttgacttcctgatcgtatttagggatttgcccaaacttccggtgaaggcacctgatctttgctttgggaaagaagggatgtagcagcatggccaccacctctttaaataaaggaaccactgcttaataatgatgttaaacagggagggtcaagtctaggggattattacattctaatctttcatggtagttgaactgtttagtttggtgggctaagttgtctatcttttgtctggtcatgaatgttcatttgtaccgttgcattttgattatactatgtcaattatctttattttatatcctatatgaactctatgtttcccttgttatgcttctttcaagggaggtgctgccggattttgcaatactttctttctctatgtgttgcataagttttgtaggaagg

SEQ ID NO: 115240 - DNA, 96 bp, Zea Mays
atgggggccggctggggcggcgcggtggtcatgaccggctggggcggcgcggcggcggcggtcgatttcaaggaagagatcagaggagaggaatga

SEQ ID NO: 115241 - DNA, 111 bp, Zea Mays
gggttctttaatatcagaccatataacgaacacaaaagaatgtattttgtcctggttacatggtactggttgagaatatggtattataaggtattaaataccatttctgat

SEQ ID NO: 115242 - DNA, 1433 bp, Zea Mays
cacgcacagcgccaagggcaccaccagcaaggaccaagacagagcacagcgcagctcgtcggcctctcgacgccggttgctgcaaccaccgcctttattgcccacgcgggccgtgcggaagaagcaagaagacacgccaatggaggtcgccgcagcatcggcagcgagctacggattcaaggccgacgacgacgttgacagcctcagggcgacggagctcaggcttggcctgccgggcacggaggagaaggaggaggccgaggagccccagcacaaggcggcaccgccgccgccgtccacgcccagaggcaagaagcgcgacgtcgtcgccagcagcgggcccgaggacgcgcccaagaagcgcgactgcgagaccgacgccgacgccgacgccgcgccgccgccggccgccaaggctcagctggtgggatggccgccggtgaggtcgtacaggaagagctgcttccagcagcaggcggcggccaagaacaagccggcggcagccctggcggaggaggccccggccgccggcgggttgttcgtgaaggtgagcatggacggcgccccctacctcaggaaggtggacctcaagatgtacaagggctaccgcgagctgcgggaggcgctggaggccatgttcctctgcttctccggcgccgccgacgcgcccgccgtcaacccctccgacttcgccgtcacctacgaggacaaggacggcgacctcatgctcgtcggcgacgtgcccttcggcatgttcatcagcacctgcaagaggctgaggatcatgaaagggtctgaagcgagagggctcggctcggccaagaacaactgatgatgaggcgtctatcgcatgcttgtgctgtgcgtgcgtgcatgcgccagcaaattcttttgttcttttggggtcttatttcttctccaaggcgtccctgcatgggtgtgggcgtgtggtgttgagtattatgtaccttctcccctagcattgtctgtgccaacaatggagcagcagctagcagcaaaccagagacatggcgaggcgaaagatgaagctgcttgcttggaaggagagagagagagagagagagagagagagagagagagagagagagagagggaagctttgtgcatgcgtggaatgatgtgtggtcgctttgttctttttcttttgtgccccttgtaggggtgtgtgtgtgtgtgtttagcaagacatgcaaaaggagtggagagtcgagttgaatctccatgatgcgtggttgtacaaagccaaagatcactcttctttcttgtctatcagtctattgtctatctatcgatcagcagcctggtcgttgcttctgtaattgcgagtgttgaaattgcaggggaggaattgttttcctctctgtccctggtgagttgagttatctatccgaataacacgatcgaggaactag

SEQ ID NO: 115243 - DNA, 3569 bp, Zea Mays
tctccctcgcctcgcagatccgcggcctgctttgttgctgctttgccagcaagctgccgcgctcatcctcgcgcgacgccagcggcggggtggcccctctccagtgacccggcgactgctcccgtcggtgccgccgccgcctcctcctccgagatccattcccgtgcccgcggcaaggaccagatccatcaccgcgccacgagctacagcaggcgacatccgccccggggtcgcacgccgcctgctagccgcggacgtcccgggagccccgttcgcagacgcctgcacgcgcgcggcgcgcaacgagctccgccacctgccgtccttcgtgctaatatcatcttgtagacttgacggcaaaaggaccctttgaatcaaagagaagttcgtcactgaggctgaagaaaatctggatgtgtttacctttcagggcttactaattttgagaggtgtctgacatagactaaaaaaaaatcagcgccagggctcagggagcgacctaccccaaggtggggagttggttccttttccagtaataatgagggcaaattcatatcccatcatgatggaagaggacatggaaaatggaaggtcgtatcaagaaagaccaagggctttttcaacagtacgaagcaaatcatctgtaccgctggccttccgtttgttgatgagggtaaatccccgtgccgtgattattctttctcttttggtcttcagtggtgttttgtatgtgggagctagtacatcaccaattctggtctttgtgttctgtatatgtactctcagtctattcttctctgtctaccttacaaagtgggttcttgctaaggacgaaggacctccagaaatgtccgagatatctgatgccataagagatggcgctgaaggtttttttaggacacaatatggaactatttctaaaatggcatttattctggcctttgtcatccttggcatttatattttccgcactaccaccccacagcaggaggcatctggcttgggaagggcaacattagcctatattacagttgcctcttttctccttggagcgttatgttctggaatagctggttttgttggaatgtgggtgtccgtacgtgcaaatgtacgagtttcaagtgctgctcgtcgctctgcaagggaatcattgcagattgccgtccgtgctggtggtttctcagccattgtggttgtttgcatggctgtatttggcgtggcaatactgtactcaacattttatgtttggcttggagtagattcacctgggtcaatgaaggttaccgacttgcctcttctccttgtgggatatggttttggtgcctcttttgttgccctttttgctcagttgggtggtggaatatacacgaaagctgctgatgttggagctgatctggttggaaaagttgagcagggaataccagaagatgatcctcgtaacccagctgtcattgctgacttggttggtgacaatgttggagattgtgctgcccgaggcgctgatctttttgagagcatagcagcagaaattatcagtgcaatgatacttggaggaacaatggcacagcgctgtaaaattgaggatccgtctggctttattttgtttcctcttgttgtgcattcatttgatttggtggtgtcatcagtcggaattctctcaatcagaggaacacgtgactctgggctcatttcccctatcgaagatcccatggcaattatgcaaaaaggctactctgttactattatgcttgctgttcttacatttggagtgtctactcgttggctcctgtacacggaacaagcaccttctgcatggctaaattttgcattgtgtggcttggtggggatcatcacagcatatgcttttgtttggatttcgaagtattacacggattataaacacgagccggtccgccttttagctctttcaagttctacaggacatggaactaatattattgctggagtaagtttggggatggaatcaacagccctaccagttctagtgataagtgttgccattatatcatcctattggctggggcagacctctggcttggtggacgagtctggcaacccaactggtggtctttttgggacagctgtagcgacaatggggatgcttagcacagcagggtatgttctcaccatggacatgtttggtcctatagctgacaatgctggtggtattgttgagatgagccagcagcatgaaagtgtgagagaaatcacagatgttctagatgctgtgggcaacacaactaaagctactacaaaaggatttgccataggatcagcagcactggcatcattcctcctgtttagtgcatacatggacgaagtagcttcttttgctcaaatgccgttcaaggaggttgacatagcagtcccggagatttttgttggtggtttattaggctcgatgcttatattcctgtttagtgcatgggcttgttcagcagttggcaaaactgcacaggaagttgttaatgaggtcaggagacaatttatcgagaggcctggtattatggactacaaagagaagcccgattatggacgctgtgtcgcaattgtggcctctgcatccttaagagaaatgataaaacctggggctctagcaattatatcacccatggccgttggcgttgtcttccggattttgggccactccactggtcagcctcttcttggagctaaagttgtagcctccatgcttatgtttgcgacggttgctggtattcttatggcactcttcttgaacactgctggcggcgcctgggataatgcaaagaagtacattgagactggtgcccttggtggcaaaggcagtgagtcccataaggctgcggttacaggcgacacggttggagacccattcaaagacactgcaggaccatcgctgcacgttcttatcaagatgctcgccacgatcacactggtcatggctcccatattcttgtgattaaccaaccagatttatcaagcttgccattaaccctgcggagatgtatctatgcgacttgtagatgaggtgtttacctgcatgtgatgtaatgatccaatcggttttagtgtgactacatgttgtacccaaagaaagaaagaaagaaagcagcgatctgtacccaggttttaatggtccaatcggttttagtgtgactatatgttgtacccaaagaaagaaagaaatcagcgatctgtacccaggtttgacggtagatattattctgaatttctgacgggtagtgatggtgcaaatgccatattttgtgacggacgtcactgaactagtagcccaagtgttttgtatttgtttattgctgggaacattatgacatccgttgagcttagctgtaagaaaggaacgatccacgatggattttaggatcgtgactgggtctacaccttacctttgactcttcacattaacaaagaaactgatgttatgtaatggtgttaatatgaccgattgtgagcacttctaagaggattaatatttaatagcttccagcacagaaaacatgcgcagataacaaaagaaacttcatatcaatctcaacagaagctgc

SEQ ID NO: 115244 - DNA, 173 bp, Zea Mays
agtttcaattcaatcttatcgcaaacgcactactatgctatagctatatctaggaaaagcggcaatacaaagccaagatcttccttactaaacttaactcataagtttaagttaatgagggctaatccgtccgcagttttcaactggtaaagctttccctgtctcttcgggaa

SEQ ID NO: 115245 - DNA, 110 bp, Zea Mays
cgaatttaaattcaaatgtagttttatcaccaacattaaatgcataaaaaatctcaacatggaatacatggtttattatatatatcaactatttattgagtcaaataaag

SEQ ID NO: 115246 - DNA, 1540 bp, Zea Mays
caacccaacatgtattttcacctaatgccgtcgccgaactactcattgccatagcactagttagacgagcgccaaccttgcggtgctttgcttgcctcgctgttgctgttgctgttgcccatggacgccatggacagcaagagcaagtggagcaacaagaagtgcaagcgcctggtcggcaagtacgagcttggcagtttgctgggacgaggcacgtttgccaaggtctacctcgcgcgcccggtggctggcggcgagttcgtggcggtgaaggtgctcgacaaggccgaggtcatgggcacggcgggcatggcgccgcgcgtgctccgcgaggtgacggccatgcgccgtctgcgccaccccaacgtgctccgcctccacgaggtgctcgccacgcgctccaggatctacctcgtcatggagcttgcgccgggcggggacctgctgtccaagatcgccgcgctccctcggcgccgcctcccggagcacgccgtgcgtcgcgtcttcgggcagctcgtcgccgcgctctcttactgccacgcgcgcggcgtcgcgcaccgcgacgtcaagccgcagaacgtcctcctggacggcaacggagccctcaaggtctccgactttggcctctccgctctcccggactccctccgcgatgacggccgcctccatacagcctgcggcacaccggcctacgcggcgcccgaggtgctgcgccgcaaggcttacgacggggccaaggcagacgcgtggtcctgcggcgtcatcctcttcgtcctcctcgctggacatctccccttcgacgacgccaacatcaccgacatgtgccggagggcgcatcgccgggagttccagttcccggagtgggtgtcgcagccggcgcgctcgctggtgaaccgcctgctcgatccaaacccggtcacccgcgtcgccgttgagacgctgacgacgcacccgtggttcaagcgttccctcagcctcgactccgtcgcagctcggtgggctgctcaacggccagcaggagcgcgcgctagcgttcctggcgccggccatgaacgccttcgacatcatttcgatgtcgtccggcctcgatctgtctggcttgttcgaccagcggaaccgacagaggaggttcatgacgatagcatccccggagcgtacactggaggagctcggccgcgccggcgggaagctcgggtatgttgtggtaggtaagaaaggagtggaccgcctgcctctcgggggcttgccagggctggcggtgatgacggttgagatgtcagaggtagcaccaccactgatgctcgtcgagctgcggcttgaggtggccgacggagatggagacggcgacggggagggacaagggttcggttgggaagagctgaaacaggagctaggagacgtagttagggcatggcatacctgcaaagatttctgacatgacgaagatgcgctgcttgtaataaacgagacagtattcttttgtttttttttattttacgatttggaggtgtatatgcgctacaataaatctgtgtttatg

SEQ ID NO: 115247 - DNA, 308 bp, Zea Mays
cataattgtgttgttactaatgcaggataccagttcaactatgtgtttgactggaccattctgaagtatcctcagataggctccaacctgtgaaccagggcaggtgaaagaaccagtggagctgttggaccctcaatggataagatggagaaggccccaggtttgccctactcttgcaaaaaatgcgtaacaaatctgtggtacaaaccagacacatatttgagcctgatctttgtgcaggagaagcattcggtagaaggaaccctagcggtcctgtgaaccagaccgacagttacgcgcaacagcca

SEQ ID NO: 115248 - DNA, 224 bp, Zea Mays
aggatttttaaagacatgctgttggcaaagaaaatgctcctagaattatggttttgcaagagtggtggggagttgactatgagataaagaatcatgcgatccacatttccctacatggtggaggatacagagcactcattccggagtataatcttgtcttatgttgccacctatttatcacatgagcatatacaatgaatgtttcttaagatgtcaatatttgc

SEQ ID NO: 115249 - DNA, 248 bp, Zea Mays
cagattgaatcacgtgacaatggcttggagatgtagtctgtaaataacaaagggcttatggaagagctacataaattgcttgagcatctgcggattccacaggagtttgcagcatcattaactggaggctcatttgaagagtcgcggatgctaaaaaatgttgaggcatgtgaatggttgacaggggccattcgcagtcttgaagttcctaatttggacccatgctatgtcaacaagcgcgctgtgag

SEQ ID NO: 115250 - DNA, 826 bp, Zea Mays
gtgccggctctttctcgctctttcgactccatcctgatcccgtgcgtcttcctcggccctcacgacctcgctcgtcgctgcccccgcacacccgcgcttcttccgtccctcccgctaaatccttccgtccctcccgccaaatcgcgccatttagtctccaaatccattcgctgcgcgccaaatccaagccaccatcctaaatcgcccccaaatcccaaaccctagaagcaaaacgcgttgaggcgtcaatccaagaggacctctgcaccaacgcctctggagatcccgccgcaaggggctccgcccgttcaaccaccaagggctcagcccatcctcccgcctggcttcccgtccatggttggacccggcacttggtttgccccacgtccaccgcagtccatggtgagctcttctgtaccatcaggcagcaatggaggctctgcagttcctcgttctttggctgagaatgttgctgacactgatgtacaagcatgaacaatataatgcttttgatgtggtgatgctgctgttctacttccatccttccagtgactgctggttgatgcaaatcggatggctactcctatttaccaaagttctaattatggttgtgtgccttctttcatcattttcatctatttaccaaagttccaattatggctgcgtgccttctttcaacattttcatgtaattcaataacaatggctttgtgccttgtatcgttgttttcatttagatcaataactatggctttatgccttttattatttaaagagtactgttgtaatgggcaattgttgatgttgacgtgaaatgactttatcta

SEQ ID NO: 115251 - DNA, 1083 bp, Zea Mays
aagatgttgtttcctccttccttcttattatttaacaaaagattatatatataccttcgacttcgtgaagttacaggatgaaggtagagatataataatacagcttcgtaggcatatatagcgatttatttctctccatctcaagaacgtgtgtccaacgaacgcatggtactatttagctatttataatcgtgagttacagcttcttcgtcaaaattacaatcgtacactcgaacgcacatacaattgagctagcaaatatattaggatactgcagtcaatttctatagctgtcttgttgacctctcatggttttggcttgttcacccctcatgtgcacatgctgttactccgaagcttgcgcttttgtattcgttgttgcattgcaaccatccccgccgaaggtgagccgaaggtaatcttgggtattctacctgcaacacttattaattcaagctacaaaacagttgtcgagttagttttttttttaccttcgaaaagaagacttccggcaatgcacaacttcccatctgcattatcgtgagcaggattgtaggcacacagtgatgacgaagacagagacagcaatatacacaaccgaaccaagagagaagcaaaggcataataataaaaaaagagagaggaaactagatcgacaaggccattattatcacggataattaatcaacgtcgtcaacggcggaaataagctagcttgactggtggtctctggcgagtgcagcatggatatgaattgcaggagggtgagctagctagggttttcgatgtgcggccaccagcagatgaaactacagcatgacctggtcctggtgctcattaattaccctctctctctctcccttcccctctcatcttggattcgtcgatccatatatgacagtcagggacgggggagagagagagagtgacaggggccggtagtagtatagattacatccatcttacatataccaccaccatcataaccagatcatgctggcagcttcaccaactcgtggtgcaccactacataccctctcgtctgatccaaacggaggaaggaggaagaagagctagctatcc

SEQ ID NO: 115252 - DNA, 1268 bp, Zea Mays
agtagtgcgtcttgcgcagatgggcaaggcgagccagtggctcagaaacttgttgctgtccggcaggaaagggaggaaggccaaggacagggctgaagccgactgccagtcggcggcggcgacaccgcacgggagggagaagaggcggtggagcttccggcggccgggcgcggcagcgtccagctcccagggcccgctcgcgtcctcgtcgtcgcactgcttctcggaggcggagctgcatgtcgtcgtggtgcagcaggagcagggacagcagcaggccgcggccgccgcggcggcggtcaagatccagtcggccttccgatcgtacctggcgaggaaggcgctatgcgcgctgcgagggatggtgatgctgcaggcgattgtgaggggacagctggtgcggcgccaggccagcctgacgctccggcgcatgcaggcgctcgtctacgcccagcgccgcgcgcgcgccgagcggctgcgcctcctcgatgtcgtcgaggacgacgcctccaggcagcaggccgcctcagccacgccgccgaggcggcgctcgccgtcgccgcagcacccgcggtcctggaagccactggaggcggtggagaggcgtctagaggagaacgtccggaccgtggaggtggacgacggcgcgccgagggcgggcgcgcggcgcaacagctgcggccactgctcggcgtcgacgacgccgagccgcacgcccatgccgaaggccgagccgcgccagaaggtctcgccgtcaccgtcgccgtcggcgctgacggacgggagcgcgcggacgcccagcggccgcttggacgacgcgtccttcacctccacgtcggagccgatgccgagcctgcgcgcggccccgccgtcctacatggccaacacggagtcgtcgcgcgccaaggcgcggtcgcagagcgcgccgaggcagcgcctctcatcggcgcccgagacggcgccggcggccacggccgtgctgtctccgtcgtgctgcgaccgtccgcctagccagggcgggggcagcgcgcggcgcagggcgtcgctggacccgctggacctgcccggcggcgcgccgtcaaggcgcatggagcggtgcgcgtcgcgggcgcgcgcgaccacgatgtcgtcggtccccggcagcgagtgcgggtcttcgagcaccgtcgggcaccgcggcagcgcgcacgggccatggcttgggtgactacgtactggcccttgtctcttcgtcagtctacgcttgccgattgaggtgaaactgaagg

SEQ ID NO: 115253 - DNA, 225 bp, Zea Mays
agcaaatttctcgtacatatatccccgttgccatccttagctgtggcgcagagctgcgtgcggcgtgcctgtctcctcctccagagatctccacacacacatgtcctactggcgactgccatgggtgtgccttctggttctggaagacgatggcctgatgagggcccgggtacttgttgccattccattgctgaccatggatgcaatgcaatgcatctgtccaca

SEQ ID NO: 115254 - DNA, 807 bp, Zea Mays
attttttctagcacacattgaacaaaaccctagagtagctcctctatggttctgccttctatacacacatatgtataaatgctgaaaaatgacgtcaggtaccaactgtccgtctatggattgtccctccttggcttgcaaaaactaaagggttgcaacataagggtcctggattatttctctcttggtaactactgaagcatgatgaaaatcactacacatatatgcgtggagatagctaggggacaacagaaggtccatgaatcctcaataccttgtgtacttttaatgccagtctctacaccaccatggctgatggatcacactatcgagtcagcgatggtggactggttctcaggcgcagctgcccctggtcttggcttctgatcctcgccaacgtgcctaggggacgatacggcagacgaggaggacgacgacggcgacgaggaggaagacgctaccttgcgcgggcttgacggcatgtgcagcctccgcagctcgctcatggggcttctcgggctcaggagcagcggcggcggctgcatctgtggctgtaggggttctgctacctgagggtgctgctggtgagggtgccggtgctcatcctgctgctcggctgccactttgttcaccaggttctgtatcgtcggcaggagcttcgctgacacagagattatcccaggaacctgcacaccacaacatcagtttatttgagcttagctcaaaatggacagagcctgaggcaactcaaggactgatataacatccttattcaataagaaacaagcaacggcgatgattactttt

SEQ ID NO: 115255 - DNA, 2027 bp, Zea Mays
ccaaccaaaacccccacctttctcgcctcgtactcgcgcgctccccaccgcctgccaccgacgccgcgtctggtctagaaccaaatgccgtgagatctgcgcgcgtgacgccttcccccgccggagactccctccgagctccgggccacggagcgcttcgtcccggatccctctggtggctcagggcaagtagaaggaaaaggaaacaagcttgctgcgtgtgacctgcagaccccaagaggatggatcagtatgaggtgctggagcagattggaaaaggagcatttggttctgcgcttttggtgaggcacaaggtcgagaagaagaagtatgtgctcaagaagatacggctcgcacggcaaaccgaccgcacacgccggtctgcccaccaggagatgcagctcatcgcgactgtccggaatccattcattgtggagtacaaagattcatgggtggaaaagggctgctacgtttgcattgttattggctactgtgagggaggagacatggctgaggttatcaaaagagccaatggaaaccatttctctgaggagaaactttgcaagtggctcgtgcaacttctcatggctcttgattatctacatgcaaatcacattcttcatcgagacgtgaagtgctctaatatatttattgccagagatcaaagcatacgccttggtgactttggccttgcaaagatattgacatcagatgaccttgcctcatctgtggtagggactccaagttatatgtgcccagaacttcttgctgatataccatatggtactaaatccgatatttggtctctaggatgttgcatttatgaaatgactgctctcaggcctgcatttaaagcttttgacatgcaagctcttattagcaagatcacaaagtcgatagtatcaccattgcccacgagatattctggttcctttaggggacttatcaagagcatgctacggaaaagtccagaacaccgaccaagcgctgcagaactgctaaagcatgtgcaccttcagccttatgtgcttcaggtccagttgaagtccagtccctctcgcaacatgtctccaatctatcaagctctgacagacaaagttaagaagatgacatttcctagtgatataactgattccgccagaagagtggcaagaagaaactcgcttggaaatgagaggactgtaacattctgcaaaccctctcctgagcggaactctattagctctacacggagcatcaaagaatatacaactacccagagtgtcaaagagctatctgttgacagcagtcaaattgatgatgaggttacaagtaaagccattagaacaaagacaacaggcattctaaggacgcccaagagtaccccagccaagacattgactactagaaatcggttggatcctccaaaaacttcttacagcagaacaaaccatagtgagttgacctcaagaacacctctgaacaagagtgctgtgacagcaagaagagcatcgctcccgctgccgacatacagagcacccaacagccgtgccgccagcgtccttgaccaactggactccccagacgtgtccgtcaacgcgcctcggatcgacaggatcgcagaattccctctagcttcatccgaggaccccctggcgcccatgaagaagaacctgtcctcggcgcccggccacgacggctcatgctccacgcctcccttcatcaaccggtccatcacgaaggacaagtacacggtgcaggtgctgcacaggggcgacggggacaacgcgagcgactcgtcggggcgcaacgccaccgccgcgtcgagcggggggtccaacgactcgaggcagcagcggttcgacacctcgtcgtaccagcagcgcgccgaggccctggagggcctgctggagttcagcgcgcagctgctgcagcaggagcggtacgaggagctgggcatcctgctgaagccgttcggccccgagaaggcgtcgccgagagagactgccatctggctcaccaagagcttcaaggagacggcgtcatag

SEQ ID NO: 115256 - DNA, 3729 bp, Zea Mays
atggaactggagcaaatacaagaggtgaatttcaatgtagaatcactccaatcacttgctcaagaagtgagggacggaaatgttgagctaaaagagaccataaaaaaccacgagggtgtaaaagccttgtacgttgataatcttatgctgctggagaggacgctggagaaaagtgcccatttggagagatcgctttcagctgcaactactgaaattgaaggattgcgggacaagaaagctgcattggaagaatcgtgcaaacaccttcattccaaggttaatggccatcagtctgagagagccatgtttgttgcgcggattgagggcatttctcataccatggagaagctatcagagaagaatgtcttcttggaaaaattgttatctgataacaataccgagctggagttgcttagaaggaagctgaatgattcagaggaatctactcatacattccgcaaccagaattctgtacttcgatctgaaaaaagaactcttatgcgcgaggtggatagcatcaatagtgctctactcagtttggaaacccaatatgcagagttagaagggcgatatttggatcttgagcaagacaaagacaaggccctcaatgaagtgatcaaacttcgagagctgttgaggctagaaaaagaaaaacacaaagaagccaccaactctggcatgactcaattcagtgctatacagaagcagataggcctactgctaaaagaagttcaccgcagggaggaccagcttcaagaggaggagcacaaggttgttgaagctcaggttgagatttttatcttacagaggtgcctaggtgacatggctgaagcaaaagctggcgtcttggcacgattgcagaagcaacaagtggtatgcaaggatcaagaggaaaaagttggtttcttgtcacaaaacaaccagcagctaactgaagggataggttctgtagtggaagtactgaatctggaagagaaatacggatcattggatctgatgaagattgatgttgttgtgcagctcctcttgcatgagatcaagtgcctgctgaatactatttctgatgctcaggatgtgaagcagaaccagatccttgagaagtcccttgttgtcacacttctcgagcactttggtcgcgaggtggctgacctgaggtcagaaaggagtgttctgaagcaagagtggcaaacaaagagtggggagctgctgcagctgcagagtgaaaggcatgacctcctaaagaccagctgtgagctacggaaggaaatggaggctcgcaaccgcaaagtggatgaactgaaatctgaggcaaagttcttggttcggcaactgtcggaattgcaagagtcacgacaatcgttgcaagcagagattgtcaagctgattgaagagaacacttcactctctagcaaagtttatagctccagagagaaagaaaagtcatttgatgatgatttcagcacacttattgttgagacggtcaggacagatatccttggtgtcatttttagaagccttcatgaagagaggacgtcacaattgcggtgtttgcatgaggattttgggtctctacatgcagcaggcaatgagctttatcaggaaatcaagctgatgaacaagaagctcggagacctacagcttgagaacaactatcttgagaaggaactcagtagaactctaagcatctgtgacagctctggtacagaaatttcgtctggaagaaggcgtgctatgaggagagatacaaagctattaaaatctggtaggaaaagccaagagagtggccagaacatggaacagcgaaaagaagttgacaatgctggcctcgataaagcaaacgaaatgctgcttagagaggagctccagaagctgaaaaatgagctgcaagtgcttaggagcaaagaacagcctgtgatcgatgtgaaatcttgtgacgcggagatcactaaattgctggccaacatgcaattggccacagcgaatgcgtctctcttcaagaagaaggtgcttgagctcgtcatgacatgcgagagttttgagatcagtgacatggtgcagaaggaggtgctgaaagaggagatcaccaggagaaactcttatgtggatgagcttaaggacaagctaaatgccattgagattgagaacagaaggctgaaggttgatctgaacggtgacttcacactgcttggagcattgcaagctgaagttgatgccctagagaaacaaaccttgtctctggccaaggattgcctgccaccaagcatgctcaaggaggaggagaagccatcatcgcctcagctgtcgaagattgatgtgaggccaagcgaagatgaaaacaccacaaagatggtgaaggacatggaactgcagaaactccacgggaccatcaaagcacttcagaaggtggtgtcagataccggggtggtcctggagcaagagaggctcgacttcaacagcaaccttcaggacgcaaggaagcagatcgagatgctgaagctgaaggagatcctggacagcgacgccagcgacgtgaactacgagcggatgatgaaggacatccagctggacctcgtccagactcctagccggcgagctgccgcctcacacgggcgccacaggaagaagaactccgtggctgcggcggcgcagtctgacgacaagatgctcgcgctgtggagcgtggacagggtgagcagcggcagccggtggcatgacgtggacctgcggccaccacagagcgaggcggccgagaacgacaagggaaagaagcggtcgtcgtccgagccggtggttaccgtgaaggacctcagcgtggacaagcaggaggtcctcttgcggcccattgtgggtgcggtggtggtggcgacgggctccacgacggagccacaccgggagtggaagaagaaggtgatcgaccggctatcctcggaggcgcagcggctccgggacctccggtccatcgtccaggagctccgtgccggcgtggaggcgtcgtcggacgcggagctggacggcgtcaaggcccagatggccgacgcagaggacgctatcgcggagctggccgacgcgaacgcgaagctcctgaagaaggcggaggagttcacgtcggcgggcgacggttgcggcgacgtggacctgcggagccggagccagcgcaagatcctggagcgcgtacgcaagatgtcggagaaggccggtcggctggagctggagctgcagcggttccagcacgcgctgctgcggcacgaggaggagcgcgcggcgaggcgcgcggccaaggcggcggcgtccaccgccgtgcaggtgcagcggcggtcgcgggtgcatctggtggagtacctctacgggcggcggcgcgacaaccggcggcccaagcagaaggcgcgcgggccgtcctgctgcatgagagccaaggccatcgacgactgacggtgacggccacgcacgccctcatcagtattcagtagtcaacccgaagatgatggttagttaattaattaatcaggagaaggtgcagtaacgtttgatttaaaattttgcttaagttcatgtcgtcctaggtaagtaattattactggactgatcttagtacgtcgttttttaaacctaaagtaaagtaaggtctaagatgtaaatgggtagtagcctagtaggcccgcagccatgactgtaatcttcggtctcattattcctcgtcagtaaaatttcaaacggtaatcttcggtctca

SEQ ID NO: 115257 - DNA, 1185 bp, Zea Mays
atggacgcggatgtgggggcgggggcgacgaatcaaccgtggccggagcccgacgacgcgcacctctccccgcctccgcctccgcctccgcctcccgcctccgccccgactccagccgccgaggctgccgcgcccaccgcctccgcggccgtatcgccgccagcgccggcggaggcgaacggcaactccgacaggaagaggaggaggaaggcggacgacggggacgggtgcaaggcctgcagctgcaagaagtccaggtgcctcaagctttattgcgtgtgctatgcttccgggtcacattgtactgaattatgtggatgcgaaccttgtcataacaagccacctcaaggtgctccatggactgcaccagttttacctctgaaacctgtccaaacattggaggctggtcaagaaatagtggaacaactcataaggtcccctatggatcttattagaagaaaatgcacctgcaagaagtcaggctgccttaagaagtactgtgactgctaccagggaggggcaggatgctctatcaactgtaagtgcgatgattgtagaaacccatttgggagaaaagtcggcgttattttggatggtaaaagcagcggtcttcccgcgcccgtacatgtgcatgaaagaaacgggactgaagctgactcgagcggcgacgacgaggaagacgacgacttgtacatgaaccgacagctctccccgtctccggtgtcaagggagtcgtcgttccagcaggagactctggtcggcgtggaagtccagacgatgaacgggcacctgtacccgaagccgctgacccaggtgcgtcccgagccgtcctcctggcagctctccgccgccaggaggccggccgaggaaccgcgcggagaggtgtggcgcttctcggggaggcccggcgaggacggggcctccgacgccgtggaagcagcgcgtgccgtcgcggtcgctcccccgagggagagcaggagaccggggacccgcggtggggacaggctcaggttcagcatcccgcggtgcgtcgaggcgatgagcgccatggcggagctgtcgcccgtggagaagtcgcttgcgcccgacgtgttcttggacgagagcaaccgcgagatcttcctctcgctgagcgtagatgttaggcccatctggctgaggcgtaagatgaagagccttgtctag

SEQ ID NO: 115258 - DNA, 3066 bp, Zea Mays
attaggacaagcattagtgttcgctcgtcactcgtcagtactcagtggaggaggcggcggcggggagggagacagatgcgggaggcccaccgcggggtcgccggaccagatggacacgccggataggccccgcgccggcgccggcgccgggttcgaggattctcctgtgttcaatttcatcaacaatctctcgcctataccaccacctaaacctttagactcagcacataatgtgcagctattcaagtcatcagatttggcacctgtttcttcgatctttgcctcaccacatgttaatccaacaaagggaactaaagttctgatcagggacgaatctgttcagcttcctcatgaattgcactcacctagcagtgtcagaactcggataggcacctcaggctcttttagaatgatcagatgcaaagacattgtgccagagaattgtaatatcacttgtcaactaaacgaggcatctattgattcttcagatcatacatcaagctctacaggccaattgactcaatccataaaagatgctgctggcagtatggaaagcgataaggatcaatgcgctggtggtaaaatagaccttaccatgtcccaggagtgcacaggcctagaaggtatgaaccttgatgagagtagcccagacagaatggattcatcacattctgggatagttgttcatgaaaaccagctatctgaacaaaacaatgatgaacctgcggcatataatggggtttacatgattacacaccaatcaagtagtgatatgctgactttagccgtaccatctggaacagaagcacaaccaatgaatgatacacaaaaggctgataatccctacccttgtgaatccttgttggatgttcagtcaagtggaaattgcacccaaaattctgtgcatgaaccccatctgtactggaacggggcagttgaaggggctgcagtagcttatactccccaagcacttcctggtgctttgcaaagtcagttgatgccatgtaacaagctcaatgagccaaaagattacatgcctactgagcaaaatgctttgtcacagcatttacgtggcatgcgtaggcgcagccttttcaatgaaaaggctgggcttagtaataaaggtgtagacaaagcttcagatcatcatcctgtaaattcaactacccccaaatgcaaaaccatttctggtgacaactcaaagactctaagaacccccccatgtgcattgcctggtattggcttgcacttgaatgcccttgccgcaactgcaacacctaaagagaaaatagtccctcaagacattcagtctactataaatgaatcaagtaacttgataggccctgctggatcttctccggcaccttctgagcaaaacattataaatgatgatttcactcaaacaactgatgttgcaaccgctgaagcttctagtcagggtagtcccaagaagaaaaggcataagtttgatagtggtgatggcacttcatgcaagcgttgtagttgtaagaagtccaaatgcctgaaactttactgtgagtgttttgctgctggagtctattgttctgagccttgttcgtgtatcggctgtatgaacaaccagagtcatacggaaactgttctatctacgcggcaacagattgaatctcgcaatccattagcatttgctcctaaagtaattcatacatctgagcctggtctggaactaagggacttctccaataaaactcctgcttcagctcgtcacaaaaggggatgcaattgcaagaagtcgtcatgtctaaaaaaatactgtgaatgttttcagggtggtgtgggatgctccataagttgcagatgcgagggctgtaagaatgcttttggaaaacgggagggggctgccgtgttaagcatagaggaacctaagcagggattggaagaaaaggatgtttgtgtgaaagaagagaaaagtgaaatcgagaaacagcttgttgtctaccaaactcctgatgatgctcctgctgaaaatgtactgaccacaccttccatggtgcagtgcagacccttggcttgtcgtccacccccaagctccaagaaaagctccaaaaaaccacgatcttcaacaaaactcactggacatccttcgcggttgtgcaacttacaagctcctccgaagaccgacactatgctctccccattcgaaaactacgcggaaatggtccttggtgatagcacatcggatatcctcaagggaaattcatctcctcaaacttctgttaaagtggtgtcaccaaacaagaagcgaatctctcccctgcgaatgggtaccgggctatctccaatctgtaggagtggcaggaagctgattttaaagtccattccttctttcccttcccttggcggtgatgtaaacaatgaggatccagaaaccaagttgccagccccttgaatttaccatattttgtcactggtttatttctaccataccatctgatagtggacagccaagcgactttcctttcatcatttctatctctctcgatcaatgattatttatgtactgctataataatctgccgcgtgctggcaaaattctgcctccctagaacaaccaatggcatttggtttgctggtaaattatctcttggctccgtgtgttccctgtggctgtctgtctataatttatgttcattattttgttccggagaccgaagaatctgaggacttgtatgtatctgggatcaagatgtgaatctcgcatgtaccagatgacagaactgttaagacttatatttgtctgaggttaaactgcaagacttttatttaagctagaactttgatcactataggatatggcatgatatagcagggctcttgagatgcattctcttgtgcgtgcttggtaactgtagtcgtgcaactgttgacggcgtttgttcagaacaagtggttgatgaatttgaagatggtttagggagtgggaatgattttgtttgtgtgcgtgcgaacttgtaaaatctccgtgtatgaactggcaatgcttttatggtattgatcatctgcggtgtgttaactgagtgcaaaata

SEQ ID NO: 115259 - DNA, 1661 bp, Zea Mays
cgccttgatcttgagcatgatattcaaaaagggtgtattgagaaggacaaagtccgtaatgcctgccacggtcagcatagaagggattataaaagaaataggaagaatgacgaatatgaaaatgaagatttggatgcagaacgatctggtcccaaatctcaaagaaaggtggagggtactggtgatgattcaccggggattgctgccatgtcctcattcaattgtaacgagggggacagcgatcctgagaaagagagatataatgaaagggaaaaatttgaaagagtattgaccttcaattctaaggaaggagcagctcatgaagctagtacattccctagcaaagagaagtataacttatgcaaaccaatatcagagcttgatctgtcaaattgtcagtggtgcactccaagttaccgacttttgcctaaaaacgtttgagctggacgtgctgttggaatctgttagtgttacaattaagcgtgttggggagttggtggaaagtatggaaggcaactcactgaaacctgatagctctatccacctcaatgaacatttgactagtttgaatatgaggtgcattgagtggctatatggtgaccatggacttgatgttgtggatgttcttcaaaaaaatgctggtgtgacattaccagttattttaaccaggctgaaacaaaagcaggaggagtggtcaatgtgccagtcagattttaataaagtttgggctgaagtatattcaaaaaattatcgcaagtctcttgactatcgcagtttctattccaaacaacaagacacaagaatctgaacacaaaagattaacgaaatcagtgagaagaatagaaaggggatgatgtgttacttgctattgctgctgggaataggtggccactagtaggcaagaagcagaggactgctggaaagcgttgggctctgaagaagcacaggcacccgcccgcctgggctaccgccgcccttgcttgtgtcgagggcctccaagaaccgcaccacctcgtccatgtcagggcgcttctccgggctcgcgtcccagcacttgtgcatgatgttcgccatcgggcaggcttgggcagcagcgagaggccgcaggttctgcacacacagaatgtcacacatcagtatgtggacgattaccagcagtgaatccaggagaagagtagaaagtgggatgatgtgttacttgctattgctgctgggaataggtagccagtagtaggcaaggaggtctcgtcctctgttctgatttctcgtttgaaggtctcgtccttgacatggatccgccggcacccatgctgtcacttcaagttgttaagtcttcatcgcaacaacttttactcaaggattcatcacaacagattacaccgatgcctccttcatttgcagttgttgcatcatcacatctgctgccagccatgcctcctacaacagatgctgtttctttagcaccccacccaggacaatcaagagacttgtcaaaaagattactctgaagaagaagatgaatgccaagtcaggctgatttgagcggtgttccagttgcagttgcttattgtatctgttaagcaacagatgttgctattgtactcttctaatctaactaggtctgtacccgtgcgttgccacgggagtaaaaatttagcgtg

SEQ ID NO: 115260 - DNA, 1810 bp, Zea Mays
cgccttgatcttgagcatgatattcaaaaagggtgtattgagaaggacaaagtccgtaatgcctgccacggtcagcatagaagggattataaaagaaataggaagaatgacgaatatgaaaatgaagatttggatgcagaacgatctggtcccaaatctcaaagaaaggtggagggtactggtgatgattcaccggggattgctgccatgtcctcattcaattgtaacgagggggacagcgatcctgagaaagagagatataatgaaagggaaaaatttgaaagagtattgaccttcaattctaaggaaggagcagctcatgaagctagtacattccctagcaaagagaagtataacttatgcaaaccaatatcagagcttgatctgtcaaattgtcagtggtgcactccaagttaccgacttttgcctaaaaactatccagtaccttctgcaagcaaaaggactgacattgaagcttcagtgctgaatgatttctgtgtattggtgacctcaggaagtggagcgtttaagcatatgcgcaaaaatcagtatgaagaaatcttgtttatatgtgaagatgacatgtttgagctggacgtgctgttggaatctgttagtgttacaattaagcgtgttggggagttggtggaaagtatggaaggcaactcactgaaacctgatagctctatccacctcaatgaacatttgactagtttgaatatgaggtgcattgagtggctatatggtgaccatggacttgatgttgtggatgttcttcaaaaaaatgctggtgtgacattaccagttattttaaccaggctgaaacaaaagcaggaggagtggtcaatgtgccagtcagattttaataaagtttgggctgaagtatattcaaaaaattatcgcaagtctcttgactatcgcagtttctattccaaacaacaagacacaagaatctgaacacaaaagattaacgaaatcagtgagaagaatagaaaggggatgatgtgttacttgctattgctgctgggaataggtggccactagtaggcaagaagcagaggactgctggaaagcgttgggctctgaagaagcacaggcacccgcccgcctgggctaccgccgcccttgcttgtgtcgagggcctccaagaaccgcaccacctcgtccatgtcagggcgcttctccgggctcgcgtcccagcacttgtgcatgatgttcgccatcgggcaggcttgggcagcagcgagaggccgcaggttctgcacacacagaatgtcacacatcagtatgtggacgattaccagcagtgaatccaggagaagagtagaaagtgggatgatgtgttacttgctattgctgctgggaataggtagccagtagtaggcaaggaggtctcgtcctctgttctgatttctcgtttgaaggtctcgtccttgacatggatccgccggcacccatgctgtcacttcaagttgttaagtcttcatcgcaacaacttttactcaaggattcatcacaacagattacaccgatgcctccttcatttgcagttgttgcatcatcacatctgctgccagccatgcctcctacaacagatgctgtttctttagcaccccacccaggacaatcaagagacttgtcaaaaagattactctgaagaagaagatgaatgccaagtcaggctgatttgagcggtgttccagttgcagttgcttattgtatctgttaagcaacagatgttgctattgtactcttctaatctaactaggtctgtacccgtgcgttgccacgggagtaaaaatttagcgtg

SEQ ID NO: 115261 - DNA, 843 bp, Zea Mays
cgccttgatcttgagcatgatattcaaaaagggtgtattgagaaggacaaagtccgtaatgcctgccacggtcagcatagaagggattataaaagaaataggaagaatgacgaatatgaaaatgaagatttggatgcagaacgatctggtcccaaatctcaaagaaaggtggagggtactggtgatgattcaccggggattgctgccatgtcctcattcaattgtaacgagggggacagcgatcctgagaaagagagatataatgaaagggaaaaatttgaaagagtattgaccttcaattctaaggaaggagcagctcatgaagctagtacattccctagcaaagagaagtataacttatgcaaaccaatatcagagcttgatctgtcaaattgtcagtggtgcactccaagttaccgacttttgcctaaaaactatccagtaccttctgcaagcaaaaggactgtgtcaaggacctggaatccccgacttgccggaccacggctacgtagctcgtagccgtcggccgtcctctccggttggggttatgcccccctaaccgcaggcttgtgaggctggaggtggaagaagagacaaattccttattgctataaccgtgcagcatagctgggtatatatggccgtcggccacctacaaatggagcaagtctccttgattttctctagcctgattgattgcttctttcctattcttatccctctttcctaatctcagcccctgctatctgtggctgatttgcagcacctgattttagccctctttcctaatctcagccacttgccattggtggctgatttgcagcatgcgctgctgcctgctct

SEQ ID NO: 115262 - DNA, 184 bp, Zea Mays
ttattcttttacttatttatgttttcctttgttcaagtttgaatcccaaattcagtttcgaacttcaaactcaggctgaatgcgcaaacaaaaatctcagaatgcgatgcagggtttatttttatttttgtttatttattatcttatctatttgaataattgcttcaaatatataatgcgcgca

SEQ ID NO: 115263 - DNA, 99 bp, Zea Mays
cacagatggctgaacagagggtagcggcgaacatatatagtgccaagaccatcaagggcgaggaaaatctgatcggaccgcaatggattcggccgacgg

SEQ ID NO: 115264 - DNA, 270 bp, Zea Mays
atggcgatgctcgtgcgaggagggggaggcagtgttaggatcaggcttggcggtggcggcgaggatgaggagtctgtccttggcctcgtcgtggttgcggttgtcgtcatcatccgtggagaggttgatgcaggagcagcgctcgagggaggcgaagaaggcagagttagcatgagcaaggtcgaggcgttgtatgagctgttcacgaagatcaataatgttgtgattgatgatgggctgatcaacaagggttgtatttggcttatttaa

SEQ ID NO: 115265 - DNA, 786 bp, Zea Mays
agggtaaatcagtgtgtggagatgtacctcaggtgtgctgtctacaatcagccccaccaatggaaaaaatggttggccttagttgagtattggtatacctctaacaaccattcggtgttgggtttcactccctccagagcactgtatggctatgaagcaccactcctagtcacccctcgactcattggaattgaggataaggaggctactgactagattactgagaggtcagctttctcagccatgttgaaggagcaattggctcgggcttaacttcgtatgaagcagtatgctaataagggcagaactccaagagagtttcaagtgggagacctagttctactcaaattacaaccttatgcatagaagactgtggtgaaccaaccttgtctgaagctggcgtttaaattctttgggccattcaagggcttggctaggattggaccagtcgcttatagacttgcattgcctgcagatgcccaagttcatcatgtttttcatgtgtctcaactcaagtcgttccttccttgctactcgcctgtgtttacaacattaccaatggtgtctgatctatctcaaggggagattgtgcctgaacaggtgttggatcaaagaatggtgcataagggcaatcattctattacttaggaattggtgaagtggactgggctacctgaggcaactgctacatgggaagattactctattgttaaggcacgttttccaacagcaaacacttggggtcaagtgtcatttgaggtctggggagatgtgaggactgcagaa

SEQ ID NO: 115266 - DNA, 1972 bp, Zea Mays
aaaccgcttgtttgcccttccgactacgtctctccctgactcggcttctcttttccggcgacgacggctggtcgagttgcggcgctctgttcagtgttcattgtgcccttcgccacgacgattatcctccagtaagtcaccatgtcttcgtccatgcaatcttcataccttcctgctaccactgagtccgtagccaaggctcaggaggccaaggacgcttctgagtccatctcaatcctctaccgcgtgcttgaggatccctcttcatctgcggatgcactgagagtaaaagagcttgccatcacgaatctcacaaactacctcacaaaagagaacagagctgaagacctcaggaaccttttgacccagctcaggcccttttttgcattgatccccaaggcgaagactgcgaagattgtgcgtggcatcattgatgccgttgccaaggtgcctggaacatctcagcttcagatctcactgtgcaaggagatggtagaatggacccgtgcagagaagcgaaccttcctcaggcagcgtgtggaagcaaggctggcagcccttctgttggagaatcaggagtatactgaggctcttacactcctttctggactcatcaaggaagttaggaggctggatgacaagttgcttcttgtggacatcgaccttttggagagcaagctccatttctctctgagaaaccttccaaaggccaaagcttctctgactgctgccagaactgcagccaatgccatttatgtgccgccatctcagcagggcacaattgatctgcagagtgggatccttcatgctgaagagaaggattacaagactgcttacagctacttcttcgaagcatttgaagctttcagttcactggaagatcccaaggctatcttcagcttgaagtacatgcttctgtgcaagataatggtcaaccaagctgatgatgttgcaggaatcatctcatcgaaggctggcctcaagtatctgggtcctgatgttgatgctatgaaagctgtggccgatgcctactccaaaaggtctctgaagtttcgaaactgctctccgtgattacaaagctcagctggaagaagatcctattgtccacaggcacctttcctcgctgtatgacactctcttggagcagaacctctgcaggctgattgagccctactcaagggtggagattgctcacatagcagagatgattgagctgccaatgaaccatgttgagaagaagctgtcccagatgatcctcgacaagaaattcgcagggacacttgatcaaggcgctggctgcctcatcatcttcgaggacagcaagactgaggagatcttccctgccacacttgaaacgatcacgaatgttggcaaggttgtggacagcctgtacatgagatcggccaagatcatggcctgaaagatgcagtgggaggcctaggtgtcgtcagcttcttttcttggtctattgtcagttcagttaaccaaactttagctgtccaagagacatcttattgtggattttttttttatttgtggttttgggtggcagactgtttgcgttacaatttgctcatgttgctcatgaatactcatgtttctgtttgatggaagtactgttaaggctatgatgtttttatactttatgttatttctgctgtcatggaaatccaggtgttagctagctacctacctgttgccatactttataatgaatttctgtgtggctctttctttcacatatcaaggggcgaaacgtattcctcttgcatgtatgtaaagtgcggaagaaagcagccgatgccacaattcatgcaaggatatggggagtatttcacaccaaattgcatactttctttaaactgaaattttgattggtaaatctatcatccactttgttgtgctgacaggtagagcaagatcttcatttcaggagatgctggtttgtcaaataaaacttacttcctccgtc

SEQ ID NO: 115267 - DNA, 2024 bp, Zea Mays
ggcccaccaacctgttcatcgatcttctttcttctcaagaaaagaaaacaaaccgcttgtttgcccttccgactacgtctctccctgactcggcttctcttttccggcgacgacggctggtcgagttgcggcgctctgttcagtgttcattgtgcccttcgccacgacgattatcctccagtagtaagtcaccatgtcttcgtccatgcaatcttcataccttcctgctaccactgagtccgtagccaaggctcaggaggccaaggacgcttctgagtccatctcaatcctctaccgcgtgcttgaggatccctcttcatctgcggatgcactgagagtaaaagagcttgccatcacgaatctcacaaactacctcacaaaagagaacagagctgaagacctcaggaaccttttgacccagctcaggcccttttttgcattgatccccaaggcgaagactgcgaagattgtgcgtggcatcattgatgccgttgccaaggtgcctggaacatctcagcttcagatctcactgtgcaaggagatggtagaatggacccgtgcagagaagcgaaccttcctcaggcagcgtgtggaagcaaggctggcagcccttctgttggagaatcaggagtatactgaggctcttacactcctttctggactcatcaaggaagttaggaggctggatgacaagttgcttcttgtggacatcgaccttttggagagcaagctccatttctctctgagaaaccttccaaaggccaaagcttctctgactgctgccagaactgcagccaatgccatttatgtgccgccatctcagcagggcacaattgatctgcagagtgggatccttcatgctgaagagaaggattacaagactgcttacagctacttcttcgaagcatttgaagctttcagttcactggaagatcccaaggctatcttcagcttgaagtacatgcttctgtgcaagataatggtcaaccaagctgatgatgttgcaggaatcatctcatcgaaggctggcctcaagtatctgggtcctgatgttgatgctatgaaagctgtggccgatgcctactccaaaaggtctctgaagtttcgaaactgctctccgtgattacaaagctcagctggaagaagatcctattgtccacaggcacctttcctcgctgtatgacactctcttggagcagaacctctgcaggctgattgagccctactcaagggtggagattgctcacatagcagagatgattgagctgccaatgaaccatgttgagaagaagctgtcccagatgatcctcgacaagaaattcgcagggacacttgatcaaggcgctggctgcctcatcatcttcgaggacagcaagactgaggagatcttccctgccacacttgaaacgatcacgaatgttggcaaggttgtggacagcctgtacatgagatcggccaagatcatggcctgaaagatgcagtgggaggcctaggtgtcgtcagcttcttttcttggtctattgtcagttcagttaaccaaactttagctgtccaagagacatcttattgtggattttttttttatttgtggttttgggtggcagactgtttgcgttacaatttgctcatgttgctcatgaatactcatgtttctgtttgatggaagtactgttaaggctatgatgtttttatactttatgttatttctgctgtcatggaaatccaggtgttagctagctacctacctgttgccatactttataatgaatttctgtgtggctctttctttcacatatcaaggggcgaaacgtattcctcttgcatgtatgtaaagtgcggaagaaagcagccgatgccacaattcatgcaaggatatggggagtatttcacaccaaattgcatactttctttaaactgaaattttgattggtaaatctatcatccactttgttgtgctgacaggtagagcaagatcttcatttcaggagatgctggtttgtcaaataaaacttacttcctccgtc

SEQ ID NO: 115268 - DNA, 875 bp, Zea Mays
tcgaatcgggtcggtcttgtcgtgcgtcgtggctgcgcgagcgactcgactgcacccaacccccctcctcccagtccccacacactgcgcgccgccgccggatcctcctagggtttcgccgcaatgtcgctccggccgagcgagcgggagcagatgcggaagggcaactacaagcagacggtggacgcggaggagagtcgctgccgctgcgagggccagatgatggacatgcgcaaggccaagcgcgaggaaagtttccaaaagaagcgctgcgatgggtttcccgcctccgccgccggtgtgccgccgatgggccactccaccgcgctccagcagaagtcccccaatcgaagaggtgatcagcacaggagtggtgccgcgattcattgagtttcttacacgtgaggaccatccccaactccagtttgaggctgcatgggcactcaccaacattgcatcaggcacatcagagaacactaaggtggtggttgagagtggtgctgtgcccatctttgtcaagctactcaactccctcaagcgaggatgttcgtgaatagacatgcactaaattacaagagatgtgtcatattatgaccagaggtggatccagaatttttctatgaccccagccaaatctaccaaattttcttctctttattttatcttaactattttataccatattaaatagagacttatatagagttacatggatcaagccctgggccacagatcgggtggcctggggtgtagatccgccactgattatgactatggatgagacttttgtgatgtaattgatgagactatggatttaaatattgttatgtgattgtgtgtgagatgttttatgtgaaaatatgttgtgttatata

SEQ ID NO: 115269 - DNA, 1801 bp, Zea Mays
tcgaatcgggtcggtcttgtcgtgcgtcgtggctgcgcgagcgactcgactgcacccaacccccctcctcccagtccccacacactgcgcgccgccgccggatcctcctagggtttcgccgcaatgtcgctccggccgagcgagcgggagcagatgcggaagggcaactacaagcagacggtggacgcggaggagagtcgctgccgctgcgagggccagatgatggacatgcgcaaggccaagcgcgaggaaagtttccaaaagaagcgctgcgatgggtttcccgcctccgccgccggtgtgccgccgatgggccactccaccgcgctccagcagaaggtgcggtgcccccctcccttgttcttcctagccccgatctgatccgctctctgcgttagggtatgggtgacgtggtggcactcgatctgctgggttcggatctgattttcttggtgacgggatggcttgccggcgatggtgcaggccgtccactccaacgacccctccgtgcagcttgaggccaccacacagttcaggaagctactttctataggtgagattggaatcttatgtgcagttagcattccggatggatagagtttaggggttgagattttggccatgctcgaggtattaggccatacccaaacgtgagggtatggtcagttgtagctgtttcgggtaattgttgtatacaggacttgacttgtggattgcgagctatcaaaattagtcgttgcaccctctcattttcagattacttaatttactgtctcctcagaaaaaaaacaaaccctatcctatggcctttgcaacatgcatatgaccatgtatgcccaaaagttctgaaaaaagttatactcttgaaagcatttgatttcatgaaccactattctttttttccagtagtgttctgcttgcagctggggcaattatcattgcatccatgtgtgtgtttgcgcgtgcgtgtgtgtgttatacattgttctattgtcttaaaatggtatgcagactatgtgtgtgtttgcgcattagtgtgtgtgttatacattgttttattgtcttaaaaagatcatggagagtctgtgtacctcttttcatattcttgtacatcgtagatagcagctttgatatcttgtgggattcttgtatttgttggtgaatccagatgagtgcacggtacttctttcttaattcccactacaactttatgtgaaagttaagtagtaacttgctgattgagtttccataaatttctctcgtagtcccccaatcgaagaggtgatcagcacaggagtggtgccgcgattcattgagtttcttacacgtgaggaccatccccaactccagtttgaggctgcatgggcactcaccaacattgcatcaggcacatcagagaacactaaggtggtggttgagagtggtgctgtgcccatctttgtcaagctactcaactccctcaagcgaggatgttcgtgaatagacatgcactaaattacaagagatgtgtcatattatgaccagaggtggatccagaatttttctatgaccccagccaaatctaccaaattttcttctctttattttatcttaactattttataccatattaaatagagacttatatagagttacatggatcaagccctgggccacagatcgggtggcctggggtgtagatccgccactgattatgactatggatgagacttttgtgatgtaattgatgagactatggatttaaatattgttatgtgattgtgtgtgagatgttttatgtgaaaatatgttgtgttatata

SEQ ID NO: 115270 - DNA, 466 bp, Zea Mays
ttggctgtgtacatgagtcgtcgtcgaattttttttgaaaccttcaagcttcgatgcccgaccctttgcatttgtggtacagtgaagattgaactatcggggagaatgcagaaacaatttacagatgataggtactacatatgacagatgaggcaactagccatggtgtatatgctgcttcgacctgtgcagtttatggatgaagacgaagctgacctgcagatgtaagctttgttttctatggactagatcttgtgtatccaaattgaacggattgttctgataaatatagtgtgaaaagataaattataatatctgttcatgtgcgtcatcgcaacgcattttggtggggtaatatgaactttgatttatttttccaattatattctaggctctaaccaactgatccaaaatgtcagatacgtggattttgatacttctaaatggagatatgtgttgtgtaata

SEQ ID NO: 115271 - DNA, 276 bp, Zea Mays
agtggagcacgagtgcgtccacgcactgcacgcgagatcaagaactagtagtgtgtttggtttgaggaatgaagtgatccatcttcttctcactcctcactttttttatttggtttgtggaatagaatgggttgatctatcaccaccacattcctcataagctaataattagtatatacatgaggagtgggttgattccaccaaaattgatggaatgaacttatgatgcatcacctcatgaagcatagagtgactccacaaaccaaacacaccata

SEQ ID NO: 115272 - DNA, 104 bp, Zea Mays
agacttagaatattttagggcatggattatgacttgcatttaattccaatctatactaatctagagctggattggtgtaaacaaacaaggcctaataagaaaat

SEQ ID NO: 115273 - DNA, 581 bp, Zea Mays
ttcctcctctcgctgtagctattagctaggcgtttcggtcgccgcgccggtgaagctaggtgctgtgctgtgctgtgctgtgctctgcaattaatattacgtcagatcgatgaacaggttcaagaacgtggtgctgcgcaagtgcaagagcctgtcatcacgggtagggcgcccgccgagcgcgtcgccgtcgtacaggtacagcagcctccggtccatgtccatgtccacccggcgggacgcgggcgccgccgccgccgatgccgacgaagccacggcggctgccgtgggcggcggcgcggcggcggtgatcgtgggcagctcgcggcggcggtacgtgatcagcgcggagcacctcagccacccgctgatcgccgcgctcatcgacgacgacgagcggcacaaggagcccgtggccgtcaactgcgaggtggtgctgttcgaccacctgctgtggatgctggacaacgccgtcgacctccacgacgacgacgacgccatgagggagctggcccagctctacgcgtgctgatcgaacgtcgtacgtcgcgcgttcgtcagaatacatatatacatccaca

SEQ ID NO: 115274 - DNA, 1323 bp, Zea Mays
tcgtctctcgtgtctcctccccctctggcacacctcgtggtcggtcgtcgtcccgcctccaccaccccaactcgtggtcttcgtttcaggccaagaagaagaagtggggagaggagatccggaggcaaggcaacccacgtcgcttccactcctttccacccttccttgtcgccttgctagttgctgctcccgtcgtgccacgtgctgcttccgctaactgcgggtaggggctagggagggagctgagcaatggcttccgccaccgccgcgccgcgacctccggcaccgccgccgcctccgcctccccctcctgcggcggcggcgcagtggctaggcccgcgggtgtcgttcagcctggacgatgcgggcggaggaggagtagggggaagggatgctgcggcagcggcaggagggaaggccgggccaggcgccggcgccggcgccgacttcgagtttctgctcggcgggtgcgccgccgcctgctccatgctccccgccgacgagctcttctccgggggcaagctggtcccactccgcatccccgcgtccacggacgagacggcggccggggcggaggccgaggtagccgcgcagtcgacgctgccgccgccgccgccgaagcaggagcagcagcagcagccggagacgccgcgggcggcggcggagcccaaggtccccgcgaggaggtggcgtgatctgctgcgtctgcggaagcagcaggcgtcgccgggcgccgcggcggacccgaggccgctgcgccggctcctccgccgcggccccaagcccccggagccggagccgtcgctgagcctgccgttgctccgcgagcccggcccggaggagcccaacgtcaccaccaaggctaccgaaaagacggcgtcgtcgcagcaccagagcctgctgcctcccaagatccggctgtccgcgccgcagcagcagacgtcggcgcccccacccgcgcccccgcctccccctccgtcggcggtggcggccgacagcccgcgcctgaacgcggcgggaaaggtggtgttcaacgggctcgggcgcagctccagcagcccgagcagcctggccggcgggcggcgccaccgcagcggcagcgcgggcgccatggagcggtcgtactcggcgcacgtgcgcgtggcgcccgtgctcaacgtgcccgtctgctcgctccgcggctcccgcaagtccgccgccgccttgggcatcgaccgcctcttcgccccgtcgtcgtcgggcgctgcctcctcctccgccggcgcggccaagaagaacagggccgcaaagaaggacgcgagtacggttttgacggtctcggcg

SEQ ID NO: 115275 - DNA, 1611 bp, Zea Mays
cccacgcgcgcggctcctaggaggagtaggctcgtgtagcccctatacgcgctctcgtctctcgtgtctcctccccctctggcacacctcgtggtcggtcgtcgtcccgcctccaccaccccaactcgtggtcttcgtttcaggccaagaagaagaagtggggagaggagatccggaggcaaggcaacccacgtcgcttccactcctttccacccttccttgtcgccttgctagttgctgctcccgtcgtgccacgtgctgcttccgctaactgcgggtaggggctagggagggagctgagcaatggcttccgccaccgccgcgccgcgacctccggcaccgccgccgcctccgcctccccctcctgcggcggcggcgcagtggctaggcccgcgggtgtcgttcagcctggacgatgcgggcggaggaggagtagggggaagggatgctgcggcagcggcaggagggaaggccgggccaggcgccggcgccggcgccgacttcgagtttctgctcggcgggtgcgccgccgcctgctccatgctccccgccgacgagctcttctccgggggcaagctggtcccactccgcatccccgcgtccacggacgagacggcggccggggcggaggccgaggtagccgcgcagtcgacgctgccgccgccgccgccgaagcaggagcagcagcagcagccggagacgccgcgggcggcggcggagcccaaggtccccgcgaggaggtggcgtgatctgctgcgtctgcggaagcagcaggcgtcgccgggcgccgcggcggacccgaggccgctgcgccggctcctccgccgcggccccaagcccccggagccggagccgtcgctgagcctgccgttgctccgcgagcccggcccggaggagcccaacgtcaccaccaaggctaccgaaaagacggcgtcgtcgcagcaccagagcctgctgcctcccaagatccggctgtccgcgccgcagcagcagacgtcggcgcccccacccgcgcccccgcctccccctccgtcggcggtggcggccgacagcccgcgcctgaacgcggcgggaaaggtggtgttcaacgggctcgggcgcagctccagcagcccgagcagcctggccggcgggcggcgccaccgcagcggcagcgcgggcgccatggagcggtcgtactcggcgcacgtgcgcgtggcgcccgtgctcaacgtgcccgtctgctcgctccgcggctcccgcaagtccgccgccgccttgggcatcgaccgcctcttcgccccgtcgtcgtcgggcgctgcctcctcctccgccggcgcggccaagaagaacagggccgcaaagaaggacgtgggccccggcgcccagtgacccgtccgtcggtcgccgcgccacgagttggtttccttgggcaatgctcgcggttaaggcagttggtttacaccaccgctagctagtagtacgtagtagtagcagctagccgacggttaatcgtcgtctggccggttgatttggcatgtaaataaagcagcagtgttttggataactagcacacgggttttacatgcagattttagaagaattaattgaaaatatcatgaaactaatcat

SEQ ID NO: 115276 - DNA, 335 bp, Zea Mays
acaacacctagaagaagtggtgtttaaaagaatagtctactccagtggttgttgatcaagtggaggagccatctaactgggtatttgatagagggatctataacctctttactacaacaaaggtgatgaggagtactctaggtgttcctgaggctagagggcgcttccagttctcgaggaggattagttaggcttgtgtataagcttaggagggttcctaccttcctcctattgtaataagttatgcactttgagtatatcaggacttgtaataaatgtaactcttcctatgtaataacctttagttttagaaatgaaaagaatgtttttataaa

SEQ ID NO: 115277 - DNA, 360 bp, Zea Mays
gtgaactcggtgcttgactctcaactcgtctatgccatgtgcgctatgcctttgccacctgggattctctccagggtggacagccgaagaagatcctttctctggactcgcgaagatcggtgctctggatcgagctgcttggttgcttgggaaaatgtttgtaaaccgaaacaggcagggggtttgggcatcaaggacctacacatccagaacacatgtctgttggtcaagctcattcacagattgcactcttcggccttgtcgtcttgggcagcctgggtgcgctcgaatgttaaactagcaacaatggagggcgagatcagggggtgccattgggatactctgagagcgttgctgctg

SEQ ID NO: 115278 - DNA, 1304 bp, Zea Mays
cccgtccgttctcacttcaggccccctcgtccgttcgatcgactcctcggaaagagggcgctcatgtggttgcgtattccgcgctgggacacgtatggcaggcgtgcgcttcctacgggtcgtcctcaacctctcgtccggccgtgttgacctgaccgaataaccacccgtctgccgctgtgccgcaccccgcacgagacccgtccttgaggggcacgtcctagatcggtggcgcctgcctctcgccgccgatacgacatgcagagccagatagtgtgccacgggtgcaggacccttctgttctacccaagaggtgctccgagcgtgtgttgtgcggtatgccatgtggtcaccaatgtgccgcctccagcaatggagatggctcgacttatatgtggtggctgccagacattattgatgtatgctcgcagtgcaacaactgtaagatgctcatgttgtgacacagtcaatcttgtcagaccagtgagtagcatagctcatgtgaactgtggccagtgccaaacagtgttgatgtatccatacggagcaccgtctgtcaaatgtgctgtttgcaacttcattacaaatgttggcggggtgactcccatgatacctttgccaccaccagcactaactgcatcaagtggaacttcatatatcatcccgtcaatttccgtgccgacgaatcaaccgcggaatgtaactgttgtcgttgaaaacccaatgacagtagatgacaagggaaaattggtgagcaatgttgtagtaggggttacgagcggcgggaaaaagtgacggcatatcacaacccgtatagctttgtccaaactatctaaaaagggtttaagaatacataccttgtatcatactgctgtttggcgatcggctgctcgacggaggaatccccctccctggagagcgtagtggcaaggcagcgctgctttcgccactgcgatcgtgctagaacgagccaaaaaaaaaaacgaagtgcgggtgtgcatactcagagtatatctgtagcttgttaccccttgattcttttgtatgtaatatgggctctgcctgactttcactgtgtgatcaaatttccaagcccgtgggcgctgttgctgcgtgccttgttattagtgaataacaaacattgcaaatggctcttgaaatacagtgtgtgtgtgttttaatctctctgcatttatgttaatcagcaggtgccaccatttgctgttccagactgataatgcagagtttgtatccacgttctttggagaaaacatttgaggctcatacgctgtttcatgtcccat

SEQ ID NO: 115279 - DNA, 1810 bp, Zea Mays
cccgtccgttctcacttcaggccccctcgtccgttcgatcgactcctcggaaagagggcgctcatgtggttgcgtattccgcgctgggacacgtatggcaggcgtgcgcttcctacgggtcgtcctcaacctctcgtccggccgtgttgacctgaccgaataaccacccgtctgccgctgtgccgcaccccgcacgagacccgtccttgaggggcacgtcctagatcggtggcgcctgcctctcgccgccgatacggtgcctctcgcggtctcgctccccctcgcaggtcttttggtttttttagttcctccctttgcttcttggaggtgtttgttgccgtctcacccgcagttcttgaggtacgcacgcagtaatccggcttctttctatgttccgatgtcttgctggttggatgaggagggtacgacgctctgtggagagatctaatcgcgctggtaaactggggcgatcggtgtgggggaatcggatagcgtggatgggatttgggattggaagagaagctggaggatgccttttttcccctgtccccaagctttctgtggatgacggtgataatcgtggacgagctaagctcattgagtgtctggctgatgtgggattgggtggcatatgctggattgctaactgttccatctggtgcaccaagaattggactgcactggggttgggattgggattgggatgggattgctttgcctttgattgtgtatatgcttattatgtgctcatccgctgtggctttggccggaactttgcagacatgcagagccagatagtgtgccacgggtgcaggacccttctgttctacccaagaggtgctccgagcgtgtgttgtgcggtatgccatgtggtcaccaatgtgccgcctccagcaatggagatggctcgacttatatgtggtggctgccagacattattgatgtatgctcgcagtgcaacaactgtaagatgctcatgttgtgacacagtcaatcttgtcagaccagtgagtagcatagctcatgtgaactgtggccagtgccaaacagtgttgatgtatccatacggagcaccgtctgtcaaatgtgctgtttgcaacttcattacaaatgttggcggggtgactcccatgatacctttgccaccaccagcactaactgcatcaagtggaacttcatatatcatcccgtcaatttccgtgccgacgaatcaaccgcggaatgtaactgttgtcgttgaaaacccaatgacagtagatgacaagggaaaattggtgagcaatgttgtagtaggggttacgagcggcgggaaaaagtgacggcatatcacaacccgtatagctttgtccaaactatctaaaaagggtttaagaatacataccttgtatcatactgctgtttggcgatcggctgctcgacggaggaatccccctccctggagagcgtagtggcaaggcagcgctgctttcgccactgcgatcgtgctagaacgagccaaaaaaaaaaacgaagtgcgggtgtgcatactcagagtatatctgtagcttgttaccccttgattcttttgtatgtaatatgggctctgcctgactttcactgtgtgatcaaatttccaagcccgtgggcgctgttgctgcgtgccttgttattagtgaataacaaacattgcaaatggctcttgaaatacagtgtgtgtgtgttttaatctctctgcatttatgttaatcagcaggtgccaccatttgctgttccagactgataatgcagagtttgtatccacgttctttggagaaaacatttgaggctcata

SEQ ID NO: 115280 - DNA, 1390 bp, Zea Mays
cccgtccgttctcacttcaggccccctcgtccgttcgatcgactcctcggaaagagggcgctcatgtggttgcgtattccgcgctgggacacgtatggcaggcgtgcgcttcctacgggtcgtcctcaacctctcgtccggccgtgttgacctgaccgaataaccacccgtctgccgctgtgccgcaccccgcacgagacccgtccttgaggggcacgtcctagatcggtggcgcctgcctctcgccgccgatacggtgcctctcgcggtctcgctccccctcgcaggtcttttggtttttttagttcctccctttgcttcttggaggtgtttgttgccgtctcacccgcagttcttgagacatgcagagccagatagtgtgccacgggtgcaggacccttctgttctacccaagaggtgctccgagcgtgtgttgtgcggtatgccatgtggtcaccaatgtgccgcctccagcaatggagatggctcgacttatatgtggtggctgccagacattattgatgtatgctcgcagtgcaacaactgtaagatgctcatgttgtgacacagtcaatcttgtcagaccagtgagtagcatagctcatgtgaactgtggccagtgccaaacagtgttgatgtatccatacggagcaccgtctgtcaaatgtgctgtttgcaacttcattacaaatgttggcggggtgactcccatgatacctttgccaccaccagcactaactgcatcaagtggaacttcatatatcatcccgtcaatttccgtgccgacgaatcaaccgcggaatgtaactgttgtcgttgaaaacccaatgacagtagatgacaagggaaaattggtgagcaatgttgtagtaggggttacgagcggcgggaaaaagtgacggcatatcacaacccgtatagctttgtccaaactatctaaaaagggtttaagaatacataccttgtatcatactgctgtttggcgatcggctgctcgacggaggaatccccctccctggagagcgtagtggcaaggcagcgctgctttcgccactgcgatcgtgctagaacgagccaaaaaaaaaaacgaagtgcgggtgtgcatactcagagtatatctgtagcttgttaccccttgattcttttgtatgtaatatgggctctgcctgactttcactgtgtgatcaaatttccaagcccgtgggcgctgttgctgcgtgccttgttattagtgaataacaaacattgcaaatggctcttgaaatacagtgtgtgtgtgttttaatctctctgcatttatgttaatcagcaggtgccaccatttgctgttccagactgataatgcagagtttgtatccacgttctttggagaaaacatttgaggctcata

SEQ ID NO: 115281 - DNA, 1400 bp, Zea Mays
cccgtccgttctcacttcaggccccctcgtccgttcgatcgactcctcggaaagagggcgctcatgtggttgcgtattccgcgctgggacacgtatggcaggcgtgcgcttcctacgggtcgtcctcaacctctcgtccggccgtgttgacctgaccgaataaccacccgtctgccgctgtgccgcaccccgcacgagacccgtccttgaggggcacgtcctagatcggtggcgcctgcctctcgccgccgatacggtgcctctcgcggtctcgctccccctcgcagtaatccggcttctttctatgttccgatgtcttgctggttggatgaggagggtacgacgctctgtggagagatctaatcgcgctgacatgcagagccagatagtgtgccacgggtgcaggacccttctgttctacccaagaggtgctccgagcgtgtgttgtgcggtatgccatgtggtcaccaatgtgccgcctccagcaatggagatggctcgacttatatgtggtggctgccagacattattgatgtatgctcgcagtgcaacaactgtaagatgctcatgttgtgacacagtcaatcttgtcagaccagtgagtagcatagctcatgtgaactgtggccagtgccaaacagtgttgatgtatccatacggagcaccgtctgtcaaatgtgctgtttgcaacttcattacaaatgttggcggggtgactcccatgatacctttgccaccaccagcactaactgcatcaagtggaacttcatatatcatcccgtcaatttccgtgccgacgaatcaaccgcggaatgtaactgttgtcgttgaaaacccaatgacagtagatgacaagggaaaattggtgagcaatgttgtagtaggggttacgagcggcgggaaaaagtgacggcatatcacaacccgtatagctttgtccaaactatctaaaaagggtttaagaatacataccttgtatcatactgctgtttggcgatcggctgctcgacggaggaatccccctccctggagagcgtagtggcaaggcagcgctgctttcgccactgcgatcgtgctagaacgagccaaaaaaaaaaacgaagtgcgggtgtgcatactcagagtatatctgtagcttgttaccccttgattcttttgtatgtaatatgggctctgcctgactttcactgtgtgatcaaatttccaagcccgtgggcgctgttgctgcgtgccttgttattagtgaataacaaacattgcaaatggctcttgaaatacagtgtgtgtgtgttttaatctctctgcatttatgttaatcagcaggtgccaccatttgctgttccagactgataatgcagagtttgtatccacgttctttggagaaaacatttgaggctcat

SEQ ID NO: 115282 - DNA, 1633 bp, Zea Mays
cccgtccgttctcacttcaggccccctcgtccgttcgatcgactcctcggaaagagggcgctcatgtggttgcgtattccgcgctgggacacgtatggcaggcgtgcgcttcctacgggtcgtcctcaacctctcgtccggccgtgttgacctgaccgaataaccacccgtctgccgctgtgccgcaccccgcacgagacccgtccttgaggggcacgtcctagatcggtggcgcctgcctctcgccgccgatacggtgcctctcgcggtctcgctccccctcgcaggtcttttggtttttttagttcctccctttgcttcttggaggtgtttgttgccgtctcacccgcagttcttgagacatgcagagccagatagtgtgccacgggtgcaggacccttctgttctacccaagaggtgctccgagcgtgtgttgtgcggtatgccatgtggtcaccaatgtgccgcctccagcaatggagatggctcgacttatatgtggtggctgccagacattattgatgtatgctcgcagtgcaacaactgtaagatgctcatgttgtgacacagtcaatcttgtcagaccaggtactgatgtatgtgtaaacttatcttgcagatccataagcttttgattttccatctatgaacatgtttaaatttcaattttcaagagtaggatgcatgttctatgcaggcagaagagttgttttggcattaagttcccgagcaccgtatttgatactgtattgtgctagtagtttatctactcctagtgtacttaaatcaggataagcttctagcatgttgacgatttttgttcatcctgcagtgagtagcatagctcatgtgaactgtggccagtgccaaacagtgttgatgtatccatacggagcaccgtctgtcaaatgtgctgtttgcaacttcattacaaatgttggcggggtgactcccatgatacctttgccaccaccagcactaactgcatcaagtggaacttcatatatcatcccgtcaatttccgtgccgacgaatcaaccgcggaatgtaactgttgtcgttgaaaacccaatgacagtagatgacaagggaaaattggtgagcaatgttgtagtaggggttacgagcggcgggaaaaagtgacggcatatcacaacccgtatagctttgtccaaactatctaaaaagggtttaagaatacataccttgtatcatactgctgtttggcgatcggctgctcgacggaggaatccccctccctggagagcgtagtggcaaggcagcgctgctttcgccactgcgatcgtgctagaacgagccaaaaaaaaaaacgaagtgcgggtgtgcatactcagagtatatctgtagcttgttaccccttgattcttttgtatgtaatatgggctctgcctgactttcactgtgtgatcaaatttccaagcccgtgggcgctgttgctgcgtgccttgttattagtgaataacaaacattgcaaatggctcttgaaatacagtgtgtgtgtgttttaatctctctgcatttatgttaatcagcaggtgccaccatttgctgttccagactgataatgcagagtttgtatccacgttctttggagaaaacatttgaggctcat

SEQ ID NO: 115283 - DNA, 1275 bp, Zea Mays
cccgtccgttctcacttcaggccccctcgtccgttcgatcgactcctcggaaagagggcgctcatgtggttgcgtattccgcgctgggacacgtatggcaggcgtgcgcttcctacgggtcgtcctcaacctctcgtccggccgtgttgacctgaccgaataaccacccgtctgccgctgtgccgcaccccgcacgagacccgtccttgaggggcacgtcctagatcggtggcgcctgcctctcgccgccgatacggtgcctctcgcggtctcgctccccctcgcaggtcttttggtttttttagttcctccctttgcttcttggaggtgtttgttgccgtctcacccgcagttcttgagcaatggagatggctcgacttatatgtggtggctgccagacattattgatgtatgctcgcagtgcaacaactgtaagatgctcatgttgtgacacagtcaatcttgtcagaccagtgagtagcatagctcatgtgaactgtggccagtgccaaacagtgttgatgtatccatacggagcaccgtctgtcaaatgtgctgtttgcaacttcattacaaatgttggcggggtgactcccatgatacctttgccaccaccagcactaactgcatcaagtggaacttcatatatcatcccgtcaatttccgtgccgacgaatcaaccgcggaatgtaactgttgtcgttgaaaacccaatgacagtagatgacaagggaaaattggtgagcaatgttgtagtaggggttacgagcggcgggaaaaagtgacggcatatcacaacccgtatagctttgtccaaactatctaaaaagggtttaagaatacataccttgtatcatactgctgtttggcgatcggctgctcgacggaggaatccccctccctggagagcgtagtggcaaggcagcgctgctttcgccactgcgatcgtgctagaacgagccaaaaaaaaaaacgaagtgcgggtgtgcatactcagagtatatctgtagcttgttaccccttgattcttttgtatgtaatatgggctctgcctgactttcactgtgtgatcaaatttccaagcccgtgggcgctgttgctgcgtgccttgttattagtgaataacaaacattgcaaatggctcttgaaatacagtgtgtgtgtgttttaatctctctgcatttatgttaatcagcaggtgccaccatttgctgttccagactgataatgcagagtttgtatccacgttctttggagaaaacatttgaggctcat

SEQ ID NO: 115284 - DNA, 991 bp, Zea Mays
gatgcgatgcatgtgggcggccaaagcctggatggatctctgatgcgccatgccgttcttcaggtaattcccgcagtggcatcagatttggctggagaacgagggtggatatctgcatcggtgtcgctgacgggctcacctaccttcacgaacaagtccgcccacggatcgtccaccgcgacatcaaagccagcaacatccttctcgacagaaacctgaggcccaagatagcagactttgggctggccaagttcttcccgggcaacatgacacacatcagcaccagggttgcggggacgctaggatatcttgcaccagagtacgccatccgagggcagctgaccagaaaggccgacgtctatagctttggtgtgctgctgctggagattgtcagtggcagatgccacactgatcccagattacgccttgacgagcagttcctcctagaaaaggtctggacactttacgagtccgacgatctcgagagcatcattgacaggacactgaagcgcgatttcgacaccgaggaagcacgccggttgctgaagataggtcttctgtgcatccaggatagccccaagatcaggccctccatgtcaacggtcgccaagatgctgaagggtgagtgcgctgtgagtgacaggatcatgaggcccggcctgatcacggacgtcatggacctgaaagtcagaacagtagagccggttcagttcagcttatccccgtcgatgtctcctgcaccgagcagctcactggtgtccacggttgcattagctggtggtagcactgttgtagagagcccctgacggagctagttgaaggaccaggtgtctaccaaaaaaactgggctgtaaaattgcaagcaacatgaattattgcttttgttcatgttttagtacattgttgtaacatagattatgtgttctccgaattgttgtaagtcaagattgtgcgctgccgaggcagttgtcgagttatcgcttgacctctt

SEQ ID NO: 115285 - DNA, 1215 bp, Zea Mays
gatgcgatgcatgtgggcggccaaagcctggatggatctctgatgcgccatgccgttcttcaggtaattcccgcagtggcatcagatttggctggagaacgagggtggatatctgcatcggtgtcgctgacgggctcacctaccttcacgaacaagtccgcccacggatcgtccaccgcgacatcaaagccagcaacatccttctcgacagaaacctgaggcccaagatagcagactttgggctggccaagttcttcccgggcaacatgacacacatcagcaccagggttgcggggacgctaggatatcttgcaccagagtacgccatccgagggcagctgaccagaaaggccgacgtctatagctttggtgtgctgctgctggagattgtcagtggcagatgccacactgatcccagattacgccttgacgagcagttcctcctagaaaaggtgaaagagcaatcccaatactagattagtttttaggtactgatccagttcttatgaatacagttgattcgttccaaaaaaaaaatgatgagttctgagagattgacttacttgtaaaagcagatcaaactatcagatttttactaacttgctagcttcaaaatgcctgaagttatggtgctatcagatcttagactttgatttaaatcatctgaaacttctgctgctgttctgtcaggtctggacactttacgagtccgacgatctcgagagcatcattgacaggacactgaagcgcgatttcgacaccgaggaagcacgccggttgctgaagataggtcttctgtgcatccaggatagccccaagatcaggccctccatgtcaacggtcgccaagatgctgaagggtgagtgcgctgtgagtgacaggatcatgaggcccggcctgatcacggacgtcatggacctgaaagtcagaacagtagagccggttcagttcagcttatccccgtcgatgtctcctgcaccgagcagctcactggtgtccacggttgcattagctggtggtagcactgttgtagagagcccctgacggagctagttgaaggaccaggtgtctaccaaaaaaactgggctgtaaaattgcaagcaacatgaattattgcttttgttcatgttttagtacattgttgtaacatagattatgtgttctccgaattgttgtaagtcaagattgtgcgctgccgaggcagttgtcgagtta

SEQ ID NO: 115286 - DNA, 1508 bp, Zea Mays
cagaaacatgtctcttctctatcttctctaactaccttccgagaatttcttgctgggcgctcgatgctcttggaccctttatgcagacttcatcccgtgacaagtcttccactgatcagtttaatctgcaggtagataccagcatctcttttccatatctgaaggcctgaattccaaacaagagagctcgaaacaacagtaatgggttgcttccctgtgttctggaggaagaagaattccagaagccagattgtgcaacatgaccaagacatcccaatcacgggcaatgtgaaaatctactcgtcaaaggagctgagaaaagccacaagaaatttctgcccgggaaacatgcttggagagggttctttcggccgggtctacctgggaaagttgaacaagggcgagaaagtggccatcaaggtgctctcctcagagtcgaggcaaggaacaaaggagttcctgaacgagttgagtgtcatatccaacataactcaccacaacctagtcaagctgcatggctgctgcgtcgacggaggccaaaagatgctggtctacaattacgtggagaacaacagccttgcacagacccttctcggtaattcccgcagtggcatcagatttggctggagaacgagggtggatatctgcatcggtgtcgctgacgggctcacctaccttcacgaacaagtccgcccacggatcgtccaccgcgacatcaaagccagcaacatccttctcgacagaaacctgaggcccaagatagcagactttgggctggccaagttcttcccgggcaacatgacacacatcagcaccagggttgcggggacgctaggatatcttgcaccagagtacgccatccgagggcagctgaccagaaaggccgacgtctatagctttggtgtgctgctgctggagattgtcagtggcagatgccacactgatcccagattacgccttgacgagcagttcctcctagaaaaggtctggacactttacgagtccgacgatctcgagagcatcattgacaggacactgaagcgcgatttcgacaccgaggaagcacgccggttgctgaagataggtcttctgtgcatccaggatagccccaagatcaggccctccatgtcaacggtcgccaagatgctgaagggtgagtgcgctgtgagtgacaggatcatgaggcccggcctgatcacggacgtcatggacctgaaagtcagaacagtagagccggttcagttcagcttatccccgtcgatgtctcctgcaccgagcagctcactggtgtccacggttgcattagctggtggtagcactgttgtagagagcccctgacggagctagttgaaggaccaggtgtctaccaaaaaaactgggctgtaaaattgcaagcaacatgaattattgcttttgttcatgttttagtacattgttgtaacatagattatgtgttctccgaattgttgtaagtcaagattgtgcgctgccgaggcagttgtcgagtt

SEQ ID NO: 115287 - DNA, 112 bp, Zea Mays
gagacactttccactgctgctagtttatgtttctttccaaaaagattattgttcattaaggatctttaacagatgtttttgttattatctcgagacctaaatgttcatcgac

SEQ ID NO: 115288 - DNA, 2032 bp, Zea Mays
gtggttccactcctcgccggcgtggcttggtttccgggataccacagagttggcggcgcgcgcggagttcgctgcggaggaaggtttgttctatgaggacgacagtagggcgccggccggcggcccggcggctgaggggctcgagattgccaagctcgggatctcgtccaagatcgtcgaaaggctcgccagcaagggcatcaccaagctgttccctatccagagggctgtccttgagccagtaatgcaaggaagggacatggttggtcgtgccaaaacggggactggtaaaactttggcatttggaatccccataatggatgcaattattcgtcacaacgagaagtacaagcctggtaagtttccattggctattgtcttggcgccaacaagagaacttgcaaaacaggttgagagggagttccttgattcctcccctttggaaacgctgtgtgtatatggagggactccaattatgcagcaaataaaacaacttaattatggtgttgatgtggtcattgggacacctggacgtgtgattgatctgctaaaaaggggtgctcttagtttggcagagatccggtttgttgttctcgatgaagcagatcagatgttgtccgtcgggttcgataaagacgttgaaacaattttggagagagtgcccccgcaacatcaaacattgatgttctctgcgacaatgccaacatggatacggaagctcacacagaagttcctcaacagtcctgttacagtggaccttgttggtgaggatgaccaaaagctggctgaaggaattagtctgctctctgtctcttcggaaaaccgtgaaaaaccagctgttcttgggaaattgattaaggaacatgcaaaaggtggcaagtgcattgtttttacacaaacaaaaagggatgcagatagattgtcacacaatatgagtcgaagtttccaatgtgaggcgcttcatggggatatctctcaatctgaaagagagaggacactggcaggatttcgggatgggcggtttaatatattgattgctactgatgtcgcttctcgtggattggatatcccaaatgtagatctggtgatacatttcgaattgccaaattcgtcagagatattcgttcacagatctggccgaactggccgtgctgggaagaagggcactgcaattgtgatgtacaactatgaacaaagtagagctgtgcgggtcattgaacgtgacgtaggatgcaagtttacggagcttccaaaaattaatgttgagggatccgacttgctgggtggtggatttgactccttcgggggtggaggtggtgggtatggtggctcaaactatgggcgctcacgagggggctttggtggacgtggcggtggtggtggttttggccgatcaggcggtggaggatttggcaattctgggtttggccgctcaagtggtggatttggtgactcgggatttggccgctccgggggtggagggtttggtgactcaggatttggcaggtcaggtggtggcggaggattcagtgactcaggatttggccggtctggtggcagcggtggaggattcagtgattctggttcaggtcgtttcggtggcggttttggtagttctcgctcaggtagttttggtggctttggcgacaaggactcacgatagacctataactaataacagctatagaattatggacatcctgagccagattcagcttggtcatgcggtatatcacaaaggagatcgagattgttgcggaccctatccatgaacacctcggagagggcataaggctgggtgaggcgggtccttcgataggcaaaaataatcacgtgccttgtttattagtgttcttttctgttcgttttttcatttgcttctgcaagttctagctctagatcatacctgtaaaatatgcagaggtcttttgcggatgatattcttatatcgtttttggtagtcgcgctgtactgtaccgtgtgatgattatggagctgctttgtaggccgtttttaacctgatatgatgatc

SEQ ID NO: 115289 - DNA, 510 bp, Zea Mays
tggtaagaaacgagcgagtttttgttttctagcgactttttttgttttctgtatatgcatccctctcaaattctgtcttggatcgctcggcacttggttctgcaccattattcagttcagtacgtatgcacaatggtatttgttacagaatatattttattgtatacctattaagtgtgtgtttgaatgcactatatctaatagctagttggctaaaaaaactactagtaaaattaactagctataaaatatgtagctaattagagcatctccaagagactctttatttttaactctctatttgattctttatttgtctctctataaatattaagctctatatataacacttcattccaaaagactctccaacatacaagttagctttgctagcgagagttgctagccaaatttagctagtgagagagtcaatttacagagtcgggtaacttggcaagttaaatgattagtctgttggaaagctattttgctattaagtagctaaaattt

SEQ ID NO: 115290 - DNA, 1717 bp, Zea Mays
agtcgagccatcaccacctcaaccgacggctcgccgctctcctactcctcccaaccctcccgtcccaccacctcccatcacccgccagctgcagcagctatggcgtcgcctccgcccgacgtggacctgggcaagctcagctacgagatcttctcgctgctggagagcaagttcctcttcggcgccggctccgtgccgggcacgccggggcggccgggccccggcgaggacagggacaggggcagggtgcgggtgctggcgatcgacgggtgcgggccgggccccggcgacgcgctgctggcggcggccgcgctggcgaggctggaggccgcgctgcgggcgcgcgcgggggaccccgacgcgcgcgtcgccgacttcttcgacgccgcggccggggccggcgccgggggcgtgctggccgcgatgctgctgctgcggggcgacgacgggagggcgcggtacacggcggccgacgcgctggcgttcgtggcgtccagcctcgggaggcacggcgggtggggcggcggcgtcggcggcgggctccggagcaggtgggccgcgctgttccggcgcggggagaggccgtcgccgctgcggcgcgtgttcggggacgccacgctcagggacaccgtggcgccgctgctggtcccctgctacgacctggccacggcggcgcccttcctcttctcccgcgccgacgccgtggagagcgacagcttcgacttccggctccgtgacgtgtgcgccgccacctgcgccggtggtggtgccgcggcggccgtgcggtcggtggacgggcgcacggccatcgccgccgcgtccggcggcgtcgccgccatgggcaaccccaccgcggccgccatcacgcacgtgctccacaacaagcacgagttcccgctcgccgccggcgtcgacgacctcctcgtcgtctccatcggctcgggatgctccgccggcgccgcaccttccgccggctggcgcacgcccatcccgccgcgctcgccgtcgcccgccgagatggtacgcctcaccgccgagggcgtcgccgacatggtcgaccaagcggtggccatggcgttcgggcacacgtgcgggcgcaactacgttcgcatccaggcgtcgtgctccgggagaaaggcgctgcggtcgctggacgcgaagaaggcggcagcggcggcggacggcatgctggcgcagcggaacgtggaggcggagctgttccgggggcggcgggtgtcggagaagtcgaaccgggagaagctggacgcgttcgcggcggagctggtgaaggagcagcagcggcgggcgcgcagcccgggcctgcccaccgtggtgatcaggcaggcgcgccccacggccacggccacgccgcgactgtcgtccgccaccaccgcctcctccgccaccgtccggaccgcctccaccgtgccgtccccggcgtcgcagggctcctaccagcattagccgccgacggcggccgtcgtccgtcctgagttttgtacatgccgccgtggacagaggagtgcatatgcgacctccacccctccctcctctccctctctctttttttacccacacgtcgatggcgatgagccactgatatgtgggtccagccgtccaagacagagctaaaacgtggtgaaagtaagttataggatggatgtagtaacttatttattatatatgccgcccaagtttgagaggaaacaaaaaaaaa

SEQ ID NO: 115291 - DNA, 90 bp, Zea Mays
gtaagtagaactgcgcggccccaccgcaccggcatcccgtcggtcacgccgccacacgtgcgctccaccgctacaacactgacacgatgg

SEQ ID NO: 115292 - DNA, 492 bp, Zea Mays
atgcttacattggtgatcaagacgcctaggtcttcaccaccatcgcttagctgttcgcctctgcgtcagctcaccggacctgcagtccgtcaggccactgtctacgctgtgctcaaggtcctactcaccgttcttctcgtcgacagcgccagtcgtgtctcccgctacaccgacactttttctccatcgctcgactccgtgctcagcgctctcaccatcattactgttcctctcctcgccggagttcgccgggcttacgctcaaccccgccaccgtgagatttacctcgcctccaaaccgtgttcgccgcagcccagccatcgtctaccatcacgctcggctccagctagttgcgctcctcgcgccaaccctgattccaagcgccgccacaacctcgtcctagattcgaggcatcacatcgtcgctctgctgcataggcgcccatgtcgtcgccttcctgccgtctttgctcatgtgccaggtcttaattaa

SEQ ID NO: 115293 - DNA, 2046 bp, Zea Mays
atggaggcggccgccgacctgctggagtacgagctgcagagggagatctccggcatcttgattcagaactacgtctgcggtttgcgccaggagtatgagatgaagttgtgggagcaccggaactgcatcagcgctctgaacaggaactgggcggaaaaggtttctgagatcacggcgctgcgagacgagcttcgcgatgttctctgtacttctgaacctgctactcatcatcaccatcaccgctcccacgggagtctagaagacgagacgatcattgcgaagacggaaggtgacagtgagcctccggtaacagagaaatcttctgagtctacgctcgagatcccagatttttccctcctgaagcacatgcacggcgaagaaatcacgagttttctcaggacagaatggctaaagctgcgaaggcagcacgagtccgagcttcacgagaagacagaggagctgttcagggtgaaaagggaacacgcaaaggagaaagcttcgttgcctcttaagaaagagcgggagcttgagctccacaggtcgaagctgctacagaccatcgctaggctgggcgagatagcctccaggaaagaggaatcttgctctgactgcaacgaggatgaggagatgtgcagattgaaggacaggatcggcgtgctactacaagaaaacaatcgtctccgaggcttgctggctgataagaagcaggaggttaaacatctctctttgcaagtgtcagattcaaggagcaaaatagcccagtactcactgccagagtcaaaactgtcgaataattgtgagaagcttagggctgaacttgaagattttaagatagagaggcacttgaacgatttattggactcatctgtattcagggaagtttgtcacaattatgaggatcagatatgtgatttgaatcaggagggatccttcctcagagacctgcttgatgaaaaagaagaccagctaagtatcatgtacgaagatagacagaagctcaagcatgaaaacgatcaactcgtatcgattgcagggtcaattatacagcatcatgaccaagccaacttggttcatgacgagcttatgatatataaggagaaattgtgcgagcaagaacttttgatattggagtcaaagggcgaatataactccatgaaaaggtgcctgtatgaggctatgcagcaaatccaggtatgcaagcaagaaattctaggcctgactgagaatttaacttctatgtctattgctttggagaaagccaaggaacagaatgcctcacttgacgccacaatccgagagatgaagaaaacaccagggcaaagcattggcagtcattgggggcaaactggggaatttgatcttaccagtatggagaagttatcaaagacatgtagtgacttcgaaagcagattagtagaaacaatgaaaagaaatgaaaccaggttgactagtatagtttgtcagtttagcccactggtgcagcaagttgctctcttaaggaaaaaagaattctggtataagcaaatactcgagattaaatgctcaaatctttggaaagcagaagccgaggttgatgtacttggtgatgaggttgacacccttctaagtgtgctgggaaaaatttatattgcactcgaccattattcgccagttttgaagcattaccctggggtaagacgatacttccatggcccttctcggtgcgcggacgccgaaacggccacgtgcgctccccggagcgggcgcgcggctcgaccccggagcgggcgggcgagcggcctcggccaaagggctccccaggcgcggctgctccctggcggcgggcgcgtccggccacgacggcgcgggcgtgacccggccgcgggctcgggcgccggccacggcggcgcgggcacgacccggccgcgggtggtgcagcagcggctcggcgcggtcgaactccctggcacgcgcatcgcctcggcggcggctgcgtccgtactctctaacagcagcggtctggcagccggcggcgcctacgatgtggtggcggtggtgtgcggttag

SEQ ID NO: 115294 - DNA, 2904 bp, Zea Mays
cgcactattcccaagctacagccctaatcctgtctctcctcatcttttctccctctgccctctttcgcaagatctctccttcgtattctcttttcgcttttaactccacggcagtccctcttctgtcacgagccaagccgagcgcagccagcaaaagagagcgacgccgcctgcaccaaagctcggattcccgtctattttacccccgcccccgccgactcaccgtcgcaagatccatccgcaggtgtcggcggcccgcggcccgtgcgaaagatggtgcctttcctaggctccccagtgttctgtcatcgtttcttggcccctatctaaagcggcggtttccagggagctgccgtccccgcccaattcagctgaggtggcggcaagtgggtttagggctcgattcagtgtgttgggtcgtgtctgactctgacccggtggggagcggtggttcttggctagttcttgagctggttgcggcgcttatccctcttcctggagttgttggattggcttgggggaagcagattcttgccaccgagggtccagcctagcgagctgctgcttcggttatcgtagaggagttttccttttgtgttcggttggggggagagagatggtgctcttgcgttctctggattgagcattccgattggatttcggcgtttcgtgcggcttccagtccatggaggatttggggctgtggaaccaggcgtggatgtgggtgctgtcccagaagcacatcctggcgtgggcgcacacggcggcgtgcggcagcagggagcgcctcgccttcttggtcgatcgccactggccggccgtgtcccggggctgcgccacctcctcgcgcctcacgctcgccgcactgcggcaatggcgtgggtgtatggcgcgcggggtgctggcggtggcgagcctcggccctgccgccgtcttcgtcatcctctggagcttcttcgtgtgcatgacctcgccggcgtgcgccctctacgcgcttcttagcctgggtgctgctgctgcagttgttcactatatgggctatacacctggccttctcattgttgggctgtttggcatattgattatgtggatgtatggctacttctggattacaggaatgcttctagttgctggaggttgtatgtgctctttgaaacatgctcgatatgtgacacctgttttgacgtcatatgctatttattgtgtggctgttcgtgttgggtggctcggagtcttcttgacattcaacctttctttcttgacaaatgatcttcttaataagttggcgcaaggatacgaaggaagcactgaagaaagccagtttgaagacatgaaggattctgatccagttatggatgagttctatcgtagttgtgaattcccatcggttcctgacagtgaacctgagaccgtgtcttctgcgaaaccatactgctcagcgcccatccaagatgtgttacatgtacaaaaagaagaacctcctagtaaaatagtgaaatctgattctagttcatcggatgagattaagaggataatggatggttcaaaccattatgaagttttgggtgtgcctcgtaatagaagcattgaccaaaaggccctgaaaaaagaatatcacagaatggtcctgcttgtacatcctgataaaaatatgggaaatccattggcttgtgaatctttcaaaaagcttcagtcagcttatgaggtcctctctgatttcacaaagaaaaacagctatgatcagcaactgaggaaagaagaatcacagaaaatgaccccaagatcacgtgctgtctcgcaacagagtggtgtagagtttctctcagaagagtccagacgcatacagtgcactaagtgtggtaatttccatatatggatatgcacgaagagaagcaaaacaaaagcaagattctgtcagggctgcgatcagtttcatcaagccaaggatggagatggatgggttgaaaccagattttcatcctccatcaagatggaaataccacgagcctttgtttgtgccgagagcaaaatatttgatgtgtctgagtgggctacctgccagggaatggagtgtaagcctaacactcacggtccaacttttatggtaaacatggtcggcgcagataggatgcctcagagatcctacagttcccggtatcccttcagcttggacgcagagatgatccccgacgatgaattcgagatgtggcttcagcaggcactggcgtcaggcgtcttcgctgacagcccgaagcgcaggaaaagctggagcccgttcaaactgcctcaaaagggaattaaaagttggcgaaggtcgtcatgagggtgtggcattatgcagcagctggggtctaggcggctacaggattggaaagaaggtgataatacaaggcttcaagggtgtaaatagactgaccaacaatttgcctggatggataactaatttttgttccgaaggagaaagaaggtgaaaaagaaacactctgaacgaacaggtataaccccatgagttgaacttggttccctctgcagcatcccacgagtttagctgtgaaccagtgtgctgttcgtcctatgatcaaaataccggtggatctttggtgtattagtttcagtagtttaggaatctgacctcgaagatttgccgaaacatcgttcctaagacggttgagatatgaagggatgaaaagtagtatttctagcattgtcattctgtaggagggaagggaagaaggttgaaagtgatactggagactggctgtaaatacaccagaagttcccatctgtggaattactgcttgtaacattgtatacactaacccggtcaaaaacttccataatccaggtctgtgctgtgatatgtggcagcatgacgttctggtgataatagagatccaattctct

SEQ ID NO: 115295 - DNA, 3292 bp, Zea Mays
tgttgcagctgtttggactgctgcagctgcaatccatagagagaaaaatactgtagaagccgcagccgcagccggattgcagccgcagcaagccgcagcgaacaagccaatagaaaaaaacccgaaggtttcataaaagttataaaaaaaccggatgaaagagagagagagagtgaccagaaaacatctattgctgctgcagagcagcagtactgtactgctattaaacaagcccagagctctgctgctactgtcctctcctcctcctcactccaccactgcccactcccatcccacgcgagcacaaccaccacctactccctactccctacactactccccccgcaagcacgcccagcgccatggccatggcggcagcgcgcacgggggcctgctactccgcctccgcttcctctcctctcctgcactactagcgggtccgctggcgacgatggcggcggtggcgagcagggagaggctctccccgggcgccgcgccgcaggtggacgcgggcaagtacgtgcggtacacgccggagcaggtggaggcactggagcgcgtctacagcgagtgccccaagcccagctcgctgcgccggcagcacctcatcagggactgccccatcctccgcaacatcgagcccaagcagatcaaggtctggttccagaaccgcagatgccgggagaagcagcgcaaggagtcctctcgtctacaaaccgtgaaccggaagctgagtgcgatgaacaagctgttgatggaggagaatgaccggctgcagaagcaggtttcccgtctcgtctttgacaacgggtatatgaagaatcgactccacagtccttctgtagccaccaccgacacaagctgtgagtctgtggtgacaagtggtcagcacaaccaacagcaaaacccagcagttctgcatcctccacaaagggatgcgaacaacccagcaggtctactcgctattgctgaggagacattggcagagttcatgtccaaggcgactggaactgctgtcaactgggtgcaaatggttgggatgaagcctggtccggattccgttggaatcatcgctgtttcgcacaactgcagcggcgtagcagcacgagcttgcggccttgtgagccttgagcccacaaaggttgctgagatccttaaggatcgtgcatcgtggtatcgcgattgtcggcatgttgatgtcctccatgttatccctacgggtaacggtggaacgattgagctgatctatatgcagacttatgcactgacaactctcgcggaaccacgagacttttggacgctccgatacactagtggtcttgacgatggcagtcttgtgatctgcgaaaggtcattgactcagtccactggaggtccttctggacctaacactccaaattttatcagagctgaggtgcttcctagtggttatctgattcgaccctgtgatgggggaggttccatgatttacattgtggatcatgttaatctgaatgcttgtagtgtgcctgaggttcttcggccactctatgaatcccctaagatactggcacagaagatgactgcggcggcgttgcgacacattaggcaaattgcacatgagtcaagtggtgaaatgccctatggtgctgggcgacagccggctgttctcagaactttcagtcaaaggctcagcagaggcttcaatgatgctgtgagtggctttccagatgatggctggtcttgtttgttgaacaccgatggtgctgaggatattacagttacaatcaactcatctccaaataaacttgttgggtctcatgtcagcgcttccccattattttctgctatggggggtggaatcatgtgcgcaaaagcatcgatgctgctgcagaatgtgccacctgctctacttgtgcgatttttgagggagcatcggtctgaatgggctgatcctggcatcgatgcttattctgtcgcctctttgagggccaacccatacactgttccaggtttaagggctggtgggtttatgggcaaccaggttatactgccccttgcacgcaccttggagcatgaagagtccttggaggttattaggcttgaaggacatggctttagccatgaggaggtgcttatgtcccgggatatgtttcttctacagctgtgcagtggcgtcgacgaggatgcacctggtgcgtgtgcacagcttgtctttgctcctattgatgaatcttttgccgacgatgcaccgttgctgccctcaggcttccgtgtgataccgcttgatgctaagacggatgtgccaacggccaccacacgcacgcttgaccttgcctctgcgctcgaggttggatcaggtggaagcggcatgcgcgcttcatgcgatggttccggcacgtgcgccacgagatcggtcctgaccatcgccttccagttctcgttcgagaaccaccttcgcgagagcgtggcggcaatggccaagcagtacgtcaggggcgtgatggcctccgtgcagagggtggccatggcgatcgctccttctcgcctcggttcgcgtatcgaactgaagcatccgccgggctctcccgaggcacttgcactagctacgtggattggcaggagctacagggcgcacactggaacggagatccgctggtcggacaccgaaggcgcggactctccactgatgctgttctggaagcacagcgacgcgatactctgctgctctctgaagccgccggctttcacgctcaagttcgccaacagcgccggcttcgacatcctggagacgacgatggtgaacatccaggacctgccgctggaggcggtcctcgacgaggagggccagaaggccctgtccgcgcagctccccgcgatcatgcagcagggcctggcgtacctccccggtggcgtgtgcaggtcgagcatggggcggcaggcgtcgtacgagcaggcagtggcgtggaaggtggtgggtgacgacggcgccccgcagtgcctggcgctcatgctcgccaactggaccttcatctgaggctcgcaacatcgctcggcagcgccagaccggatgccgccttttgccctactacgtatcattagttgcttttccgttgtgccgcctgtgttaagaatttgtgtactgtgtggatgatcgagaactgactctgtttgtgtgtgtgcgtgacaaacaactacaacagctgtatgcgtgcctggtcgtggtctcgtctccccggcttgtcgccggcgacattgatcactgttgcaggttgcagtattactatttgctagttctgcttgctcgatcagt

SEQ ID NO: 115296 - DNA, 285 bp, Zea Mays
atgaattcaagtctccacacttttgcggccaccaaatttgaattccattcaatgttttcctgtacaacaaataggagaaaactagacatagcaaaaagctccaagcagcacgtggatggtctcgaagctgcccttgtgcttctccctgttcttgatcactcctacacgcccggtgttcctcccgccggttaccatgaccacattgtcgacatcaaatttgatgaagtccatgatcttgttggtctccagatcgatcttgatggtgccatttctgcaaacttttag

SEQ ID NO: 115297 - DNA, 2015 bp, Zea Mays
atgagtactagagatcgcattagaaaaaggagggatgatgatgatctcatgcttttaattctccctactctacatctcttgggctatattggagatagtgaaaaaaaagttgcgacatacatcaacgctaactggagaggaaaaggttagggagctacttgaaggccacatcaagaattgtaggacatcatttaggatggaaccttacatctttaaagccttggtcaattatcttataagcgaagggttggttaaagacactagaagaatcaaggtcgaggagaagcttggtttctttttatatatgattagtcacaatgcgtcatttgaggatctccaagtattctttggtcacagcaatgatacattccatcgtgtgatcaaacatttctttgacatagttatccctgccctcagcatgcggttccttaaacctccctccaatcaagtacatgcaaaagatcgcgaagataaccgattttacccttactttaaggtgatttcttttaactcttatgtgtcaatcttacaaggtactcaaccttaaatgatcttagaagatcatttcttttttatgttgaataaatgtgttatttttatgttgtagataagatgtttagaggttctcctaagatagtagctttatctaaagctgctcaaaagaaggcttctcctaaagctgcaaaatcaaaaaaatgtggcggtggtattgagagagctgcatggaatgttgaattagagaagagtcttgttgacttgttgtttgaacacaatatgcctccacatagggctcaaaatggatggagtccagatgcttggaataaaatagtttctgaattccacgagaagcatgaatatgttacattcaacaagatccaaattcaagaaaaggagagagaattaaaaagggaatacaagatattgaaggaggtaagaaaacaaagtggagtttcttggaatgaaaaaagatgcatgatcattgctgaaccaacgatatgggacaacattatcactacatttcctagagctaagaagttccgcaagaagtcttttcctctctttgatgccttgggtgaattatatgatggtcacattgcacaagggacttggaacattacatctactcaaccactacaaaattctgatgaaggagagaaatttaaaaccatagaagtggaagatgaagatactaatgaaccacaagtagatgcgagaatagaacaagatgaagatatagtaattgttgaaagggttgaacagaggttacctaaaaggtcaggtgcaccaactgtcaatcaagagaaggagacaaagagagtgaggaaagatgcactagaagggctgatagggaggtaccttgatgtgaaaacaaagcaagttgcagatgaggccgcacaatcaacaaaagagaaggaagttgctcaaggtaatgatttttctatcaagaggtgtatttctgttcttaagactatggatatcacaagagatgagaagatcaaagcagcgggggtgtttaacacaccaaattacagagaaacatttatttgttttaatgatgatgagccagaagtcgctctcctttggctaagggggaagatggataaactctaaagggtccaaggataaatatattatcaacatctctagaggaagagaaagtcaagtcacatcttcagtctgtgcaggctgtttattcagtttcagtcaataaggcttagcttgtagtgtgtgtggtctgaagcttgcatgtgcatgtagagactgtttcttcggtctgtgcaggctgtgcagttttcagcttgtttcttcagtcgtttcagactgtgcatacatgtgctcgtctctactttgtcaaaaaaaaatagtgttattcagactgcagttttcagcttgtttgttgattgagtttattcagttttcagtttgtagatagcgttattcagttttcagatagcgctattcagtttccattttttagattgttctatatggaataaacgaacaaatatttgttg

SEQ ID NO: 115298 - DNA, 106 bp, Zea Mays
tttttttaaatccttgaaaccattccacttgtttgcctctaccataccgaagcaaagatgcacaagcttaatgaatacttgtgagcatcgtcggtcagtgttgtgc

SEQ ID NO: 115299 - DNA, 1518 bp, Zea Mays
cgccaccactctgatgcaggtcaccagcgataggccccaccggccaccacccagcctcttcccctccacccctgctctcaaatttgagacccaaactatcccgtcgtcgccagtcgccacgccgtcggccacgccccgacgaccaacacctgctccctccgccgccgcccgtgtcctcccgctccgtccgcgcgccgccctcatacctccaagcgcggttggatctgctctgggtccaagtccgctcgatcctcctctcgtcggaaactttatgtgtgccttcatccacgaagagctgaagatatcacatgactagttgcagttagtgtggcttttctccctgcttggtcctgattgtgtgctttgccttgcaaaggaaggaatcatgacctctgttgttcagagcgtttcaggtgaccacagggctgaggatcaaagtcatcagaagaagcaaactgaacctggggaccagcaagaagccccagttactagttcagatagccaaccaacagtgggcacaccatcaacagattatgtggcaccctatgcccctcatgacatgagccatgcaatgggtcaatatgcttatccaaatattgatccatactatggaagtctttatgcggcggcttatggtggacatccattgatgcatccaacattagtcggaatgcatccggctggcttacctttgcctaccgatgcaattgaagagccagtgtatgtaaatgcaaagcaatacaatgccatattaagacggcgtcaatctcgggctaaagctgaatcagaacggaagcttgtcaagggccgcaagccctatctccatgagtcacggcatcagcatgccttgaaaagggccaggggagctggaggtcggtttctcaattcgaagtcagatgacaaggaagagaactccgactcaagtcaaaaagagattcagaacggagttgcgccccaaaagggtggccaaccgtcaacccctccgtctcccaacggtgcgtcgtcagcttatcaggcgcctagtcgtgaatgatgattcggaactcacaactgaagagattttagtccctgacgctagttgtggcagcagctttgtacagtaagtgctagcgggcagcagcgaaatggtgtcatagaaaaacgttgacgagtcagacaggttttggagtcttggttttttttcctctgtttattttacctgtctgcaattttagtagctttgtgtcccttcccctggatagttttttggtcagcgcttaagaaagtttaagggctgatttgttgatcggggatcccgaggggatccatgggagaaaaatcgtcttgctattcaaaattgtattgtaaggggattcctcgcctatggatcctctcgagatccctaaccaccaaatcagccctaagtgtgtagcatattggtctattgtttgcttttgctttgacttggagatttgggagtggagttcataaccttaccggagatttgggagtttaatgatgtgtttggtttgtggagtc

SEQ ID NO: 115300 - DNA, 2293 bp, Zea Mays
acccgatgccgatggcgatgggggaggactgtacggccgagatcgcgcacacgcgcgtggcgcgccactataaaatgccacaacccccgtggcgtggacccatcagatccatcaacacccttaccctaacataactaagtaaccgcctccctcctccactcaaccatggcggcgtctggcgacggcgacgtcgacatcgacgggtgctgcgggggcacgctgttcccagagaagtcgttccggagctggtcggcgtatgggcaggcgctgctggagacgggcccgcggctgcgcgaccgggtgacgacgcggtccatggacgacacggaggtgaacgaggtccgcggccggagcggcgccgacatgcggcggacgctcacgtggtgggacctcatctggttcggcatcggcgccgtcatcggctccggcatcttcgtgctcacgggccaggaggctaagaatgccgccggccccgccgtcgtcgtctcctacgccatctccggcgtctgcgccatgctcgccgtattctgttacaccgagttcgccgtcgagatccccgtcgcaggcgggtcgttcgcgtacctccgcgtggagctcggcgacttcatggcgttcatcgcggcgggcaacatcctgctggagtactgcatcggcggcgcggcggtggcgcggtcgtggacgtcgtacttcgcgacgcttctgaaccaccacccggacgacttccgcgttcacgccgccgcgctcgcggagggctactcgcagctggacccgattgcggtggcggtgacggcggtgatctgcgcgctggccgtgttcagcaccaagggctcgtcgcgcttcaactacgtgctctccatcctgcacctcgccgtcctcgtcttcgtggtcgtggcggggctgaccaaggccaatgccgccaacctcaccgccgacttcgcgcccttcggcgcgcgcggggtgttcgcggccgccgccgtgctcttcttcgcctacatcggcttcgacgccgtgagcaccatggcggaggagacgcggaaccccgctaaggacatccccgtggggctcatgggcgccatgacgctcaccaccatcatctactgcctcctggcactcgttctctgcctcatgcagccctacaccgagatggaccccgacgcgcccttcagcgtcgccttcaccgccgttggcatggactgggccaagtacatcgtcgccttcggcgcgctcaagggcatgacctccgtgctcctggttagcgccgtcgggcaggccaggtacctgacccacattgcgcggacgcatatggtgccgccgtgcctcgcgcaggtgcaccccaggttcggcacccccgtctacgccactatcgtcatgatggtggccaccgccgtcatcgcgctcttcaccaacctcaccatcctctccaacctgctctccatctccacgctcttcatcttctcactcgtcgccatcgcactcctcgtccgccgctactacgtctctggcgagacggcggcctcggaccgcaacaggctcgtggcgtgcctcgccgtgatcgtcgcctcgtccacggccaccgccgcgtactgggggatgacgacctccggtggcggcgggtgggtggtgtacgtggtcacttgcgccgcgtggctcgccgccacggcgtacctgcaatggggcgtgcccaaggcgcgcgcgcccaagatgtggggggtgccgctcgtgccatggctaccgtcggcgtccatcttcatcaacatcttcttactgggctccatcgacggcgcctccttcacgcgcttctggatatggacagcggcgctgctcgtctactacttcttcgtggggctccacgcgtcctacgacacggccaaggccctcgctgtcgagaccgaggcagcacgggtggaggaaggtgcgcgcaagcctaccgccgcgaacacagcagacggcggctgccgcttcggctaaactaaacttaaactaagtagccttagagcttagctggttaatgaaattatctgttattactctatctatatatgattagtcgacgtgcatgtacaaagaaatatactgctagcttaataagagggtgtttggtttctagggactaatgtttagtccctacattttattctattttagttcaaaaattgttaaatttagaaactaaaactttattttagtttctatatttagcaatttataaactaaaaaggaataaaatgaagggattaaacattagtccatagaaaccaaacaccccctaagttcacagtgttgaatttcgaag

SEQ ID NO: 115301 - DNA, 3969 bp, Zea Mays
aagagaggggaaaaaagaagaaagaaagcaaggagcaccgcaccactccactccacttccctcctcgatccagccatggcggcctaggccccctagggttccctgtcagcccccacccaggcgcctcctgccgcttcctccgctcccacccggtggtcgcgctgcccgattcggccgccggcgtcgaatgggaggcgacccgatgctcgaagccggccgttgccgcgcgctgccgacggagattccctgagctcggcggcgggttcccgtgctcgccgagcgatgactctcggcgccggcgctgcccaaggcactgggtctagggcgcgtggctggttgggagcgcgccgtgcgtgcaatgggggatttaaggcggttctgtagagtcgccgcggcggtcttggttctgcgagcgcgtggcctgcgctcgtgaaggtagggctgtctagctgctccttcgtctgatgagctcagcttctgcgtcccgcctcgttttgtgcccgcgtttgctccggcggctgcccaaagcccagcggatcgggccctgctcatttcggcgcttctcttcggttctttgtggaaagggaggagctgtgaggtgttgcttggcgagggtgcgcagctgaggattccgggcatgaggtcagcaatgacgcgcatttgtcgcgacaggccggaattcgagtagcggtttcttgaagtggattggctgctgctgcgtgggaagggggaagcggcggcatcaacagccgcagaggaaggcttactctgaagcggaggggaagcaggctggcattgctactgggagcatggcgaggtgctaaggacgtgcaggttccgcaatcaccgcatcttggtgttcttgtttcaggtcgtagtgggagatgaacctctcaccgcccaggatgtcggagccatcgcttgaaagtgacggggaacaaaggtgtctgaactcggagctatggcatgcatgcgcagggccccttgtgtcccttcctgtggttgggagccgggtcgtctactttccccagggccatagtgagcaggttgctgcatcaactaataaagaagttgacgctcagatcccaaactacccaaacctacctccacaattaatctgccagcttcataatgtcacaatgcatgctgatgcagagactggagaggtttatgcccagatgacactgcaaccattgagcccggaagagcaaaaggaaccttttcttccaattgaattgggtgctggtagcaaccagccaactaattacttctgcaagacgttgactgcaagtgatacgagtacccatggcgggttctctgttccacgccgagcagctgagaaagtcttccccccattggatttttcacaacaccctccagtgcaagagctggttgcaagagatctgcatgataatgagtggaaattccgccacatttttcgtggtcagccaaaaaggcatctactgacgactggttggagtgtttttgtaagcgcaaaaagactagtagcaggggattctatcatatttatctggaatgataataaccagcttctattgggaattcgtcgagcaaatcgtccacagactgttatgccctcttccgtgctatcaagcgatagcatgcacattggtctccttgctgcagcagctcatgctgcagccacaaacagtcgtttcactattttctacaacccccgggccagcccttctgagtttgtgattccactggctaagtatgtgaaagctgtctaccacacacgtgtgtctgttggaatgcggtttcggatgctttttgagacagaggaatcaagcgtcagacgatacatgggtacgatcacatgcataagtgatctggactcagagcgttggccaaattcacactggcgttctgtgaaggttggttgggatgagtctacagctggtgataaacagccaagagtttcactctgggagattgaaccactgatggcctttccgatgtacccaactgcctttccattaaggctaaagcgtccgtgggcttcagggctacctatgttcaatggtgggaggagtgatgagttcgctcgttattcttctctcatgtggctccgagatggaaacagaggggctcaatcactgaacttccagggacttggagcatcaccatggcttcaaccaagaatagattatccattattaggtctgaagctagatacttaccagcagatggctgctgctgcactggaagaaattagagctggggatcatttgaagcagatatcttctctcctgccagtgcaacagccacaaaatttgagtggtggattagatcctttatatggaaatcctgttctgcagcagatgcagttccaatctcagcagtcatccttgcaagttgtgcagcaaggttatggtccaaatgcaagcgactctgggttccttcaaaatcagctgcagctgcaaaagcagcaggagccactaccacagcagcagcagcaagctctgcaacaacaatcgcatcaggaaatgcaacatcacctctcagctagctgtcatgatattgctaatgtagcttctggtgtgtctgagtctggatctgcttctcaaacagaatcttctttgctttctgggtcatcgtaccaacagatctatgatggaaacagtggtccaggtctgcatctgcacaacggtttccacaactgttcaagccaagagtcctccaaccttcttaatctctcaagaagtggacaattcatggcatcagagggatggcctttgaagaggttggctgtggaatctctttctggtcatgagctccaacctgtgcagcacaagtttgagaaagtgaatcaccaaagtaatgtgtctcacatttctagcaccttgcccccactgtcagcaagagacagttatagtgcccaggctagtggtacaaatgatcagagtcacctgctttcatcatcatttgcaatccatgatggcttgacagccgtcaggagtggtggtgttggcagtggaactgatgcgataaccatagcttcgttgagatataatgatatgaatttgctacctgaaaaccccatcgcaacttccagttgtttgggcgaatcaggaaccttcaattctctcgacgatgtgtgtggtgtaaacccatcacaaggtggaacctttgtgaaggtttacaaatcagggtcccctgggagatcgctcgacatcaccaggttcagcagctactacgagttacgtagcgagctcgagcggttatttggtcttgaaggccaactggaggaccctgtaagatcaggctggcagcttgtattcgttgaccgggaaaacgatattcttctcgtcggcgatgacccgtggcaggagtttgtgaatagtgtatggtgcataaagatcctctcgccgcaagacgtgcagcagatggtccgcggcggaggcgaccttctgtctacaactggagtgaggacactgcagggcagtgtctgcgatgattattctgcaggccacgacatgcagaatctcaccggcagcatcgcacctgtggtgcctctggactactgagaccgagatgaagaccagaaactgaagttctgaaccaaaaccggcaattcagcaccgcaggattgccgtccacgagtcttttcggttcctatgatctatcttctctcaagttgtgttggtcagaaataacctagtcgttaatatagctagatccattgtatcattatggtaatggacatgttgtacgatagctgttgtagctacgtgtagccatagcctaagctctaaatggcaggcaagaattggtctatgaaagtatggatgcaggcactcactgtagaggtgacctagccctgtagttctctatatcttctcatatctaaaagctgacggttccatgtggcgcctaaactattgaaccctgtcacctttgtcatatttttttcacctcaattcgcggttgtttgatcttgttgca

SEQ ID NO: 115302 - DNA, 3948 bp, Zea Mays
aagagaggggaaaaaagaagaaagaaagcaaggagcaccgcaccactccactccacttccctcctcgatccagccatggcggcctaggccccctagggttccctgtcagcccccacccaggcgcctcctgccgcttcctccgctcccacccggtggtcgcgctgcccgattcggccgccggcgtcgaatgggaggcgacccgatgctcgaagccggccgttgccgcgcgctgccgacggagattccctgagctcggcggcgggttcccgtgctcgccgagcgatgactctcggcgccggcgctgcccaaggcactgggtctagggcgcgtggctggttgggagcgcgccgtgcgtgcaatgggggatttaaggcggttctgtagagtcgccgcggcggtcttggttctgcgagcgcgtggcctgcgctcgtgaaggtagggctgtctagctgctccttcgtctgatgagctcagcttctgcgtcccgcctcgttttgtgcccgcgtttgctccggcggctgcccaaagcccagcggatcgggccctgctcatttcggcgcttctcttcggttctttgtggaaagggaggagctgtgaggtgttgcttggcgagggtgcgcagctgaggattccgggcatgaggtcagcaatgacgcgcatttgtcgcgacaggccggaattcgagtagcggtttcttgaagtggattggctgctgctgcgtgggaagggggaagcggcggcatcaacagccgcagaggaaggcttactctgaagcggaggggaagcaggctggcattgctactgggagcatggcgaggtgctaaggacgtgcaggttccgcaatcaccgcatcttggtgttcttgtttcaggtcgtagtgggagatgaacctctcaccgcccaggatgtcggagccatcgcttgaaagtgacggggaacaaaggtgtctgaactcggagctatggcatgcatgcgcagggccccttgtgtcccttcctgtggttgggagccgggtcgtctactttccccagggccatagtgagcaggttgctgcatcaactaataaagaagttgacgctcagatcccaaactacccaaacctacctccacaattaatctgccagcttcataatgtcacaatgcatgctgatgcagagactggagaggtttatgcccagatgacactgcaaccattgagcccggaagagcaaaaggaaccttttcttccaattgaattgggtgctggtagcaaccagccaactaattacttctgcaagacgttgactgcaagtgatacgagtacccatggcgggttctctgttccacgccgagcagctgagaaagtcttccccccattggatttttcacaacaccctccagtgcaagagctggttgcaagagatctgcatgataatgagtggaaattccgccacatttttcgtggtcagccaaaaaggcatctactgacgactggttggagtgtttttgtaagcgcaaaaagactagtagcaggggattctatcatatttatctggaatgataataaccagcttctattgggaattcgtcgagcaaatcgtccacagactgttatgccctcttccgtgctatcaagcgatagcatgcacattggtctccttgctgcagcagctcatgctgcagccacaaacagtcgtttcactattttctacaacccccgcccttctgagtttgtgattccactggctaagtatgtgaaagctgtctaccacacacgtgtgtctgttggaatgcggtttcggatgctttttgagacagaggaatcaagcgtcagacgatacatgggtacgatcacatgcataagtgatctggactcagagcgttggccaaattcacactggcgttctgtgaaggttggttgggatgagtctacagctggtgataaacagccaagagtttcactctgggagattgaaccactgatggcctttccgatgtacccaactgcctttccattaaggctaaagcgtccgtgggcttcagggctacctatgttcaatggtgggaggagtgatgagttcgctcgttattcttctctcatgtggctccgagatggaaacagaggggctcaatcactgaacttccagggacttggagcatcaccatggcttcaaccaagaatagattatccattattaggtctgaagctagatacttaccagcagatggctgctgctgcactggaagaaattagagctggggatcatttgaagcagatatcttctctcctgccagtgcaacagccacaaaatttgagtggtggattagatcctttatatggaaatcctgttctgcagcagatgcagttccaatctcagcagtcatccttgcaagttgtgcagcaaggttatggtccaaatgcaagcgactctgggttccttcaaaatcagctgcagctgcaaaagcagcaggagccactaccacagcagcagcagcaagctctgcaacaacaatcgcatcaggaaatgcaacatcacctctcagctagctgtcatgatattgctaatgtagcttctggtgtgtctgagtctggatctgcttctcaaacagaatcttctttgctttctgggtcatcgtaccaacagatctatgatggaaacagtggtccaggtctgcatctgcacaacggtttccacaactgttcaagccaagagtcctccaaccttcttaatctctcaagaagtggacaattcatggcatcagagggatggcctttgaagaggttggctgtggaatctctttctggtcatgagctccaacctgtgcagcacaagtttgagaaagtgaatcaccaaagtaatgtgtctcacatttctagcaccttgcccccactgtcagcaagagacagttatagtgcccaggctagtggtacaaatgatcagagtcacctgctttcatcatcatttgcaatccatgatggcttgacagccgtcaggagtggtggtgttggcagtggaactgatgcgataaccatagcttcgttgagatataatgatatgaatttgctacctgaaaaccccatcgcaacttccagttgtttgggcgaatcaggaaccttcaattctctcgacgatgtgtgtggtgtaaacccatcacaaggtggaacctttgtgaaggtttacaaatcagggtcccctgggagatcgctcgacatcaccaggttcagcagctactacgagttacgtagcgagctcgagcggttatttggtcttgaaggccaactggaggaccctgtaagatcaggctggcagcttgtattcgttgaccgggaaaacgatattcttctcgtcggcgatgacccgtggcaggagtttgtgaatagtgtatggtgcataaagatcctctcgccgcaagacgtgcagcagatggtccgcggcggaggcgaccttctgtctacaactggagtgaggacactgcagggcagtgtctgcgatgattattctgcaggccacgacatgcagaatctcaccggcagcatcgcacctgtggtgcctctggactactgagaccgagatgaagaccagaaactgaagttctgaaccaaaaccggcaattcagcaccgcaggattgccgtccacgagtcttttcggttcctatgatctatcttctctcaagttgtgttggtcagaaataacctagtcgttaatatagctagatccattgtatcattatggtaatggacatgttgtacgatagctgttgtagctacgtgtagccatagcctaagctctaaatggcaggcaagaattggtctatgaaagtatggatgcaggcactcactgtagaggtgacctagccctgtagttctctatatcttctcatatctaaaagctgacggttccatgtggcgcctaaactattgaaccctgtcacctttgtcatatttttttcacctcaattcgcggttg

SEQ ID NO: 115303 - DNA, 3253 bp, Zea Mays
aagagaggggaaaaaagaagaaagaaagcaaggagcaccgcaccactccactccacttccctcctcgatccagccatggcggcctaggccccctagggttccctgtcagcccccacccaggcgcctcctgccgcttcctccgctcccacccggtggtcgcgctgcccgattcggccgccggcgtcgaatgggaggcgacccgatgctcgaagccggccgttgccgcgcgctgccgacggagattccctgagctcggcggcgggttcccgtgctcgccgagcgatgactctcggcgccggcgctgcccaaggcactgggtctagggcgcgtggctggttgggagcgcgccgtgcgtgcaatgggggatttaaggcggttctgtagagtcgccgcggcggtcttggttctgcgagcgcgtggcctgcgctcgtgaaggtagggctgtctagctgctccttcgtctgatgagctcagcttctgcgtcccgcctcgttttgtgcccgcgtttgctccggcggctgcccaaagcccagcggatcgggccctgctcatttcggcgcttctcttcggttctttgtggaaagggaggagctgtgaggtgttgcttggcgagggtgcgcagctgaggattccgggcatgaggtcagcaatgacgcgcatttgtcgcgacaggccggaattcgagtagcggtttcttgaagtggattggctgctgctgcgtgggaagggggaagcggcggcatcaacagccgcagaggaaggcttactctgaagcggaggggaagcaggctggcattgctactgggagcatggcgaggtgctaaggacgtgcaggttccgcaatcaccgcatcttggtgttcttgtttcaggtcgtagtgggagatgaacctctcaccgcccaggatgtcggagccatcgcttgaaagtgacggggaacaaaggtgtctgaactcggagctatggcatgcatgcgcagggccccttgtgtcccttcctgtggttgggagccgggtcgtctactttccccagggccatagtgagcaggttgctgcatcaactaataaagaagttgacgctcagatcccaaactacccaaacctacctccacaattaatctgccagcttcataatgtcacaatgcatgctgatgcagagactggagaggtttatgcccagatgacactgcaaccattgagcccggaagagcaaaaggaaccttttcttccaattgaattgggtgctggtagcaaccagccaactaattacttctgcaagacgttgactgcaagtgatacgagtacccatggcgggttctctgttccacgccgagcagctgagaaagtcttccccccattggatttttcacaacaccctccagtgcaagagctggttgcaagagatctgcatgataatgagtggaaattccgccacatttttcgtggtcagccaaaaaggcatctactgacgactggttggagtgtttttgtaagcgcaaaaagactagtagcaggggattctatcatatttatctggaatgataataaccagcttctattgggaattcgtcgagcaaatcgtccacagactgttatgccctcttccgtgctatcaagcgatagcatgcacattggtctccttgctgcagcagctcatgctgcagccacaaacagtcgtttcactattttctacaacccccgggccagcccttctgagtttgtgattccactggctaagtatgtgaaagctgtctaccacacacgtgtgtctgttggaatgcggtttcggatgctttttgagacagaggaatcaagcgtcagacgatacatgggtacgatcacatgcataagtgatctggactcagagcgttggccaaattcacactggcgttctgtgaaggttggttgggatgagtctacagctggtgataaacagccaagagtttcactctgggagattgaaccactgatggcctttccgatgtacccaactgcctttccattaaggctaaagcgtccgtgggcttcagggctacctatgttcaatggtgggaggagtgatgagttcgctcgttattcttctctcatgtggctccgagatggaaacagaggggctcaatcactgaacttccagggacttggagcatcaccatggcttcaaccaagaatagattatccattattaggtctgaagctagatacttaccagcagatggctgctgctgcactggaagaaattagagctggggatcatttgaagcagatatcttctctcctgccagtgcaacagccacaaaatttgagtggtggattagatcctttatatggaaatcctgttctgcagcagatgcagttccaatctcagcagtcatccttgcaagttgtgcagcaaggttatggtccaaatgcaagcgactctgggttccttcaaaatcagctgcagctgcaaaagcagcaggagccactaccacagcagcagcagcaagctctgcaacaacaatcgcatcaggaaatgcaacatcacctctcagctagctgtcatgatattgctaatgtagcttctggtgtgtctgagtctggatctgcttctcaaacagaatcttctttgctttctgggtcatcgtaccaacagatctatgatggaaacagtggtccaggtctgcatctgcacaacggtttccacaactgttcaagccaagagtcctccaaccttcttaatctctcaagaagtggacaattcatggcatcagagggatggcctttgaagaggttggctgtggaatctctttctggtcatgagctccaacctgtgcagcacaagtttgagaaagtgaatcaccaaagtaatgtgtctcacatttctagcaccttgcccccactgtcagcaagagacagttatagtgcccaggctagtggtacaaatgatcagagtcacctgctttcatcatcatttgcaatccatgatggcttgacagccgtcaggagtggtggtgttggcagtggaactgatgcgataaccatagcttcgttgagatataatgatatgaatttgctacctgaaaaccccatcgcaacttccagttgtttgggcgaatcaggaaccttcaattctctcgacgatgtgtgtggtgtaaacccatcacaaggtggaacctttgtgaaggtatgtaatctcacttatgctgtatgctccttattcatcaaatggcatgtgaagttgccaagttggtaactgcaagagcacttcattttgtg

SEQ ID NO: 115304 - DNA, 106 bp, Zea Mays
ggtgagcagggaaggcgcgggtgcgtgggcagagagcccgacgacggccggcagaggaagctggggaccgccatgggaggaaggagagcaagctgcgggctgggcg

SEQ ID NO: 115305 - DNA, 780 bp, Zea Mays
atgtcgactgcgagtagttttgcgcgcacgacacgcgacgaaggagaactgaacagggagcttcgtgacagcacgcacaggaacaacggaacgctacgcgcgcgacgcaaagacaagcaggacgcgaacttggaagagtcgagccagggggcatcgacgaacgcgaaggggctcaagcggaatcgacggcgcgactatcccggccgagcagggaactacgcccgatcacggcaaactagtctgccagcacgaagagacgacggcgagcgacggcaaccgaaaggagctcgcgaaatccaggacggcctgacagggcaccgagaaccgggagtcaggcgtgcgccatggataaacagggagatgagcgccgaactcgcgcgcgacgcagggaaaacagggcgcgacgagcagcggagagaagcaggtggccggagcttgcggctagcagggagcgccgagcgagcgctggagacgcagagcgcgacagccatgggaactgagggcgagcagagactcgacgcagaggagtgcgcaggacacagctccacggcacggacgccagggcacgcacgcacaggagagctaagcagggaggaacacgcaggaacttgggcgcgcggcgttgagaactggagggagcacggctgggctgggcgactaggtgtcgagcgccagggagaccgagctgggcggacgcgtgcaggaagacgggcagagggagcaggggcctcggcgccggcgagcaggaactggggcgcggttcaggagaagctcggctga

SEQ ID NO: 115306 - DNA, 994 bp, Zea Mays
taatagggaagtaaagaagcacgtaccactattctgcacagggttttgatggcagagaccatcagtctccttttaacagcaaattacaaggattgaagctagaactaggaagtgttaactaataagtccattccccatctcatcggttttggaactcttgtgctgccataagttgatcggccacattaacaaataagggacaaattctctctatgaaagctattgtatcagcaagaaaataacagcagtgtcctaccttactcttcttgtgcttatgcacatctgctgaatcttcagttccctcgtgcttcctcttctgatacaaatggtgagcattgcccatcaaaaggtatatggtttagaatgaagctattcagagtttttgaacataaagaaaactgaccaaccttttcatgatgtttctttgaatcagaatcatgatgaccactcttatcttttttcttatccttgtctttgtctttatctttgtccttactccgatccttatgccgatgtttgtgcttcttatgttccttgtctttgtccctctctctgtctttgtgctttttatgcttcttctctttgtccttggactcgctttttggtttacccgaaatagtcggtatacccttttcagtctagggcaaaaccacaggagctgtttctcgaagttggaacgcttgccccagtgtttccatatcgaagggctgaatataagcaggtttatccctcatatatgcattctgaacaagttgatctaactccattccttctccttttcgaatttcagtgtctcccacaatattgtgaagataatgtgtatctgatattgccagtggcaaaggtttcttgcaaaagaaatcatggtgtggcagcagtttgtagtggttaatcaaatcaacagcaccagtaagctcccttggccctgaaatagagatcatattatcaaacaaccacaaagccgacaaataaggcttctgaaaatatagatgca

SEQ ID NO: 115307 - DNA, 352 bp, Zea Mays
taagcagggacaacgacggcgccgcggagtggagggccgagcgggcgagggctgctgcgaggatgctggtcatgggggaaaacagcagcgaagctcgacgacgacgcaaggtgaagaacggtgctgctgcgaggaatcaacaacgcctggcttgttgcgcatttcctcgagcacatagcaagcgtcaacggcgcactgcgcagcagcacgcaagcagggggaatggagctcgagtgccgagcgtccaccatggcagggacgacgagctcggctcggtgaagaggagcaggggctggcggccatggacagggagggggggctgctgcttggctccatggatagcaggagagga

SEQ ID NO: 115308 - DNA, 2134 bp, Zea Mays
gggagtagcttggaagaaaggggcagagtggatacagtacaaagcgaagcggcaaccaccgcgaggtttcctcgagaatctccagtctcttcttccccgcacccactctttatccacgagcgacggggacccgtgacagcggcgaaaggctcgagcttttcttgatttgccctgccgcctgcattgggacgagaggaggtccttttcttggacgttctggggaggagtacctgagccgactcgcgggcgttcttgggctcgttgcgtctgttcaggttctggaagcatgaggttatggtctctctttctcttgcctctgctctgtctacctgcgcgggttcgatcagaggattacgcggatgcaactgtcattgttcgaggctctgagacgattgcttcgaccagtgatgagtttgtttgcgccaccattgattggtggcctccagagaagtgtaactacgaccagtgtccatgggaaagggcttctgtcttaaatctggacttgactaatcctttgctggctaaagctatccaagccttcagtccgctgcgcatcagagttggaggctccttacaagatcaagtgttatatggcacaccaaatttaggattgccatgcgacccatttacaaaggtttcaagtggcctttttgggttttctcaaggatgcataacattggaaagatgggatgatattaatgatatgttcctgaaaactggtgcagttgttacattcggtctcaacgcgcttcgaggaagacagcagacaagaaaaggtgtctggggtggtccctggaattctagcaatgctcgagaattcattgaatataccgttttaaagaactatcctatcgattcttgggaatttgggaatgaattgagcggaagtggagttggtgcgagtgtgtcagctgaacaatatggaaaagatctagttgaactccaaaccatcatcagcgagctatacggagattccaacaaaccactggttgtagccccaggaggattttatgaccagaaatggtttgctcagctcctcgatgtctccgggccaaatgttctcaacgcaatgactcatcatatttacaatcttggtgctggtaatgatccacaggttccaaacagaattttgaacccgcagtatctgagccggacttccgacacattcagaagtctccaactcaccatacagcgccatggaccatggtctgctccatgggttggtgaatctggtggtgcatataacagtggcagccggctcgtgtccaatacttttctcaatagcttctggtatcttgatcagctgggtcagtcagcaaagtatgacaccaaggtctactgcagacagacgctgattggtggcaattacggccttcttgacaccgagactttcgtaccaaacccggattactacagtgccttgttgtggcatcagctcatggggacaggagttctttctgtagacatcagtggttcttcgtacttgcgcgcctacgtgcattgcgccaagcaaaagggtggcgtcactcttctcttgctgaacctgcaccgaacgatgggcttcatggtctcagtcaggaacgacctaaatgtcaacctcgcagaagggcaagggatcaggagggacagtgcctttgtccatggcctgaagaggacggtttcttgggtcgggagcaaagcctccgatgggttttccaagagggaagagtaccatctctcgtcgaaagatgggaacccttttgcccggaccatgctgctgaatggagcccctcttgagctcactgaagatggtggcatcccttcattgtatccagtggaagtttcagttaactcgccaatctatgttgctcctctgaccattgcgtttgtcgtcttccctgactttgaggctgaagcttgtggccgatgatcaactgtacatagaatatcacctttttttgctataaggcatctaaagaacaaaggtcattgtaatgtaaagacgtgttcgttttctgatctgtgccccaatcgggccatctacgttttcccaacgaatagtctccaggtgatgtcatactgatcaatgcctcgtcattgtactttgtacatacagttcatcatctcagaaaaaaaatgttcagcatcaaccaaa

SEQ ID NO: 115309 - DNA, 2115 bp, Zea Mays
gggagtagcttggaagaaaggggcagagtggatacagtacaaagcgaagcggcaaccaccgcgaggtttcctcgagaatctccagtctcttcttccccgcacccactctttatccacgagcgacggggacccgtgacagcggcgaaaggctcgagcttttcttgatttgccctgccgcctgcattgggacgagaggaggtccttttcttggacgttctggggaggagtacctgagccgactcgcgggcgttcttgggctcgttgcgtctgttcaggttctggaagcatgaggttatggtctctctttctcttgcctctgctctgtctacctgcgcgggttcgatcagaggattacgcggatgcaactgtcattgttcgaggctctgagacgattgcttcgaccagtgatgagtttgtttgcgccaccattgattggtggcctccagagaagtgtaactacgaccagtgtccatgggaaagggcttctgtcttaaatctggacttgactaatcctttgctggctaaagctatccaagccttcagtccgctgcgcatcagagttggaggctccttacaagatcaagtgttatatggcacaccaaatttaggattgccatgcgacccatttacaaaggtttcaagtggcctttttgggttttctcaaggatgcataacattggaaagatgggatgatattaatgatatgttcctgaaaactggtgcagttgttacattcggtctcaacgcgcttcgaggaagacagcagacaagaaaaggtgtctggggtggtccctggaattctagcaatgctcgagaattcattgaatataccgttttaaagaactatcctatcgattcttgggaatttgggaatgaattgagcggaagtggagttggtgcgagtgtgtcagctgaacaatatggaaaagatctagttgaactccaaaccatcatcagcgagctatacggagattccaacaaaccactggttgtagccccaggaggattttatgaccagaaatggtttgctcagctcctcgatgtctccgggccaaatgttctcaacgcaatgactcatcatatttacaatcttggtgctggtaatgatccacaggttccaaacagaattttgaacccgcagtatctgagccggacttccgacacattcagaagtctccaactcaccatacagcgccatggaccatggtctgctccatgggttggtgaatctggtggtgcatataacagtggcagccggctcgtgtccaatacttttctcaatagcttctggtatcttgatcagctgggtcagtcagcaaagtatgacaccaaggtctactgcagacagacgctgattggtggcaattacggccttcttgacaccgagactttcgtaccaaacccggattactacagctcatggggacaggagttctttctgtagacatcagtggttcttcgtacttgcgcgcctacgtgcattgcgccaagcaaaagggtggcgtcactcttctcttgctgaacctgcaccgaacgatgggcttcatggtctcagtcaggaacgacctaaatgtcaacctcgcagaagggcaagggatcaggagggacagtgcctttgtccatggcctgaagaggacggtttcttgggtcgggagcaaagcctccgatgggttttccaagagggaagagtaccatctctcgtcgaaagatgggaacccttttgcccggaccatgctgctgaatggagcccctcttgagctcactgaagatggtggcatcccttcattgtatccagtggaagtttcagttaactcgccaatctatgttgctcctctgaccattgcgtttgtcgtcttccctgactttgaggctgaagcttgtggccgatgatcaactgtacatagaatatcacctttttttgctataaggcatctaaagaacaaaggtcattgtaatgtaaagacgtgttcgttttctgatctgtgccccaatcgggccatctacgttttcccaacgaatagtctccaggtgatgtcatactgatcaatgcctcgtcattgtactttgtacatacagttcatcatctcagaaaaaaaatgttcagcatcaaccaaa

SEQ ID NO: 115310 - DNA, 1983 bp, Zea Mays
gctgcatagagagttgacccactactccagtaaagttcttttttacaagttccatgatactaccatggaacatgttgatcctataagtctgggcccttggatcccgtctctgcgcccaacaccatttcagggttctggaagcatgaggttatggtctctctttctcttgcctctgctctgtctacctgcgcgggttcgatcagaggattacgcggatgcaactgtcattgttcgaggctctgagacgattgcttcgaccagtgatgagtttgtttgcgccaccattgattggtggcctccagagaagtgtaactacgaccagtgtccatgggaaagggcttctgtcttaaatctggacttgactaatcctttgctggctaaagctatccaagccttcagtccgctgcgcatcagagttggaggctccttacaagatcaagtgttatatggcacaccaaatttaggattgccatgcgacccatttacaaaggtttcaagtggcctttttgggttttctcaaggatgcataacattggaaagatgggatgatattaatgatatgttcctgaaaactggtgcagttgttacattcggtctcaacgcgcttcgaggaagacagcagacaagaaaaggtgtctggggtggtccctggaattctagcaatgctcgagaattcattgaatataccgttttaaagaactatcctatcgattcttgggaatttgggaatgaattgagcggaagtggagttggtgcgagtgtgtcagctgaacaatatggaaaagatctagttgaactccaaaccatcatcagcgagctatacggagattccaacaaaccactggttgtagccccaggaggattttatgaccagaaatggtttgctcagctcctcgatgtctccgggccaaatgttctcaacgcaatgactcatcatatttacaatcttggtgctggtaatgatccacaggttccaaacagaattttgaacccgcagtatctgagccggacttccgacacattcagaagtctccaactcaccatacagcgccatggaccatggtctgctccatgggttggtgaatctggtggtgcatataacagtggcagccggctcgtgtccaatacttttctcaatagcttctggtatcttgatcagctgggtcagtcagcaaagtatgacaccaaggtctactgcagacagacgctgattggtggcaattacggccttcttgacaccgagactttcgtaccaaacccggattactacagtgccttgttgtggcatcagctcatggggacaggagttctttctgtagacatcagtggttcttcgtacttgcgcgcctacgtgcattgcgccaagcaaaagggtggcgtcactcttctcttgctgaacctgcaccgaacgatgggcttcatggtctcagtcaggaacgacctaaatgtcaacctcgcagaagggcaagggatcaggagggacagtgcctttgtccatggcctgaagaggacggtttcttgggtcgggagcaaagcctccgatgggttttccaagagggaagagtaccatctctcgtcgaaagatgggaacccttttgcccggaccatgctgctgaatggagcccctcttgagctcactgaagatggtggcatcccttcattgtatccagtggaagtttcagttaactcgccaatctatgttgctcctctgaccattgcgtttgtcgtcttccctgactttgaggctgaagcttgtggccgatgatcaactgtacatagaatatcacctttttttgctataaggcatctaaagaacaaaggtcattgtaatgtaaagacgtgttcgttttctgatctgtgccccaatcgggccatctacgttttcccaacgaatagtctccaggtgatgtcatactgatcaatgcctcgtcattgtactttgtacatacagttcatcatctcagaaaaaaaatgttcagcatc

SEQ ID NO: 115311 - DNA, 2044 bp, Zea Mays
gaagttgcatcatatgatatcaattatcaagaaatgaaggtcaggaaagtccgatgcagctgcatagagagttgacccactactccagtaaagttcttttttacaagttccatgatactaccatggaacatgttgatcctataagtctgggcccttggatcccgtctctgcgcccaacaccatttcagggtctggactcatgcttactatttcttttcccgaatccatcctggcctacagagacaccacggtgattgattgtttaatcccggctctgttgccttcagattcaggttctggaagcatgaggttatggtctctctttctcttgcctctgctctgtctacctgcgcgggttcgatcagaggattacgcggatgcaactgtcattgttcgaggctctgagacgattgcttcgaccagtgatgagtttgtttgcgccaccattgattggtggcctccagagaagtgtaactacgaccagtgtccatgggaaagggcttctgtcttaaatctggacttgactaatcctttgctggctaaagctatccaagccttcagtccgctgcgcatcagagttggaggctccttacaagatcaagtgttatatggcacaccaaatttaggattgccatgcgacccatttacaaaggtttcaagtggcctttttgggttttctcaaggatgcataacattggaaagatgggatgatattaatgatatgttcctgaaaactggtgcagttgttacattcggtctcaacgcgcttcgaggaagacagcagacaagaaaaggtgtctggggtggtccctggaattctagcaatgctcgagaattcattgaatataccgttttaaagaactatcctatcgattcttgggaatttgggaatgaattgagcggaagtggagttggtgcgagtgtgtcagctgaacaatatggaaaagatctagttgaactccaaaccatcatcagcgagctatacggagattccaacaaaccactggttgtagccccaggaggattttatgaccagaaatggtttgctcagctcctcgatgtctccgggccaaatgttctcaacgcaatgactcatcatatttacaatcttggtgctggtaatgatccacaggttccaaacagaattttgaacccgcagtatctgagccggacttccgacacattcagaagtctccaactcaccatacagcgccatggaccatggtctgctccatgggttggtgaatctggtggtgcatataacagtggcagccggctcgtgtccaatacttttctcaatagcttctggtatcttgatcagctgggtcagtcagcaaagtatgacaccaaggtctactgcagacagacgctgattggtggcaattacggccttcttgacaccgagactttcgtaccaaacccggattactacagtgccttgttgtggcatcagctcatggggacaggagttctttctgtagacatcagtggttcttcgtacttgcgcgcctacgtgcattgcgccaagcaaaagggtggcgtcactcttctcttgctgaacctgcaccgaacgatgggcttcatggtctcagtcaggaacgacctaaatgtcaacctcgcagaagggcaagggatcaggagggacagtgcctttgtccatggcctgaagaggacggtttcttgggtcgggagcaaagcctccgatgggttttccaagagggaagagtaccatctctcgtcgaaagatgggaacccttttgcccggaccatgctgctgaatggagcccctcttgagctcactgaagatggtggcatcccttcattgtatccagtggaagtttcagttaactcgccaatctatgttgctcctctgaccattgcgtttgtcgtcttccctgactttgaggctgaagcttgtggccgatgatcaactgtacatagaatatcacctttttttgctataaggcatctaaagaacaaaggtcattgtaatgtaaagacgtgttcgttttctgatctgtgccccaatcgggccatctacgtt

SEQ ID NO: 115312 - DNA, 96 bp, Zea Mays
gtattacttctagttaaaagttacgcgagaatgctggcctctccgcaatcggcggatttctgccttatacggtgccgccgcgtggaagaaaaaaaa

SEQ ID NO: 115313 - DNA, 1754 bp, Zea Mays
aacgaaggtgagtaatcatcgaccattccggccgcggccgtggttagtttgttgtagtagtatagatatataacctgctgctgttttgcacccatgcatggctagcactcttccgcagcgtatccaccacatctgttttgcctatcagctaagacttacacagtggatattacatagcgagctagcatggcttacagtaagtgtaagtcttattagttgataggtcgaaatagatgtggtggactgcaaagatacgttctagaggcctcgctcgcgtcgacgccgcctttgatttttatgatgagccaacaagtactgctacatgataattaagtgctcctcctcctcggtgcctgtcacgaagggagggaccagtgcaatttgcatgcaagttccagagaagttcaaccagtttgtgcatcggatcagatcagtaggcacctttcatgaaccatggccggcgaccagcttgccggatctgctgctcgtggatgtgcaggagctcgtcgatgcgccggggctgcgacagcagcggccctgagaagtccaccctgttcaccttccccttgtgcatctgaagacaaccatagaattcagagattatccatcagagttacaaaatccagtactcggtagcgtgaaattatcaaggagacagcactggactgcagatttgcggtgcttgtgattgtgagctgtgagagtgataccattccagtcttgagctgcttggcgtcaagcgtctgcctcaacctgctgttgtaagcttcagaggcgctgaaggcgtcagcgacctgtgcccactgcttgatcacctcctgcttctccgcctcgtatggtgccgccgctgctgtggcggtggcggtggcgccggagccggaggtggttcttgctccgtctcctcctccgctgttgttgttcctgttggtccctggccccatggagccgctccgcatcgtcacagttaccgccgccgtcgtggcgtcgggccggggcttcttggcccaggagaagccggtggacgccgcgagctgcacggggccagagagagggaggtgttcggcgacacaaggcggctccttgaagctggtggacatggtcctagccctggcgcacggcgccgcgtggtcgccgccgacgctgccgccgtgccgcttgctgatggccggaacgggctccaggtcgacgaacagccgcgagtcgccgtcgttccccgccattgtcaccccgttttcggccacaacgggcagcgattcctgcgggtggaaccaacagcacagcagcgtcgtcaggtcaccggtgaacactgaacagaacacgcaggtgagcccaccgcccccgacagcgtcgcacctcggcgtgcacgtggctctggttcgtgtcctgcagccgcatgctcttgtgccccctcgacagacccttatccgcctcgccgccttggctcggaaggttgctcctcctggcaatggcatggcatcacttcagcgtcgcagcacaagccgggcgtagtgcagctagcgctccaaggaggaaacgagcaaggagatgggcaatagccgcgtaccttctagattcttctcggagcttagcgtccatctccttgttgggcgcgtacttgggcaggctctccggctcgcacgcgtatggcgccgtcgtgaagtactgatggttggagcagcaatgcatggcgattagcaatttggcaggatcaggagcagcaagaagacgcttatacagagtttcagttcaggcac

SEQ ID NO: 115314 - DNA, 952 bp, Zea Mays
aacgaaggtgagtaatcatcgaccattccggccgcggccgtggttagtttgttgtagtagtatagatatataacctgctgctgttttgcacccatgcatggctagcactcttccgcagcgtatccaccacatctgttttgcctatcagctaagacttacacagtggatattacatagcgagctagcatggcttacagtaagtgtaagtcttattagttgataggtcgaaatagatgtggtggactgcaaagatacgttctagaggcctcgctcgcgtcgacgccgcctttgatttttatgatgagccaacaagtactgctacatgataattaaggtaattaccttggccatagccattgatgacttgtatcttactatagtacggccccgtttggtttatttagtatagggatcaaagtttagttaggggactaaagtttagtccctaacatgtttggttctagggattaaaattagtaagaatatactaaatgactcataagaagactagtgcaattgaactaaatgagaggtaaatgtggaattaatatggtttaatcccttttagccacatcttgagggactagggactaaaatagtttagtccctgttttaatcctaccgtttgacaatttaggactaaatatgactaaaatggagagattaatctttagtccctcaaaccaaacgggacctaaattgctcgcgccccgctagcaaattaggaagcaaatatattttttccttcctttctttagatgcgaaggatgacattatggtgtgcttagccagttagcctacatcaaagagatgtctctcgtcaagaacagttagcacggttagagcatatgaacttcttcatttcaccttgaacaaacccacaaccaaggaaacgttggatgaagagggtatatactttagcttgaagggttcttgattttttttatatcag

SEQ ID NO: 115315 - DNA, 996 bp, Zea Mays
atggcaccttcccgaagtcggaaatttcgaacccgacctccaatctcatattcttatgcacttcacaaccgcgataggatcaatttgttggtgtctttgaaaaatccacagatcgatctaagacgggccaataacacagagatcatgttgacaaaaatcaaaatgccgctccctgatatgatgagtgctgctctagctttggacgattcagttttggatgctgaccagattgaaaatctaataaaattttgcccaacaaaagaggagatggaacttctaaagaactacagtggggacaaggaagctcttggcaagtgtgagcatttctttctagagttaatgaaggtgccaagggttgaatctaagcttaagatatttgctttcaagattcagtttcagtctcagattagggatgtcagaaagaatttgcagactgtatcatctgcttgtgaggagctcagaagctctgagaagttgaaggttatcatgaagaacattctgttaattgggaatacattgaatcaaggcacaccaagaggccaggctgttggttttcgcttggacagcctcctaaaacttatagagacccgtgccactagtggtagaatgacattaatgcattttctatgtaagtcccttgcagagaagtcaccagaagtaatggattttcatgaggatcttgtccacttggaagcttcttcaaagttgcaactaaaagcattggcggaggagcagctggcagtggtaaaggggctggagaaagttgaacaggagctaactgcttcagaaagtgatgggccggtttctgatgttttccgtaagactttaaaggagttcattgattgttcgagtgctgatgtatgctccttgtcagcattctattctgaagtaggtaaaagcgcagatgcacttgctctttattttggagaagaccctgctaaatttccttttgagcaaggtaatattcatgcctatagacccatggaaatggtttaa

SEQ ID NO: 115316 - DNA, 5562 bp, Zea Mays
atggcgctgttccggaggctcttctatcggaagccgccggatcggctcctcgagatagccgaccgcgtctacggtacggtaccacacaatgtagattaccactccgttgaaacggctgcggtcgtgctttggcaccttgcttactacttcctcccaccaatcgtattcgattgttgcttctcaacagaaaccatggaccaatacagatacaagaattacctggacaacattattttgcagctccgtgaacagtttgcagattcttcattgatggtacttaactttagagatgaaggaaaaagtcttatttcaggcattttctccaagtacaatattacagccaaagactacccttgcaagtatctaggatgcccgttacttcctttggatatcattctccacttcctaaggctgagtgaaaggtggcttatgcttgaagggcagcaaaatattttactaatgcactgtgagaaagatggatggccagtgttggcatttatgcttgcaggtcttcttctgtacaggaaacaatataatggggagcaaagaactctagatatggtgtacaagcaagccccaaaggagcttcttcagatgctaaccacattgaatccacaaccgtctcatcttcggtatcttgggtacatatgcagaatggatgacggcataggatggcctacacaacctattcctttcaccttggattgtgtaattcttagagaaattccaaattttgatggagtcggtggttgtcggccaattgttcgagtatatgggcaggatattccaacaactgacagaagtcatagtgtcatttcaccaccatcaaaggccaagaaacatattaggcgttacagacaggcagataatgcgccagtgaagttaaatgtaggatcctgcgtccaaggtgatgtcgtccttgaatgtctgcatgtggatgatggccaaggaaatgaaaggttaatgtttagggtgatgttcaatacctttttcatccagtctcacattttaccgttgaactttgaggacatcgatgtcccttgggatgccgatcaccagttcacaaagaacttcaaagcagaggtactcttttcagagtttgatgctgagtctgatgcgtcaactgaagtagcacctgattatgattatgattatgactatgataatgatatggatgttgcctctgctgatgagttctttgaagcagaagaaatcttcagtaatgctgaatctcaagatggaaataaggatgcggatactctttctatggtctctacagattatattcgaactccaagtgccgaatgttggaaaaactctccattttccaactttgatctgaatattgacattgatggatcacaagacaataaagccgataacttgggcttgttgttagaaacagtaaatgatggaaagacatgcacatccactgaagccaatattttgctcaacaatgagactgcagttgtgaagtcaacttttaccgctacaatagcatgcacatccactgaagccaatattttgctcaacgatgagactgcagttgtgaagtcaacttttacagctacaatagatggagacacagatagcggcatctcaagttctacctataaagaggatgggtgcatgtttgaaaagggtagttccaagcaggatataaggatgggttccaatcaagacttgagccagattgataatgtattggttaaggaggtgattatattagaaactaatagtactgatgacatacagatgatcaaagaggtcatcatatctgaagttacaactcccaaacaagtggtagaggggaatatgatggaaactgaattagatgaggcagtccacagttcagaaagcactgcactgggagaagacgaggacacaaaacgacctaatacttttttcaaaaaagatgagggacagagtgcacgagatgaatatgctgcttatgacaatggcatagtgattgaacgggaagaaagtcgcaacaaagaaaaatttaccatcacaggcacagattcactagtggctgagcccaaagatttaccacatcttgacagctcaaacacttctttggaactaagttcagccaatgaaaatattgatcagcttcgtgcttgcagtagtaatgtcactgcagagcgaagagcaggaattgacacatcattttccagctccaggagtcagtcttctaatatctcttgtgcgaacattctaccagaagaatctaacttgataataaaccatgcttcaacttctgtgaatgcaaatacagatacaaccgattcatctcgactggtgctaaagaaaaaaccttttctaccattggcgacatctagtcttttttctccatcatctcccagacgcaatctgcttcgtgctgcatccacagatttgtcctttttttctccatcacaaacagaatctaagcagaactccgttacttctacaagtggaaggggtgattcagatacatcttctgtgcttccaccatttcagctctacacatccctgggatcatcatccaaaatgtctctagtacatcctactctgcgaccaataagaacgatttcatctctaccatcattatcatttggcacattcatagagatgtcaatggcttcttcaagatcacccaaacaccaagagcatgttagatctccctcaataccacaagatcaacatcttcacccaccaatgacagaggaaaatgatctacattcaggtagcttaactttgcctgcttccaaccaatatggccctcaaaccccacacccacctccactaccacccccacatgattcttgcacccaaagttattcgagcaccataatatatgaacctgaacaaataagagctgatggatcttgttcctatagtccagattatagacaaagtgttctcaacttaggtgattcctcactaacttcactctctaatagtagtatagctgcaactgaatgtcccttaggagcctctgattttgtagatgaggaagtaacaagtagacctaatatagtaactgccatggatgtcccatttaccaatgaagatacaaattctttgttgcacatgacttgttcttcacctcccaaaacattacaacgtgctgaaccaccaacgctgccgccaccacctttgcctctagtaccaccaccatcacaactaccactgccaactatatgcagtgatagtggatcagttccactggtatactcaaatccgtcttcagattgtccatataaagaaccaacaatgctaccagaacacaaatctgatgttccagctacttctctcgaaggacatgaagcaagtgaagttcaatttctgcaatctgatactgctgtcgaattatctccatcagagcattctgagtataaagttcagcatgtggttggaagcgctgaagatacaatttcaagtatgtcatcctatatacctgcagcacctccatatccaatgtttcacattgtaacagataattcctcatgttcaatatctgcagagcaagtaaattgtgagcagcctttagatcaaacaacattatcaattcatttgaggccatttgaggtggagatatcacaaggtgaaacaattaacggagtcttggcctctataattgatgataaagaacacggaggcattccaattctgcaattgccacaaaagttgcctcattctggagaacatatgaaatctccacctccacctcctcctcctccacaaccaccaccttgtcatgcaacagttataccttctttgtgtttatcttcaaaaccaccttctccaacagaacattacgaaaatccaccttcttcccctccacctttttctagagaatcatgtgttgttctacctccacttccagctccactcttgaatcatccatctcttcctggaaaacatattaatctatatccacctccaccacctccaccaccaactttacatcatatcgcacctgcatctccgtgctcgtaccaaccttctttctatgcagatatagcaacccaacctaccttttcagaggatattgtaatagttccacctccacattcaaaaggggttaatataattccattgccacctcctcctcctagaacaagtgaaactttgtctcaacctcttgatggtgggcaatcaacaggaccagcttctcttcttgaagttactaaagaaaacccaccacctcctctccttccccctgaaggacaaatgggatctccattgtcaactctttgtggagaaattgtgaatattccaatacctccaccttcacttcctggaggacatggagaagttccactatcaactcctcctagaggatgtggggccattccacctccaccaccctttactaaagggataggaggaattacattgccaattggatttcatagtggagacttgtcattcctccaatctaccagagaatctaaaggcccttcatgcttgccacctccacctccacctccacctccacctccaccaccaccactatcttctaatggacacataggtgatctgccaccaccacctacgagtgtatttgtagaggcttcgatccctctgccacctcaaacaggatgtggaggggatccaccaccgccaccacctactggaggacatgtagggcctccaccaccaccgccacctctaggggaatgtgcatgggatcttcaacctcccaaagcatgtgtaagggctcccccgccacctccacctcctggaggatatgcagaagttctaatgccaccaccacctcccagaggatatgtaggggctccagcaccacctccacctcctggaggatatgcaggagctccaccaccaccgccacctcctggaggatatgcaggagctccaccaccaccgccacctcctggaggatatgcaggagctccaccaccaccgccacctcctggaggatatgcaggagctccaccaccaccgccaccccctggaggatatgcaggagctccaccacccccgccttcatatggaggaattggaggagttcctcctcctccaccaccctttggaggactaggaggaactccaccgcctccacctccagcagggtttcgaggtggagctccatcaccacctcctcctcctggaggtcatggaggtccaccaccacctcctcctagaggacatggaagtggtccccctccccctcccggtgcaccttctcctccaatgcctcctggaatgtctggtggcccccctcctcctccaggtggaagagggatgcctactccacctggcggaaggggacatggccttgctcgaacgttaggcccgacattacaaagtgcaatgcgaaagtcatccctaaaaccactacattgggtcaaagtaacaagagcaatgcaaggaagcttatgggcggagctacaaaaacaagtggaagctaatagccatgctgaattcgatgtaaatgaactagagtctctgtttaccattgctccaaaggcaaaagctggctcaaaatcagaaggccgtggaaaatcccttggaacaaaatctgataaagttcaactggtaatttactaa

SEQ ID NO: 115317 - DNA, 492 bp, Zea Mays
ctgttttttactttcttcaaggaaaacatttcggtaaagataatagtgccgctgacaatagaagctgtcgagaagcgcagggaagtgttcagcccttgtgctccctctgatgatatcagccaggcactggaggagggtgcagaagcaacagtggttgatttcacgagattgaggcataaggtgactgctgacgaaggtacggaagcgactgaaggggtggtgtcagctgcgcatgttccagaggatggcaccactgttacaccaggaactgggaggagcactgatcatcagtactctgaaagggcgagcgattcttcaaccgctgtcggatcatcgaagggccacaacgcgagcctgaggaggctatacaggtcgatgaacgtgccggtgccgtgccccctgccatcgctcgtccagctgatggcggcctccaagcggcctagagtctcaaactgcgtagctgtaggttcagtttttgctgctgcaaaatga

SEQ ID NO: 115318 - DNA, 1897 bp, Zea Mays
ctattcatttcagctccaatcgcttcgcttgcttcgtctccagtacctgccttgccacgccagtcgccagctcagacctcgctcctctgccctgctcctccgtaaactaaagaggccctcccgcggtcccgcccggtggcctctcgccgtgctcatccgttcggtaccgggtcagtgccgccgtcagtaggtggtcagtcaatcatccgctcgtccattccagctctctcctgctcttgaccggccaaccatccatccatccatcggcgggcgcgcagccagccaagcggtcccgccataaaggtggcgagcgcgagtatgctgttgcattgctgctgattgctccgtctcctccgcctctcgctcgctctctgaggtgaggaagaagaagcggagaggttacgggtttgcgggttgcgttgcgtgcgacatggggagagcggcggggctggcgcgcgacggtgtgacgacagcggggcgggcgacgacgacgagggtcatgcgggctgccgtgtccgcgttcttcgccgggtaccaccgcttcacctccgtggcggcgctgctggcgctgccgttctcggcggcggtgctggcgtcggaggcgatggcgccgtcgtcgtgggcgctgcgcgctgtggcggcgcggctccgctccgtgttcgcggccgcggggttcccgccctcccccttcttcgcgctgctcgaggccaagctgtcgcagaccgtcttcacgttcgcggccacgctgccgttcgcgctcaccttcctgctgctggccaaggcctgcgtcgccgccatgctccgcctccgggacgacgacgcgtcggagtcgccgccgcctcggcggcggcgggtcgccgtggccgcgctcccgccgtgcgcggccgtggcgcgcgcgtacccggccgtcgtcgccacgcacctcctcaacgccttcctcatgctctccgccaacgccgcggtgttctcgctgctgctgctggctttcggcgccgccgacctgctgggtctcacctcccacgtctggacgctcgcgctctcggccgcgggcgccatcgtctactcgctcgtcgtcggcgtcgccaccgtggtctgcaacctcgccatcgtcgtggccgccacggagcccgggtgcgcgggccacgccgcggtgctcagggcctgcgtcgcgatccggggccgggtgtccacggcgctggcgctggcgctgcccaccaacctcggcatggcggcggccgaggcgctgttcggactccgcgtcgtcgcgcagcgtcggagggacgggaggctcgcgccgggtgtcgccggcgaggccttctcgatcgcctacatccacgcgatctgcgtcgtgctggagatcatcgtcacctgcatgttctacaggagctgcaagaggagtgaagccgacgagctcagagagctggagccagaggagaagggagacctccaggcttgatgccctctcaccttcagcttcagtctggtgcgtgcacaatacagatagtagcatcatcatagattgtgtttctgatcagaacaacaggatcagatcatagggtacagagctgatacaaagaaacatagtggtaagccgacataaatttctgcaaaatgtttctttttttatgcaaagcaaatggtaaacattgagttcaaataaacggttatttgtacagaaagaaacattctcttgaactgttcttgtgtgacactggtagcttgcaccagcacctcgaagaaggaattgcagttcagagcgtataaactcaacctcctcatcaatctactaggtatatgcccgtgcgttgctacggaatcgacatgatagaatagactgatatgcaaaagcactaattgttattctatagtatattagcatgttaaggatgtttgcatt

SEQ ID NO: 115319 - DNA, 202 bp, Zea Mays
gggagacgggttctctacatcttcttgcgcctctactgctgacgggagggaagggagcggatctggtgatccgtggtaacgtagttcttaacaatatgtacgtggtggcgatgatgtgaacagaggagacggttagggagtagccatctcacacattaaattgtagccgtgttttttaaaagtaaagaaaagaaaaaaaaga

SEQ ID NO: 115320 - DNA, 1517 bp, Zea Mays
aaaggtcaaccgaaaccctacctttttcttaaagtggcggctcttgcacactcaagtataggcagcttttttctcgagtgtggcggcgcgtgagacggaagcgccgcacatccatcgtcgccttcttccttgcctcaacaactcatctgtgtcatcagtctctccctcggcacgagacttcgggtccactcaccatcaacacgcaacttctatcaccttcgtctcaacttcaagatccactctcgccatgccaacatcccggggtacaagggctatatggtgttacacatatgagaaaggacttgtggacatactgaaagagcatgctgatatcccaatgtacaaagcacaaaatggttggacaacagagggttgggtaaatattaccaaacagttcaatgaaacatttcctttggcttattttacaaaacaacaaatacaaaataaggaaaaggagttgaaagggaactataagataatacaagatgtcttgaaaattaatggtgttagttggaataagtcattaggcatgattattgctgaaccaaagatttggcatgaagtgatcaaggggaatgccaaagttagcaagttcaaaaagaagccatttcttctatatgaatacatgtcatcattatatgcaggaagtaccactgatggagatttgaatttgacgtcaactgagcctcctaacaaaagagctggacctctaactaaaagaagtcactctaaacaaagtacacagaacacagttgttgttcctgattctaatggcatcaattttgctggtaatggtaccaatccttttcctcaaatcatgggcttagaaatgaaatctgcaccatccaatctcaatcaagaggaacaagaagacgctagcggaaaaaaacgcaagcaaactcaaacgacggctaaacttgtcgaactcttagagtttagaaagaaccatatagagaaaagtatgaaagagaagaaggaaaaagaagatgattattgtgtggagaagtgcattgatgttgtggatagcatgaaagatctaactgatgagcagaaggcagatgctaacgagctcttccaatctgagatgaatcgacggatatttatgaagactaaaaatctaaatgttcgactaatttggttaaagaaaaaaatttcacagaaccagtgagagataaggaacagaaagaagagaaggaacacatgtgggatggaaggcctttggcaaataaaacatatgcgatatgccttcattgctaattaatgaatttcttatcatttaggatcaattatatgcattaacatttaattgtctaatttcatattttgggtccgaagatggatattttcgtctaaaatttagaaacaatcatgtactttgctatgtgtggccacacacataatacttggtgtcattattgatcctatagacataaattatgagcattatttagtatctcaatctatggattgatagaacacaattgctatttttaatgacttatttggatttcccacta

SEQ ID NO: 115321 - DNA, 1539 bp, Zea Mays
aaaggtcaaccgaaaccctacctttttcttaaagtggcggctcttgcacactcaagtataggcagcttttttctcgagtgtggcggcgcgtgagacggaagcgccgcacatccatcgtcgccttcttccttgcctcaacaactcatctgtgtcatcagtctctccctcggcacgagacttcgggtccactcaccatcaacacgcaacttctatcaccttcgtctcaacttcaagatccactctcggttagctcaaagatccactctcgccatgccaacatcccggggtacaagggctatatggtgttacacatatgagaaaggacttgtggacatactgaaagagcatgctgatatcccaatgtacaaagcacaaaatggttggacaacagagggttgggtaaatattaccaaacagttcaatgaaacatttcctttggcttattttacaaaacaacaaatacaaaataaggaaaaggagttgaaagggaactataagataatacaagatgtcttgaaaattaatggtgttagttggaataagtcattaggcatgattattgctgaaccaaagatttggcatgaagtgatcaaggggaatgccaaagttagcaagttcaaaaagaagccatttcttctatatgaatacatgtcatcattatatgcaggaagtaccactgatggagatttgaatttgacgtcaactgagcctcctaacaaaagagctggacctctaactaaaagaagtcactctaaacaaagtacacagaacacagttgttgttcctgattctaatggcatcaattttgctggtaatggtaccaatccttttcctcaaatcatgggcttagaaatgaaatctgcaccatccaatctcaatcaagaggaacaagaagacgctagcggaaaaaaacgcaagcaaactcaaacgacggctaaacttgtcgaactcttagagtttagaaagaaccatatagagaaaagtatgaaagagaagaaggaaaaagaagatgattattgtgtggagaagtgcattgatgttgtggatagcatgaaagatctaactgatgagcagaaggcagatgctaacgagctcttccaatctgagatgaatcgacggatatttatgaagactaaaaatctaaatgttcgactaatttggttaaagaaaaaaatttcacagaaccagtgagagataaggaacagaaagaagagaaggaacacatgtgggatggaaggcctttggcaaataaaacatatgcgatatgccttcattgctaattaatgaatttcttatcatttaggatcaattatatgcattaacatttaattgtctaatttcatattttgggtccgaagatggatattttcgtctaaaatttagaaacaatcatgtactttgctatgtgtggccacacacataatacttggtgtcattattgatcctatagacataaattatgagcattatttagtatctcaatctatggattgatagaacacaattgctatttttaatgacttatttggatttcccact

SEQ ID NO: 115322 - DNA, 2430 bp, Zea Mays
gtggtttggctcctcgggatgttcttcctgcctgccctgccccctccggaccaaacccaagcgcccaaatccgacccccccaaatgccttctctgtgatggtctgattctgatggatgctccccacctgctctagcggtctagccccagctcgcgccgcctcgcttcctccgttcgcgacgccggcatttcgtggcgccttatccttctctgcccttctggtgggtgagataaaggggcagcgggttgttttttctgaaggtttcgcggccacttccagccggatccacggccgcggccaccgccgccgctccctcggcctggtggagaggaggggtgatccatccgaaggtggcggttccatttcttgttttcctgattgcctgagtaattgtggacatgaagagacttctgtggtgctgttgaagaattagtgccagtctcgatttctcctgatggataagcagggcaacgccaagaacggggaagtggggaacaatgtgtttcacaggatgattcttaatcagtttgctggggacttaggtctcgacgaggacaatgtgccttgcaatactccaagaaactccgctcgctctgcatttggtggcagggcagttgcttctactagcagcaaccacagcactgattcattgagcccaggcgaatatgtgagggatcctggatcccttctaagtttacaaccatggatttttagaagaaacggctcacagaaccatggggaaagtgtgcttgcgagcggtaagggcaagaatcgggtcgatgtccttcgagagggtcatgctgttggaatctcaccaaggagtcctggtcttggttctgggcctggaagaggttgtggagctgttaggagcagaagatctcgttcgaatttgatgaagccacttgtgccaatggacaactcctacgtcccacagctttacagtgagaactttgaaatcgaagaatgcacatttgctccagctccttccccagcttctgctaggccattcattgtgacagatggtacaaggataattagtaaatcacgctatgagccagtacctctgccctttaatatcggaatagacaaggaggaatgtagaggcacctcagcgatgctaggaggtctgattggaattgttcctctacctgagttgaagaaactcaaacatgagtgcagaaattcacatgatggaaggcttggtctgtctggttctcagcgaagtagcagctcacatgaacaagcaggtttacatgatcgattcctcctattctctactggggtgagcattggtattctatggtcttctctgtcaaacaagaaggaatttgatacgctgaagggcacactaaaacgaatggaaaacttagttcaggatttacaagatgaactggagatgaaagagggtttaactgtgaaggaattgcctaatgaaacttctagcgaacatgatgatgataatagcaaaccacaagtagttgattcagaggcaatgagcaaaattgaagcggagcttgaagctgagcttgcaagactggaactgaatatcacttcgaaacgtttggaagaagaaacatctgacttcaatgaggctgacaaggagttcattggtgacattgtttgtggggaactgaaagctgatatggtcccccgggacgtcacagattacagcagtgaatgtgactatggcagggacagcagggaaagttccccagactacacatgtggagcaaactatcccgtctcacctagagatctcagcattcgtctccacaaggtgatccaacgtaggcttgaagaccgagtcaaggagcttgaatcatcaattgcccacagacagaagcaggcgcaactacagatgatggtgactgatgaaatattctctgaaccgatatgctcaaacagtgaatcaggttcttcaggacgaggaagtcccattttcatacaagaaattagctccttggcagaaccatattgtctaaacctatctggagacgcgcttgaagcttatgacgaagcttacgaagaattcatgagaattgcggactccccttgcactacaagtacaaatgggaaggcacaggcaaccgaagattacctggtagaccgtggtttaatctggggaatggaggacagctctacgaagctgaaagaagtacccacttgggagagagttctaaagagcacagatcctaacagggatcaagagagcgatagagatgagtcggacgacgaagacgacgactgtaaagtgctgattcagcagattgtagagagaactaaacaaggttcccctgtacttgttaacgctcaaaaacttctgttttctgtggatcaataggccacttcactatacaccatttatttttgagatatagcatgtagtgtcgaattattattgagaaaggaaaattattaattgttttgcgg

SEQ ID NO: 115323 - DNA, 543 bp, Zea Mays
ctgcactgatgaaggccttgaacaggacactgtggatgctgttaatcctgaggaaactactgccatggtggaggatgagaagaaacctgaagatgcaccacagtctgaggttgagaaggacaaggagggcgcggagaatgaagaagaagaaaaggaacatgaggataaggagatgactctagaggaatatgaaaaggtactggaggaaaaacgaaaagctgtactctcccttaaggctaaggagagaaaagttgaaattgacaaggagctacaggccatgcaacaactgtcagttaaaaaggatggcgatgaagtgtttatcaagctgggctctgacaaggacttgaaaaagaaagaaagtgctgaaagagaagaacggggcaagaaggtatatatctgataattttcacctgcttcagtctgatataatcagagtcactgttgtttccctgaccgtcatgtctgttttatgttttccttcctctctcaagtccctgtgcattttgcagaagatacttctaggtttaatactataaattaaat

SEQ ID NO: 115324 - DNA, 857 bp, Zea Mays
gtgctctcagtgtgaccgggcggatcctccaattccttgtgagcttgtgaggggccatcttgactatacacctcatgcttggaacattgttcctgttaaaaagtggaatggctaggtaaggatgattgttgatgcttgttaccccaccaacaaaaaggaagagacagatccagagtacttttgcaggtagcagcttgtgatcttatattcctatactccgtaagcagaaatcattttagcttcccttgtttccccattcttatttcctgttgtattcatatgaagtgcaccatgcttgtcctatgtcatggtcaatattgcgttagcattgtttcagttatgctaatattgtttgacataaagaatggcctacaaaattccacaccacatatttctaaaataggcctattttaaatagctaatttccagtttttagcttatatttgtttcatgtgatttcaatattattttgttatttagatgcagaaggtgaacatgttgaataaaatataattatgtccacatattataaaaagaacagtattgtaaattattatatggtacgctctaccttttgttatattctatttataactaggtatatgcccgtgcgttgctacggaatcaatatgatgaaatacattatatgaaaacactaattgttgttctattcttttgttagcatcgctaaaaatggatgtttacataccttaaaagatacaatatgatataatttgaatagtacgacagaagattcaatcatatacttgagtaatacttattgcactatccagactccagagtcacataatttctcacatacacacaagtaacacacagatattgtgacacaacac

SEQ ID NO: 115325 - DNA, 439 bp, Zea Mays
ccctcttcgagttccaggattccaaggtccaaccttctcctctctgaggccgtagcatttgtctggttagattgggttgttccgtttgggtagccgggtggggatcgaaatctgtgcggcacccatggcggtggtcgaggggacgaagaagaaggtaatcatcgacaccgaccccggaattggtagagcacagaaagccaccaagctgaggatcgcaagcttcgtccacggtacagacggcctgggaaaccaggacttccctcgaccagctaccaagcctgtagatcagtctgctgctgtctttctggttgagcagacaaatctgtaccctggtcaagttaccgttgtcacccttggcccacttaccaaccttgctctgattgtgtggattgtttcctacacgttgctctgcttctcgtttcttctggggttcaactga

SEQ ID NO: 115326 - DNA, 392 bp, Zea Mays
aatttagttatttatttgatagtaatctcatgtttaattataggaataagatggacaaatttctcatcaagaaccagaagaaagatgcttctatttctaaaacaattaggacaaatgagagccgtgtagaacaaaagaggccacgtattgagctagatatggatgatatagttgcagatcctggccttagaaaaccaattgatgagttcccccatgaaattagagatgatgctaaaagtgcttatttacaaatgggtccatatcaaccatttggtcatacatttccacggatagcgggtaattctcaaactagaggttttgttgaatcttggttcaaacagttcgattggttagagtacagtgtacagaaagatgcagcttattgcttttat

SEQ ID NO: 115327 - DNA, 2761 bp, Zea Mays
ctctctccgccatctcgctcctctcaatccccagttccccacacatccatcccatttccgccgccgcctccgttgaaccttcgtcgcttgctgccgcgccgcgcccctacaaagccagccagccgctaaaacctcctcgtcttcatccacttccgcccgcgcacccgatcttccccaagtccgccgccgccatgggctcctcctgcgacccctccccgtcgccgggcgccgacgacctcttcctctccctctccgacctcggccccacgtcaccctccgcgtacctcgacctcccgcccaccccgcagccccagcaggggatcaaaggcccgacgcaggacttgcttctcccctacatctccagcatgctcatggaggacgatatcgacgacaccttcttctacgactacccggacaaccccgcgctcctccaggcgcagcagtctttcctcgacgtcctctccgacgacgccactgtcccgaccaccaccaccacccacagcagcgccagcgtcaaccaccaccactcctcctcctcctccgacgcatcagccagcgggccgctcacccccgccgctgtcgactcctacgcaccggcccccgccgcccagttcgacagcttcgacttcgaccccgcggccttctttagcaacggggccaactccgacctcatgacctccgccttcctcaagggcatggaggaagccaacaagttcctgcccacccaggacaaactcgtcatcgacctcgacccgccagacgaccccaagaggttcgtcctccccacccccgccgcggacaagctcgcgcccggattgaacgcggccgctcccaccgtccatgtggccgtggccgtcaaggaggaggaggcgatcctcgctgcgcctgatgccgcgcctggcagcggcggcgccgtcttgggccgcggtcggaggaaccgcttcgacgacgaggaggacctggaactgcagcgccggagcagcaagcagagcgcgctggagggggatggcgacgagcgggacgtcttcgagaaatacatcatcgcctcccccgagatgtgcacggagcagatgcagaagctgcggatcgccatgcaggaggcggccgccaagagggaggcggcggcaggcgagaacggcaaggccaagggccgccgcggcgggagggaggtggtggaccttcgcacgctgctcacccactgcgcgcaggccgtcgcctccgacgatcgccgcagtgccaccgagctgctcaagcagatcaagcagcatgccagcccactgggggacgccacgcagcgcctcgcccactgctttgccgagggcctccaggcccgcctcgccggcacaggcagcatggtgtaccagtcgctcatggccaagcgcacgtctgccaccgacatactccaggcgtaccagctgtacatggccgccatctgcttcaagaaagtcgtctgcctattctcaaatcacaccatctacaatgctggactgggcaagaagaagatacatatcgttgattacgggatacagtacggcttccagtggccgtgcttcctgcgatggatagcggatagggagggtgggccgccggaggtgaggattactggcattgacctgccccagcctgggtttcgccctactcagcgcatcgaggagacagggcgccggctcagcaagtatgcccagcagttcggtgtgccattcaagtaccaggcaattgcagcttccaagatggagtccatccgtgtggaggatttgaacctggatccagaggaggtgctcatcgtgaactgcctataccagttcaagaacttgatggatgagagcgttgtgatcgaaagcccaagggacattgtgctcaacaacatcagaaatatgcggcctcatacattcatacacgcaattgtgaatggctccttcagtgcgcctttcttcgtgacaaggttccgggaggctctgttcttctactcggccttgtttgatgcgctggacgcgaccaccccaagagacagcaaccagaggatgctgatcgaggagaacctcttcgggagggctgccctgaatgtcattgcgtgtgagggcacagaccgagtggagcgccctgagacgtacaaacaatggcaggtgcggaaccaacgagcaggcttgaagcagcagccattgaaccctgatgtcgtgcaggtagtgcggaacaaggtcaaggattgctaccacaaggactttgtgatcgacgtcgatcaccgctggctcttgcagggatggaaaggccgcatcctctatgccgtctcaacatgggtggcaaatgatgccccctcttacatctagctgttctgttgactcacttgtctacaaattttaggtttaggtatgtcatctggatatatctagtgacaagtgtgttcagtgggttacatggactcacttgtgattgatggtaatgcgaactagatgcttatcactcaaccatgttgttgcatagtgctaaacatgattagatctaggtcctgggtctgggcaatgtcctctgcagcatctgccgtgtttgatcaatccagtcagttgatcaggttgtaattgacacttggtcctctctgtttccggtgtgattactgcgctgtttcagacttcagaatcgttatcatgaactgatggattttgtctgtctactcttatcgcacatgagagcatttttccagaatacaatgtacaaggcatgtgttttatccatccatgtacatggtttggtcgatgaaccgagtctt

SEQ ID NO: 115328 - DNA, 1354 bp, Zea Mays
ctctctccgccatctcgctcctctcaatccccagttccccacacatccatcccatttccgccgccgcctccgttgaaccttcgtcgcttgctgccgcgccgcgcccctacaaagccagccagccgctaaaacctcctcgtctgcctattctcaaatcacaccatctacaatgctggactgggcaagaagaagatacatatcgttgattacgggatacagtacggcttccagtggccgtgcttcctgcgatggatagcggatagggagggtgggccgccggaggtgaggattactggcattgacctgccccagcctgggtttcgccctactcagcgcatcgaggagacagggcgccggctcagcaagtatgcccagcagttcggtgtgccattcaagtaccaggcaattgcagcttccaagatggagtccatccgtgtggaggatttgaacctggatccagaggaggtgctcatcgtgaactgcctataccagttcaagaacttgatggatgagagcgttgtgatcgaaagcccaagggacattgtgctcaacaacatcagaaatatgcggcctcatacattcatacacgcaattgtgaatggctccttcagtgcgcctttcttcgtgacaaggttccgggaggctctgttcttctactcggccttgtttgatgcgctggacgcgaccaccccaagagacagcaaccagaggatgctgatcgaggagaacctcttcgggagggctgccctgaatgtcattgcgtgtgagggcacagaccgagtggagcgccctgagacgtacaaacaatggcaggtgcggaaccaacgagcaggcttgaagcagcagccattgaaccctgatgtcgtgcaggtagtgcggaacaaggtcaaggattgctaccacaaggactttgtgatcgacgtcgatcaccgctggctcttgcagggatggaaaggccgcatcctctatgccgtctcaacatgggtggcaaatgatgccccctcttacatctagctgttctgttgactcacttgtctacaaattttaggtttaggtatgtcatctggatatatctagtgacaagtgtgttcagtgggttacatggactcacttgtgattgatggtaatgcgaactagatgcttatcactcaaccatgttgttgcatagtgctaaacatgattagatctaggtcctgggtctgggcaatgtcctctgcagcatctgccgtgtttgatcaatccagtcagttgatcaggttgtaattgacacttggtcctctctgtttccggtgtgattactgcgctgtttcagacttcagaatcgttatcatgaactgatggattttgtctgtct

SEQ ID NO: 115329 - DNA, 1099 bp, Zea Mays
cacacatccatcccatttccgccgccgcctccgttgaaccttcgtcgcttgctgccgcgccgcgcccctacaaagccagcctgggtttcgccctactcagcgcatcgaggagacagggcgccggctcagcaagtatgcccagcagttcggtgtgccattcaagtaccaggcaattgcagcttccaagatggagtccatccgtgtggaggatttgaacctggatccagaggaggtgctcatcgtgaactgcctataccagttcaagaacttgatggatgagagcgttgtgatcgaaagcccaagggacattgtgctcaacaacatcagaaatatgcggcctcatacattcatacacgcaattgtgaatggctccttcagtgcgcctttcttcgtgacaaggttccgggaggctctgttcttctactcggccttgtttgatgcgctggacgcgaccaccccaagagacagcaaccagaggatgctgatcgaggagaacctcttcgggagggctgccctgaatgtcattgcgtgtgagggcacagaccgagtggagcgccctgagacgtacaaacaatggcaggtgcggaaccaacgagcaggcttgaagcagcagccattgaaccctgatgtcgtgcaggtagtgcggaacaaggtcaaggattgctaccacaaggactttgtgatcgacgtcgatcaccgctggctcttgcagggatggaaaggccgcatcctctatgccgtctcaacatgggtggcaaatgatgccccctcttacatctagctgttctgttgactcacttgtctacaaattttaggtttaggtatgtcatctggatatatctagtgacaagtgtgttcagtgggttacatggactcacttgtgattgatggtaatgcgaactagatgcttatcactcaaccatgttgttgcatagtgctaaacatgattagatctaggtcctgggtctgggcaatgtcctctgcagcatctgccgtgtttgatcaatccagtcagttgatcaggttgtaattgacacttggtcctctctgtttccggtgtgattactgcgctgtttcagacttcagaatcgttatcatg

SEQ ID NO: 115330 - DNA, 1088 bp, Zea Mays
cacacatccatcccatttccgccgccgcctccgttgaaccttcgtcgcttgctgccgcgccgcgcccctacaaagccagcctgggtttcgccctactcagcgcatcgaggagacagggcgccggctcagcaagtatgcccagcagttcggtgtgccattcaagtaccaggcaattgcagcttccaagatggagtccatccgtgtggaggatttgaacctggatccagaggaggtgctcatcgtgaactgcctataccagttcaagaacttgatggatgagagcgttgtgatcgaaagcccaagggacattgtgctcaacaacatcagaaatatgcggcctcatacattcatacacgcaattgtgaatggctccttcagtgcgcctttcttcgtgacaaggttccgggaggctctgttcttctactcggccttgtttgatgcgctggacgcgaccaccccaagagacagcaaccagaggatgctgatcgaggagaacctcttcgggagggctgccctgaatgtcattgcgtgtgagggcacagaccgagtggagcgccctgagacgtacaaacaatggcaggtgcggaaccaacgagcaggcttgaagcagcagccattgaaccctgatgtcgtgcaggtagtgcggaacaaggtcaaggattgctaccacaaggactttgtgatcgacgtcgatcaccgctggctcttgcagggatggaaaggccgcatcctctatgccgtctcaacatgggtggcaaatgatgccccctcttacatctagctgttctgttgactcacttgtctacaaattttaggtttaggtatgtcatctggatatatctagtgacaagtgtgttcagtgggttacatggactcacttgtgattgatggtaatgcgaactagatgcttatcactcaaccatgttgttgcatagtgctaaacatgattagatctaggtcctgggtctgggcaatgtcctctgcagcatctgccgtgtttgatcaatccagtcagttgatcaggttgtaattgacacttggtcctctctgtttccggtgtgattactgcgctgtttcagacttcagaa

SEQ ID NO: 115331 - DNA, 909 bp, Zea Mays
tctagcagccagacatcagaaggcatctggtctcattttaactggagatcttatttgtaccttttttttgcatctggtctttttttttcgtacacccaactagccttctgagcgattttataaaccacatggtcagaagaagtcagatctgttgccgctgatcctggcagccatggaccatgaccattttcctaggccatcatcctgtgggcagatgcagactttccggttcccacaacgatgatatgaattcgcggctgatcactcgttgcactgaatctgtaataataatacatatacttgtacgtaggatgtttcataagattcggagaagccacgagtcaaaaaagaaaaaaaaatagtagctttcttgctcccgttgccgttggtcttaggcggccatggaccatgtggctgacaagagtcactgcctgcacccctttttctaatctattttcggtaatctatatttatttataatattcggtgggcagatagtggcacatgcacacgaatagtaagctctttttttatatatagtttctggcaaggaaatagcagctttgactagagagccaaatgacattgtctgtgtgtctgtctgtctcttactttcgcggccttgactaccaacgagacgttggcttcaaatctcaatagccttttgcgtatatatgttgccaacttgcagtatataatattgacatcgtgctgtgctgtgttgttcttactagtcgtacgaaggctctggactgatataagagaattgcagagattaatttaaagcctcaacccgagaggtacaagcgaatacttctatcaaataagtatccgtatcgtacattttttatactggtaagtatccagatttataaatgttactgtatgtttgattaaatgttaagatga

SEQ ID NO: 115332 - DNA, 1765 bp, Zea Mays
agagagagtatctgatattctgatcatggccaccaccacatctccagttctcctcggtcctcgccgcggcgccggcatgtctctcgctctccaagccctccgccgcagccgccccctcgtcgggttcctcccccactcctcccctctctccacctcagcctcacctcccgacgcccacgagctcctccgcattgaccgcatcctaaccaaccccgccgccggcggcggcggcagcctaccctcgcaatcccaacaacacccacgcgccgccaccgatctacaccagctcctccgccgcgccgccggcctcaccgcagcggagtccgcctccctcctccgccgcctccctggcgcccagccccacccccgcctgggccgcctcctccaggagctcgcgggcctcggcctccctaggggcgaagtcaaggccgccctggcgtccgaccaggaaggtctcctctccatggaccccggcgaaccgtcccggctcctcgacctcctgcgcgacctccggtgccgggaggcggtgagggaccggatcctcgctcacggcgctctccgcgccgccgtcgccgcccggcggcgggtggagctcctccacgcgcgcgggctgtcccgccacgacgccctgcgtgtgctcgccgccgagccgcggacgatgctgtactcgccggaggacgtggagaggaagctggagttcttggtggaaacaatggggtttgaggtcggctggctagtgcagtacccggagttcctgggcgtgaacctggacaggtggatcatcccgcggcacaatgtggtggagcacctgaaatccgtcggcgggctcggagaccccgttgaaatgaagcactatgtgaggctcacccgcaggaggttttacaacatgtttgtgaagccgtaccctgagtgtgagaggatatttgggggcctggtcagggagagggacgagatggcgaggcggcgacatccgaccggcctatggaaactgtttaagccagcgaagcatgagagaactcaggaggatgtgcagaacatgaagtctctcgtgggatcactgaaatgagtaatgttatgcccaagggaacattggtggtctcaaacaacagcaaatgctgaaccaatgatgtattgtgatctttcgcttatgcacggataccccagactagttctgataaccaagaaggaccatttgagaatttcatgtttgaggtgacatgctagggcgcgaagaggtgtgggtggtgttgtgaaaccataactgttcatgaagtgcttgtgtggtgacagaagtggcagttattctgaacggacatagatcatgttcaatattctcaaaaatatcttgctaaggcatttcaccgcagattgcaagattaaaatttgagcaattctagtattctgatcagcatttctttcactggagagtagcagataacaagttcaggaaatctggcagctgatggaatggttacctcaagatttcgatgggatggatagagcagcagcagaagctcattgcatattttcttttgagaaatttatgatgatcagaagattctgctcagaagatgagcgtgctaatttaatacagaaatgttttcttgtgtgtacatcgtggcactggttagtttagagacatttcgctgctttctattgtttagtgttatgtgattaccttcttacattcttgttcaacactagtgtaattcattattcatgacttctttattggtgcatcttaaaaaaaaatattgcatttata

SEQ ID NO: 115333 - DNA, 345 bp, Zea Mays
acatttgtcacaaattagttctgtttatgacgttttctgagagctaacccaacatagtgacgcaaaaaaatattcgtcattaaagtcgtcataatttggaagaatcagaccattgtgacgatatttaatgacaatactgaattgtcataagagtgaatcgtcacagtacccttttatgccataactatgacgatatagtgtgtcatatcatgtttcgtcataacttttattattttaatacaaataataatgtaaaatctatttttacatgcgcaagtattatgtgcatatttggacgcatgtgccagtgctgtgtttcaaaaaatactttaaaaaacaaaaaaa

SEQ ID NO: 115334 - DNA, 897 bp, Zea Mays
ctcacctcgggccaggccaaatcaagctcaccatttcccatgcatccaaactaacctccccgcgaccgagcccagtgcctcagcgcacgcaggacatggccggctccggcggcatggagcttccgccgctccgtgacctatcgcgacgggctgcctccttcctgcgcatggcgcggctggcgctcaccggcgccgccactccggcacaactgctcgccggagaggaggtcgtcgtcgacggcggcatcagctgcaacccatactacaagagcatcagcacggaggacgactggggatctgaactctggccggatcaggaggacgaatcggaactgctcgtggacggcgacgaggacgggtcaacgacgagaggtggtggtggtggtgcatctgagagtgtcactctggtcggagccggaggaggcggcgtcggtggcccgctggacaggaaacctcagttgaggcaccagtccgcagcacccggcgcacacgtgacgtcgtcggagccatcatcgtcggagccgttgatgacacgccgccgagccacgaaacgggtgaatgataccgccgtggcggttgaccacccgttcggacgcgatcgtcgaggcggcgagtcgtcgtcgctgttgcttgtttcttcctagtcccatcgatctgacacaagaaaagtaagcaccagatggttgttgcttctcctttctcagagctagctcgcttgatcggagaagcgaaacaataatgcttcctactagcctagtttcttttcgcagaaacccaaaagtgttatgcacgtcaatactgtatcaatttctagccgccacaggaaagtataggatccaattacatgcactgtatctgaatcaatgaagaagtcgcttatctatggatctggctcgc

SEQ ID NO: 115335 - DNA, 77 bp, Zea Mays
aagcgggtggagcgaggggggcgtgagggttagttcgggatgctataattcagcaaccctcgtggccaatcctctaa

SEQ ID NO: 115336 - DNA, 350 bp, Zea Mays
acataaactcgggcaaccgcctccagctatccgcgttaggaagttagaaaatctaggaggactccgcgcgtcgctcaacctcaccggcaaccgcgcagccgcttaacggccaccggtttccacggagcatatgcccagtgcataaatacccagatcgctgggaccatgtactttgcgccatcaccgaaggggagagaagggtgttgccgccgccacggatgaggctagccggagagtcctcctgctgcacgccgaagcggaacaacgcctggcaacaccgtgatcttggcgcgaggacttgtgtcatctgaaaagcaagttggtacctggattctcaagtgccaggcaag

SEQ ID NO: 115337 - DNA, 2085 bp, Zea Mays
gcgtccgatccatccccagtccaccccattccattgcgtgctggagcccttcccagctttctctggtggcgccgcccatgtcccctcctgcacactgattgagctcttcattcttctccctcttctctctctctttctcctactgttagctactagccatacctagggtttgtcacggccttctcagtttttgagccatcaccttttattctctctctctccctctctctctctcatgacccaagacacatccatccagccatccgcgctagctctctagctagctatcctcatcagcaccatctgtctcttgctgtctcgcagcactgttcttagctgcaggtagctccagctcgatcgttcgttctctcttagcagctaaggaaggccacataaattataaaaggcagcccttgagggcaggcgcaaggaaagctgtggtttccatctcctcacacccttctccatcgttctccctccccaagagtcacggtcagtaaaaggaacgaaagaggccgagtcgttctcttaacttcgccaccgcacccgccatcatggtgttctcctcgctcccgatcttccttgaccctcccaattggggccagatgcatatgcagcagcagcaaccactccagtgtctcctcgacggcggtgctggcagcgaccaccaccacctgatgcctccgccgtcctgcctggcgccgctgcgcggaggtcctgctgacacggcggcgagcgctccagcgggaggcggctcgtccacctcggtgccgacgacggcgggagcaggggcaggggcgggggcgacgcagcctcgccccgtcgtgtcgatggcggagcgcgccaggctcgtgcgcgtgccgctcccggagcccggcacgctccgctgcccgcgctgcgactccgccaacaccaagttctgctactttaacaactactcgctctcgcagccgcgccacttctgcaaggcgtgccgccgctactggacccgcggcggcgcgctccgcaacgtgcccgtcggcggcgggtgcaggcgcaacaccaagcgctccagcaagaagtcctcccgcggtggcggcgcgggcgccacggcggccacctcctcgtcctccaccacctccacctccaccacggccaccaccaccacgacgagcgcggccatggcggcggccgaggccatcgccagcatgcaggcgcagctgccccacctcggcctcccgcccgcagcggccgccgccgcgctcgaggcctcgctggagggctaccaccaccactacctcccgctccagatgcagccgcagttcctgcagcaggctggcctgcacggctaccatttcgccgacgacggcagcggcgtcctcgcagacgggttcccgaggggcgtcgttgcctcgggccttctcgcgcagctcgccgcggtgaagatggaggagcacagcagcaacggcggaggtgccgtcacggcgcatcaacaagagcagtcgtactcgtactggcccggcagcaccggcggtggcagtgggtggccggcggagttcttgtcggggttcagctcgtcgtcgtcggggaatgtgttgtgagttgcatgtggccgtccaggtccagctggggataaatatgcatacatgcattctgacgaagctgaactagctcactctcctcagttagtttatgtggtttggaacttaattggagtcgtcttcttcaattagggctggtgatcgatcttgttttgggtcgctgcatgtttttttccttacgagttttaagctgcaggttaatgtcgtgtagttggtagtttttgcatgtagtgggaggtgcatgtgttaactcacggatgtgatacgtgtcaggttacttaactatactatgtttaattacatgagaacttggggcatagttgtactagtacaatggagctctcgaaatttcaaatgtgtgtttggatgttttattatcgattgaaatgttgtggaatagctgatgaatggcggctaagtctgtctgttcaaaattcgatcaactcatcgacatgatgctatctcagtgatctttttgatgaaattcgttcttccaccctcctct

SEQ ID NO: 115338 - DNA, 2435 bp, Zea Mays
gacgccgccatgcgccttcgttcacacgatcgcgtgccaacggctcagatgtccccacgacgcgcccaggaacattctagaacaccacagcccacgcgctgacgacgagccctttgttccctataaaagccactgcccggctcagtctctcgccctctcgaaaccctagtcccctgctccattctcagccgccgccaatcccttcccgtgctccgcaaccgctgagtgagaagaagagatggccggcaagggcgatggcccggctatcggcatcgatctcggcacgacgtactcttgcgtcggcgtgtggcagcacgaccgcgtcgagatcattgccaacgaccagggtaaccgcaccacgccctcgtacgtcgccttcaccgactccgagcgcctcatcggagatgcggccaagaaccaggtcgccatgaaccccatcaacaccgtctttgatgccaagcgtctcatcggcaggaggttcagtgatgcgtctgtccagagtgatatcaagttgtggcccttcaaggtcatttctgggcctggtgagaagccaatgattgttgtccagcacaagggtgaggagaagcagtttgcagctgaagagatctcctctatggttcttatcaagatgcgtgagattgctgaagcttaccttggtagcacgatcaagaatgctgtggtcacagtccctgcctacttcaatgactcacagaggcaggccacaaaggatgctggggtgattgctggccttaatgtgctgcgtatcatcaacgagccaacagctgcagctatcgcctatggtcttgacaagaaggctaccagtgtcggtgagaagaatgtcctcatctttgatcttggaggtggtacctttgatgtctccctcctcaccattgaggaaggaatctttgaggtcaaggccacagctggtgacacccatcttggtggtgaggactttgacaacaggatggtcaaccacttcgtccaggagttcaagaggaagaacaagaaggatatcactggcaaccccagggctctccggaggctgaggaccgcttgtgagagggcgaagaggactctgtcttccactgcccagaccacgattgagattgactcgctgtatgagggcatcgacttctactccaccatcacccgtgccaggtttgaggagctcaacatggacctgttcaggaagtgcatggagcctgttgagaagtgcctgagggatgccaagatggacaagagcaccgtccatgacgttgtacttgttggtggctccactaggatccccagggtgcagcaactgctccaggacttcttcaacggcaaggagctgtgcaagaacatcaaccccgatgaggctgtcgcctatggtgctgctgtccaggctgccatcctgagcggtgagggcaatgagaaggtgcaggacctgcttctgctggacgtcacccctctgtccctgggtctggagactgctggaggagttatgacagtgctgatcccgaggaacaccaccatccccaccaagaaggagcaggtattctccacctactcggacaaccagcccggtgtcctgatccaggtctacgagggtgagaggacccggacacgcgacaacaacctgctgggcaagttcgagctctccggcatcccccctgcaccccgtggtgtgccacagatcaccgtgtgctttgacatcgacgccaacggcatcctgaacgtgtctgccgaggacaagacaacggggcagaagaacaagatcacaatcaccaacgacaagggccgtctctccaaggaggagatcgagaagatggttcaggacgctgagaagtacaagtctgaggatgaggagcacaagaagaaggtggaggccaagaactcgctggagaactactcctacaacatgcgcaacacgatcaaggacgagaagattgcgtccaagctgccggccgatgacaagaagaagatcgaggacgccatcgacgcggccatcagctggctggacgccaaccagctcgccgaggcggacgagttcgaggacaagatgaaggagctggagagcctctgcaaccccatcatcgccaagatgtaccagggcgcgggtgaagacatgggcggcgctggcggcatggacgaggacgcccctgccggcagcggcggccctggccccaagatcgaggaggtggactaagcggtttgttgtcagtcttgagtgtgctgcagttgctggctggcccagttgctgccgagagttatcgtcagttggtgcggtgtgtccgcttaaactttatttgtggttggttggtacttttgtggtggttatttttttggacctcgtgatagtcggtcggttcaatgttatcgcggctactggcaaaccttaagtgatacggtattcttcttttcgactaaaatagaataaaacatagagactaaaa

SEQ ID NO: 115339 - DNA, 2524 bp, Zea Mays
ctcatcagggaggcttgtctctgtgggctggttctaagcgtaagcgggccggccagcacttatgccgccgccaatcccttcccgtgctccgcaaccgctgagtgagaagaagagatggccggcaagggcgatggcccggctatcggcatcgatctcggcacgacgtactcttgcgtcggcgtgtggcagcacgaccgcgtcgagatcattgccaacgaccagggtaaccgcaccacgccctcgtacgtcgccttcaccgactccgagcgcctcatcggagatgcggccaagaaccaggtcgccatgaaccccatcaacaccgtctttgatgccaagcgtctcatcggcaggaggttcagtgatgcgtctgtccagagtgatatcaagttgtggcccttcaaggtcatttctgggcctggtgagaagccaatgattgttgtccagcacaagggtgaggagaagcagtttgcagctgaagagatctcctctatggttcttatcaagatgcgtgagattgctgaagcttaccttggtagcacgatcaagaatgctgtggtcacagtccctgcctacttcaatgactcacagaggcaggccacaaaggatgctggggtgattgctggccttaatgtgctgcgtatcatcaacgagccaacagctgcagctatcgcctatggtcttgacaagaaggctaccagtgtcggtgagaagaatgtcctcatctttgatcttggaggtggtacctttgatgtctccctcctcaccattgaggaaggaatctttgaggtcaaggccacagctggtgacacccatcttggtggtgaggactttgacaacaggatggtcaaccacttcgtccaggagttcaagaggaagaacaagaaggatatcactggcaaccccagggctctccggaggctgaggaccgcttgtgagagggcgaagaggactctgtcttccactgcccagaccacgattgagattgactcgctgtatgagggcatcgacttctactccaccatcacccgtgccaggtttgaggagctcaacatggacctgttcaggaagtgcatggagcctgttgagaagtgcctgagggatgccaagatggacaagagcaccgtccatgacgttgtacttgttggtggctccactaggatccccagggtgcagcaactgctccaggacttcttcaacggcaaggagctgtgcaagaacatcaaccccgatgaggctgtcgcctatggtgctgctgtccaggctgccatcctgagcggtgagggcaatgagaaggtgcaggacctgcttctgctggacgtcacccctctgtccctgggtctggagactgctggaggagttatgacagtgctgatcccgaggaacaccaccatccccaccaagaaggagcaggtattctccacctactcggacaaccagcccggtgtcctgatccaggtctacgagggtgagaggacccggacacgcgacaacaacctgctgggcaagttcgagctctccggcatcccccctgcaccccgtggtgtgccacagatcaccgtgtgctttgacatcgacgccaacggcatcctgaacgtgtctgccgaggacaagacaacggggcagaagaacaagatcacaatcaccaacgacaagggccgtctctccaaggaggagatcgagaagatggttcaggacgctgagaagtacaagtctgaggatgaggagcacaagaagaaggtggaggccaagaactcgctggagaactactcctacaacatgcgcaacacgatcaaggacgagaagattgcgtccaagctgccggccgatgacaagaagaagatcgaggacgccatcgacgcggccatcagctggctggacgccaaccagctcgccgaggcggacgagttcgaggacaagatgaaggagctggagagcctctgcaaccccatcatcgccaagatgtaccagggcgcgggtgaagacatgggcggcgctggcggcatggacgaggacgcccctgccggcagcggcggccctggccccaagatcgaggaggtggactaagcggtttgttgtcagtcttgagtgtgctgcagttgctggctggcccagttgctgccgagagttatcgtcagttggtgcggtgtgtccgcttaaactttatttgtggttggttggtacttttgtggtggttatttttttggacctcgtgatagtcggtcggttcaatgttatcgcggctactggcaaaccttaagtgatacggtattcttcttttcggtatttgtttctgcatactgctggctcgtattttgtttttgagcttgcgattctttgttaatttcaaccttttgccagttaggaggccattctcatttgattgtttaccacaatttttaggctgtcatgttatgtggcatttaatgaaattgataaactcccacccagaatagctagcagcttttgttgggtcctggtttttcttgtcctcgaagagttttgggagcaaaacggtttctttata

SEQ ID NO: 115340 - DNA, 1866 bp, Zea Mays
atcggcaggaggttcagtgatgcgtctgtccagagtgatatcaagttgtggcccttcaaggtcatttctgggcctggtgagaagccaatgattgttgtccagcacaagggtgaggagaagcagtttgcagctgaagagatctcctctatggttcttatcaagatgcgtgagattgctgaagcttaccttggtagcacgatcaagaatgctgtggtcacagtccctgcctacttcaatgactcacagaggcaggccacaaaggatgctggggtgattgctggccttaatgtgctgcgtatcatcaacgagccaacagctgcagctatcgcctatggtcttgacaagaaggctaccagtgtcggtgagaagaatgtcctcatctttgatcttggaggtggtacctttgatgtctccctcctcaccattgaggaaggaatctttgaggtcaaggccacagctggtgacacccatcttggtggtgaggactttgacaacaggatggtcaaccacttcgtccaggagttcaagaggaagaacaagaaggatatcactggcaaccccagggctctccggaggctgaggaccgcttgtgagagggcgaagaggactctgtcttccactgcccagaccacgattgagattgactcgctgtatgagggcatcgacttctactccaccatcacccgtgccaggtttgaggagctcaacatggacctgttcaggaagtgcatggagcctgttgagaagtgcctgagggatgccaagatgctccaggacttcttcaacggcaaggagctgtgcaagaacatcaaccccgatgaggctgtcgcctatggtgctgctgtccaggctgccatcctgagcggtgagggcaatgagaaggtgcaggacctgcttctgctggacgtcacccctctgtccctgggtctggagactgctggaggagttatgacagtgctgatcccgaggaacaccaccatccccaccaagaaggagcaggtattctccacctactcggacaaccagcccggtgtcctgatccaggtctacgagggtgagaggacccggacacgcgacaacaacctgctgggcaagttcgagctctccggcatcccccctgcaccccgtggtgtgccacagatcaccgtgtgctttgacatcgacgccaacggcatcctgaacgtgtctgccgaggacaagacaacggggcagaagaacaagatcacaatcaccaacgacaagggccgtctctccaaggaggagatcgagaagatggttcaggacgctgagaagtacaagtctgaggatgaggagcacaagaagaaggtggaggccaagaactcgctggagaactactcctacaacatgcgcaacacgatcaaggacgagaagattgcgtccaagctgccggccgatgacaagaagaagatcgaggacgccatcgacgcggccatcagctggctggacgccaaccagctcgccgaggcggacgagttcgaggacaagatgaaggagctggagagcctctgcaaccccatcatcgccaagatgtaccagggcgcgggtgaagacatgggcggcgctggcggcatggacgaggacgcccctgccggcagcggcggccctggccccaagatcgaggaggtggactaagcggtttgttgtcagtcttgagtgtgctgcagttgctggctggcccagttgctgccgagagttatcgtcagttggtgcggtgtgtccgcttaaactttatttgtggttggttggtacttttgtggtggttatttttttggacctcgtgatagtcggtcggttcaatgttatcgcggctactggcaaaccttaagtgatacggtattcttcttt

SEQ ID NO: 115341 - DNA, 561 bp, Zea Mays
atggctacttggtggcactaccgtggttgggggagaacaaaaaggagcacaaccaccatatgtgggaggaacaccatagggggagggaccacatcaagaagccataaggagaagcatacgaaggaggtgcaccatatgatccataaggaggaggtccctatggcatatgtatggctggtggtgcacgcggaggggcaagacctggcgtcgtacagcgtgagcctggtggacgggttcaacgtgcccgctgtggtgagcccgcaggcggtgggcggcgggcagtgcccggccctggggtgcgcggcggacctcaacgccgggtgcccgccctcgcagcgcgtgctgggggccgggggcggcgtggtggcgtgcaagggccccgcgggctacttcaaggagcggtgcccgctgacgcgcaccacgcccaccgacgtggagcccgtgccgcagcggtgcttggcgcccggcgagctcaaggtcgtcttctgccagtccgccatggtgaacgccgccgccgccgccgagaccgagcgcatccgcaccgtcgtcgcggacaactag

SEQ ID NO: 115342 - DNA, 445 bp, Zea Mays
agggatctggggttatgtgccataacacgccaccaccggtgataccagcaccaggaggagcttatgcaggggagggagctactacaggagagggtagtttgacaaacaatccgtttgaatagtggtcatgtaaataatatagttattaatgtctttttttctttagaatccaaaccagttaaatgacttcgttaacgacttgttcgcttctggaggtagtggtcacaactcaaatgaccccgatatatgatgatttgagtattgtagtgaattgtgagtttgtgttatgttgtaatggactatgtgatgtatttgtgaacaattgtgaattgtggactctagtggtattttggtgaactctgatgtacttgtgaagaattgtgatattttgtgttaaatgtgtgtaattctggaattattgtttctgtcatattattgtgattat

SEQ ID NO: 115343 - DNA, 1017 bp, Zea Mays
ggacgctagtcgcatcactaagctcgcctataaaagccaggcagagctgtctgatgttttgtcattgccatcacaattcacaaactcacgcctaataacactacacaaccagctataggggcctaccagctttgtcaagggctgaagaagaccatggccagagccatcgtcctcgccgctcttctcctcgctgccactgccagctccacgacggcgaccacgctgaccatccacaacctctgccctcacccggtgtggcctctggtgacccccaactcaggcctcccttccatctccgacaacaccgcgcgactagaccccaacgcgctgctcaccctctccttcccgcccaccttctgggccggccgggtggccgcgcgcacgggctgcgacgccgccgcgtccggctgctggacgggcgccgcgccgcccgccaccgtcgtgcaggtcaccgtccacgacggcacgaaccaggaccaggccgcctacagcgtcagcctcgccgacggcttcaacgcgcccgtggtggtcagcccgcaggcggccggcggcgggcagtgcccagcgctggggtgccccgtcgacctcaactgcgactgccccccgcagcagcgcgccgccgagggcgccgcgtgccgcggcccgccggagtacttcaagagccggtgcccgctcaccaggaccacgcccaccgacgtggagcccgtgccgcagagctgccgcgcgccgggcgagctcaaggtcgtcttctgccaggcgaccatcgtcacaggcggtgtcgccgctgccgccgaagccgagatggccatccgaaccgtcgtcgccgacagctagactactggccgagacagacgtccagctccactggccccgcttcgttgaatcgttatttgtcacgctttttgctttcgtgtgtttgttagcttaggcttcgacgcgtgtaacccggtggtttttaagcaaaatttcaagtttaaattcgtattacatattttttaataaaagcattacatttct

SEQ ID NO: 115344 - DNA, 3856 bp, Zea Mays
tttgatttcctcgcctcgtccccctctcctcctctctaccttcgccgccgccgccgccgccgccgccacccctgcccttcctgcaccccacgcgcctgcgcgtcgctgatcgggtttccagccgcgcgctacttccggccttcctccgcgtgtactgaggcctcccgctccgctcaggacatacgcagcggggtcgtgactccgcgtccaacgacagtcaatatgtcgcttgacgttactcaagttctcttaagtgcacaatctgctgatggcgcaattaggaagcatgctgaagaaagcctcatgcaattccaggagcagaacctccctgggttcttgctctccctctcaagcgagatggccagtgaagagaaacctgaggagagccgcaggttagctggcttgattctgaagaatgcactggatgcaaaggagcagcacaggaagaatgaacttttccagagatggctggcactcgatactggtgccaaggcacatattaaaggattgttgttgcaaacgctcacatcttctgtcgcaagtgccagatccactgcttcccaagttattgccaaggttgccggtattgagattccacagaagcaatggccagagcttatagggtcattgctcgcaaacatacatcaggttcagccaaatgtcaagcaagcaacacttgagacgcttggctatttatgtgaggaagtttctccagatgctgttgagcaagatcaagtcaataaaatacttacagctgttgttcagggtatgaatgcttctgaggcaaactctgatgtgaggcttgcagctacacgggcattgtataatgctttgggctttgctcaggttaacttctcaaatgacatggagcgtgactatatcatgagagtagtttgtgaagcgacacagtctccagaggtgaagataaggcaggccgcctttgagtgtttggtggctatctcgtctacttattatgataagctggcaacagacatgcaggatatatttaatataactgcaaaagctgtgaggggagatgaggagtcagttgcactccaggctattgaattctggagttccatatgcgatgaggaaattgatattctggatgagtacagcagtgaatttacagctgattccgatgttccttgctactactttatcaagcaggctcttcctgccttggtgcctatgttgttggaaactctcctcaagcaagaggaagaccaagacttggatgaaggtgcttggaatcttgcaatggctgggggaacttgtttgggcctggtggcaaggaccgttggtgatgacattgttcctcttgtaatgccttttgtggaggagaacataaccaagtctgagtggagacaaagagaggctgcaacatatgcctttggctctatcttggagggcccatcagctgataaactggctcctcttgttaatgttgcattgggcttcatgctgtctgcactgatgaaggatccaagcaaccatgtgaaggacacaactgcttggacccttgggagaatctttgagttccttcatggttcagcgcttgaaactcctcctatcatcacaggtgagaattgtcagcaaatacttactgtgctgcttcacagcatgaaggatgtcccaaatgtggctgaaaaggcatgtggagccctatatttccttgcacaaggctatgttgatgctggatctgcatcaccattatcccctttctttcaagatatcgttcagaacctgcttatggtcactcacagggacgatgctggagaatctcggttgcgaacagcagcatatgagaccctaaatgaagttgtcaggtgctccactgaggagacggcccctattgttatgcagttagtacctgtgatcatggtggagctccatcagacactggaagctgaaaagctgtcaactgatgagagggagaagaggagcgaactgcagggcctcctttgtggttgcttgcaggtcataatccaaaagttaggggggatggagtcaactaagtactctttcttgcagtatgctgatcagatgatggatctgtttttgaaagttttcgcatgtcgaaatgccacagtacacgaagaagctatgcttgctattggtgcattggcatatgcagctggcccaaactttgcaaagtacatgacacagttttatcagtatttggagatgggacttcagaactttgaggagtatcaggtgtgtgccattaccgtgggtgttgttggtgacctctgcagagcactggaagacaaaattttacccttctgcgatggcatcatgacccagctcctgaaggacctgtccagtaaccagttgcacagatctgtgaaaccaccgatattttcgtgctttggtgatatagcactggcaattggggaggactttgagaagtatttgatctatgcgatgcctatgctgcaaagtgctgctgatttgtcggcccataccactgcaactgatgatgagatgctcgactacaccaatcagctaagaaatggaatcttggaagcctactctggtatcctgcaaggatttaagagttcacctaagacacaactgctgatgccattcgctccgcatattattcagttccttgatgctctgtacaatgggaaggatatggatgatactgtgatgaagactgcaataggtgtcttgggagatctggctgacacattaggtgtccatgctggccctttgatcaatcaatccacctcaagccaggcatttttagaggaatgcttggcatcagacgatcctttggtgaaagaatctgccgattgggcgaggatagcagtcagccgtgcagtttcgggttgatgccacagtgagtctcgagtctgcacttgcatcccatccacatgtcatcatgcctgggtctttaattgcttcatgtccagacctgctcttcggtgaagtccaacatctttacagcagagtcggagggtccccactaactcatgcatcagtacatgtgtcaacccgcgccccgcttcggcgggaaaagaagggttcaagttggccgcccactaactttcgccaaatgcatctgcaaccttcatgtcttgttggaggtgagatgaggttctattatcgcatgacatgctcacagattcctgtgcatggcatgcctatgatatgtggcccatcatttcctcccctgtatccatcccatgcatcaaagtttggtcagatggccacgtgggacaaaaggcgcagtttcttgctgctgctccagtaagaaagagcgggctcgaatcgcgttgtcacaggattatttttgtatcgatcagggtggccaagtccatttatgtcagacatatcctccctgctgctgctggtaggttgtgaatttcctagcattcttttccctttggccgcttgcattgtctttgcatttcattcttggtcggtctattttgtaagagttgctttgggggcaaaacatgtgtcctgtccggtctgctaccgcacgctatttgtacaagtcaggtccgtgcgtgcattggtttatttcccggtgttatcggagcagcgcgtgtttgtgcctttttccaccgtgtttttggtaatctacatacatgctgctccatttcggtttatgaggagctgtgtgggtgaagaaacagagatagagttatataggtctttgaagtggttcttgctggtggcagaggcaaattgagttgggtgtggtttatgaattgtaccatggtgtggagaagacccactggtaatatttactgtatttggctggtgctccgccgcagagcatatgagcaaagttaagcgtgagtgctctttttctcagcttcatctaaacatggaatcaatt

SEQ ID NO: 115345 - DNA, 372 bp, Zea Mays
tatattggtgcagctaatgtattccatcgtgacctaaagcccaagaatatactggctaacgcggaccgcaaactgaaaatatgtgactttggacttgcccgtgcatcattcaatgatgccccttcagctatattttggacagattatgtggcaacaaggtggtaccgggcacctgaactatgtggttcctttttctccaaatacactcctgcaattgatatttggagcattgggtgcatatttgctgaacttctcactggaaggccactatttcctgggaagaatattgtacaccaattagatattataacagatcttcttgggactctatcatctgagaccttatctcagattcgaaatgagaaggccaag

SEQ ID NO: 115346 - DNA, 1305 bp, Zea Mays
accggagtcaccgtcgtggagcgagctgaggcctgagccaagccgaggccagaccacgtccacaaatgccgccgcagaacggcgcgtgggtggcggaggcgcaggcgcagcgggggacgaagcagccggcggcgcggggacggcggcccggcgcggcgctgctgctgctcctccttctcctccgcgtgggcgcgctgtgcgcctccgcggccgcggccgcgctcgccgccgccgccacgccccggcggcgcgcgccgttccggttcctgctggcggccgacgccatcgtggctgtctactcggcgctggaggccgccgccgccgcgtgggaggcggcccggggagccacgcctctgccggaggccgtgcagctctggttcgacttcggccacgaccagggcttcggctacttggcgctggccggggccgctgcggcggcgcgggacgtggcagggtgcggccgcgggcgggaaggatggacgagcggcggcgggggcgcgggcgctgcggcgtgcgtccgggccgacgtcgccgtggggctcggcttcgcgggcttcgccttcctggcactcgccgcgctcgtcaccggcttccggctcgcctgcttcctcgccaccggctcccggttcccgccgacgcaaccggcatcctactgaccggctggtggtagcttcggcatcggagcactgacaatgtactggtcgtgcgcgcgccagcgtgcgtgcttgtgcttgtgcgtgaacggcgcgtggtagggtgtggaaccttggcaccatcacgagaatgcaagcctaagttaaaacttagggcctatttggttcgtttagtctagagactaaattttagttgagggactaaagtttagtaaatatcatttttagttctagagattaagggcttagagattaagggcttgtttggttcgctacctaacttgtcatattttgcctaacttttctgcctaaggttagttcttcaattcgaacgattaaccttaggcaaagtgtggcgcaattagccacaaaccaaacaggccctaagataatgtttggttcctttaatcactaggctgactaaagtttagttgctaaagtaccccgtttagtttcagtgagtaaaccggactaaagagcattaattgttgtgaataatgattgtattacccctattaattagtgaatgtttgctgcacgaagaaagtggagaggacaaataaggtaaaaatcctactttagtccattttagtcaccccttggtgactaaagaactaaagtttagtcaccctactttagtcagcatgtttgc

SEQ ID NO: 115347 - DNA, 1314 bp, Zea Mays
gcactatataatgctctctcttctctctcgtccaacgctagccgcaccgcgctcacttccgcaccctcttcccgccgcgccgccgccgccgccgcttcctccccgccgccgggcaagatgggtcgcgtgatccgcgcgcagcgtaagggtgcgggatccgtgttcaagtcccacacccaccaccgcaagggccccgcccggttccgctccctcgacttcggcgagcgcaacgggtacctcaagggcgtagtcaccgacgtgatccacgaccccggacgcggcgccccgctcgccaaggtcaccttccgccaccccttcaggtacaagcaccagaaggagctcttcgtcgccgccgagggcatgtacaccggccagttcgtttactgcggccgccgcgccacgctctccatcggcaacgtcctgccgctccgcgggatccccgagggtgccgtcgtctgcaacgtcgagcaccacgttggtgaccgcggtgtcttcgccagggcctctggggactacgccatcgtgatcagccacaaccctgacaacggaacctcgaggatcaagctgccatctggtgccaagaaaattgtccccagcagctgccgtgccatgattgggcaggttgccggtggtggcaggactgagaagccgatgctgaaggctggcaacgcctaccacaagtaccgtgtgaagaggaacagctggcccaaggtccgtggtgtggccatgaaccccgtggagcatccccacggaggaggtaaccaccaacatatcggtcacgcctctactgtccgccgcgatgctccccctggccagaaggtcggtctcattgcggctaggaggactggaaggctcagaggccaggctgctgccacagcctccaaggctgacaaggccacctagagtattgttgttcttgttttatctatccctctgctgtgatttattagatggttaaaaaggacgtgttccgctatggatggtactatggtgaaacattgtgtcagtttttgtggtatctgtatggattttcaagtatgcctaaagaagtttttggtgctcaatgatatatgcctcttttctcagtttgcattttggtttgttgttgtagaattgttgaacggttgtctccgatcgtgtaatttctgagttccttaacgttggttgtgcatggtttgtcaaacaaatgtaagtggtaattaccctgaacttcattacggctgagttatagagattgttggaactgggaggtgcttgatagacggctggacagattttgagcctagaaatttaaatttcaacacagttctccct

SEQ ID NO: 115348 - DNA, 888 bp, Zea Mays
atgggtcgcgtgatccgcgcgcagcgtaagggtgcgggatccgtgttcaagtcccacacccaccaccgcaagggccccgcccggttccgctccctcgacttcggcgagcgcaacgggtacctcaagggcgtagtcaccttccgccaccccttcaggtacaagcaccagaaggagctcttcgtcgccgccgagggcatgtacaccggccagttcgtttactgcggccgccgcgccacgctctccatcggcaacgtcctgccgctccgcgggatccccgagggtgccgtcgtctgcaacgtcgagcaccacgttggtgaccgcggtgtcttcgccagggcctctggggactacgccatcgtgatcagccacaaccctgacaacggaacctcgaggatcaagctgccatctggtgccaagaaaattgtccccagcagctgccgtgccatgattgggcaggttgccggtggtggcaggactgagaagccgatgctgaaggctggcaacgcctaccacaagtaccgtgtgaagaggaacagctggcccaaggtccgtggtgtggccatgaaccccgtggagcatccccacggaggaggtaaccaccaacatatcggtcacgcctctactgtccgccgcgatgctccccctggccagaaggtcggtctcattgcggctaggaggactggaaggctcagaggccaggctgctgccacagcctccaaggctgacaaggccacctagagtattgttgttcttgttttatctatccctctgctgtgatttattagatggttaaaaaggacgtgttccgctatggatggtactatggtgaaacattgtgtcagtttttgtggtatctgtatggattttcaagtatgcctaaagaagttt

SEQ ID NO: 115349 - DNA, 1136 bp, Zea Mays
aaacaaaaaaaaaaagccaaagccgctcctccaggctccacgcactcgcacgcgcgctgacgaggcgaggcggctgcgggtgggtcccacgtgcagcctcacgagccgcgtcacgcccccggatggggtgcctgttcttcccagacgaggagagcgagggagcgagacgagatccattcccaacttcagctgcgcctcgactcgtagcccgaaccctagccaccaagccggaggcgagagagcagccatggcgcggtgcctcgcgctcgtcgccctcctcgtactcggcctcgccgccgccgcctccgcggccgacgcgcccttcgtcgtcgcgcacaagaaaatttcgctctcccgccccaagccgggcgtcgagcgcgtcgctgtctccctcgacctctacaaccagggatccgcgactgcctatgatgtgtccattaatgacgactcttggccaacagaagtgtttgagcttgtcactggagagaaatcgaagacattggaaaggcttgaccctggtgccactgcttcacacacatatgtcctggagaccaaaacacagggcaggttccagggttcaccagctatcattacataccgtgttcccacaaagacagctcttcaggaggcatactcaactcccatcttcccactggatattctcgctgagagacctccagagaagaagtttgaatgggctaagaggcttgtgatgaaatacgggtcacttgtgtctgttgtctcttttgttggactgtttatctaccttgtcgcgagcccgtcgaagagcagctcaaaggcaagcaagaagagacgctgatctacttataggtcgcagttgacggtgtagctggtggttttgcctggaggaactcttggtagtttgagctgtgcgaaagcttttaagtttacatttactcaccactccatgaacggcaacgaagtattcatcagttagaaaagtgcacctataattttggttgcttataactttctatttgtcagagatttaactcgaaggacctgtaactaggaaagttaattttgcttggaagaacattttgatatgatcgttgttcctgtgcttcgtgcgtggtgccgtgaaattgagaggaaccatttggtgggacgttttc

SEQ ID NO: 115350 - DNA, 267 bp, Zea Mays
ccccgatcgacctcgtgatccttgcggccatgtcgtcgtcggcagccatgggcaattgatgaattcgtctagctctctgagtccatgcggctagacgcctcgctacctgcggatgatgacccatccaatgagaccgcctcgcatcgcccctccatcattctcaacgccgtcgcgctcggcaatatcgatgctggcaagtcggctgtgtggaacagcctcatcggccaccctgtgctgcccacggaaggggaaaaccacgcgtcgcag

SEQ ID NO: 115351 - DNA, 192 bp, Zea Mays
atggcggccggcaggagggcgatgctcgcgctcttcctcatctgggctatggcaatgcttcttttcatggctacccacgctccggcagtactcggcgcccgtgaggacgccgtctgcttttgctgcgccgacaagatatggtgtacgttcgaccccaattgctgctcgagacccccaccaagtgcaaactaa

SEQ ID NO: 115352 - DNA, 782 bp, Zea Mays
agacctgtttccccaccgagcgtgcagctcaaggatgaggcgctcttcatggggagacatgcgcccacgcttgaggccagggtggaggtagttgacccaccgcagccggcagctcttgcctgtccggttgagtcctgcatgaatgaagatacagaaagggagaggggaagcaagaatagagtcggttagagaggttgatacttgcttttgcgacttagcgcgatgacttcaatttagctacctaatttgtggatccccacccctcaaacctgatactttggcaatgaaatcccaacgacgttcaccgaacagacggacagtgcataccagttgcaggtcctcctgctctgtccatggccccttgcgagtctcctctctcactgtcaccatatcgcctatgcgatatgatgaaactaacgctgctcactcctaccttgtatcggctgggagccggtcttcttgctcttctttctctgtgtgcttgttggctccagtttcaggattatcttgttgaaatccagtctgtttgtgaggaagaggagaggaagaagaaagctagtacagagaagagtatgccactttgtcttagttgcctactggtttggtggcttactggcttttgcctctcatttataggtaagagggggaggtcttggtggccaggtgatatggtgggtgtgatttggagctccctaaagatcctatattccaccatttgggttgccctcagattctaactgataaagtagcttttttaattggctcatgttgcgcatattgta

SEQ ID NO: 115353 - DNA, 1062 bp, Zea Mays
atgtcgcccgccgccgccaccacaaccttcgtcgcaatctccatcgccgtccccaaccctaccgctccatcccgcggtcgcgtgcgccttccgctaggcggggtccccgctgctccacgccgcgccgtcgcctctatggcagtgtccgcccccaggtccggcgccgccacctcgtttctcgagcgccgcgagtcggagcgcgctctccactttgtcaaataccagggcctcggcaacgacttcataatggtggacaacagggattcgtcggtgccgaaggtgacgcccgaggaggctgcgaagctgtgcgaccgaaacttcggcattggcgccgacggtgttatcttcgtcatgccgggggtcaatggtgccgactacaccatgagaatcttcaactctgatggcagcgaaccagagatgtgtggtaatggagtccgttgcttcgctcggtttatagccgagattgaaaatctgcaggggacaaatagattcactattcatactggtgctggaaagatcgttcctgaaatacaaagtgatgggcaggtaaaggttgatatgggcgagcctatcctttctggactagacatccccacaaaactgctagctaccaagaacaaagctgttgttcaagctgaattggcagttgagggcttaacatggcatgtcacatgtgttagcatgggaaaccctcactgtgtcacatttggtgcaaatgagttaaaggtattgcaggtcgacgatttaaaacttagcgaaattgggcctaaatttgagcatcatgaaatgtttcctgctcgcacaaacacagaattcgtacaggttttgtctcgctcacacctcaaaatgcgggtctgggaacgtggtgctggagcaactcttgcctgtggtactggtgcttgtgcagtggttgttgcagctgttcttgagggtcgagctgagcggaaatgtgtagttgatttgcctggcgggccattggaaattgagtggagggaggatgacaatcatgtttacatgactggtcctgcagaggtcgtcttttatggatctgttgttcactag

SEQ ID NO: 115354 - DNA, 333 bp, Zea Mays
gtctcgaccagccaagccctcctgtgtactgaccgcaccatgggtggactcgagagagattccgccgctgctaggcttagatgtcgccgtcggtcgctgctgctatccttgaccggcgcgtagtggcgggtgatccctgggatcggatttggtgccgctgtacgcatacccgcttcgccgttcgttgtgtgtgtcgcgccgtgcgattgggagcctggccacgggtgccattgacgcgtgttgtggccccgctggcagaccaagaagcgtcgccccgccgtagcgcctgctcgctccgtagccggtttctctgcgacatcatcgctggtaaga

SEQ ID NO: 115355 - DNA, 914 bp, Zea Mays
acatcattcaaggcagccggcagcgcgtcgacatgcgcacggccgtcctccgctggccggccgccacctcccatggcaacgccgcgcgccctcgcgttgagacttgagagagggccaactgccaagagcatccgcccgcattcatggccgccccgctggcccgctgttgcatggtgacccgtgtcgatctgtggtcaccgtgcgccactgctcacggtcagattcttcgatcgggctcctttcagctaaccgtccgcgcgcgacgatttcagctgaatgcacaataccgcgccttcgagtccagccagcatcttcctccgttccatcaacgtcctcgctctctgcccccgggccgtaactaccagcccaatcaatggattggcacgtacatgctgcggccgccgcgtcgtgcggtgcctgccaccgtttccggccgccgacctcctcacgcacgcagctcagctcagctcatgggcgtccgccaccgagttggggtcggcgggtcgccgccgtcgccgcccatgcatgcccggccgtccgggtgaccagatgcgacacctccttgggcaccgacgacgccgtcagcgcatacatctacgtgcatgcccacaaggccaccgccgggctccaaggggagtggagtgtcatggagccatgaatatccatgcctaacgagtgacctggaaacagggacaacacacaaaggttccggtcccctcccccgcggtaccaccggctgcattcaagaccaaatctacaggacagatgggctgggcacccagatggcgggacctgctgcggttggttgggttcaagacttcaagtagtgtagttgtagttcttgttcttggaaagacccttcatcagcacctgctttacctgcatttgacaaattttcgtttccttttcagata

SEQ ID NO: 115356 - DNA, 850 bp, Zea Mays
acacacactcggtttgtttctactaacaccaccctctctctatataagcccacgcacattgtgcttgtgccaaagcagtccaaacacgcaacgcaacactcgccttcccctcccaaccctccgaaccgaagcagcaaagctagacgatgacgctgacgatcccggacgaggtgcgcgccaaggcggaggtgtacgtgggcgacgcggcggggcaggagaagacgcggctgctcctccaggagacgggcctcccgagcgggctgctcccgctgcgggacatcatcgagtgcggctacgtggaggagacgggcttcgtgtggctccggcagcgccgcaaggtggaccactacttcgccaaggccggccgccacgtgtcctacggcgccgaggtgtcggcggtggccgacaagggccggctcaagaagatcacgggcgtcaaggccaaggagatgctgctgtgggtcaccctccacgagatctgcgtcgacgacccgcccacgggtaagctccactgcaaggccatcggcggcctgtcccgcagcttccccgtcgaggccttcgaggccgaggagccggcgccgcccggagccggcggtgtcgttcccagggacgcggaggaggaggaggaggtggagaaggaggagggggagggggacaagaacccggagcaggaagcggcggccgagaaagacggcgacgcccccgctgccgctccagcccctgaggaagcagagagcaaggccgaggagaaggccgacaaggaggtgagctcggccgatccggcggtggtgcacgccgaggcgctggccgccaagaactgatcatcgcggacgatccatatgggatgcat

SEQ ID NO: 115357 - DNA, 975 bp, Zea Mays
atggccgcaacacagagcaggggcggcggcggtgttgttcccgttcaggtggacgaggagcacggccgccgccggcagggaggagcagcgccgcaggaggaggaggaggaggcggccgagaagccggagctccggcgtggcccgtggaccgtggacgaggaccacatcctcgtcaactacatcgccgacaacggcgagggccgctggaactccctcgcccgcgccgccggcctgaagcgcacgggcaagagctgccggctgcggtggctcaactacctccggcccgacgtgaagcgcggcaacttcaccgccgacgagcagctgctcatcctcgacctccacacccgctggggcaaccggtggtcgaagatagcgcagcacctgccggggaggacggacaacgagatcaagaactactggaggacgcgggtgcagaagcacgccaagcagctcaactgcgacgccagcagcaagcgcttcaaggacgccatgcgctacctctggatgccgcacctcgtcgacgccaccgctaccgctgacgacgaataccaccaacaccaagccgccgcagcaggcaacatcgacggcctgctcgccggcggcgacgtcgaccacgtccagcacgctctggcggcgggcgtggccgctgctatggcgtcgtcgtcgtccgactcgctcgcgtcggagccgtactcgtacgaggacggtggcctcctcgcgagcctgcgcgccggcgacgacatgcagctggtgatgagcggcggcggctgggcggcggcgcaggcgcaggaggccaacgaccaagggctgtggccgtcgtcgtctggtcatggtctgtcgtcgtcggtgcaggccgctgccggtggtgccggccagtttgaggacccggagctcagtggatgggtgcaaggtttctccgacagcattattactggtaacctttgggccttggaggaaatttggaagatgcaatga

SEQ ID NO: 115358 - DNA, 2075 bp, Zea Mays
tttcgaatcttgaataggtatgtgcatgccgagttgcatggagcttccagtactataatcaagaatcacaaacctgacactcctattccaccattaacattaaaccaagcaggatgcttcactgtttgccacagcaaagcatgggattcaaaaattgttacaagtgcttggtgggtgtatccacatcaagttagcaagacagctcctactggcgagtaccttactgttggtagttttatgatccgtggcaagaaaaattttcttccacctcacccccttgttatgggctttggtatactcttccgtttggacgagagctccctagcatctcatttgaatgaaaggagggttaggggtgaagatgaggccctccatgaaatggaagcagagtctcgcaagaagcaaagtaaccctgaatctgatgaagatattggtagtgaaggtgcaaataaggaaactcatgaagatgaatcaaacgggcaaactacaaacattcaacaaaacaatgatcttgagcttcctgatctgtctagcaacattggtactgccaactcatctgaactccttcctgaaatccaagctgaggaaaccttggacaatggaagttccattcttaaggaagaaacaatcgaagcttctgtttcatctcaacttgatgatctgctagataagactctttgccttggccctgcaaaggtgtcaggtaaaagctctctgcttaccagcatcccttcaagtttagcagaagatgatgatgatcttgaagtgaaaaggccaactataagagacaaaccatacatatcgaaagcagagagaagaaaattgaagaagggccaagttaatgatgaaactgctactgattctcaaaatggtgaagctgtagaaacaccaggtacatcaaagcaagaaaagggaaaggcagagacaaaggctactgattctaaagcaagtcagccagatacttcacagcaagaaaaaggaaaggcaaacacaaaggctactggttctaaattaagccagccaggtaattcacaacaagaaaaaggcaagggaagcactcacgctggtaacgctaaagtaagccgtggacagaaagggaagcttaagaagattaaagagaaatatgcagagcaggatgaagaagaaagagagatccgtatggcattgctcgcgtcatctgggaaagcattgcggaaggataaaccttcacaagatgtagaagaaacctctgttaaagaatcaaaaccatcagctggtgaagatgattcgtcaaaaatatgttataaatgcaaaaaggctggacatctttctcgcgattgcccagaaagcacatctgaggtggaccgaaatgatggcagtattagtagaagcagagacgatacgggtaccaatactgctcctgctggtggcaacagtcctatggacgaagacgatgttcaagaaattggtgatgaagagaaagaaaagttgattgacttggactacttaactggaaacccactaccaaatgatattttgctatatgctgtacctgtgtgtgccccttacaacgcattgcagacatacaaatatcgtgtaaagattaccccaggcactgcaaagaaagggaaagctgcaaaaaccgcgatgagcttgttcctgcacacacctgatgctaccaaccgtgagaaggagctcatgaaggcatgcacagaccctgagctggtggctgcaatcgtcgggaatgccaagatcacagcgcctggcctcactcaactgaagcagaaacagaagcagaaggggaagaagtctgcaaaacagaactagtgtgaaactggtgggtccaaagaactgatccatccccgattcgcaggaagtgaagctttgcctttgcagaaagtctgtggatgttgtggtttgtcagttgtcgctcgaggcgcatttgggggtatatgcagcctgtcagggagtacacccctttggcgtcacactggtgaggccagagcgacaggcacgcagtaggggacccaagctgcacgtctatgatgcaattgcgatatacagctcataataaaagaagtattgatttcatatgc

SEQ ID NO: 115359 - DNA, 1925 bp, Zea Mays
aggcggcggagagaagggagaaaatccccggtagggaggggggaaggaagccaaaggcccaaaggtctcggcgctgccgtagtaccggctgaggcaagatggtgaaggcacgaatgacgacgacggacgtggcggcggaggtgaagtgcctccgccgcctcatcggcatgcgcctagccaacgtctacgacatcacccccaagacataccttttcaagctgatgaacagcagtgggattactgaatcaggggaaagcgagaaggtcttgttgctcatggagagtggtgtcaggttccacaccacccaatacgttcgtgacaagagtaccaccccttcaggtttcactctgaaactacgaaagcacattcgtaacaagagacttgaagatgtccgtatgctcggatatgacaggattatccttttccaatttgggcttggtagtaatgcacatttcataattttagagctatatgcacaaggaaacattcttctcacggattcagaatacacagtattgacactactccgttctcacagagatgacaacaaaggattggccatcatgtcacgtcatcgctatccagtagaagcttgccgtgtttttggcaggactgactttgcaaagttaaaggacatgttgacaaagcctgataaggctgatgataaagaggaaattacgtctggatcaaccgatgctcaggaaacttctcaatccaccaatgatgaagtgttggtaactgaaatatctgaaaaatcactgagtaaaaaagaaaagaaggctgctgcaaaagctaagcagtttggttcaaatgcaaaagtaaacaatggtgctcaatccaataaagctactctgaagacaattcttggtgaggcactggcttatggccctgcactagcagagcatatcatattggatgctggtttggttccaagtacaaaggttgggaaagacccagagagcactatcaatgacagcactgttcagtctctaatggaatctattacaaggtttgaggactggcttgtagatattatatccggccaaaggattcctgagggttatattctcatgcaaaataagatgaccgcaaagaacatcacacccttggaagaggcttcgattaatcataagatatatgatgaatattgccctgttctgttgaatcaattcaagtcaagggaatataatgaatttgcgacatttgatgctgcattagacgagttctacagcaaaatagaaagtcaaaaggtgaatcaacagcagaaagcaaaagaggaatctgcagctcagaggctgaacaaaataaaattggatcaggagaatcgtgtgcatacattgaggaaggaagtggaccattgtgtcaaaatggcagaattaattgaatacaatttagaggatgtagatgcagcaattttggctgtgcgtgtttctcttgcaaatgaaatgagttgggaagctcttactcgcatgattaaagaggaaagaaaggctggaaacccagtagcaggacttatcgacaaactaaattttgaaagaaattgtatcactctactcttgagcaataatcttgatgacatggatgaggatgaaaaaactgcacctgtggagaaggtagaggttgatatagcactttctgcacatgcaaatgcaagacggtggtatgaaatgaagaagaaacaggaaagtaaacaagagaagactatcacagctcatgataaggcgtttaaagcagctgagaagaagacacgccttcagcttgctcaggaaaaaacagtagccgcaatcactcatatgcgcaaagttcactggtttgagaaattcaattggttcatcagcagtgaaaactacttgataatcagtggccgagatgctcaacaaaacgagttgattgtgaagcgctatatgtccaaaggagatctgtaa

SEQ ID NO: 115360 - DNA, 105 bp, Zea Mays
atgcggttgtctataaggagacttggaactactccagttctattcttcaagcatttttagtactgatagttccaagtttggttagtgtgtgagatttaaggagcg

SEQ ID NO: 115361 - DNA, 430 bp, Zea Mays
atatttagaggagttgacggatacagacaatgagcatttaataaagtctcgattctagccctggctagagttgccattgcagctgccgcgaccacggccgagacagggcaccttagatccgccgcagcaaggggctatggcgaagcagggggagaaccttcctcaaccgaagtcgccaacgcaactgccacagccacggaagattcaccttccccatccagcgaagcagggggagaatcttcctcaaccggagtcgccaatgcaactgccacggccgaggaaggttcaccttccccaaccagcgaagcagggggagacccttcctctgccggagtcgccaacgcaactgccacggccgcagaaggttcaccatccccagccatgggggcgtcagtcgctaggagcaaggagtccattgccggcttccagc

SEQ ID NO: 115362 - DNA, 601 bp, Zea Mays
acctcctgtccgtggtaaccaggctcgaggccatggtcccacttccccgcaaagcagctcccccgcggaaaccacctctctaattccccggtgttgaatcgagcggaaccaactgcggagcgagatcgaggtatctgggaccgcctccaaggaggcgcggggaggcaggggaacgccgaaaccctaggcggtcgaacggacggagcgatcaggggggatggggttcgctcgatcagcagcgtaggacgcgatgggggtgccggagcaggaagggggaaacgggtcctcgtcgccctgccggtccggcgagcggcgggggagacaatgacaggtggggccgctcgtcagagttggaggcggaatgacgaggcgacgcggggaggggaagagggaaggttggggaggcgctcgtgagagcgataatgaaggatctgggaggacggacgcgtggcgtggcgggagtggacgtggggacggaagcccgtgctctcgtggcacagatgtcaaaggaaaccacgtggcggaacaggagcggaggagatctgtaaatggtgtggcttcagggagcataggatccggtgtccggcttgggggtgaatga

SEQ ID NO: 115363 - DNA, 90 bp, Zea Mays
ttttttttttgcaaatacacatttagacacctcaagacctctatattaaataccatgtacatgtccttgtatgctcgctcgctgatctta

SEQ ID NO: 115364 - DNA, 629 bp, Zea Mays
attctaatgacccacggaaaactgttgggatccatctaggaacgtatacagacctcttcctatatataaatgggtacgaccgattaagacacacacaatctaattgaaccaatgtatttaaaatctaatggtgccatcggagccgaggtttggtacctaaaacctaagcctcgaacctaaatcctttggattttaggatccggttgagttttagatctacaacaaggagaggaagagatcactcatgtggcacaatctataaccctaaatcgaaatcttcaaaccctaagtaaaccctaaccctaagatcctaaatagtattcacccgagcatacaaagaaagaagaagatgcacaatggccttaccttattcgtcgctaaaactggcgaccacaataagaggcgacccaatttcccgtctcacgggcgcaagcgcgcacgagtcttaggacgccgcaatgatcccactcaacggcagcactctcacccttgggtttgcttgcacatcaacgagaggcagcatgagcaccaccaccactccgccatgatctcctcactctcaccgaagtagggatgggacgaagggaaagagggccggggaaaagagagcacagtgccactaggggtag

SEQ ID NO: 115365 - DNA, 201 bp, Zea Mays
tttgagttcatgtgacttattttagaaacttgagctcacaaactttctcttatttggtctctgtatggtggaattatgtcagtttataatctctgttcgttcagccagtcgttgtgaactatcttctaatcgctcacttcattggtcgtgttgtaccaagacatattggatggagtaaacaataacatcagttagccaaat

SEQ ID NO: 115366 - DNA, 1160 bp, Zea Mays
attcacgtttcaagtatctattatcatctctatctggaattcatccaggacgtttggcccgagcggtctagcaaccattcccagacggtgggttttgtgggccttttattgttacccgccctgtttgtgctcggccctgatatgtgcttatacttgctctttagttagtctgactgttgctcctctctctctctctccctctccatttgggtcccccttctctttctcatggcggcggcggcggcgtcgacgccgcagggagtggcggagcggcggggcatcccggcagcggccttcgttgaggacgttgaggcctacctccgccaggtcgggctcgacgtcaattccgcgctcgcttttctccaggaaaggctgcagcagtacaaaatagtggagatgaagcttctagcacaacaaagggatcttcaggcaaagattcctgatatagagaagtgcttggatattgttacaacattacaagctaaaaaggatttgggtgaggcactcatagctgatttcgaattgtccgaggggatctactcccgtgcaaaaattgaggatactgactcggtgtgcctgtggttgggtgcaaatgtgatgctggagtactcttgcgatgaggccaatgccctcttgaagaaaaacttggaaaatgccaaggccagcttagaagtccttgttgctgatctccatttcctgcgagaccagcaaaccatcactcaggttacaattgctcgggtattcaactgggacgtgcaccatcggagaagcaaacaggccgtaaaagaaacctgattacttacatcacgaggccgaccaatgcgactgggactttttttttttgtaccttctgctacctctggcagattagcccgtcatagcaagcagtttgttgttgtatcggtttgttcagagttttacggtgtgggaacattagtagaaatgtcatttcactgccttcttttccccgctggatcgcatttcacaaaatatttccaccattcttgcagagaagccttgctatcgccaaactacttggaacattttgtcccgcctcggaactttaggacttttttccccgtgtttcttgcgtttttctagtaagaaaacgaactggttcatgtataattcctgcttttctaaaggggcttcctttttta

SEQ ID NO: 115367 - DNA, 3220 bp, Zea Mays
attcaatctccatccggatgcgtcatgcgtgtgtgtgacttgtgagagagacagattccacagcaatttgctccccttccacgcacaggtcaagaaccgctccccagaaaagatcgtatttttcatcgattcaaccggtttctgtacgggaaatcgctgctggagatctcagagaaccggaagctcggagcttttgctccgtttgcgtcgaatctgccttgggagcggataaaggagcggcctttcgagctcgtcggagccgcccctgaggaggcgaaaggggacgcggcggcggcgccatcagctgtagggcgctcgtggaagtcggtgaagccggtggtttgaggacgaggtggcctcggtggtttcgaggaagccacccactgccgcggcggggatggactccagcggggaggaactcctgaagaagatccgggagctggaggttgggcaggcgcagctcaagcaggagatgtccaagctgatacccggcgccgtggagcggcggcgctcgcaatccgtctcgccgcggcgcggcgcgccggtgccaccgccgaccaaggcgaaggcggggccaccaggtaggctgctgtccgggggatttgagggcgggcagcgtgcgtgggcccgtgggtcggcgtctttcccgcactcatcgccgctgcatcgggagggccgggccacgggcgctggaaatggtagcaccagcgctaggctgcctgagaggcagtactccagggtgctgcagtcactggggcattccgtccacattcttgacctcgatgggaggatcatatactggaatcagtctgcggagaatctgtttggctatcctgcatcagaagcccttggtcaggacgccctcatgcttctggttgattctggtgatcacaatgtggtgaatgacattttccgacgtatttctatgggtgaaagttggactgggaagtttccagttaagagcaaacaaggagatagattttcagctgttgccaccaacacacctttctatgatgaagatggaagtttggtgggtatcatttgtgtttcaagtgattcccgccacttggagcagatattttgtaagcctccaacctctgcaaggcctcaatcagaatcatctaggacatcttgtgatgggagttgcagcaacactagtcgcagaatcaatttgttgaacagaagtccttttgatcctcagatacccctgcaaagcacttttgcatccaggataacgaatttggctaccaaggtcacaaataaagttcgttctcgggtcagcacagacgattatggcatagaacgggaaggtggcagtggtgagagtcattgttcggatcgtggtgcaaaggaagaaccaacatctagcggaacaaatacacctagagggaatgcaccacatggtcccttttctacagatgagaactcccctgggaaatcaacgaacccaagcagtgatgaattagaaggaaaagtaggtctgcacaagtttttgagttcaaaggcagaggcactactgaacaagaaagggatatcatggccttggaaagtgcgcgagaatgacggacctgatgaaagaaatcatgtgatattgttgcatggagaccaagagaatgttatgaatcatcagaaggtttcagattctagcatagctccagattcccaaggcgctgaacacaacctacctagcaaaaatgaggcatcaggttcctggtcctcttacaacaataacagcacaagcagtgcaagcagcacaggaagcactaatagcagtgctctctacaaagtagatcatgaagcggattgtctggattatgagatcttatgggaagaccttgtcattggagaacaaatagggcaaggctcttgtgggacagtatatcatgctttgtggtatggttcggatgtggctgttaaagttttctccaggcaagaatattcagaagatgtgatactgtcctttcgacaagaggtgtcccttatgaaaaaactgcgccatcctaacatactgctcttcatgggtgcggttacgtctccacaacgcctttgtattgtaacagagtttctccctcgtggaagcttgtttcgcttacttcaaaggagtgctaccaagttgggtgtgagacgacatgttcacatggctttagatattgcaaggggcatgaactatcttcaccattccagcccacctatcattcaccgagatttgaagtcatctaatctgttagtcgacaagaactggactgtgaaggtggcggactttggcctttcacgtctcaagcgcgaaactttcttgacaacaaaaacgggaaaaggaacaccgcaatggatggcgccagaggtgctgcgcaacgaaccttccgatgaaaagtctgatgtgtatagctatggggtgatcctatgggagctcgttactcagaagataccctgggaaaacctgaactcgatgcagggttttgcggccacaattttttttaagataatgcttgtctgggtagcttcgacgatccctaactgtcgagggtatgctcccatatccgtaggtcattggcgcagtaggttttatgaaccaaaggttggatatcccaagcgaagtagatcctcagtggagatcaattatcctgaactgttgggaaagcgacccgcagcaacggccgtcgttccaggagcttctggagaggctccgcgagctgcagaggcgttacgccatccagcagcggaacgcgaagaacagcgtcgaggagtgaagactgaagaatgcaatgcaactctcccaagcggcggcgggcttgctttgaagcattttgcgagccagcagcatgccagatctagagaagggcctgagcctcctgtactggggcctgggggctgctaaggctggaagaagtatgttctacagacgaggcgccttctgtcttcttctttttttttaaaaaaaaagaaagttcttccccatggcaattgtgactgtaattaatttctgggtcctgacagcaagggtcagtagggtagcgagtgagtagtgactgagctcgggcttgcttgctagcgcctctgggttctgattcttgacaacgcaaatgcgtactacgtggttaacagtaacatccaatccagcctccagtttctggcaagggcatgcatgatgatgtgtagattgtctgttctgataggtcagtggtgtgtacatgtgatccccaaccgaacgcattcgactgcg

SEQ ID NO: 115368 - DNA, 624 bp, Zea Mays
atgtcaatattatccgtgcatcacccactcaaaagtcaggacaaatctccacagcaagcaatcactttgtcatgctctcgagagagttctttgaaaataactgggaagaactctttactcctcgacgacaacgctgatctggcccttgtcaagcatgtcatagaaggacctagtcttcctctgctcgttccagtggtgcatcttccacatgcctcccgcgatcagacccagggtcagtccaatgaagatctccttcaccacactcgggcccttgagggtggcatgcgcaaccctgccgcctgccatttgctttcttgcttgttgaggtcagacgccaagcgcctgaaacgaaagcaatggagcttatgtgagctgatgcgtgggtgcagctgtgcaacaggcagacagcatttcttcaataagatgctacagacacacccaacaaagaccaatgagcatgcacgcaaaaactccaaacagaaacaacaggtaaccaatgccatatacagccgcgttataattgtgcctattcaggtgggttacgccgaatgtccttatatttgtggacaaaaattcaatggctgcagtaaaaatagacagcatattgacttatttgtgaaatag

SEQ ID NO: 115369 - DNA, 1711 bp, Zea Mays
ataaataccatgttacggtccaattccaatcaaccacgccgtctaaaaccacgagatccccggtgtcccactaatccatcagcagccgcacatagtaagggtgtacccagcaattcggccgcacgatgcacgagcaggaacaacccacggagtcccacaagggtcactgacagacacgcaagacagattcccttcaccttgctcccatcagcatttcatgggagccattctgccatgacaagagaattacaaagatgccctcgtcccggcattaaatacacctccccgctcggcctgatcccctcccccttccctcttctccgcctccgattggagtggctcgccttcttccccgcagccagcacgagcttgtcgagatttcagctcgtttctccgccagaggtcgagcaggccagcctcccaggaccgaagctctgcccggttcgccagtccaggaactgctgctctcccggagccagagatccaaacaaacctctgcgttggggttctccggggttccttgcgctggagggaggtttcgttctcgccggccatggtttggctgagaagaagcagcagcatattgatgcgaaatctctgagctttatgaagatcgccactcacctgcgccgctcctgcttcctccactccttctcggtcgtcttcctctactggttttatgtgatctcgtaacttgccctcccccggatccgccattccccgtgccctctctctctctctctctctctctctctctctctctctctctctctctctctctctctctctctctctctctctctctccgtcccctcttgcttctcccttctttcttgccttcccgaacaaccgccgaataataatacactagcgctagcgatagaggaattttgttggaggtaaagtagccagaccgaccgggggaaaaaagaccgtgtcttgatgtcgtcgtcgtcgctgtcgccggcggggaggacgtccgggtcggacggcgactcggcggcggacacgcgccggcgcgagaagcggcggctgtcgaaccgcgagtcggcgcggcggtcgcggctgcggaagcagcagcacctggacgagctggcccaggaggcggcgctcctgcaggccgagaacgcgcgcgtggcggcccgcgccgccgacgtcgcgtcgcagaacgcgcgcgtcgagcaggagaacgccgtgctccgcgctcgcgccgccgaactcggcgcccgcctccgctccgtcaacgaggtgctccgcgtcgtcgaggagttcagcggcgtcgccatggacatccaggaggaggtgccgccggcggacgacccgctgctccgcccctggcagttgccctgctacccggccgccgccatgcccatcggcgccccgcatatgctccgctactgatgagtgatgaatgattgcccccgccaaccatacgaggcagacagagccggggctggtcggcaaacgagacaagaagaattggctgcgtctcaacaacacatgattattgctgctgatctgttctctctgtgtgtatgagatgatgctcgtttacatatgtatctggttggttgtactttcggtattgtaatgttattatatcaataagtgttatgtaatctcctacgtttgagtgtttattcgatgattcattttttgtatacggttaacaagttactccatgaaaacatttctcatggagttcagttcg

SEQ ID NO: 115370 - DNA, 393 bp, Zea Mays
atggggatggacaagtgcagcgcgaatggacaagtgtagcgcgaacagcgtggacagcggcaacgtacacaaggcgggcatggtgatgaatgggttgcccatcagtgtgtacgcatctgagacattggggtgtgcggcggccatgtccacagacggttgatgagcaagatgctcggacgcattggggattcactgctgatcaggttcggcacatacacatgcggctcgtgcgccgtgtcatgcacgctcaagtgggacgtggccactgtcatggagtacaagggtatacccctgcagcaggtcgtcgactactatgtcaggggcacgatgtagaatatccgaagacaactattatcaataattagccaatataaactatttacaaacctttac

SEQ ID NO: 115371 - DNA, 1147 bp, Zea Mays
acgggggcacgtgactatctcgtgttcttaccttctctcctctcttctcaccagcggagagaaagcaaaccctagtccccgtcgtcgccgccggcaacccttcggatctgcggcgagcgccacagcggttagagcgaatccacccagggggagttgaagcccctttgtctgggaatttcgcggggaagcaagcggttggtggtgaaggaggctatggggtcgtcgtcgaaggtggtgcggccggaggaggtgctggagtcgctgaagaacgacggcagcatcgacgcgctccgcatgaagatcatcgcccagctcaaggccaacgaagatatgaagaaaaacactatgatgatggtggagcaaagcaaggtactgaatactcctggagctgagaaaaagacgaagagggagttgtttgatgcacttcgacaggaactggagaccccagtccttgagaaagcctccaaggcagtttgggagctgattctagacaatggtggattagggaaagagataactgaaacggttgagaaagtcttctgccggctcagtggaatcgacatgatgccacctccgccttcgggcgctggtgctcatcgagagaaagatgacatgtccttcgatgaaaaatttgtgaagagcaaggaggtggatgcctttgaaccatcctcatcaaggaagagacctttcagcgacgtcaaccgaaaaggtgcaggtgctttacctaatggcagtgctacagaccagcatgatgagtccgaggatagtgatcagaagatatgatgctctgctctctgctctaatttttagctcaggctgaagtagctttgctgcttgaatgataacaagtcgaattgtgatccctgcatattctatggctgtatggtatattggcaagttagactttttctgtttatacaagttctgtgagcaactgctataggatatttgagttttcaaatctgctgctgtctattttcttcttaatataggataaatttgttgactattactcgacagttttgtggtatgtttaacttgtaatcattctagagtgttgtaaccatcaagagttataagttagatgcttcttaatcttgcagtattctattctttttctcgagggagttcattagcaattttctaa

SEQ ID NO: 115372 - DNA, 1831 bp, Zea Mays
cgaacccatttcttgcagtgccacaggaaggagcaagacgatccatatttggagaggccatttggcatccagagcatccagataaacttgaaagagcaagaaaaacgaggcctcgtttcttgcagtgcctgtgcgtgcggcggcagcgcatgcgcattctctcccctccccgttctcctctccccgggcaacccggccgcgccgcccccctttcttccaccctcgttggtagagtaccgatatagttcccccatcggccaggaatcctcgcatcgcatcacgacacccggttcctctccctcccttcccttcctctgcttccggggaggaggagaggaaagagacagacgaagggcgcaccgggaaggaggacctggaggaggaggcacacaacacaatccttcctcttgcacgcggagtcctcaagcgggcctcctcctcggccttggctcaaattccgggtgccataacacgacctccgccggcggccaccggcagccatgtcgcccttctacctcgctcgcggtgcttccaagctagtgagaaggattacctcggagacatcggtcgagctcaagattctatctgataaatggcggcttctcctcgctggcctcattttccagtacatacatggtttggccgctcatggggttcattatctgcaccggccgggccctacccttcaagatcttggcttcatgattcttccggagcttgggaaagaaaggggttacatcagtgagacattgtttacattcgtcttcctcaccttcgttttgtggacatttcatcctttcatccttcagactaaacgcttctacactgttctgatatggcgcagggtacttgccttcttatgtgcttctcagtttcttcgaataataacattctatgcaacacagcttccaggacctaattatcattgtcgcgagggctcgcctctggctagattaccacctccccagaatgcagctgaggtctttctgattaatttcccaacaggagtgatttatggatgtggtgacttgatattttcatcccacatgattttcaccctagttttcgtcataacataccagaaatatggaagcataaggttttgtaagatgcttgcttggtgcatagctgttgctcagagtcttcttattatatgttctcgcaagcattacagtgttgacgtcgttgttgcatggtatactgtgaatttggtcgttttctttgtggataagaagcttacagaacttcctgatcgatcagtgggatccacatcagtacttcctgtgagtgcaagggataaagataccaagttgaaagaagaaaataccagattgctgaatggtaactctatggattcagctgatcggaggccacggacacaaatgaatggaaagcaaattgagaatgaaagccatgttgatagtgaaactgtgaaaacatgatcaactatcaaggaggggattttgttagctaagagacgtttcagacgactaaagaaatatgggatgccatccgctttggtgcctactgcctagctccttgacgacttcatgaaatatagctacgaaggaaatagttttacatctcgctgttctaggcagcagaagttttgtttgcaaaactgtacatcttcctcggctctctcatttgtaaccctttttctttctggtttctttcatttatttaccagcttggaattcagattatttatactagttgtgtatagttagcacaggttctttgcatgtgaacagtaatcatatggacaatataagattgttcttgttataagcaccactttttattattcaactttttattcaagtgaaac

SEQ ID NO: 115373 - DNA, 1312 bp, Zea Mays
tcaatgacgaaactacccctgcctcttctccttcttcagcctccagccggcgccgcctccccgctccgctccctcctgccacctgcgcgcagcctcacggcgatgtcagcggccacgtcgacggcgccgtcgatcggagagtatccttccccggtgtcccctccctacccggccacctccaaggacctggagctccggcgcgccatgaccgcctccgcgcgctccgcggccttcgcgtctgcggacgtcgtgttcgaggacgagtggctcgccgtcgtcgacaaacccgccggcgtctactgcgacgccctcctcacctccttcccttgctctgccgtctcaggctggaccgtgatactagtgggctcatggttatcaccaaatgcaacaaagttgctgggaagctagtgaaggcattcactgaccataaagtcaagaaaacatatctagctctctgcataggtttcccaccggcatgggaaaagatcaagatatgttctggccatgggcgatcgaaacacggcgcttggcgtgtatatgctatgtctgatgttggccgttcactcccaggcggctctgtcgtacgggacatgagcacgcggtttgaagttctaggcgtcaacggtaaagggcagttcagagaaccctacagcttggacaccgacgatatcgagccaattactgtgcaagaaaaggcgactgaccagacttgtggcggtgatgcgaacagcagtgtcatcttggttagagcctatccccagagcggacggacacaccagattcgtctacactgccagtatcttggtctccctatcagaggtgatgtgaagtacggcggggtgatcgagtgggacggcgtagagtgtgagggccatgcactgcatgcggagagcttgtcatttgtacaccccatcactggattgcccatcactctccggtcacctctccctccatgggcaaaagattgcatatcagcaatggaataaagttcccttggcctcaatgtgatgcacgatgctccatttggcactgaaatgtccaccaaggatgtaactctgagatctcaaaaggcatcatctcttgaagaccttttctgggagtagcgttgggaaatagcactatcaaatatactgagtccactgttacaggcagttctacttgagactgtaattttagcacgtgtaccgtagagatattgagttgtttgttgtagttttgtttcaaattgtgagtacccaaacgcaggcacacacaacacatgttgaaccatggatatttatttatttatttatttggtcgttcaacaaggcat

SEQ ID NO: 115374 - DNA, 1347 bp, Zea Mays
tcaatgacgaaactacccctgcctcttctccttcttcagcctccagccggcgccgcctccccgctccgctccctcctgccacctgcgcgcagcctcacggcgatgtcagcggccacgtcgacggcgccgtcgatcggagagtatccttccccggtgtcccctccctacccggccacctccaaggacctggagctccggcgcgccatgaccgcctccgcgcgctccgcggccttcgcgtctgcggacgtcgtgttcgaggacgagtggctcgccgtcgtcgacaaacccgccggcgtctactgcgacgccctcctcacctccttcccttgctctgccgtctcagagaatccagcaactaaacctaaccttcaccttgcaaacaggctggaccgtgatactagtgggctcatggttatcaccaaatgcaacaaagttgctgggaagctagtgaaggcattcactgaccataaagtcaagaaaacatatctagctctctgcataggtttcccaccggcatgggaaaagatcaagatatgttctggccatgggcgatcgaaacacggcgcttggcgtgtatatgctatgtctgatgttggccgttcactcccaggcggctctgtcgtacgggacatgagcacgcggtttgaagttctaggcgtcaacggtaaagggcagttcagagaaccctacagcttggacaccgacgatatcgagccaattactgtgcaagaaaaggcgactgaccagacttgtggcggtgatgcgaacagcagtgtcatcttggttagagcctatccccagagcggacggacacaccagattcgtctacactgccagtatcttggtctccctatcagaggtgatgtgaagtacggcggggtgatcgagtgggacggcgtagagtgtgagggccatgcactgcatgcggagagcttgtcatttgtacaccccatcactggattgcccatcactctccggtcacctctccctccatgggcaaaagattgcatatcagcaatggaataaagttcccttggcctcaatgtgatgcacgatgctccatttggcactgaaatgtccaccaaggatgtaactctgagatctcaaaaggcatcatctcttgaagaccttttctgggagtagcgttgggaaatagcactatcaaatatactgagtccactgttacaggcagttctacttgagactgtaattttagcacgtgtaccgtagagatattgagttgtttgttgtagttttgtttcaaattgtgagtacccaaacgcaggcacacacaacacatgttgaaccatggatatttatttatttatttatttggtcgttcaacaa

SEQ ID NO: 115375 - DNA, 1043 bp, Zea Mays
gttcttgatttactatttctaagttcttcttttacaaaagagatgatacactattcgttctcactacaggcaaacatttcttgcgacttgcagagaatccagcaactaaacctaaccttcaccttgcaaacaggctggaccgtgatactagtgggctcatggttatcaccaaatgcaacaaagttgctgggaagctagtgaaggcattcactgaccataaagtcaagaaaacatatctagctctctgcataggtttcccaccggcatgggaaaagatcaagatatgttctggccatgggcgatcgaaacacggcgcttggcgtgtatatgctatgtctgatgttggccgttcactcccaggcggctctgtcgtacgggacatgagcacgcggtttgaagttctaggcgtcaacggtaaagggcagttcagagaaccctacagcttggacaccgacgatatcgagccaattactgtgcaagaaaaggcgactgaccagacttgtggcggtgatgcgaacagcagtgtcatcttggttagagcctatccccagagcggacggacacaccagattcgtctacactgccagtatcttggtctccctatcagaggtgatgtgaagtacggcggggtgatcgagtgggacggcgtagagtgtgagggccatgcactgcatgcggagagcttgtcatttgtacaccccatcactggattgcccatcactctccggtcacctctccctccatgggcaaaagattgcatatcagcaatggaataaagttcccttggcctcaatgtgatgcacgatgctccatttggcactgaaatgtccaccaaggatgtaactctgagatctcaaaaggcatcatctcttgaagaccttttctgggagtagcgttgggaaatagcactatcaaatatactgagtccactgttacaggcagttctacttgagactgtaattttagcacgtgtaccgtagagatattgagttgtttgttgtagttttgtttcaaattgtgagtacccaaacgcaggcacacac

SEQ ID NO: 115376 - DNA, 1317 bp, Zea Mays
tcaatgacgaaactacccctgcctcttctccttcttcagcctccagccggcgccgcctccccgctccgctccctcctgccacctgcgcgcagcctcacggcgatgtcagcggccacgtcgacggcgccgtcgatcggagagtatccttccccggtgtcccctccctacccggccacctccaaggacctggagctccggcgcgccatgaccgcctccgcgcgctccgcggccttcgcgtctgcggacgtcgtgttcgaggacgagtggctcgccgtcgtcgacaaacccgccggcgtctactgcgacgccctcctcacctccttcccttgctctgccgtctcaggcaaacatttcttgcgacttgcagagaatccagcaactaaacctaaccttcaccttgcaaacaggctggaccgtgatactagtgggctcatggttatcaccaaatgcaacaaagttgctgggaagctagtgaaggcattcactgaccataaagtcaagaaaacatatctagctctctgcataggtttcccaccggcatgggaaaagatcaagatatgttctggccatgggcgatcgaaacacggcgcttggcgtgtatatgctatgtctgatgttggccgttcactcccaggcggctctgtcgtacgggacatgagcacgcggtttgaagttctaggcgtcaacggtaaagggcagttcagagaaccctacagcttggacaccgacgatatcgagccaattactgtgcaagaaaaggcgactgaccagacttgtggcggtgatgcgaacagcagtgtcatcttggttagagcctatccccagagcggacggacacaccagattcgtctacactgccagtatcttggtctccctatcagaggtgatgtgaagtacggcggggtgatcgagtgggacggcgtagagtgtgagggccatgcactgcatgcggagagcttgtcatttgtacaccccatcactggattgcccatcactctccggtcacctctccctccatgggcaaaagattgcatatcagcaatggaataaagttcccttggcctcaatgtgatgcacgatgctccatttggcactgaaatgtccaccaaggatgtaactctgagatctcaaaaggcatcatctcttgaagaccttttctgggagtagcgttgggaaatagcactatcaaatatactgagtccactgttacaggcagttctacttgagactgtaattttagcacgtgtaccgtagagatattgagttgtttgttgtagttttgtttcaaattgtgagtacccaaacgcaggcacacac

SEQ ID NO: 115377 - DNA, 578 bp, Zea Mays
gacagaagcccgatattacctgacttggctgcaacaaactaaaaagcaccattgttagttaaattaactacaaattattgcattcacctgacatttatagcacagcacaaatcagtttcaatctctaaagcattactcaactttgtacagttactgctaataatccctatttgtagcctgcgtataggccaaccaggctcacggtgtgcagccgcagtgcgtttggttgtaggtcgtatccatgcagccaggctcgtgttactttatcgtttgtttggtttgtcgcatatgcagctgagcttgtgtctagcgatgcaaaaaaaacacctcgggccaggctgtggagaggcggccaaaatctccgcatttggagaaccaggctcgcgtgatgcacagccaggccccaccggcctggctcgcacggccaggctgctcagatacggcaaccaattaggcccacttctacggtcatgtgaaatttacaaaccatgaaccactactacatgacaaatcctaaggttctcatataattcttaatctcgatggaattatggaaagaggccaatgcctaagaagcg

SEQ ID NO: 115378 - DNA, 1058 bp, Zea Mays
ggatgcagtcctagaggctgacatggaggctacaagccaatctgagaaggggaaaaaaggatgatcagaggcaaaagaagtgcaaaagatgtggtgaattaggtcacagagaaactagctacaagtgccctttaaatggaacaaagaaaaagtaaccgatgaaatgtctaatttgaacatgtgcacttttatatttgactctaattgtggtgtccaacatgtaggaagagaaagcctcgcatgaataaaacaaagtatggggagaatgccaaaatccccaaaagccgacttgaagaaggtgtccaaagtcaaggtgttatccaaggtgaagttgttgtccaacttgaagaaattgtccaagatcatagcgttgtccaaggtgaagttgttgtccaaggtgaagaggctgtctaagtcgaagtttcgcttctggtgcaaagcccagctagaccaacaagggagtatattttataggacaacccaatcagggtgactaggaggtaaacaaatatgccaaccagccaagtatttctcagttctgaatcttactggatgcttcatgtcagttgaggagctagcagcactgtggtgccatgaacccaacttatctgaatcttctattttttcagtcggcttgctatgctactgggagatggacagattgataatcagtcacctctcaaaaatacaactccgaagaagatgctagtgaagaagctcacgccaaggaagctgaagagaatgtgaaaatattctaataagctactgttttatgtgttatccaagattttagtaagatagtattagaagtgaaccttgttatgctgtcagatgaactatatttattatgacgtgtgagtagtgctgtcagcttttgggagtagtgtgctgtcagatgaactactactttgaccaagaactactacttgatggagatcgtagttattttgatggatagcgtagtgtgctgtcagatgtactgttatctgaaagaaatgttgaatctgttagtgtgcacaggttaccagcttgtgttattgtgcacaggttatcagcaa

SEQ ID NO: 115379 - DNA, 902 bp, Zea Mays
gattaaaaagttcatgaacaccctgcgacagtaccagaccacagccattatgaacctttaggttgtcccaatttatcctttctactcttatacgaaagcttgtgatggccaacataattgatatgagatgttcatttagaatgaatggttagtcgaatgattgtgcttaaacctcatgtttttaggagacgaacgacgatcgagaggctgttctacaagcttataattgataatgtggcggagctgcttcattttgtctacacaacaactgtaggtgaggcctgccagaaatatgggtccatctttggacgaccacagggtttgtatgtcagcctgaaggacaaggggaaggtcctagaagttctaaggaactggccacataggaacattcaagttatctgtgttactgatggtgagcaaatcttgggacttggagatttgggttggcagggaatgggaattcatgtaggcaaactttctctatatagtgctcttggaggatttgatccatcagttctaagcgttcatatattttatctactcttttttggttgcatctcttaaaatggtcatgtatgtttggtaccaacaaacaattgaattatctcaagtggcgagttctaaattacgttgcagtgttttcctatcacaattgatgttggcacaaataatgagaaactgcttaatgatgagttctacattggacttcggaaaaaacgtgtgactgtcgaggagtatgatgagcttattgaagagttcatggctgctgttaagaaattctatggtgagaaagtcctcattcaatttgagtactttaccaatcataatgcctttgatctgcttgaaaatataacaagagccatcttgttttcaatgatgatattcaggtaaatagaaccgtc

SEQ ID NO: 115380 - DNA, 171 bp, Zea Mays
atgcctatattcagtacaaattcagtacatgtgcaagactcgaacgtcgcgctctacagccggcagaagtctgcggaggtgaagttgtacgagactcggatgatgcccaccatgtggtcgttcaaaacccctcaagcaaaaattgaagccatgatctcatgctttggttaa

SEQ ID NO: 115381 - DNA, 127 bp, Zea Mays
ccagatgttgtgatattcacagaggtaactgcatgcggagtaactaatattggcttttatttatcatttagtaccaaattgttgacctccaactgtatacattttgttagctatttatgtttgcatt

SEQ ID NO: 115382 - DNA, 672 bp, Zea Mays
atgcccgtgcgcactttggatgtgtccctcatttttgtggcagaggaggatcgctgggagtgcaaggacggagacggcgagagggaggattgcattgaggaggaggtagacagctggggagaaaggggagaaacaagaacacctgcaggggcaacatgtgaatcagaggagtttggtcagacaattaagttcgatataaatgatttgaaacaatattactatactatcaacgccgaggagtacctatgcttcccagagcacctctgcacctgctactcatacgtctacgacgttgtcgggcatgacgagcagctcagtgcgcgaatctgtgtctgtcgcatcctacatggaaggtttttgatgggggcgaggccggtcggtgccaaggcgactcaccttcccttgagagcgcggatcgagagccggtgcgtcgattacgactgggattgcgatggagtgggattgcaatggagttcctcgcggccgcgacacaatgagacacatcaagggcgcgatgcgaggctagagaagggcatggcgtggatggtagggacctttcagcgaatcggttcaacagagcaggaggtggtggtggtgggcggtgcggatgctgccgtcgcggtcgcagagaaagtgggagaggaggacctagcagcgatggagtgggattag

SEQ ID NO: 115383 - DNA, 2416 bp, Zea Mays
gaaccagctaaccaaacagaccgcactctgctcgctcggcgttgtctgatctctcctcgcgcccgtcctccgctgcccgactccggcgtcctccccaccgacccatccacagctcaagccaacattcacccgtatcccgcgcgcgcttgattcgccgcatctgagcgtcacggccgcgactgcgcgccctgcgtcgcctcccgccgccgccgcacggccgcgacggatgctcggccaccgcttccccgccgcgctcggcctcccgcgcggtctgctgctggggaggagcgtcacccgccgcagtctgtccgccatggccggtggcgaggcggagggcccgctcgggggtttcttcgattacatggagcggctgcgcaactacgagcgctcgggcgtgccgcgcggcgccggcaccgactccgacgacggattcgacctcgggcgcatgcgccgactccttcgtcggctcggcgatccccacaccgacttcccggctgtgcatatcgccggcaccaaggggaaaggttctactgctgcattgctgtccaatatcatgagggcgcaaggctacaatgtgggaagttattctagtccacatcttctaacaatacgtgaacggatttctgttggaaatgatggaggccctgttccagtacgactgttgagtgatctttttgatggggctaaggaagctattgatgaagcaatagaattggaaaatggatccctaacgcattttgaggtttttactgctctctcatttcttctattctcacaagaaaatgttgacattgccatcattgaagcaggtcttggtggagctagggatgcaacaaatgttattcggagtactgaattagcagcatccgtcataacaacagtagggagggaacatctggttgcattgggtggctccctgcaaagcatagcaatagcaaagtctggaatcattaaacaaggacaaccagttgtgattggtggaccattttcagcagttattgagcaaattattcgtgacagggcattcttgacacaatctcctgtgatatctgcttgtgatcctggcatcaagagctttacgaaatgcatagattgggataatggtaagccgtatcaacgctgttacttcagcataaatatttcaaatgatgtacccttggtgagttacattgggaacctcacctacttcatctgaaattgacaagttcgtatctgtttttcaaatcctctggctgatcagcgcaaactatccttttcagtccattgaaatgcatgacataaacctccaactgctgggagatcatcagcgtcagaatgctgtcacagctgcttgcacggctctctgtctccgtagtctaggatgggaaatctctgatgcttctatccaagctggcttgagggagacccaacttcctgggaggagccagtttctcacagcagaggaagcctcggttcttgggctggatggtgcatctactgtactaatcgatggagcccatactgaggaatctgcaaaggccttatcaggcgtgatagaagctgtcagaccagaagggcctctagcgcttgttgtcggaatggctagtgacaaggagcatcttgcgtttgctgagcagcttctctcaggtcaaaccccagatgtcgtgctactgacagaggcgagcatcgccggaggaagctcccgtgcaatgccagcctcatccctgaaagaagtatggattgccgcggcacgccatcgtggcatcgagtacgtggacatcggtggcatcagtggcactgaaaccctggagcacatcgccgatctgttgggcagtccttcgctgagttccagaaggaagcccatggtgatcgggtgccaagacatggggccgttctcctggaacctgatcattgctgcctcccagctccttgagagcagaggcagggccccaggcctcatctgcgtgaccggctccctgcatctcgtcggggccatactgcaaaagctgggacggcattagaggcgccaaccatctcatctttcatagtaccatatactagactggaagagagtggaagctacactggactcgtagtggtgtaccggcgagatggatcattcgtgtggtgtacattgcgggactgtttggatggaatctaccaaaatgcctgggccaggcatccatcccaggcgcccgattttgaacatttgggccaggacccaggatgcatttgactgaggcagggctcccatccaaacggacggcaggcaagcaaggcatctgtgctgatgggatattgggatcacgtcctgcgttgctgccaacttgttcgtggctctttctaagctgacaataatagattgtaaataggctgattatctgtactcctacaaaacacaccacacggaaaaaagagcacggcctaggcacggcac

SEQ ID NO: 115384 - DNA, 2314 bp, Zea Mays
ctctgctcgctcggcgttgtctgatctctcctcgcgcccgtcctccgctgcccgactccggcgtcctccccaccgacccatccacagctcaagccaacattcacccgtatcccgcgcgcgcttgattcgccgcatctgagcgtcacggccgcgactgcgcgccctgcgtcgcctcccgccgccgccgcacggccgcgacggatgctcggccaccgcttccccgccgcgctcggcctcccgcgcggtctgctgctggggaggagcgtcacccgccgcagtctgtccgccatggccggtggcgaggcggagggcccgctcgggggtttcttcgattacatggagcggctgcgcaactacgagcgctcgggcgtgccgcgcggcgccggcaccgactccgacgacggattcgacctcgggcgcatgcgccgactccttcgtcggctcggcgatccccacaccgacttcccggctgtgcatatcgccggcaccaaggggaaaggttctactgctgcattgctgtccaatatcatgagggcgcaaggctacaatgtgggaagttattctagtccacatcttctaacaatacgtgaacggatttctgttggaaatgatggaggccctgttccagtacgactgttgagtgatctttttgatggggctaaggaagctattgatgaagcaatagaattggaaaatggatccctaacgcattttgaggtttttactgctctctcatttcttctattctcacaagaaaatgttgacattgccatcattgaagcaggtcttggtggagctagggatgcaacaaatgttattcggagtactgaattagcagcatccgtcataacaacagtagggagggaacatctggttgcattgggtggctccctgcaaagcatagcaatagcaaagtctggaatcattaaacaaggacaaccagttgtgattggtggaccattttcagcagttattgagcaaattattcgtgacagggcattcttgacacaatctcctgtgatatctgcttgtgatcctggcatcaagagctttacgaaatgcatagattgggataatggtaagccgtatcaacgctgttacttcagcataaatatttcaaatgatgtacccttgtccattgaaatgcatgacataaacctccaactgctgggagatcatcagcgtcagaatgctgtcacagctgcttgcacggctctctgtctccgtagtctagttaaggatgggaaatctctgatgcttctatccaagctggcttgagggagacccaacttcctgggaggagccagtttctcacagcagaggaagcctcggttcttgggctggatggtgcatctactgtactaatcgatggagcccatactgaggaatctgcaaaggccttatcaggcgtgatagaagctgtcagaccagaagggcctctagcgcttgttgtcggaatggctagtgacaaggagcatcttgcgtttgctgagcagcttctctcaggtcaaaccccagatgtcgtgctactgacagaggcgagcatcgccggaggaagctcccgtgcaatgccagcctcatccctgaaagaagtatggattgccgcggcacgccatcgtggcatcgagtacgtggacatcggtggcatcagtggcactgaaaccctggagcacatcgccgatctgttgggcagtccttcgctgagttccagaaggaagcccatggtgatcgggtgccaagacatggggccgttctcctggaacctgatcattgctgcctcccagctccttgagagcagaggcagggccccaggcctcatctgcgtgaccggctccctgcatctcgtcggggccatactgcaaaagctgggacggcattagaggcgccaaccatctcatctttcatagtaccatatactagactggaagagagtggaagctacactggactcgtagtggtgtaccggcgagatggatcattcgtgtggtgtacattgcgggactgtttggatggaatctaccaaaatgcctgggccaggcatccatcccaggcgcccgattttgaacatttgggccaggacccaggatgcatttgactgaggcagggctcccatccaaacggacggcaggcaagcaaggcatctgtgctgatgggatattgggatcacgtcctgcgttgctgccaacttgttcgtggctctttctaagctgacaataatagattgtaaataggctgattatctgtactcctacaaaacacaccagtttttctggtttataccttcgtgaggtatattcctctacccctctcggct

SEQ ID NO: 115385 - DNA, 2334 bp, Zea Mays
gaaccagctaaccaaacagaccgcactctgctcgctcggcgttgtctgatctctcctcgcgcccgtcctccgctgcccgactccggcgtcctccccaccgacccatccacagctcaagccaacattcacccgtatcccgcgcgcgcttgattcgccgcatctgagcgtcacggccgcgactgcgcgccctgcgtcgcctcccgccgccgccgcacggccgcgacggatgctcggccaccgcttccccgccgcgctcggcctcccgcgcggtctgctgctggggaggagcgtcacccgccgcagtctgtccgccatggccggtggcgaggcggagggcccgctcgggggtttcttcgattacatggagcggctgcgcaactacgagcgctcgggcgtgccgcgcggcgccggcaccgactccgacgacggattcgacctcgggcgcatgcgccgactccttcgtcggctcggcgatccccacaccgacttcccggctgtgcatatcgccggcaccaaggggaaaggttctactgctgcattgctgtccaatatcatgagggcgcaaggctacaatgtgggaagttattctagtccacatcttctaacaatacgtgaacggatttctgttggaaatgatggaggccctgttccagtacgactgttgagtgatctttttgatggggctaaggaagctattgatgaagcaatagaattggaaaatggatccctaacgcattttgaggtttttactgctctctcatttcttctattctcacaagaaaatgttgacattgccatcattgaagcaggtcttggtggagctagggatgcaacaaatgttattcggagtactgaattagcagcatccgtcataacaacagtagggagggaacatctggttgcattgggtggctccctgcaaagcatagcaatagcaaagtctggaatcattaaacaaggacaaccagttgtgattggtggaccattttcagcagttattgagcaaattattcgtgacagggcattcttgacacaatctcctgtgatatctgcttgtgatcctggcatcaagagctttacgaaatgcatagattgggataatggtaagccgtatcaacgctgttacttcagcataaatatttcaaatgatgtacccttgtccattgaaatgcatgacataaacctccaactgctgggagatcatcagcgtcagaatgctgtcacagctgcttgcacggctctctgtctccgtagtctaggatgggaaatctctgatgcttctatccaagctggcttgagggagacccaacttcctgggaggagccagtttctcacagcagaggaagcctcggttcttgggctggatggtgcatctactgtactaatcgatggagcccatactgaggaatctgcaaaggccttatcaggcgtgatagaagctgtcagaccagaagggcctctagcgcttgttgtcggaatggctagtgacaaggagcatcttgcgtttgctgagcagcttctctcaggtcaaaccccagatgtcgtgctactgacagaggcgagcatcgccggaggaagctcccgtgcaatgccagcctcatccctgaaagaagtatggattgccgcggcacgccatcgtggcatcgagtacgtggacatcggtggcatcagtggcactgaaaccctggagcacatcgccgatctgttgggcagtccttcgctgagttccagaaggaagcccatggtgatcgggtgccaagacatggggccgttctcctggaacctgatcattgctgcctcccagctccttgagagcagaggcagggccccaggcctcatctgcgtgaccggctccctgcatctcgtcggggccatactgcaaaagctgggacggcattagaggcgccaaccatctcatctttcatagtaccatatactagactggaagagagtggaagctacactggactcgtagtggtgtaccggcgagatggatcattcgtgtggtgtacattgcgggactgtttggatggaatctaccaaaatgcctgggccaggcatccatcccaggcgcccgattttgaacatttgggccaggacccaggatgcatttgactgaggcagggctcccatccaaacggacggcaggcaagcaaggcatctgtgctgatgggatattgggatcacgtcctgcgttgctgccaacttgttcgtggctctttctaagctgacaataatagattgtaaataggctgattatctgtactcctacaaaacacaccagtttttctggtttataccttcgtgaggtatattcctctacccctctcggct

SEQ ID NO: 115386 - DNA, 3121 bp, Zea Mays
cgccaacacggttctcagttaccagatcaagcccctttcctcttgagccaccgctgatggcctccaccccgccggcgcccgccgtggcgccgtcgctggtggacaccctctttcagcgctccctaaatgacctcgtcaagtccctccgagccgacccgtcggccgccggcgaggcccccgccgttacccgcgcgctctccgagatccaccgcgagatccgcgcccccgacgccgccaccaagtccgtcgcggtgcagaagctcacgtacctctcctccctccacttcgcccccgtctcctcccacccgctcgccttccccgccatcgagcttctggcctcgccgcacctcccccacaagcgcctggcctacctcgccgcatctctctcgctccacccggcctcgctctccctgctcccgctcgccacgcaccagctccacaaggacctctccccctccgctggcgcccaccagcacgtctctgcgctcgcgctccagctcctcggctcacccgccgcggctgccgctcccgacctcccggttcacctcgtgcacgacctcgtgccacacctcacccgcggcagcccccgcgctattgccgccgccgcgcgcgtcatagctgcctctccgtccgcggccgtgccggtcctcttcaagccgctcgcagcctgtctcgcctctcccgatcctcgggcgtccacggctgctgtggcagccttctgtgacctatcggcgccgcctgctgacgcgactccttttctgccgcttgcgcccgacctctacagcctgctcaccacctcccgatccaactgggcgctcatcaaggtgctcaaggtgtttgcgcgactggctcctctcgagtcccgcctggcagctaaaattgtcgacccggtctgccagctcctcactcgatctgcggccatgtcactgacctttgagtgcatccgtacggtactcactgcactgccagcacatgatgccgcagtccgccttgccattgggaaaaccaaggagttcattgctgctgctgatgaccccaaccttcggtaccttgggcttctggctcttggtatgattggcccagcatatgcatccacagtgaatgattgttgggatgctattgtgaagtcactgggtgatgctgacgcgaacattcgccaggaggcattgcatcttattatggggatggttaatgaaaacaacatcatggacattgctggtatcctgatcagtcatgttccaaagtcagacccagagttcgcaagtgacattcttggggctgttctagcagcatgtgggcataatgtgtatgagatggtggtggattttgattggtatgtttcactccttgtggatatggcaagaactctgcattgtgcccagggggatgagattggtcggcagtttgttgatttaggactgagagtgcaggatgcgcggccagagcttgtccgtttagctcgaagtcttctgattgatcctgctttgcttggaaatcacttcctcttccctgttctttcagcggctgcatggatttctggtgagtatgtggacttaacgaaggatcctgttgagcttgttgaagcactgttgcaaccaaggaccagcctcctgccaatttcagtgagagctgtctacatccatgcagtatttaaattgattacgtggtgtttcagtgtgtatgttgggagattgggtgattcaggcatggcaatggatgtcatgtttgacaggttagctgctgatcaaactgttagtgcggaaagcaatgctgcacttgggtctggtgaagagcaagatattggggcgagcacagtactaaaggacccttttttgcatgaatcaatactttacatgattaacctgattcaaacaacaattggtccactcattaactgcaatgaagtagaactccaggagagagcacacaacctgattggttttatccatttagtaagagaaattcaagagttgaacaaaaggaaggttgctgacggtgacaagtcaagcaggttaaaagagcttgttgagattatgcggacagtattctgtcaagaactaggtcctgtttctgtgaatgcacagatgaaagtggcccctccagatggccttatcctgaatgaaaatcttgttgaacttgctggcatggtgagtgaagatgatactactccctcagcttcaatatttttctatccttgcagtcgtcattctttagataccagagacgagcctgcagtgtcaattggttcttcatctctttctgagcatcgcaagaggcatgaactcttttatctccaaacaaggaaaactgaggatgagccaaatgattaccctcaagctaacgattctctaccatcttctagcaataattctgttaatgacgacaagttgaaggctgctgaccttgtatttcctgggaaaaagttgacagccatgaagtccagaccaaaagtagttaagttggatgctgaggatttcctcagttctatgatgcctagtgcaaatgttccgaaagaagaccccttgtctggtgttctgcgtgatgtgctcttcggtagtgatgctaaggcattgtcttcacaaaggacttcagatataaacttggaaggaatgctaaacaaaacaagcagtaatgaatctagctctcagcagatagagaatttaggaagccatcccgcttcatgttctagaacaagcaaggaacaaaacaatgataaagtgaaaggtacaaatcctcctgaaagtgatggcaaagaaccaagaaagcacagaagctctggtagaagtggacatcgtcaaggaaaacataagcatagagaaaagtctagtactcagcctgatgctatacctcaagctccagtcattcaagatttccttctgtagcatctgagagactcatttggacatggaaatggaaattagaagccacacttttccataattgcattgttctgacttctgagttagtaccatgattatacaaaggaaggcctcttagtttgaacacactataaaattgttaagattttatggaaatttagtagtgttctttgcaggttttattccagttaccgtattaaaagtttgtttatctgtactatattaaagcaccagttttcctg

SEQ ID NO: 115387 - DNA, 284 bp, Zea Mays
acctccgtcaacccaggcgaccgccctgccatactgcatgtcctgtctaaggcctcgccgccgcccgaggtgccaccgttcaagccgcagttcgtgtggtcgctcgagggggagcgcaattccggctcagcgacatcgagtggaccacgaccggcaccggtgacaccgatgccgacggctcgtccatgcaggccacacacaacacctcctacggcagctttcggccgcacaacacggccgacagcagcgacggttacttccccgccctctcatccggtcgttga

SEQ ID NO: 115388 - DNA, 687 bp, Zea Mays
tatgctccctccattccaaattataagcccttccgtcttttctaggtacagtttttatgttccatttgtaccttttttgttctcattattgctctatacttgcaagtgacttggtgccatgctgtgttcaaatccagcgaccattcaaatgacaaattatgcgctttctggatttgacctgaacaaatgtttaaccatgttactaaagagttacaatatctgcaggttgatgatatgctgagagagagggacaatatccattgctcgttcacaactgaacgaactttggcaaaccctgttggtgtcggtagtagcagtaggtataccatcgagcagagcattcctgagagccctgagaatggtagcgtagatggcagagacaaatctggcaaaaagaagtggtttaatctaaaccttaataggtccgacaagaaagcctgatgaatcttttgtcagggaacgtcatgtgttttcactttgttgtacattttggaatccctattgtattcatgccgtatgagttctttggttcccagttctctgggagttttgtagcatatagcagttttgggtacaactttctattctcatgtatgtattatcctaagtgactgcattgaccccatgcatcccaggcgaagttgaatcgcccgaccaagttattttatcgttataatttcttctatc

SEQ ID NO: 115389 - DNA, 1829 bp, Zea Mays
aaaaccaaacgctttctaaaccaaacactccttgtcggtcgccgctagctcctccaacctcgttggccgttgccgtctccgtctcgcccgcccatctacgcggcgagatctgctcgcgccgcgccgaggcgcaggcgcctctccttgccaggcgtgacacagacgaactggtgccgcctctgctggggcttggtcctcccagccgagcgcgcctcatccggatcttgcgacgacggtgcccaagctcccggcctccctttcgcatccctgctgcgagccgtcggtctccggaaagagttagagccgtcggtctccgtaaagaattggagccgccaggcgccttgagaagggttttgtcccgggatgtcgtcgtcggggaagatggaggggccgtctgccccggtggtgcgtcgggatccctacgaggtgctcagcgttcccagagattcctccgaccaggagatcaagtccgcctaccggaagctcgcactcaagtaccaccctgacaagaatgctagcaacccagaagcatcggaactcttcaaagaagttgcatattcttatagcatcttgtcagatcctgagaaaagaaggcagtatgatactgctggttttgaggagttagaaaatgaaggaatggatatggaaattgatttgtccaatcttggaactgtgaacacaatgtttgcagcactttttagcaagcttggtgttcctatcaagaccacaatatctcctactgtgctggaagaggccatgaatggcacagttacagtgagaccactccctgttggaacatcagctacgggaaaggttgataagcaatgcgctcatttttttggcgtaacaataagtgaagagcaagctcattctggaatggttgtcagagtgacttcacctgctcaaagtaaatttaagcttctttacttcgagcaagaagttaatggaggttatggacttgctttgcagatagtcaaaagactggcaaggtaacatcagcaggcatgtatttcttgcatttccaggtgtatcgtatggactcaacagcgaatgcgttggcaatggccaaagatcctgaagctgccttctttaaaaggttggaaggtctccaaccctgcgaagtttcagctctcaaatctggaacccatatatttgctgtatatggtgacaattttttcaagccagctagctatatgattgaagcgatgtgcgcaaagagttatgaagacacaacagagaggctgaaagagatagaatctaaaattctagctaagcgaaatgatctgcgtcaatttgaaactgagtacagaaaagctttggcacgatttcaagaagtcaccaacagatatacacaagagagagaagcggttgatgatatgctgagagagagggacaatatccattgctcgttcacaactgaacgaactttggcaaaccctgttggtgtcggtagtagcagtaggtataccatcgagcagagcattcctgagagccctgagaatggtagcgtagatggcagagacaaatctggcaaaaagaagtggtttaatctaaaccttaataggtccgacaagaaagcctgatgaatcttttgtcagggaacgtcatgtgttttcactttgttgtacattttggaatccctattgtattcatgccgtatgagttctttggttcccagttctctgggagttttgtagcatatagcagttttgggtacaactttctattctcatgtatgtattatcctaagtgactgcattgaccccatgcatcccaggcgaagttgaatcgcccgaccaagttattttatcgttataatttcttctatc

SEQ ID NO: 115390 - DNA, 1833 bp, Zea Mays
aaaaccaaacgctttctaaaccaaacactccttgtcggtcgccgctagctcctccaacctcgttggccgttgccgtctccgtctcgcccgcccatctacgcggcgagatctgctcgcgccgcgccgaggcgcaggcgcctctccttgccaggcgtgacacagacgaactggtgccgcctctgctggggcttggtcctcccagccgagcgcgcctcatccggatcttgcgacgacggtgcccaagctcccggcctccctttcgcatccctgctgcgagccgtcggtctccggaaagagttagagccgtcggtctccgtaaagaattggagccgccaggcgccttgagaagggttttgtcccgggatgtcgtcgtcggggaagatggaggggccgtctgccccggtggtgcgtcgggatccctacgaggtgctcagcgttcccagagattcctccgaccaggagatcaagtccgcctaccggaagctcgcactcaagtaccaccctgacaagaatgctagcaacccagaagcatcggaactcttcaaagaagttgcatattcttatagcatcttgtcagatcctgagaaaagaaggcagtatgatactgctggttttgaggagttagaaaatgaaggaatggatatggaaattgatttgtccaatcttggaactgtgaacacaatgtttgcagcactttttagcaagcttggtgttcctatcaagaccacaatatctcctactgtgctggaagaggccatgaatggcacagttacagtgagaccactccctgttggaacatcagctacgggaaaggttgataagcaatgcgctcatttttttggcgtaacaataagtgaagagcaagctcattctggaatggttgtcagagtgacttcacctgctcaaagtaaatttaagcttctttacttcgagcaagaagttaatggaggttatggacttgctttgcaggaagatagtcaaaagactggcaaggtaacatcagcaggcatgtatttcttgcatttccaggtgtatcgtatggactcaacagcgaatgcgttggcaatggccaaagatcctgaagctgccttctttaaaaggttggaaggtctccaaccctgcgaagtttcagctctcaaatctggaacccatatatttgctgtatatggtgacaattttttcaagccagctagctatatgattgaagcgatgtgcgcaaagagttatgaagacacaacagagaggctgaaagagatagaatctaaaattctagctaagcgaaatgatctgcgtcaatttgaaactgagtacagaaaagctttggcacgatttcaagaagtcaccaacagatatacacaagagagagaagcggttgatgatatgctgagagagagggacaatatccattgctcgttcacaactgaacgaactttggcaaaccctgttggtgtcggtagtagcagtaggtataccatcgagcagagcattcctgagagccctgagaatggtagcgtagatggcagagacaaatctggcaaaaagaagtggtttaatctaaaccttaataggtccgacaagaaagcctgatgaatcttttgtcagggaacgtcatgtgttttcactttgttgtacattttggaatccctattgtattcatgccgtatgagttctttggttcccagttctctgggagttttgtagcatatagcagttttgggtacaactttctattctcatgtatgtattatcctaagtgactgcattgaccccatgcatcccaggcgaagttgaatcgcccgaccaagttattttatcgttataatttcttctatc

SEQ ID NO: 115391 - DNA, 2322 bp, Zea Mays
aagagcacacgcaggcaggttagccttgatttcggcagtccaacgacactttccctccctcccagttcgttgaggatccgagagttctgggtccgagcggctgactctgcgagctgcgatgcatcgacgagtggccatgcgacccgaccggcccttctcccacccacgcaccctaaaacctggacacctcctcctctctctcctctagaacgcgcgcaagaacacacgtaggagaaactggaccggcgcgcaccaaccccgaaccacataactaggacgaggcgaaggattgtcatccaagccgcgtgatctttaattcgccgccgcacgcccttgtcatggaaggtggcggctgggctgtcggaggccacgcacttggcgccgcccaagaaccgcgggggcagcagcagcatcgggaggaggagaaggcagccggagctgccgccgagaggaagggcgctggcgccggcggcggcggcggcatgaagttccgcgtgcgcgcgcgggcgccgcacggtgtcggggcgctgctgctcatcggcggagcggccgtcgtcggggccgccgtcctcgcgtggcgccgctcacgccacggcaacaagggtggctccgtggaccagcctgatcgccggctgccagcgaaagtagagggtttggatggcggaattgtcgaggatgggaaggttcagggtggctcattggtgcagaagcttagtcagtctaatgagatcttgagcgtgggcaacacagatattggatccggtagattggatggcaacgcgtcagaggaaagccatcagattcacaaggatggtgaaatcactgcagatcaatcggagagcaagcatgacgggaaaattgatgagaattcaggtatcaatcctgccgaggtccaaatgcacgatcaggagagcaagcatgaagagaaaaacgatgagaattcaggcagcaatcctgtcgaggttcacaaacacgatctggacaaagaacatgtcgaagaagttgaccagaagtcaagcagcaaccatgttgagatcagtgcgcatgatatgtgtgaggacaatgaacatgttgagaaaattgatcacgttgaaagaatcgatcagaattcgagcagggaccctgtcaaagccatcatgcaggaaatgatcaaagtttgtttggtcagtggaagcgtggagaaggtggaggaagaggactcaagcaagaaggacttggagaaagagatagccccaaaagataataaagatatggaggcctctgatggaagcaagctcggcgtcaacggtccaggtatcatcctcagcaagcataatgatgagtgtggtggtggtgcccaagaggctgaatcgatggagaacacgccgacggcacagctgatgatgcatcaagaccaactcttagatgacatggttactgatactgttacagaaactggaggtgctgttgcagacactgaagaagatgatactgttgcagagacagaagatgttgttacagacactgaagatactgttacagacaccgaagatgctcttgcagaaacagaagcagagaaaggtgaaagagcaatcgcggacaagggtgagctcgagcaggacgaaaagaaagatctggtagcactccctgaacttgccagctcaccagcactgtcatcgttggttaagccaacagtagtgaagaaagagctggactttccgagacccaacgaaacggggatgaagacagagcaagattacactaacggtgagctgagggagcacaatgacctggtcagcaaagtgcagggagaaggtggcgtcgcgacgaccatggagtccaggagctctgctctgatgatcattctcgctctgatattcgcgctggccacgggaataacgatcgtcgtgcgcctctactccccttcccgagcaacgaaactccagatggatctgccataagcctgcaatcggtcatcaagtacgatttctgaggctgcaaagttccattgggatttttcgtggcctcgtacgcgcgcgcgcatgaacggcgaagttaggagctgctggagtgtgtgcaagtacaagataggaagagaagtctaccatggtcatgaacgaattcatatggccattgtgcagcacgatctgtctgtgctggagaagttacacgtgtggtgccagctaccaaaagaaagaaccgaggtccgagagcagtagagtaggtttcttccggctgaggagcgcttgtttttcttttttcttcttttaaaagaaatatatattattttgcaagccatgttagtgctgatagtctatggaaatgcctaaaccatgttgaagt

SEQ ID NO: 115392 - DNA, 3202 bp, Zea Mays
cacgcctctcctcacctgtggagctccccacagcccgtaactacctgcccccagtccccgccgccccgcctcgcctgaccccagtccccgcggtttatccaccacgacaccaccacctctccaccgctgggccggatcgatcgggatcgcgccgccgccgccgccctccgcactcgcgggatcctgctcctaccatgcagcagcgctgcgcccttgcccgaccgcgccggcccgccgaaccgcgcgtcccgctccccgacgaccaccccttcgtcgccgtcttctccttccttttcatccccacctaaaccaacctcctcgcagcgtaattctgccagtatctcctcatcttctctcgtcgccgggagagcgaacggatcgccgcgtgctcggccgacgggatgagccgggaggcgcagaaactcgattgcgccaccggcggcggcggcggcgtcgggataggggtcttgtcgctggacctgctgggccaggtgctggaccgcctacgggagccgcgggaccgcaaggcgtgccgcctcgtcagccgcgccttcgagcgctccgaggccgcgcaccgacgcgcgctgcgggtgctccgacgcgagccgctcccgcgcctgctccgcgcgttcccggcgctcgagcggctcgacctctctgcctgcgcttcgctcgacgacgcctccctcgccgcggctgttgccggtgccggtgggggcctcgccggcctccgcagcgtgtgcctcgcgcgggccaatggggttggctggcgcggcctcgaggcgctcgtggctgcctgccccaagctggaggcggtcgatttgtcgcactgcgtcagcgccggggaccgcgaggccgctgcgctggcggcggcggccgggctcagggagctgaggctggacaaatgccttgctgtcaccgacatggggctcgccaaggtggctgttggctgccccaggctggagaagctcagcctcaagtggtgccgtgagatctctgatatcggaattgatctgctggccaagaagtgccccgagctccgcagcctcaacatatcctacctcaaggtgggtaatggatcccttagatcaatttcctcacttgagaggcttgaggaattggcaatggtttgttgttcatgtattgatgatgaaggcctggaattgctgagcaaggggagtgattcgctgcagagtgttgatgtgtcaagatgtgatcatgtgacttcccatgggttagcttcactcatagacggtcgcaattttctccagaagttatatgctgcagattgtttgcatgagataggacagcgttttgtatccaagttggcaacactgaaggaaaccttgacaacattgaaactcgacggtcttgaagtctcggactctcttcttgaagccattggtgaaagctgtaacaaattggttgagattggacttagcaaatgcagtggtgttacagatgaaggaatctcatctcttgtagctcggtgtagtgacctaagaacaattgatctcacatgctgcaacctcagtaccaacaatgctcttgattcaatagctggcaactgtaagatgcttgaatgtttgcggttggaatcctgctctttgataaatgagaagggactaaaacgaattgcaacttgttgccccaatcttaaggagatagacctcactgactgcggagtggatgatgcagcattggagcacttggctaaatgctctgaattgagagtattgaaattaggcctatgctcaagtatttctgacaaaggcattgcgtttattagttcaaattgtggaaaacttgtggagcttgatctctaccggtgcagctctattaccgatgatgggttggcagctttagcaaatggatgcaagaggatcaagttactgaacttgtgttactgcaacaagatcactgatactggtttgggtcacttaggctccctggaggagctcacaaaccttgaactgaggtgcttggtccgcataacaggcattgggatttcctcagttgcaatcggatgcaagaacctgatagagctggacttgaaacgatgctattcggttgatgacgctggcctgtgggctcttgctcgttatgctttgaaccttagacagcttacgatatcgtactgccaagtcacggggctgggcctgtgccacctgctgagctccctgcggtgcctccaggacattaagatggtgcacctctcatgggtctccatagaagggttcgagatcgcgttgcgagcagcctgcgggaggttgaagaagctgaagatgctctgtgggctgaagaccgtgctgtcccctgaactcatccagatgctgcaggcgtgtggctgccgaataagatgggtcaacaagcctcttgtctacaaggactagaccacctgttcctcatcgtttgtgaagtttcagcgctgccatggattgccaagagcccaagacctaccaggtttgccctgtgagccatgtgagatgttctgcaatagtccttgtgagatattccgcaataatcgttgggggcgtaacatatctagcggcgattatcggctctgctccagtgtatgtacactgaggcatcggttatgttcatgtgtatagcctgcagtgggatgatccacttcctgggattactttagtgtgtttgttacttcattccgcatggtttgggcctttgaagttaaaagaatcataagaccttgttcggttattgatattacatgtgtattggagtgtattaggtgggattaggatggattttgacttgttatggatttaaaccggctcaatcctattcaatacatgtggattatcaccaaaacgaacaagcccagggatatgatccatgctttggttctttcttacttttggctgacactaccttatctgataatatgtatatggtgttctgtttcatgttatgaggtgttcaaacagtgggtctatgaagacattgtagtctctgtcgaatggcccacttgtaccatttgcaagaatctgtcacaattgcctcgctatcttgattgatgattagatttggcacgagtcaggttcagccatccgtgcacacagtggctactggtattactttctgcatcgcgcttcgctttgactgaaacatacaacgaaagagttaccgctagtttggcaactcattttttataaggggttctcatttttcccaaaaaaaa

SEQ ID NO: 115393 - DNA, 770 bp, Zea Mays
atggatgctaaacgcagtggtgcaagtctgtctatagaaacatgccctcattacctgacattttcgtccgaagaagttccagatggagatactcgctttaaatgttctcctcccatatgtggtgacacaaacagagaaaatctttggaaagctctgcttgatggacacatagacatgctaagttcagaccactcaccatccactcctgacctcaaactaatggaggaaggcgacttcttaagggcatggggaggcatatcatcgttgcagtttgtcctcccggcgacatggtcatatgggcgaaagtatggcattactctgaatcagctagcctcatagtggagcgaaaggccacccaagcttgcaggccaaaagaataagggagctattctaccaggataccatgctgacattgtagtatggaacccgaaacagaatttcaacttgacaataaccatgctatatatcataaacatcagaatatttcagcgtatttaggaaagcaactttctggtaaggtcctgtcgacttttgtgagaggaaatcttgtgtttgctgaagacaagcatgcaaatgctgcttgtggtgttcctatcctcgctaagtaacatacaggtggatccagagctgccattattgatccgtagtgtatacaatcgtatgcatgtgccaatttgtaggttgctctcttgtatataattgaacgcattcatgtcattgttatatagtagcaatctatttatattggcacacattttgccttgatccct

SEQ ID NO: 115394 - DNA, 370 bp, Zea Mays
aagcaaacagatcaacgtggcctcgtacgtttgatgacacgtatcattcaagcctgactgtagaagcggcgtcacgagttataatttcatgcagactttgtctatgcattggcaactaattaaacccaagagtacgtgccgtataactgcatggtatgaagacacaggtttcaccacaggggatggccaaactccctcgcgatgatgtcactggggagggtatccgcctgcaggacggaggcggcccgtcgccgtcgtcggagctaccacgccagctggagaagcagcagcgccaacacaccgcctgctgccactctccatgctagctagatatatagctggcgatagctatctcatccactaaccagac

SEQ ID NO: 115395 - DNA, 818 bp, Zea Mays
aggtttgggtgatcaatcggtgatgcttcccctttgagaactttcggtatgagtcgtttctcccttcttacgcattacgtcaaggcaccagtaagagcatggacgatcgtttgatttttaccaatactacgtgcaggaatctacagtgcactgttgtgattggatattattgctttaggaacttatgcttttgctaccttctattttctatacttgtatgttgcccaattcatttgaagttcatgctttgtgcttttggggttaacctttcaataccctttgcccatgtccttggaaggcattagtgcatgacaccgatatgagggtcaacaagctgacaagacatgattttttcttgactcggttgcctgtgatttaactttgccatttggttaatagaatactttaacgtgctattgctagtaggtatctaaagctctctccctcctctcttatcatatactcacatgctgctattttcttttcagattgaggagatgcatcgtgaactttgcagcttggtaatatgttttattccaccaatgtctacgcctcagcctccaggctctgtatttaggtcctttgtacaaagtttggtgctcaaagctagaggtggagatcataggatggttgtcaatgggactttcaacaacactgtgcttatttcattgtacacagtaatcctgcatttgttgtctgctggtgcccttccatcatggtggagcctaagattcaaaaggaatgatgcctatcatagtacaggaatgataccagagttggataaaaaaaatttatcacaattttttgttgtggtccga

SEQ ID NO: 115396 - DNA, 89 bp, Zea Mays
gctgattatttgacaacgatatactcgtatatactagttcaaaactacgatttattgacaatgatatactcatatatatatactcgttc

SEQ ID NO: 115397 - DNA, 1238 bp, Zea Mays
ttaaggttgctattatcttgttgatgctggttacacaaatgcaaatggtttcttagcaccatatcgaggacagaggtatcatctaggaggtttcactactcaaaacccaccacatagtgctgaggagtacttcaacttgtgccatgctagagctaggaatattgttgagagggcatttggaaggctcaagggtcggtgggcaattttaaggtctgcatcgttttttccagtcaagactcaaagtcgaattataatggcatgtgccctcttgcacaacttaattttgcaaaatatgtctagagacccatttgaaaatgatgaggagccagctatggatgcatcatttgaagttatggatggagaaatcagtgaaccagaatttatcacaggtgtctcaacatctaatgaatggactgatttccgcaataatcttgctcaggggatgtataatagatatagagctaggtctaataactaaggacatgaaccaattagagagctcaagtgttactcggggaagagggaaaaacaaaaggatctggacttattatgaggatgaggagttaattaaagcactatatgagatatctttagatccaaagtggaaaagtgagggaggttttaagaatgggtattgttctgttctagaaaatgaactcaaagcaaggctaccagggtgtggtctcagtgctattccacacattgagtctagagtgaggcattttaggaccaagtatggttctattgaggtcatgcttgctaagagtggttttaatcagatgacgatgcttttcgcgcttcctgagactcttaggagagaattcatcctgaacatgattgcagatgaagctcaaaggaagtgacttgtcaaattatcaatgaagaatgtcaggagcatttggtgaagagtgatcggcatatcaacttctggaagttgaattttgaagacgtttgaagtcctaagacatttctagaacatgaaaattatgaattcctaaggctagctttttttgactgactgtgttgttgactttgtgtgaaaataacccgttgtttgaaacctattatatttgctagctttatttgctattcagcaagacatataaagttgctagctttattggttgtctgtgttttcaactgtttgtgaaaataaccagtataaagttgttgtttagaacatgttatttgtgctagcgcaaagctgaaaataaaatcagtatttttgtgcgccataa

SEQ ID NO: 115398 - DNA, 87 bp, Zea Mays
gcatatccaaatattatggcagatcgtgagtttctattgcatgcgcgcaaattttggatgatattttcgtttccactgcacgcgtac

SEQ ID NO: 115399 - DNA, 857 bp, Zea Mays
gagaggtttgtatgcaagcatagatcaaaattggggagaggagcgagagagaacgaccgaaacagagagataatccagagagagatggcaaactgttttggtgacatcgtggacaattacaagttagatacaatgccaagatatgtcggcaaaacgaagactcgagaagaccgggcacgagaggcctcctatctcaataatgagaatgaaaagtccaagaaggctaaagactatgtgaacatgctgaaggactggtacggcaatggagcgtcgacgctgtgcgtgatctacaaccagacgggcggaaccctgcggtacatcgacgacaaggactggctgggctacccggggccgacgccctacccgacggagatcgggaacgggcagtgggcgtccttcctccacgtccacaaaaccggcgccgcgtcggggtccatggccgccgtcgtctaccgcggcaaggacggcggcggctccgagcgcgacttcgcaatggcctggagcaccccctggggcgcctccaagaacagggcctactgcgagatcggcagcgtcggctccttccagtcgcagtgggacaagctctacaccaatctcaacaaggccgggtacaccaccaacgccagtagtacccactcgtctatttctgcagccactgccaagggcagctcccccgacttcaaagcatacgtcaagatcccttacagtgcatgatgtcggtcgatgctgtcaaatccgatccatcatggcatcgttctgtttgtactacttcttcctccaattaataatcgtatagcagcttgaaataatattgcatgcattcaagcatgatgcaaattagaaataatataccaata

SEQ ID NO: 115400 - DNA, 1370 bp, Zea Mays
gccttatacgaaacatagctactcctactactcaaatccatccttattgagcttagtgtttgatccatggactcggaaggagtagcagcaaaggtggcagatgagactactaaaccggcaagccaagaagacggcgagagcaaggccgggatgactgatctgctgatgctgaccgacaagtcgcagctgcaggcgctagcgatgctgctgcggaacaacgaggagctcatgatgagccaagcgatcaagtcggagacggagcgcgttgagtacctcaagacggtgagcgactgctacacgcggacaatgaagctccttgacgactccatggcggccaggatcacgtacgagcgttcgggcggaacgaggagcctcgtcgcccgggacatggacgactacgtcgtctacggcctcaacgcgtgcttgcagaacgtccgcaactgctgcgtgcgtctggacgccatcgacaagctgcgggcgcactacgacgccctcgccgacgccgtcgccgaaccggccgccaacgtcgagggcctcgccgcggaggcgtccgagtacaaggccgccatgtggcagtactgctacaaccagcggagcgcctccgcgcgggcgcactcccgcgcctactcccaggcgctcaagctggagggcatcgacttcgccgagcttgtgcggaggcaccagctccggctcgggtacggcagcaagggcgaggagttcgaggacctggacgacacccagaagctggaggtgtacaacagcatcatcgtcgagtcggggcgggcggggctaccggtgcggatgttctcgtcgggccgctctgccggtggccctaagattgcagccacgacgtgggcgcaggcggtgagcgtcttcatcatggcggcgggcaacctggcgtgggacgtgttcaccacggagcacgaggtggaggccatcctcaagggcagcctcaacctcctggcggggctagggggcttcgccgtggaggccgtcgtcggcgcggctgtcaccaaggcggtcgcaaacgtcggcgccggcgtctttgcttgctctctcgcgggcttcgtcgtgggcgccatagccgggctgatcttcatcggcgtcagcggcctcctcattaacctcatcatcggctcccctaggaaggtgcctgacatgagcaagctcatgttccacaccgccgtcatgcccgatggaatggcccttgcgtatgcggtatctcattaattacttattatcatcgcagtgactaccgatgcaactgcttcagatcctactgttggaacgcgtgtggaaataataaaggaataataataattattattgtaataacaataattatcatatattgataatgattatatatc

SEQ ID NO: 115401 - DNA, 648 bp, Zea Mays
atgagtcctttcggggcggtgatcacgccagaaaccctcaagtacatgtccaagtaccagggacgtgagatcacgcaggtggactgcgcacgggaggcgatgaggctgatccacgcggaagacaagaacctcaaggccgaggactcagcgtgggagctgaagaagaagttcggcaacggcgtgagcaccatggtcctcgtctacaacgccaccggggccagcctgagcctggtggacgacgggaaagactggatgggctccgtctacagctcgccgatcccggacaccttccacaacgggcagtggatcgccttcctccacgtcaagcccggctcgctggcgcagggcagccaggccgccagggtgttccgcggcagggacgtcgatggccggactcgggacttcgtcgtcgcctggtacatcccgtgggacaacataccgacacgagcttacactgaaattggcagtgaaaactacttcaagactcggtggagtagtgtcaaaacgagtctaggacattcaaggagagtgacccgtgccaaggacgagaactgtgcgtcaactgtcagcatcggtggctacactacagccttctgcatcgcagtcctacaacaccagttccagccgctgccggaagagcgcgaataa

SEQ ID NO: 115402 - DNA, 1915 bp, Zea Mays
ggtggattcaggctagcgggattatgctaggtcggtgcagtggcgatgcgatgcggtgcaggcaaacccgcaacggctaggaagacctctacaaaaaaataaacaagcatgtcaacaaaaaaattcggcaacactacctctgcacggggaggtttccaaaacgtgcaaataaaagtaataggatgacagttgacatccacacatatacaacaaacgacacgatggccatcaatcacatatatattattaatcggtgcagaagaatatatccaaccacatcaactacttgaattaattaaggtacaaagtaaaataaaaaacttttcatttgagcacatttgttgatacggatagaccaaagtcttatgctacaaatgtaacctaatttgtactaatttcctatatattaaagccggaaggaaacgtggcctgatatgcgtccacgtcatcctttttactctcagccatacgattcagatccaatggacgcgagctatcctcctccttccacctgtctccgcacaaaagaaaaaaaattcttgggtctccacgctaccagagccttccaggcgaagacgacatcgggagatttgcgctctctcttgctatggcgcttcctccccctctgagatgtgcttgcgctggcgccacgcccgcgtgaatggcctcgccgccgcttctcgcgctcgcacgtgctactgtgtctgcgcgcctctccctgcgttcaagcacgccgcctcttctcccaccccgtcgcccctgcgccgtggtggctcccgtggtcgcactcgcatctctctcgccgcagcgctttctctcctcccgagatccctctcctcgtgctcgccgccacgcccgggtgaacgccctcgctgccgcttcttgcactccccgcgcgcctctcctcgctttcgcccaagccgcctcctctccctctccgtcgcccataatcaagcgagactgcgtgcaggggtgcatgctgcacgcggtggcgacgagctacggcacgaccgcgacgtcgcgaatgactccgagttccgttcgtggggtgcaggctcaccggctccgcatgctgtaattgggcaaagcgtggggacgctacgctcgggtggtctacttcaatcttagcgcccagcgacatcgtcgtgcaccagggctggagcgactaggcgaccggtccagaacgaagtgagtagcgcttccttctctcttgtacagttgtaccattccatcctgtgtgttaccttcactgtagctgtcaacttggtgaaggtgatgatgagattctaagaagtaggtacgtgcttgcctagcaggtcagcctcatcgaacggtcttcaactactggcaaatgcaacgccgttagttgccgcatgtgactactcgcaaatcagatggtaaacacgagtaaattaaatagtaggattactttacggcatgtataaatagcacatagtgcatgacgaggtgcagcagtagcagcatgatgccaacaactgcactctggtttcttattttccagctggatcttgcacgcacatctaatttgtcttttttttggctggaatttccttcctgtctatacatgtagtatgtcgattatgttgtcttcctattttttatttactactaatagttgtatcacagaagtcccattcttctctactcctttatctaatttactgtttttttgtcttagttgatccaattagaccattttgttatgtgtatatgcaatgattctatctcttttaggattatgtaatgctaggaactgatgttacattttttgccaacttctaattgtgttcttggttatggatttatggtggaagcataatcgtttgtttcatacctaatgataagaataataataacctttaccattaacatttttctcaaaatctagcacagt

SEQ ID NO: 115403 - DNA, 252 bp, Zea Mays
ccaagcaaagagaaatagactgtccaagcaaacaaagcttacatgtactgaatctaaatctgaaaaaagtcaaaaacatgtcaaggatgaataaagactaatctgaaaaaagagacaaaagcatgccaagaatgaataaaaactatgattaatctgaaaaacatgtcaaaatcgaccacacactaagcaaagaaaggtggcctacctgaatctaaaagaaactgtccaagcaaagagaaatagactgtccaa

SEQ ID NO: 115404 - DNA, 2713 bp, Zea Mays
ggaagggttttccccgacctctcgcgcaccgggggggggggacatataagtcaagcgcagccgccgtcgcctcctctccctcgcgcagtcagcagaccctcccccttgcgcgccgttagcagatccctgcaccgctgaccggcccctcccctcgccgcgccgtcagcagatccctccgctgccgccgccgcggtgcctcggcgtctgctgcttccccaccggatactaacaaatgggttctagaattgagttgataaggaaacatttgaaacaggaggaggaggatgatgatgagttattttttgtgttagttccagctatatatgcttccctttattctaaaaagaggccagtacacacttcttgtcgtagtggtgcacaaaaaattagagaaatgctcgatggtcatgagagctggtgcaaatctgagtttcgaatggagccagagatctttagagctgtagcaagctatcttagaagggaaggattgttgcaagacacttcaaatatgagcattgaggagcatcttgggatattcatgtacatgatatctcaaaatgctagcaatgcgatcttacaaaaagaatttcagcatagcggggaaaccatacatagaaagataagcgagttctttggtataatccccgctctaactcaaagatttgtgaagctcccaagtgtaacccaaccacatgtgaagattacatccaatcctcggttttggccttactttcaaaattgcattggtgcaattgatgggacacacgtccccataactattagtgaagaaagagcccctccatttagaaatcgaaaaggaaccctttctcaaaacgtgatgttggcgtgcgacttcgatttgaatttcacattcatctcatgtgggtgggaagggtccgcatctgatgcgggggttcttcaatcagctttaagaaagggtttcagagtgtcagatggtaaatactatcttgtagatgggggatatgcaaacactccttcttttattgccccatatcgaggagtttcttaccatctcagtgaatatcggaggcgagggttgagtactgtatatgctgattataaggagttatttaatcattctcatgccctccttcgcaaccacatagaaaggtccatcggtgtcttgaagaagcgatttcctatcctcaaagtgggcaccttttatcccatagagactcaggttttgattccatcagcagcagtttcatttcataacatgattagaggtttaaatggtgaagatggatggttggatcagcacccaactaacatcaattctagtcaatttgttgaattaccagagggagatagcaattatcagtatagtatcatggctagagcttcgtggaatatgaactatgagaagattcttgttgacatcttgcacgagcacaatcatgtgaagtaccggggccagaatggttgggcaccagaaggttggcgttctatgacacaaatgttcaatgagaagtgcccgttggctaagtttacaaaggcacagatccaggaaaaagaaaaggaacttaaggcaaactataaggtgctgaaggaagcccgcaagcaaagtggtgttggatggagtgaggccatgggtatgatcattgcggaaccaccaatatgggcaaatataattgtcagtaatccaaaggtcaagaaatttcagtcaaggcctttccctttgtataatcagttgtcagcactctatgatggcagttgtgccaccggtgatctcaattttacatcaactcagcaacatacatcatcccgacaacaattacatattcaagctgaagctgaagctgaagctatgagctctttcaggattgatgatgacctcggggttaaccctgatttgaaccaaatctcttcaaatttgcatgggttggcatcttcaagtacccgtgttgagattggtggacatgaccgcaccccggcatcttcagaacaacgagcggagagtcatggaaggaagcgtaagcaaagtcagattgctggggttcttgaggaatatttggattacaaaaggcaacataatgataagttgcttgatgtggtaaatcagattgatcagcaagctgagggatgtaacaagaaggaagaatattgtattggaaagtgtgttcgtgtgttagagtcgatggaagagttaactgaagaggagatggcagcagcaatgggcgtgattaagtgtgaggagaatagagaaatatttctgaacagccagaggccacgtgtccgattattgtggcttaggaacgagatcaacaagcagatttccaccaatctcaatattttcagatgtccaccaagcctttagtttcctggccttacttattctatgcatcagtttcatctcagaacgccagccagaaggcaacattttgaagactttatattcatctgcatctataccacatagctcctttgatttcaatgttatatcaaatttaacatttgtatctgcgctatcaaggatcttgtataaattagtagtagactggtggatgtgtcaagcattctggtggcattttcaagaacttctattttgttatgtcagatttactttatattcatctgcatctataccacataactcctttgatttcaatgatgtatcagatttgagcacactgagatgttcaagcttatgtatcttttttaaattagtatgagtagagtggttactactgtc

SEQ ID NO: 115405 - DNA, 420 bp, Zea Mays
tgtgtcatattgtttgattaagctttgtgtcatattgtcaaattttgtatatatctattctaaaatattaagttttcatataattccaatatttaggattgcaccgaacgcaggaaggtatggagccacatgtcacatgtgtgtcatgacggatcgagaaaggcaatttgctctattattaaatagagatagatagataattattatcattgtaataattattaattttattacaattattatttactgtgccctcttattatttccacgcgcgttgcaacagcaggagcttgaagcagttggtagtgactgcaatgatattaagtaattaatgagataccgcacatgcaagggccattccatcgggcatgacagcggtgtggaacatgagcttgctcatgtcaggcaccttcctagggg

SEQ ID NO: 115406 - DNA, 1647 bp, Zea Mays
gtctcttggagatgctcttagccctctaattttctctctacccccttcttccaaactagccataaaaagttgatttccgcaccgcaagtgcaatgccgttccatcttccatggagggaaaggaatgtcccgtagcgccaaacaaactatgatgcggcagtactgtatgtgtgactattggcctcaggtggctgccagatggcgctccgccaatggccgcgctcaccacccacggatcggtatccgcgtgacccctctaaaaccaatctccacccttcgttcaaacgcaatcgaacggcgcgcatcccaccctcccttctcctccctcctcccgcgcacggccaaattcccaaccctccgcgcgcgcagcaccaaatccacccgccgcctcctactttaaccccttcccgcctgcccgcaactcctcaccggccaccgcgaagccagagccccacgccccgtccgaactccgaaccccagaacagagcaaagcctcctcggcctccctgtccccagccttccccgatggcccgcacgaagcagacggcgcgcaagtcgacgggcggcaaggcgccgcggaagcagctggcgacgaaggcggcgcgcaagtcggcgccggcgacgggcggcgtgaagaagccgcaccgcttccgcccgggcaccgtcgcgctgcgcgagatccgcaagtaccagaagagcacggagttgctgatccgcaagctcccgttccagcgtctggtccgcgagatcgcgcaggacttcaagacggacctccggttccagtcctccgccgtcgccgcgctgcaggaggccgccgaggcctacctggtgggcctcttcgaggacaccaacctctgtgccatccacgccaagcgcgtcaccatcatgcccaaggacatccagctcgcgcgccgcatccgcggcgagcgcgcctaggcggttcggttgcggcgcctgctcgctactgatggaggtgcttagtttagcacgtcatggttgtgttataggtgtgcgttgttgttttcaagaggtagcttcttgctatgtgctgatgttaacggaggattatgattagcagttctgaaaaaaatgtaatggatgtgatctgctctatctacatgttttctgtctttgtcctggaatcccatggtgtttagcattgatttcacatgtcttgtttttctctgaatcctgcttgtaatgacatcgacatctgttacacgatctgcttcaatttgtttttgcttggtttctcagcaagtcatatttttaactttttaggtacatactgttcacttaattactactaccagtaacaattataagacttgctccttgaagacaggcatttgctcgccggacgctgcaggcaaaggtttagcacgcggagtaccttatcagacagtaatggcgacaagctgggcccggaggagttgctgtcgccagaagcagaaagaggcgaggagagggacgtcggtgtaggcgataagggcgggtggcgcggcgaagcctggcatcgcagaggcgggtgtgggccccggggcgggggaagcgaaggtggtccgctgtcggcgttgacgtttttctcccgactctccctcctacgccgccctcggatcagtgccatgcctcatctacctccaccgcc

SEQ ID NO: 115407 - DNA, 326 bp, Zea Mays
tcctcatgtcgtagcctggatctccataattcagcttcagagcggcacaacagcatggttgttgcaagtggtgatctttccccgcggaacaccacaacatttctccgtttcctaagctgccaaaatattttgctattaagataataaaaaagatgttagagcatctccaagagattctttattttttactctctatttgactctttatttgtctctccataaagattaaactgtatatataacatcacattccaacagactcttcaacatacaaattaacttggctagcgagagttgctggccaaatttggctagtgaaggaatca

SEQ ID NO: 115408 - DNA, 1852 bp, Zea Mays
ttctaccaaggattagtacaggactgggtccaacgaggccggccacacgtcacatgtacatttatttcctgctggaagactgcttctctctccctcctgtagaaaccaacaacaatggcagatgtcatcatctccgccatcctcggtgatgtggtcagtagagcggtttctcttctcattgggcgtttcagtaacaaccaggagagcgctgaggacaagctgcaaaggatgaggcgtctggtcatcagaatccacagcgtggtagaggaagcaaaggggcggcagatctcaaaccacggcaccctccagtggctctccgagctcatcgacggcgactaccagggctgctatttgctcgactccgtcgggtgcggaggtgaattagctgacagagatgacgatggtaaggcaatcccccaagtttcaaccttgtccttgtttaatccagcaaagcgcgtgagacttgcagcatcgtcccggcgccatgacgatacgggcggtgtcgatgagatcgagagggtgctccagagactgcaggtcatgtctggtgatctgagggagttcatcctgctcttgcaaggctgcaagcccatccgccgccctctagccactagcatcttccgggacgggcagatgttcggccgacatgtcgagaaaagagaggatcatcaacttcctgctgcacgaggacgtctatcggcggaccacggagcttggtgtgctgcctattgttggtgacagcggagtcgggaagacaaccctggtgcaatacgcctgcgacgacgctagagtgcgcgcccacttcccagtgatcatgctgtacagtttcacatctacctacgatgtcaaaaacaaccaaggaacttgtccaagcgacgacccactggagttgatcaagagtagcgacgacagtttttgggacagacacaggaggtgcctgatgatatttgaggacgtggacatgtgcaggaagcagatgctggaggagttcttgcagaaccaccgccgcagcgaggcggcgggggtagtcaagatgatcgtcaccacgaacaaccggcgtgtcgcgaacgacgtcgggacggtggagccgatcgtgctaaggccgttgccgtgccctgagtactggttcttcttcaaggcccacgcgttcgccggcagagacgtcgaggagaacccgaggctcatctctgcggggaaagcgatagcgaggaagctcaacggctcattcttcggcgccaagatcgtcggagggctgctcacggatcacccggatccaagggtctggtgcaaggtcctgaggagcagcattggagggatgtctccccttggtgacggcgtcggttacatctcggacttggctgaaaacttgctgcccggccatgtgaacatgtgcagggtgacgctctctaaggacccggcatttcctccccagacggcgacaccgcagttggctatgttcaaggatctgcacggcgctgttcctcatgacagcgagttggcctgctgggcagacgacgcccggtttgggagtgtgagtgcaagtcagtactgccgttctttaaccattactatattgctcgttgctcttgcacttgcaccgtagctgcagtgaactcttgccgatcagtgttgatctctgtataactagaatgttggatatgcttgtacctatacctactagcaatgggtaaatacccatcgggtattactaccccatacccatactcacgacacaaaaataactccaccggatcacccatatacacttgcgggtatggatttacccccatacccatacccatgtgggtataggtcacccatcgggtcacccgtacccacaaaaattaaacaa

SEQ ID NO: 115409 - DNA, 98 bp, Zea Mays
atattattacatatttttatcgtcaatataatattagtgttacgattatatatattttgtcacacggattttacatatcatagtgatgtttatcgttc

SEQ ID NO: 115410 - DNA, 1708 bp, Zea Mays
ctcactccgtcccaccgtaaataggcagacacatcagaagagagagggagcacccttccgaagccacgccaccgacatcgcctcgtgacccgacgcactgcgccagggacccagccagctagctacatccactgatccacgcgcattccccgtaccaccgccaccgcgccgcgtcacggaaggaggaggatgtcgtcgtctccctcgccggcggccacccgcctggatctggatggcaaccccatcgctcccctcaccatctgcatgatcggcgccggcggcttcatcggctcccacctctgcgagaagctaatggccgagacgcaccacaccgtcctcgctgttgacgtctactgcgacaagatccgccaccttgtcgaccccgcgccgccgcacctcgccgggcgcatctcattccaccgccttaacataaaaaacgactccaggctagaggggctcatcaagatggccgatctgaccataaacctggccgcgatctgcacgccggccgactacaacactcgcccacttgacaccatctacagcaacttcatcgacgcactcccagtggtcaagtactgctccgagaacagcaagcgtctcatccacttctccacctgcgaggtctacggcaagaccatcggcagcttcctccccaaagaccacccgctccgcaaggagcctgaattttatgttcttaaagaagatgagtcgccctgtatttttggtccaatcgtgaaacaaagatggtcctatgcatgcgcaaagcaacttattgagaggcttgtatttgctgaaggtgcagaaaatggccttgatttcacaatcgtgagacctttcaattggattggaccaaggatggacttcattcctggtgttgatggtcctagtgaaggtgtgcctcgggttttggcttgcttcagtaacaatctgctccggagagagcccttgaagcttgttgatgggggtcagtctcagagaacctttgtctacatcaaggatgctatcgaagctgtagtgctgatgattgaaaatcctgctcgagccaatggccacatcttcaatgttgggaatccgaacaatgaagttaccgttagggagttggcccaaatgatgacagaggtctacgcaaatgtctcaggagaggcaccgctggatgagcccatgattgacgtgagctcgagtcagttctacggtgaaggatacgatgatagcgacaagaggatccccgacatgactataatcaacaagcagctaggttggaacccaaagacgcctctcaaggatctgctggagacaacactgacatatcagcacaagacatacaaagaagctgtgaaaaggcaaatgtcgcaggcttcagcgtcgacttagatagcgtgcccctggctctcgtctagagcctagtcgcagctgttaagatgtttcggaagcgcaggtcacacatacgctagtgatcttttttttgaggccctagatgtccgtgttgttagataaccaagggatgctgtatcagtatgatatatttgtggcagagttgatgtattccatcgttgagctgttatatattgctgtttgagtgtagaactagttgctcagttatatgttattggttcatgagattagcgcccacatcaatctgttgatagcacatacatactatagcagggcaatgatgaatctcattcgtcagccatcaagtttcaga

SEQ ID NO: 115411 - DNA, 1002 bp, Zea Mays
aaagaacttgcaagttgttgcgccgagacaatatcaagggcaataaaagaagacatgggtgataatatgttctctattcttgtagatgagtctcgtgatatatcagtcaaagagcaaatggccatagttatcaatgtgtcaacaaaaaagggacaagtgattgaaaggttttttggtgtgaagcttgtcaaagatactacatctgaggcaataaagaaaggagtggttgtggtgcttagtgaccacagtttagctattgcaagaatacgagggcaaggttatgatagagcttctaatatgagaggtgaattcaatggtgttcaaaagctaattgtgatgacaacccctaagctttctatgtccattgttttgctcaccaattgtagttggttgttatttctatcgtaagatgttgcccaactattgagtattttttgaatgtcaccttgattatgaacattgtttgtggatcttgcaagagaatggatgtattgcttgataaacatcataaaattcttgtggataaactgaatcatggtgagatttcatttggaagaggacaaaaccaagaaactacattggctagacctagagatacaagatggggatcccactacaagacttcgctttgtattgaaacattatgggagtcaataatagaagttctaggaattgtgaatcaaggacaacgaaatccatcaagggctggaggtttggttgctaacatggagtcattttgtcttgtgtttgttgttcacttgttctcaaatgttgtgagtcaaacaaatgagttgtcccttccgttgcaaaagaaggatcaaaatattgtccaggccatgtctttagttgatgatgtgagaatttgtttgaatgatttgagaagtgaaggttgggatccactgtttgaagaagtcaaagctttttgtgtgcaagttggtattgatcgatataccagatacgaatggtccaacatcaagatttggtcattcaagaagaggagga

SEQ ID NO: 115412 - DNA, 368 bp, Zea Mays
agcggcttcattggcagcattttttgtccaaatagcaattctttcctgcttcccacgcacactgacaactgcgccacaaatttcatcaccatagtcgaattgttcaccaatcatagccagcagctaaacaaaggacagttgaaagaatataaggtggaggacgtgttaaggagagatgtgcaaaacaaagttatctttctgataaaatagaattgcttacagtgtgcagccaaaatgtatcagattttcctcttccacagctgatggtccatttaccaccattcgcacaaatagggtcttcccattttggctcgatcttgttcttgaagcaatggaaatcagctcccacgatcaatttgctagggtga

SEQ ID NO: 115413 - DNA, 1816 bp, Zea Mays
ttctaccaagaattagtacaggactgggtccaacgaggccggccacacgtcacatgtacatttatttcctgctggaagactgcttgtctctccctcctgtagaaactagaaaccaacaacaatggcagatgccatcatctccgccatcatcggtgatgtggtcagtagagcggtttctcttctcattgggcgtttcatcagtaacaaccaggagagcgctgaggacaagctgcaaaggatgaggcgtctggtcatcagaatccacagcgtggtagaggaagcaaaagggcggcagatctcaaacaacggcaccctccagttgctctccgatctcatcgacggcgactaccagggctgctatttgctcgactccgtcaggtgcggaggtgaagctgacagagatgacgatggtaaggcaatcccccaagtttcaaccttgtccttgtttaatccagcaaagcgcgtgagacttgcagcatcgtcccggcgccatgacgatacgggcggtgtcgatgagatcgagagggtgctccagagactgcaggtcatgtctggtgatctgagggagttcatcctgctcttgcaaggctgcaagcccatccgccgccctctagccactagcatcttccgggacgcgcagatgttcggccgacatgtcgagaaagaaaggatcatcaacttcctgctgcacgaggacgactatcggccagccacggagctgggtgtgctgcctattgttggtgacagcggagtcgggaagacaaccctggtgcaatacgcctgcgacgacgctagagtgcgcgcccacttcccagtgatcatgctgtacagtttcacatctacctacgatgtcaaaaacaaccaaggaacttcaataagcgacgacccactagagttgatcaagagtagcgacgacagtttttgggacagacacaggaggtgcctgatgatatttgaggacgtggacatgtgcaggaagcagatgctggaggagttcttgcagaaccaccggcgcagcgaggcggcgggggtagtcaagatgatcgtcaccacgaacaaccggcgtgtcgcgaacgacgtcgggacggtggagccgatcgtgctaaggccgttgccgtgcccagagttctggttcttcttcaaggcccacgcgttcgacggcagagacgtcgaggagaacccgaggctcatctctgcggggaaagcgatagcgaggaagctcaacggctcattcttcggcgccaagatcatcggaggggtgctcagggatcaccgggatccaagggtgtggtgcaaggccctgaggagcagcattggagggatgtctccccttggtgacggcgtcagttacatctcggacttggctgggaacttgctgcccggtcatgtggacatgtgcagggtgacgctctccaaggacccgccgccggcctttcttcctgaaacggcagcacagcggttggctatgttcaaagatctgcacggcgctgttcctcatgacaacgtgttggcctgctgcgcggacgacgcccggtttgcgagagtgttgttgtgcaagtccgtactgccgttcttcaaccattactacattgctcgttgctcttgcacttgcactgtaggctcaaagagaaagaactcttgccgttcttcgaccgatcagcgcgttgatttctgtattgcaactcttagaaagagcacgaccatgtaataactagaatgtttagtggaatggataagcttgtacccataccaaccatggaatagacccaagttttcgaccccctgtggctctatcaatcttgtaaatggatctaat

SEQ ID NO: 115414 - DNA, 171 bp, Zea Mays
atggcggcgaggcatggattgcatttgggcgcgaaggatatgggtggggcatccgcggtgcatgggaagaacgattgggcggggtggtcctgcgcgtcgtcggtgaagggattcctgcgtgctggactgctgcgaggcgtggataacggaacctatgatccagatcgttga

SEQ ID NO: 115415 - DNA, 1074 bp, Zea Mays
gtcgctgtcctatttcaatttcgaatctccccttcccctcagtctctcacacgcacgctcctcccctacgcagcaaaaccctaaccctagctgcggacgccgtcgccgcctccgcgcccaaccgatgtctgattctgaggcgtccccaccgcccactccggccgccgcaacgcccgcagcgctggtggagacctccccgtcctcggcgaggaaggaagaactgctgcctgtggaggaaaagatctcggaattaagtgaatcacaatcagagcttctagggaggctccgtgggcttaaggaggatttgctgagttggaggagtaatttagactcccaagtgacgaaatacaaagtggaactctctgacatcaagagtgcactcaataatgaaatagagcagcttcgctcagatttccaagagctgaggaccacccttaagaagcagcaggaagatgtgtcacttagcttgaagaatttggggcttcaagatgctaccgaaaatgatgggaacaaaggaaatggagacggcacaaatgaggtcttgtcagctaacttggggaacttgaaactggatggttcttctgaaaactatgatgaaagcagagagtcaaaggaggacaaggaaaacaccgacactgctggtgatggcatcgtcgacaaagctactaaggagacgagctcaactgatgaacaattctaacacaggaaactgaactacactgttcgtgtctcagctgtagaaattctaggaacatcgatacatgagttcctgtaagagagcgagtccatgctttgctatggctcagtcgggttggttatggaactctattgggacctgtgagtcgtgaggatccaaatctcctctagaattgtgtaccaattgaaagttacgatatggtatcatggacatttgctcacctgaatgcatttcagctggtttgtcgtttgcaatatccaagcctccaaggccatgattttattagacctacttgaaatggcggtaggtgatgtactgatgtggattttgtacgaggaatagtggaataaggtattctggtgggtttgttgttggtc

SEQ ID NO: 115416 - DNA, 1129 bp, Zea Mays
ggaaaagtttccgtttccctgctcgagccgctcccccgtcctcttccttcctctcgagtagcctgccctcggttggtcgctgtcctatttcaatttcgaatctccccttcccctcagtctctcacacgcacgctcctcccctacgcagcaaaaccctaaccctagctgcggacgccgtcgccgcctccgcgcccaaccgatgtctgattctgaggcgtccccaccgcccactccggccgccgcaacgcccgcagcgctggtggagacctccccgtcctcggcgaggaaggaagaactgctgcctgtggaggaaaagatctcggaattaagtgaatcacaatcagagcttctagggaggctccgtgggcttaaggaggatttgctgagttggaggagtaatttagactcccaagtgacgaaatacaaagtggaactctctgacatcaagagtgcactcaataatgaaatagagcagcttcgctcagatttccaagagctgaggaccacccttaagaagcagcaggaagatgtgtcacttagcttgaagaatttggggcttcaagatgctaccgaaaatgatgggaacaaaggaaatggagacggcacaaatgaggtcttgtcagctaacttggggaacttgaaactggatggttcttctgaaaactatgatgaaagcagagagtcaaaggaggacaaggtggaaaacaccgacactgctggtgatggcatcgtcgacaaagctactaaggagacgagctcaactgatgaacaattctaacacaggaaactgaactacactgttcgtgtctcagctgtagaaattctaggaacatcgatacatgagttcctgtaagagagcgagtccatgctttgctatggctcagtcgggttggttatggaactctattgggacctgtgagtcgtgaggatccaaatctcctctagaattgtgtaccaattgaaagttacgatatggtatcatggacatttgctcacctgaatgcatttcagctggtttgtcgtttgcaatatccaagcctccaaggccatgattttattagacctacttgaaatggcggtaggtgatgtactgatgtggattttgtacgaggaatagtggaataaggta

SEQ ID NO: 115417 - DNA, 902 bp, Zea Mays
caatttcgaatctccccttcccctcagtctctcacacgcacgctcctcccctacgcagcaaaaccctaaccctagctgcggacgccgtcgccgcctccgcgcccaaccgatgtctgattctgaggcgtccccaccgcccactccggccgccgcaacgcccgcagcgctggtggagacctccccgtcctcggcggaattaagtgaatcacaatcagagcttctagggaggctccgtgggcttaaggaggatttgctgagttggaggagtaatttagactcccaagtgacgaaatacaaagtggaactctctgacatcaagagtgcactcaataatgaaatagagcagcttcgctcagatttccaagagctgaggaccacccttaagaagcagcaggaagatgtgtcacttagcttgaagaatttggggcttcaagatgctaccgaaaatgatgggaacaaaggaaatggagacggcacaaatgaggtcttgtcagctaacttggggaacttgaaactggatggttcttctgaaaactatgatgaaagcagagagtcaaaggaggacaaggtggaaaacaccgacactgctggtgatggcatcgtcgacaaagctactaaggagacgagctcaactgatgaacaattctaacacaggaaactgaactacactgttcgtgtctcagctgtagaaattctaggaacatcgatacatgagttcctgtaagagagcgagtccatgctttgctatggctcagtcgggttggttatggaactctattgggacctgtgagtcgtgaggatccaaatctcctctagaattgtgtaccaattgaaagttacgatatggtatcatggacatttgctcacctgaatgcatttcagctggtttgtcgtttgcaata

SEQ ID NO: 115418 - DNA, 1407 bp, Zea Mays
gtcgctgtcctatttcaatttcgaatctccccttcccctcagtctctcacacgcacgctcctcccctacgcagcaaaaccctaaccctagctgcggacgccgtcgccgcctccgcgcccaaccgatgtctgattctgaggcgtccccaccgcccactccggccgccgcaacgcccgcagcgctggtggagacctccccgtcctcggcgaggaaggaagaactgctgcctgtggaggaaaagatctcggaattaagtgaatcacaatcagagcttctagggaggctccgtgggcttaaggaggatttgctgagttggaggagtaatttagactcccaagtgacgaaatacaaagtggaactctctgacatcaagagtgcactcaataatgaaatagagcagcttcgctcagatttccaagagctgaggaccacccttaagaagcagcaggaagatgtgtcacttagcttgaagaatttggggcttcaagatgctaccgaaaatgatgggaacaaaggaaatggagacggcacaaatgaggtcttgtcagctaacttggggaacttgaaactggatggttcttctgaaaactatgatgaaagcagagagtcaaaggaggacaaggtggtaagaaattagtacccagttacatggatgactagaaaataagtaggaacacacactcgtatttttcttttccagctggatggttcaaagcagtctcttcgttgcgagggaccaaacatgctctggcatatagaacatctgcaatgctaggatcccatccttttcttatatgataaaaaaaacttataaacaccaataaaagaaatcaaatgttatttgagaaattcaggtcttttcatcctttttcaagatgatatactgtaactggttatggggtggagtttacaatgaaaggtttcacactatcttttccctgatcgttgagtgtgctgaatcatgcaccaagagttatgacagaacttaacatgcgctgatgatggtttaatttgctgcagggtcaccacagtttcttagtggagagttctccctgaccttttcctttctgatggctacaggaaaacaccgacactgctggtgatggcatcgtcgacaaagctactaaggagacgagctcaactgatgaacaattctaacacaggaaactgaactacactgttcgtgtctcagctgtagaaattctaggaacatcgatacatgagttcctgtaagagagcgagtccatgctttgctatggctcagtcgggttggttatggaactctattgggacctgtgagtcgtgaggatccaaatctcctctagaattgtgtaccaattgaaagttacgatatggtatcatggacatttgctcacctgaatgcatttcagctggtttgtcgtttgc

SEQ ID NO: 115419 - DNA, 570 bp, Zea Mays
gttcgtttttataaaattgttgtgtactaatattttgtttaatattttgtataagtttgacgaagcatttacaatggctcttcaaaggagtgatgtttccatagtatcgtggctgtgctcccaggtatcttccttccaccaaattgatcagctaagatcgaccctacttttccatattagaacaatcttgttttggctttgtgatgcttacatccccttgtacaggttgatttgcgggcactatgtgcaatggttccagtacctcttaaccagggggtctttctggccttattgcagcagctagcaattgacattcacaatgagacatcacggaaggttcaatggatgacagatgttgccatggcaatcaacccagcagaccagatcatcgcggtgcatgtgccaccaatctttgagcaagtctacagccaattggcccaccaacggacactccccacggccgcatcagatggcaccagtatccgtgtgatcatgcatgtaattaactcggttctgcttagctaagtatgtgttttgttgcttaagaacatgtatgtacatacatagaag

SEQ ID NO: 115420 - DNA, 1357 bp, Zea Mays
atggaaccggtcgtattgaaccgcgaaagagccgcagcggaccgcctaaaacggatgcctatgttgtttgacgactaccgtgaagaagatttttatgggctaccgcggaaatacagtattgtcgctcgggtagaagttaaattcccgaaggaaccacgtttccgtgatagacaacatttcgttttatcagacatcaatggagccaagatcgaagccataacatatatgtatgagacagtcaaacatttcgacaatttgctccatgaaaagcatgtttacaagatgcataatgtaaagttcagtcttcatccgggtgaatttaattttcgtcatctaaatggtcccatggaattgtgtcttgaccaacaaactatcgtggagccatacactgttccaattcaaatggcgccattcccaaaacaaatactcttgaaccttgctgatattgccgagttgccaaacaggactttagtcgatattatggctattgtagtccacttggatacaattcatcgcacaatgtggggccctttcagaaagattgttataatggatgctagagggtatttacatatcattaaagtttggggtgacctactaaacaaaaatgcactccgctgggcgttggctaaggaggattatggcataataattgggactatgtttagacggttcagaagacaagagtgcctcgagtcttcggatcataccgcaatacacttcaatccgttccatcacaacacccatcattttggacaagctcctgtggagttgagcctggatccaattcataacagcccttgggagcatcacgagaaacaacaagatcaaaatgtaacatccattgatgctattctttttgttgcactatggaagcttgccagatttgatagcctagcgtgcagtgagagtttcatagtcaagaggcatatttggatgaacacgagaatgaaggtttgtcttcggcagatcagggaaatcttgatcaggctcttcgtcttcaaagtgacggtttttgaaaacagctcactcttaggaggcaatggcctttccacatactgaatttccacatcattttcaccttcggaatctgaacacagtccctcagaatcatcaaactttatctctgagtgcaccttccgatcagcacgacagttccttctccgtgtcttcgttgagtccaatctgcagggtagccgtctttgtcatattctacatggttctttccacttaaccttcttctgctgtatgttttcccttcgtgatgattttgttcatcaaaggcatttgcatcttctttcaaggaggatctactcgagttgctcatcgactgtctcttcagggtatgagtgaattc

SEQ ID NO: 115421 - DNA, 106 bp, Zea Mays
cttcaattaggctttttatacttctgatttatagcatgacctcttttaaattcttatacattttggttcatatcgggcttcaggacgacaactgacagcacacccc

SEQ ID NO: 115422 - DNA, 1128 bp, Zea Mays
atggcgcgtgaggacgcagctttgcggaaggctctgtttgtcacaatagttggtactaggccagaggtcctaggggctgagatcatcaatgaagttgctcaaagttttaatgtcgatgggggttcaatgtccattcaccaggcaatgcccgaggatttcattctgttcttgccggatgaacgaacagcttcaagggtattcaatgatggaagtatttttagaggaccacagtttgaccttgtgtttaagaggtggacgcgttgtgcaaatgcggctgcgacatcgctcccgaccttgattaatgtggagatcaggggcattccggcccatgcatggtctcgatctacagcagaatttctgctgcgagattcgtgcatcatttccgagctgcacccagcaacagcattgaaaactgacctatcgtccttcatgttgaaggtgtggtgtctggatccgaggaatctacatcgtgacatgactctcatcatttcggagccagggcctgcggcaggagaaaagcgttgtttatcctacaagatcagcctgatggtcacccctgtcgatgcctcggaaaaagctattgttattcccactccgctgagcgacagtgacccccctgatggtgacggtgattccttcttccctgggtcgccacagagacgttcaaagcacagtgctggtgggcgacgctcagtccattctcgtttgggcccacaactgccttctcgacgtatggaaggaggtcaacgggaagctggagaaccatccttgaagatgcacagctctgtggagtctgctttggggacagcatctgatccgtgcatgcgcaagaattgtttgctgggcggatccagcctggaactgcttgctggggctactgaacagactgctggactggtttccaaggaaacaattatgctggacagtttacgggatggcagactcgaagagactcaatctgaggatgggcagctggagcaggacagtttacgggatggcaaacttgaagaaactcactctgaggatggacagctggagcaggtcgcattactttccccccaacaatctgctggtccgctgaaatctaatgggctatgcagcaggaagagggcactctgggtccggtga

SEQ ID NO: 115423 - DNA, 2751 bp, Zea Mays
acggcccaccccgatctcataatcgtcgtcttcttccacttcgacgcggctagggccggcgcaaccatctcctcttctcttctggcggcttctccgtcccgtcgatcaaccgcgccgccttcgccagtataccccgcattgagccgtcatcgttacctgcgccgaccggcacctctgtagcctcttctccagggattgcacgaggaggaggaggttcgggcttcgccatgtcgaagtcgaacctagatgatctgcttctgcaggcagccggccggacggggaagaaccactcccggccgagcaacccgcggtggaactctgggggaagcggctccgacggcttcgacgacgacgactcggacgccgcgccgacctactcgaggaagaagccttcgtcgcaggttccgctcaagaagcggcaccagccagagcagggcggccggcgtggcagtggcgggtggaaggacgaggacgacgaggacgaagacgggcgtcgcagtggcggggaggactcggacagcgccccttcggtggggagtgacctatacaaggatgaggacgacaaggagcgtctggagaacatgtctgagctgcaaagggagatgatcctggctgatcggggcacccgcctcgatgattacaagctcaagcagcgggcacgagcgtcctcgtccaagacggacaaggtgggcgcacggaaggatagcagtccacccccgccgcccagccggatgcggtcttcaacccgagctgacaagtctgggtccgcagctaagagcgcgttggacgagctgcgggcaaagcagcggatgcggcaacaggctccggaggcacgcaggttcacggacctgctcccacgtagtggctcaccaactaggcgcagggctgggagccctccaagtgatgggagcaacgatggggatggcagggggaggcctaatgaccatgggaggatcgctgacgatagcagggatgacgaatttgatgagtcgccgagtaggcttgatccactcaagtttgatgacgtgaagagtattaccctcaggaggtcaaagctggtgaaatggttcatggagccgttctttgatgatctaatttctgggtgttttgtgcggctaggtattggccagacaaagaatgggaccccgaggtacaggctgtgcatagtgaggaacgtggatgcaagcgatccagaccggaattacaaactggaaagctactcgacatgcaaatatctcaatgttgtgtgggatagtgaggctaatgctgcgcggtggcagatgactcaagtatcggattccccacccaacgaagaagagttcaaggaatggctgcaagaggcagagaagcatggtgcacgtataccgacccggcaggaagtgctggacaagaaagaagccatccaggaggcctataattttgtgtattcagctgcaactgtacagcagatgctgcgagagaaatcagctgtgagacgccctatcaatattgctgctgagaaggatcggttgaggagtgagttggagatggccctgagccgtaggaatgaagctgaagcagagaggattcgtgtgaagctgaaaaatctgcaaagcaggccacaaccggtgtcaaaggataataaggctgcaaagttggaggctatgaaccggaagaatcgtgctgataacttcaagaacgcttcggaactgaaacctgtaaatacatctttgaaggctggagaggctggttatgaccctttctcgaggaggtggacaagatcaagaaactattatgcatcaaagccaggaggagataatgctgaagaaactgccaacaagtccagtagtattgtagagcctagcaatggagatataaagagcaaggctcagactggtacatcagccacaactgcagctcaagtggcagcagctgacgccgggaagctcactgatactaatgcaccagtggatctgggaacagaatcgaatgtgatgcatacatttgaacttcctatatcattgtctgctttgcaagaatttggtggagccaagggcctgtttgatggttacatggcaaggaggcagaagatagaagctacaatggggtacaaggtgcctgacaacgatggaaggaggcatgctttaaccttgagtgtgagtgattacaaaaggcggcggggtctcctctgaatggtatctctgattgtgctggacgctcaacggattcaactatattcctggcgtcagcacctatgtgcatttgctgtgacaattgtgcagatcatctgcattttgccttatcttcctaggcgtaacataagacatgcagactacaattcttttgcataaatgttacctgatgtatgaccgattatgttgctgacatcacgtttacatctgtggattttgcttacatcttatccttgctagctgcaaaaaaccggattccataattagatgaattaaattcaatgtatctttcatttttctgattcatgttttacatggtctgatacatgaacatcagaacatacatagtggagcttgcttattaacggcctcatttgtggtccgaagaagtctttcttgctccaactattacttggttgttttttcctgtttttttcttttattgatccctctttgagactgttgtgttcatgctgaaattacagtattctgttgaacaccgcaatttgaaggtactgcagttgtgtattctgtctgtccgatgcttagtataaaaggtatctgtaaatattcagtgacc

SEQ ID NO: 115424 - DNA, 2523 bp, Zea Mays
cagttccacacttccacccacctccagagccaaaagagccggcggtggccggcagccaaaacccacgtcggatttcgccgccgccgccaggagctaggggacaaggcaacgccggcaggtgcaacatttatgcgtgtaccgcccggcagccacgcgtacacttctgccgcagagctaaacgcgccactccgcggcaagctgatctgctgctcccaagtcccaccagccaccgcaccgagtgccaatggcgactgcagcgacttctacgccggcggcgtggcagtctactctggtctactctggtctacgccatgcagggacctgcccgtgcttctcgcccagccccgctcgctccccgtcatcgtcacctacaggccgaattgggagggaggccagtacgcaggcgaagatgagccacggtttgaggcgcttctactggcaatggagctgggagctgaatatgtcgatgtcgagttcaaggtcgccgacaaatttatgaagtatttgtctgggaagaaacctcaaaactgtaagctcatcatttcagcatacgactacaagaccactccatcggtacatgaacttctgaatttagtagctcagatacgagcaacgggggctgacattgtgaaaattgaaaccactgctgctgacattgtagacacatcaagaatgtttcaagtacttgcacattgccatgaaaagcaggtgcctatcattgggctggtgaggaaagaacatggttttatttctcgtattatttgcgcaaaatatggcggataccttacttttgcatctcttgaaaatggaaaagaatctaccactgagcagccgacagtagcagacttgataaataagtacaaaatacggcagataggcccagatactaaggtctttggtattattggaaatccagttagccacagtaaaagcccaattgtgcaaaatcaagctttcagatcagtgggtttcgatgctgtgtttttgccatttttgtcagatgacttggttcagtttctttataccttctcagcaccagattatgccggcttcagttgcacaatgccccataaagaaactgcacttaggtgctgtgacgatgtcgaccctatcgccagggacatcggagctattaatacaatcattagaagacctgatggaaaacttgtaggctacaatacagattattctggtgctatttctgctattgaggatggaataagagcatcacaaccaacagattcgatcacttcaccactggctggaagactttttgttgttattggggctggtggtgcaggaaaagcactagcatatggtgcaaaagagaagggagcaagagttgtgattgcaaaccgtacatttgcacgagctcaagaactcgcccacatcattggcgggactgctttgaccctgtcagagttggaaagctaccatccggagaaagggatgattcttgcaaacgcgacatctgtggggatgcatccaaacgtcgatgaaacccctttatctaagcacgcgctaaaatcctatgccgttgtcttcgacgcggtcttcgtgccgagagagaccagacttctccgagaagctgcagtgtgtggagccacagtcatcgacggtttggagatgctaatcaggctagtgatggttcagtttaagcttttcacggggggcatgacagctccagaaaggttgatgcgtgaggctatcctgacgaagacacattgagggtttgttcaaataacaagatctctacactacagatgtccctgcaaaaaaaaaggtcccagttgtacatgtcctccttcttgcttcttcctcggcgtctgggaagcaccgtatctcattttcaacccaagcaaggagaggaggtgcaggttcgggcctcgtcctgcttctcctgctgcctgccatgatgcagtgtcgtttgttgttcagtagacggtatgctctagttcaacagagtaaagatgttttgttttctcaggttgcaaaacaacgaatggtcatgttcaataaggaatggaatgtgatttggatcaacactagttttctgtcatatccattccacggtttggagataaaattggttggcaacccaacctgtgcagacgtgcaccagttccatattccccttcagatttggattcagagaagcctttcctgacatgagacgtctcattagacacgaactttcttttcccttaaaattcatttcagctggcccgaacttgtgcagtcttctcttctcctacactacaactgaaatgatttgtctctaaacaagtgttatgctataacatacaataaactgtatattattaactacgtttttgagaaacatagctcccaaacaggcccgaacttgtttgtcttgacttttctatctttttttagagatatttttagatatggattcagtgatcagtttgcctctcagccattgtaaaattagatgttccgagctcaaacattttggtttgccttattttgtatcagcataacgacatttgtgttccccta

SEQ ID NO: 115425 - DNA, 1105 bp, Zea Mays
agcgtcagacatctccggagcccggacggacgcttttctatcccaagcctatctatttatcggttcgcccgccgcactacgctcccaccgtgtgatagctgctgctcttggcctgctacgacctcacggccacctctgtcctgtcccactagactagctgcagctagcgcctcttcccctcgccgccgccccctatccgagagcgacgagcatggcgcactccctcgccgcctccttctcgccggccgccgcgcggcgccaggtgacaaatgtgatttcaagccggagctcggtttccttccagagccacaggatgacttctgtatccatccgttcaagaccaagttctcttcgtttcaagatttgctgttcggctaagaaggagacagtcgacaaggtctgtagtatagtgaaggagcagctggctcttcccgatgggactgctatcactggcgaatcaaaattcgccgaacttggtgctgattcactggatacggttgaaattgtgatgggcctcgaggaggcgttcaacataaccgtcgacgaaacaagcgcacaggacatcgcgacggtgcaggacgctgcagacctcatcgagaaactcatgctggaagcgcctccaaaggttgtctagatcgatccatcagtcttgcgattggcgacttggcgttttatgttaaattgttcatgttacccaatttgttctttattgatggttcaagataagatttttgtatggatgttgctgaggtataaattagatgctccaaaggctgcatggagcagatgaagacgatgtattccacttcccatttgcatgttgtacttccatagagagatcaatgaactgttatgaagagtcactgcaactgtggcttttgatctttgtgaagtcacatacagtaattgttgttagatttgcaaatacaaggctgtctgtcaggtgctaacgcattgtggtgtttcaccacaagcgttgatgaattcccttcgttgtgattgattggctgattgctcgataacaacttgacttttggtaaatcagatcggataggatcacgttggatttatgggattcaattaaattatagaaaaatcacaaaaa

SEQ ID NO: 115426 - DNA, 675 bp, Zea Mays
atggcttcaattagggttcctattgcccatgggggggtttgctttagggttttgggaaatccccacttagatgtgcatgacaagctagggcatgatatccaagatagtttgcactggattaggaccttgaattcaaagtttgaggtactttgcccatacaaatcttcatgtgataatgggttaaaaaggggtaaccctggggtggacaccctgagtaacacctggggtgttacatacactaggagttatgcagcatttaagatgatggaaatggccaagaatagtgcttgtacccaagcacaagaacgacttgaggaagaaaaggttcaagcggaacaggttattggactagagcatcaggtgacagaacttcagatgcaacaccaagctgatcagaatcgcattaaggagcttgagcatcagctaactaatgctcattctaaattaaaaattttgagtcagcaacaagaagaaatttgtctatatgctgttgctgttagagaagaccttaaggaaaccatgagcttcataagccatcaggatcaggcgatcaaagaattaaatcgtgctcatcccatggaatttcaagtagcacaacggcttgtcaaccatctgcagcaagcagtgcataggctcaatgctgccttttatcctactcctgcatcggcggactaa

SEQ ID NO: 115427 - DNA, 3520 bp, Zea Mays
aatcaaggcctcactttaacacacagcttccatagttcagctccagccacacatctcaccgcctctccacagtcgccaccgcctcaataatacttcttcctcaagaaaacaatcccgtaatccacactcatcgctaacgactcacacaaatcgaatctggaaattcttcccccaatccgtcccaaactcgcctcctcacggccgccgccgccgccgccgccgccgctgctcggtaatccctcatcctccccacctgtccgctcgtcagcgtcatgtccggcaccaccccgacccctacacctacaccgacgccgctaccgccgccgccgccgccgccgccagccgctcgccccgcacggtacgacttcctcaactccaagccaccgcccaactacgtcgcggggctcggccgtggcgccaccggcttcaccacccgctcggatatcggaccggcccgcgccgcacccgacctacccgaccgctccgcctccgccgccgccgccggtcccgccgtcggccggggccgcgggaagcctcccggcgaggatgacggcgacgacgacggcggcgacgaggagaagggctacgacgaaaaccagaagttcgacgagttcgagggcaacgacgccggcctcttctccaacgccgactacgacgacgacgaccgcgaggcggatgcggtgtgggagagcatcgaccagaggatggactcgcgccgcaaggaccgccgcgaggcgcgcctcaagcaggagattgagaagtaccgcgcgtcaaaccctaagatcaccgagcagtttgctgatctcaagaggaagctggccgatctgtccgcgcaggaatgggagagcataccggagattggggactactcgctgcgcaacaagaagaagcggtttgagagcttcgtgcccgtgccggacaccctgcttgagaaggcccggcaggagcaggagcatgtcacagcacttgaccctaagagccgtgcggctggtggcacagagacgccatgggcgcagactcctgttaccgatttgacagctgtgggcgagggtcgtggcactgtgctctcgctcaagttagataggctgtcagattcagtttctgggctcactgtagtcgatcccaaggggtatttgacagacctgaaaagtatgaagattactagtgatgctgagatttctgacatcaagaaggcacggctattgctcaagtcggtgacacagacgaaccctaaacatccacctggttggattgccgctgctaggctcgaagagattgctggcaagcttcaggttgctcggcagctcatccagcgtggttgtgaggagtgccccaagaacgaagatgtttggcttgaggcatgccgtttggccagtccagatgaggcaaaggctgtaattgcccgtggcgtgatgtcaattccaaattctgtgaagctatggttgcaggcagcaaaactggagggtagtgatctgaataagagtagggttttgaggaaagggctggagcacattcctgattcagtccggctatggaaggctgtagttgagcttgcaaatgaagaggatgcaaggctgttgcttcacagggctgtggagtgttgcccgttgcatgttgagctttggcttgcccttgcaaggctggagacctatgaccaagcaaggaaagtacttaacaaggcgagggagaagctccccaaggagcctgccatttggattacagctgcgaagctagaggaggctaatgggaacacacaatctgttaacaaggtgattgagagaggtattaggtctcttcagagagaaggaatggatattgatagggaagcatggttaaaggaagcagaagccgcagaacgtgctgggtctgttttaacttgccaggctattgtgaagaacactgtaggcattggtgttgatgatgaggatcggaagcgtacatgggttgctgatgctgaggaatgcaagaagcgcggttcaattgagacagcgcgtgctatctatgcacatgcgcttactgtgttccttactaagaagagtatttggctgaaagcagctcagcttgagaagagccacgggactagggagtcacttgatgctctcctcaagaaggctgtgaattacaatccacgagctgaggtattgtggcttatggctgccaaggagaaatggttggctggggatgtgcctgcagctcgtgccattcttcaggaagcttatgctgctatccccaattcagaagagatctggctggccgcattcaagctcgagtttgagaacaatgagccagagagagcaagaatgctcttggccaaggccagggaaagaggagggacagagagggtctggatgaaatctgccattgttgagagggaattggggaatgttggtgaggaaaggagattgttggaggaaggtttgaagctattcccttcattcttcaaattgtggttaatgcttggacagatggaggaccggcttgataacggagcgaaggccaaggaggtttttgagaatggcctcaagcactgccccagttgcatccctctttggctctctctagctaacctagaggagaagattagtggattgagtaaatcacgtgctgtcctcacaatggctagaaagaagaaccctgctacacctgaactctggctagcggcaattcgagctgagttgaggaatgggaacaaaaaggaagctgatgctctactggccaaggcattacaagagtgtcccacaagtggtattttgtgggctgccgctattgagatggcgccacgcccacagcgcaaaggaaagagtacagatgctattaagcgaagtgatcatgatccacatgtcattgcaactgtggccaaacttttctggcttgacaggaaggtcgataaagctaggagttggttgaacagagctgttactcttgctcctgatgttggtgatttttgggcattgtactacaaatttgaacttcagcatggaaatgtggacacacagaaggatgttctgaaaagatgtgttgcagcagaaccaaagcatggtgaaaaatggcaagcaatatccaagtctgttgaaaactcacacctgcctgttgaggctcttctaaagaaagctgttgtggtgcttgatgtagaagaaaatgccaatccggcaggagcctagactcactctttttacaagatgtttggtgaatgtgttttgtactaccatccttaatttatgttcacttcaatatgaggtactttaccttttaatatttcatctttattgttgagttaatatttgatcatcagtacttgaacttgcatagcagccatcatttgttctactcttttagctgtttattcttctcaacgggtaataagcagattgtaattcaatatgccagcagcttctcccactcggcttaggtgcgggagcaaggcgagtgcacttttgtatacattcaataccatctacccttgctacagattgtcactaaacttatgcttaatatagtttactggcaatcctttcttctc

SEQ ID NO: 115428 - DNA, 450 bp, Zea Mays
atgggatctaacaagaccggagttgtagcagtcaacagattgagaagcaaggagtttgagaagcaagggaagataagaacacagacctacatattgatttgtggcaaaggtgtgcaggcaaccacaaaacacaccgacgtcgacctgtggatcgatgggtggcactgtgacacggatcggcgacaatggccacaaacccacagtctggcgacggcagctacagacccaccaatcatcgggcgacaactccaatcggcgactgatgaccacagatcgactgcggcagcggccacgagcccacggctcatcaggtggcagctccaatcaatgaacggcggccacagacctcgtggcggcggcaccaatcggcggctgaaatatctgatacgtatccggaagtatccgaaaggtatccgtatccgatacggtatccgacaccgaagaggataa

SEQ ID NO: 115429 - DNA, 648 bp, Zea Mays
atgggagcagagaagagaacttcgcgagctgaggggggcgccgcgagcttgaagatggagcagaggacagagcgacagacgcacagagaacagcgccggcagctcgccatgggagatccgagctgggcgcatggcggcaacagggaggagcaggcgatgtcgcggctgggagccgcacacagcagcaggcgcggtaccaagcacgaccatgggagcgggccaggcgcgcgaccacgcgatgcaggaagccgagcagaaaatccactccgacaagggaacgacggccatggcagggagctgggaacgcacaggaaggagctctggccgacgccatggctgggacctgggagctggggcgagcagcacgcaggcacggcaccaagcgagcacagagagagatggaaggaggagagagagaacagcgcggagagagaaacgccatggggacgggcgcggctggagcttggagaccgagcgaccgagcggccgccatgggatcgagggagaggagaaacagggagggcgcagaggacctgggcgctgagcgccatgggcaaaaacgtcagggaggggctgctcgaccggacagagaacgagcagggagaaatgcactttgagaatcctccagaacggtacggctcaggttga

SEQ ID NO: 115430 - DNA, 166 bp, Zea Mays
tattttatttttattttactcctcacatgtttttcatgtcaacaattacttaaatatttctttatcgtaaatatatacacatctgtataagtgattaaactattttctcatcacacaggcctattaatattctattcggtacactaattcagctagttaatcggaa

SEQ ID NO: 115431 - DNA, 2915 bp, Zea Mays
cctcgccccccgtcgctcccttccatggcgtttcacgtcgcgtgccccatcacttgcaggagggtgtgcgactgcgagctagggttcggcgccgcagcggcgaggaagggaggagggggtggtgctgcggcggcggtatgggcgggcacggcggcggtgctcgaggggttcctcgtggatccgtggctgctgcggccggctggggccgtggacgaggatgcggcgacggtgcaggtggaagtgccgcccctggagccggaccctgaggatggggaggacgaggcgcgccgggcggcagcgcagcgcggcgccgccgcggcagaggacctcgccaggcgcttcgagagcggtgcctacggatcgccggaagcaggagaagatgaagacgagtgggatcgagaggatcaaggaaatgctgctgtcaaggttatgtgccgtttatgcttttcaggagaaaatgagggcagcacgaaagctgccaaaatgcttccttgcaaactctgcagcaaacggtatcatagaaactgtttgaaaagctggggggaacatagagaccttttccattggagttcatgggtatgtccttcttgccgcagttgtgaggtatgccgacgtcctggtgaccccaacaagttgatgttctgtaaaaggtgtgatggcgcttatcattgttactgtcagcaaccatcacacaagaatgttactcatggaccatatttatgtccaaaacatacaaggtgccacagctgtggatctggtgtgcctggtagtggacacagcacaaggtggtttttggggtacacatgctgtgatgcgtgtggacgattgtttgtgaaaggaaactactgtccaatctgcttgaaggtttatagagactctgaagtgatacctatggtttgctgcgatgtttgtgaaaagtgggtgcatattgagtgtgatggcatcagtgaggaaaagtaccaacaattccaagctgatcaaaaccttcagtacacatgtgcagcatgccgtggtgaatgctcccagatcagagacactgaggatgcaatccgggagctttggaagaggagggatgttgccgatcatgagcttatggctactttacgggctgctgctgcactgccttctcttgaagatgtctcaccaccttatcaaaactctgatgatgagaaactcggtgcatatgcattgaaaaatgagagtagaaatactctaaagttttcattgaaaagtaacagtagtaaacctccaccagatacacctgagcaagagaagattgtttttaagagctctggatcaaataagaagccttccaaaaagaaaagtggtcaggctaataaaacagttgatggccatgatgaaatatttctggagagaaggcatgctgttaaatcatcaaatagctgtttgggagatcaaactataaatgagaatcatgacaggagcccttttaaaaatgatgataatgtctatgtttcatcttcaactcgaagtttagaaaagaatttgaaatctccatccatgaaagctgtggcaaacaatgctgatatgatacccaaagtcaagattaaaggcagtaaggtttcgagtttgcattacaaagatggtgaagaaaatactcctaagaatgacactggaaaagctaccaagttggttatccatcttggttcacggcataaaactaggagtggctctcctaagtcggaactgtccaattctcaaagagagcaagatttgggttcaatacatggagggaaaatagatgtcacaagccagctgaaaagttcaagaaacgaggtaaaagagagaagtgtaatgaagttagttagagatactggggtgcaacaaagaaatagccttttgggcgatcttggtacctcaaagaagcatgcaactgggaaaaggagcaatgctctaatttctggaatggaaaatgcaaatgaaactggtactagaaacagatcatttgcacagaaacaatctcattctagtcaggtggagaaccatggaactgctgactctcctgatagcttgaagccatcattgctcaaactcaaatttaagcgtccacattttgagcagctaaacacccaggcctctcaaccagaggagccgacctcctgggtttctcagcaggaggagcagttaaatgttgctaaaggccagagatcaaagaggaagaggccttcgatggagaaggcagatggtttggacggtataactccagccaagaggcatcagcagagcacagatgaagtgatggacgcaaactggattctacgcaagttgggcaaggatgcgatcggaaagaggattgaggtccatctaacttctgatggcaaatggcatcaagggatggtgtctaatgtcatgggtggcacactgtgtattcggttagataatggcaggtctgagaacgtggagctggggaagcaggccatccgcttgattgcttcaagatcgaagggcgggaagcgatgaaaccttttccccataatatgcagcttaggacctgttctcgctcaatacattgcgccatgattatggcaggtagagtcctccccccctgaggtttgacatccgctggagcacagcctctcagcctttgctgactggacgagatactgagcgcaacttccatctgttgcgccatgtttcgctagcctagcgtgtaacagacatcgttttttggtgttggaagccccattggctttcgactagattctgttagggtagggaatgaggttttagatcaccttggatgtaagagaagcaggtagcgccgtgtctggagtgttttgtatgtttagttttccgacgagtttctcgacaatttgttattcacttatatttggttgctggtgttatttgctggccaatcaatgtctttttgtgatagtaataatttgtctaca

SEQ ID NO: 115432 - DNA, 894 bp, Zea Mays
cgtctgcatcttgcaccaagcaagtgcactgcagttctctgcagcatgctgccgtattatggtggctattattggtcagagtacgttgaacagtatcacagagcacgccggctagagaacgagaagcggcggctggagaacgagaagcgtgcgctggagaggcaactagcggagaagacgagggacgctcaggtgtcctccacccaggtcttcacgctgcagcacaaggtgcgagagctggagcagaggaacaccggactgtccggggacctggcgaagcaaagggaggacacgaggaaggccggcctgctgttcatggttgccgccgacaggtaccaagaggaagcccagaagcaaatcagggccaaggcagaggaactggccgacacgaggaaggcgggcctggcgctgatgaacaccgccgacacctaccaacaagcggcgaggaagcagatgaaggagaaggcggaggagctggaggtcgcgaggaaggcggttctggcgctcatggaagcggccgacgcgtaccaacaggaagcgaagaagcagatcaggggtaaggtggaggagctcaaggtcatggcggcgcagaaggcggagcttgatgccagggtggaagctttggagtcggggctcggggcagctctggcgaagaaccgggagttggaggatgcttatggtaaggtggaggctcagaatggtaagcttcggatggaggttgagaggttggtgatggagttaggtgcattgccggaggagaaagatatgcagccatttcatgctgggaaggaagaaatagtcttgttcaaggaattggaggaccataagatgaaggtggaggaggtaactcaagacaacaacaagggatttggggatggtgaaatgatagcatga

SEQ ID NO: 115433 - DNA, 354 bp, Zea Mays
gaatttaaggtttgcatgcatttcagttaacaaactggtaagcagctgcactccacatgataaaagtaagaccatcattgcagaactaaggagctccagtcctgatcaagactaaatcactctaggccttgacagttcaacaaacaaagttttggccactaaatgattatttttctattaaatagacctggtaagactatgacacaatggaagatactgctggccaattcttgtgcatacacaggagacagtacctggcaatctctcataacagttcttgcggttgaacattattacattcagaagaatcttggatgtggcaaccatcttcaataacaacatattcatcacaat

SEQ ID NO: 115434 - DNA, 516 bp, Zea Mays
aatcagtcgccattattaattgatgtccttcaaggtcaagcactcgtagtgaacttcatggttaatggacacgaatacaatagtggatactatcttgctgacggcatctacccttcctgaccggtgttcatcaagggtattcctcttccacaaagtgagaaacatcaattattcataaatgctcaagcaacatggcgcaaagatgtcgactgcgcttttggagtgttgaaatctcggttcaacattatagcagttcctggacgttcttactcccaacgtactcttgggttgatcatgcgtgcatgtttcattttgcacaacatgaccatcaatgacgagtgtgatgctgatttggatgggacttatgagacaatcgattctactgttggcctggcgatctactacaatacacctccgagcctagcagccaggattcaaatggacactgagatgatagacacatcgatgtatacacaactcaaccatgatttggttgagcatgtgtggggacataat

SEQ ID NO: 115435 - DNA, 340 bp, Zea Mays
gtactaagttgtggcactagccaggtaacaaaggggcaccaagcattaaaaggatcagccaagtttacatcatacactggagcaatacattcaaccgaggtgttggataaagaccattgtttcagctttcggctcagcatcctccagggccatgatctctgagatttttctgcaagaaacctctggtctgtctgctccaagatcacgctccaaccgacgcaagaaaccttcttcaacctcactcagatgatcgtcgacctcttgttcgctgtcaaaacagcattcggcgtcatcatgcttactggatgatgctggagatgagtatggtgtgtactctccg

SEQ ID NO: 115436 - DNA, 2481 bp, Zea Mays
gccaaattgggacgtcgtctccgactccgacgctgctcgatcgagcaaaccgacaaccccctctccgccgccgcgcacctacgctgccctccgtttggtcgtccgcccgcttcgacgggactggtccggccgtcggcgctcggcctgtcgacccaccagcccgctcccgtggcaggcgagttcgtccatcctccgaccccatccgtcggtcgccgggatggcggcgtcgggcgggaacgagccggaactcgccgtggtaacagatgtttgtaatgcttcaagcacacctcaagaaaataggcttgctggtgacagcaacaccatttcagaaaatgcccaggaatcattgagttctttaccagaacaagagtcaaatgatgctagtgttaacacagaaaagcaggaacctggcatttcaaaatgcaaatctgtggacgaaattccaaaaacagtaactgtaaagagatgcaagaacgttgattcaaaaaaagtctcctcaaataacaataataatccaagatttactggcagtccagctctgaaaaagcatcccacaaagggggaccatctttttgaactatgtgaaaatggcatggctcaagacacaaagcctcctagcacaaggatatgcataaattcagcctgcaaagctgtcttcaactcagataacacattttgtaagaggtgttcatgttgtatttgccatggttttgatgataacaaagatcctagtctttggctggtatgctcatcagagactggtgatcaggattgctgtggatcatccttccacgttgagtgtgcactcaagcaccgaaaggcaggatgcatagaacttgcacaatctatacagcttgatggtaactactgctgtgctgcatgcggcaaggttattggaatacttgggttctggaagaggcagctagtagttgctaaagatgctcgtagagttgatagtctctgttcccgcatatatctgagccatagacttttggatggcacaacacgttttaaagagttgcatcagatcgtagaggatgcaaaagcaaagttggaaagtgaagttggcccccttgatggtacgtcatccaagatggctcgtggtattgtaggccggctgcctgttgctgctgatgtgcagcaactttgctctttagcaattgaaaaagctgatgagtggcttagttcaaacattcaatctgaaactaaacaaaatgatacacttccttctgcctgcaggtttaaatttgaagatattacagcttcatctttggtgttggttctcaaggaagctgtttcctcgcagtatcatgctatcaaaggctataaactctggtactggaatagcagagaagcgccttacacaggggagcctgctgttttccccaaagaccaaagaaggattctaatatccaatcttcagccctgcacagagtattccttccgtattatttcatttactgaggatggtgaactgggccattctgaatcaaagatctttaccaagagtgtggaaatcattcataagaacacagagcatggagcagaaggttgctcatcttctgccaagagagctggtaagagacaaaatgctaggtcatcaggcttccaggtgcgccagttgggtaatgtcttccgaagagcacagactgagaatggttaccccagtacgttgtgtaaatatgagattgaagattcatgtgatcagagtgagtccgtgataccagataaggaccagtttcgatgtggtgcctcccgcaaactcgatcttaatgagacctcagtcccggacctaaatgcagaggtagtcatgccaacagagtgctgccagaatgagaacggctgtacttctggaaagaatgcattcacaaagtcgaacggttgtggtgactctgagacctgtgcagaggggcatgtaggggatgcaccagccatggaatcccggtcccagagtcgcaagcaggcatcagatttggagcaggagacctgtcttgatgacagcaatttggtggcccgtgcagctaggctcttcgccccgaggttaggacagttagatgacaactacgagtactgcgtgaagattatccgttggttggaatgttcaggcctcattgagaaggatttcaggatgaaatttctaacatggttcagtttgagatcgacagagcaggagcgaagagttgttatcaccttcatccgcaccctaattgatgaacccagtagtctggctgcgcagcttttggattcctttgaagaaattgttaccagtaagaggccaagaacaggtttctgtactaagttgtggcactagccaggtagagaaagcatggaactgatatctaatgatactctagcgttcttacatcagcaagattaactgggatgacagtgtaatagtaattttatttattttctgataaatgtagttaaactgatgttgctgagctttgatatttgccatgatgatatattcttcagggc

SEQ ID NO: 115437 - DNA, 2367 bp, Zea Mays
gctcgatcgagcaaaccgacaaccccctctccgccgccgcgcacctacgctgccctccgtttggtcgtccgcccgcttcgacgggactggtccggccgtcggcgctcggcctgtcgacccaccagcccgctcccgtggcagtggtaacagatgtttgtaatgcttcaagcacacctcaagaaaataggcttgctggtgacagcaacaccatttcagaaaatgcccaggaatcattgagttctttaccagaacaagagtcaaatgatgctagtgttaacacagaaaagcaggaacctggcatttcaaaatgcaaatctgtggacgaaattccaaaaacagtaactgtaaagagatgcaagaacgttgattcaaaaaaagtctcctcaaataacaataataatccaagatttactggcagtccagctctgaaaaagcatcccacaaagggggaccatctttttgaactatgtgaaaatggcatggctcaagacacaaagcctcctagcacaaggatatgcataaattcagcctgcaaagctgtcttcaactcagataacacattttgtaagaggtgttcatgttgtatttgccatggttttgatgataacaaagatcctagtctttggctggtatgctcatcagagactggtgatcaggattgctgtggatcatccttccacgttgagtgtgcactcaagcaccgaaaggcaggatgcatagaacttgcacaatctatacagcttgatggtaactactgctgtgctgcatgcggcaaggttattggaatacttgggttctggaagaggcagctagtagttgctaaagatgctcgtagagttgatagtctctgttcccgcatatatctgagccatagacttttggatggcacaacacgttttaaagagttgcatcagatcgtagaggatgcaaaagcaaagttggaaagtgaagttggcccccttgatggtacgtcatccaagatggctcgtggtattgtaggccggctgcctgttgctgctgatgtgcagcaactttgctctttagcaattgaaaaagctgatgagtggcttagttcaaacattcaatctgaaactaaacaaaatgatacacttccttctgcctgcaggtttaaatttgaagatattacagcttcatctttggtgttggttctcaaggaagctgtttcctcgcagtatcatgctatcaaaggctataaactctggtactggaatagcagagaagcgccttacacaggggagcctgctgttttccccaaagaccaaagaaggattctaatatccaatcttcagccctgcacagagtattccttccgtattatttcatttactgaggatggtgaactgggccattctgaatcaaagatctttaccaagagtgtggaaatcattcataagaacacagagcatggagcagaaggttgctcatcttctgccaagagagctggtaagagacaaaatgctaggtcatcaggcttccaggtgcgccagttgggtaatgtcttccgaagagcacagactgagaatggttaccccagtacgttgtgtaaatatgagattgaagattcatgtgatcagagtgagtccgtgataccagataaggaccagtttcgatgtggtgcctcccgcaaactcgatcttaatgagacctcagtcccggacctaaatgcagaggtagtcatgccaacagagtgctgccagaatgagaacggctgtacttctggaaagaatgcattcacaaagtcgaacggttgtggtgactctgagacctgtgcagaggggcatgtaggggatgcaccagccatggaatcccggtcccagagtcgcaagcaggcatcagatttggagcaggagacctgtcttgatgacagcaatttggtggcccgtgcagctaggctcttcgccccgaggttaggacagttagatgacaactacgagtactgcgtgaagattatccgttggttggaatgttcaggcctcattgagaaggatttcaggatgaaatttctaacatggttcagtttgagatcgacagagcaggagcgaagagttgttatcaccttcatccgcaccctaattgatgaacccagtagtctggctgcgcagcttttggattcctttgaagaaattgttaccagtaagaggccaagaacaggtttctgtactaagttgtggcactagccaggtagagaaagcatggaactgatatctaatgatactctagcgttcttacatcagcaagattaactgggatgacagtgtaatagtaattttatttattttctgataaatgtagttaaactgatgttgctgagctttgatatttgccatgatgatatattcttcaggg

SEQ ID NO: 115438 - DNA, 665 bp, Zea Mays
gagaaatgagatatagaggatgaaatcttttagaggagactgtaaaggacagatatagaggatgaatatagaggacgttgctggagacagcctaacactgaaccgttagatcgtagatccatggtcaacgagacgtccacgccaacactcgatctcggacgcatgcctgagaaccgacggttctacttttatttggcgaaccggtatactctgatcaaatcgtagccgcacaatgtcagatggacgataagtgttcatcgtctattccgatgagcagcagacggtggcgcccgctcgcagcccgcggtagaggactcaccagagttcccagttcgtcacccaatgccccgctatccctggtaacagatgcaacgcaacgtggagaccaaatcgaacaaagactgcgacgtctaaccaatgggagaagatggtagcaggtccgaccatggtgtacggtggaccatcgacggagttcggttgatggcaggggcacgtgtttcccacgcaactactcactatctcaagcacacacacctttggttcaacgttggtgtggctcccacgagcgggcgcatgcccggaacgggacgacgacaaggtcgagccctgctacggccggtcccccatctctctcatctcggcgctctccggtgtttctgctcgcc

SEQ ID NO: 115439 - DNA, 4644 bp, Zea Mays
atgatgcaccaagagcgaaaacagacagcttccatgccactctggactagcgcacgatggtgtgcgcaggctgcctcctatagagctggaggattggagcacaggcggcgacgattccaagtgcttgacaagcattatggttccagcttcaaggagacgacacgggacttcctgttctgcttggctgccctcacgaacactatggagaggcatgccggcgcccaccatggcctgcggacttcttgctcccctttgaggcaggcgactttaatgcgcctcaactctttgcacagtgtgataaagtctccccatttcatatggcaccgcctaataaaacgcagaatctgctcagtagtaaacatggacaagctttctagatattctccgttgacaccattttcttcaaatacttgtctgtagccaccaaggttaatttcttccagccataatccaacatcctgaaagaaaatagttaaactattaggtgaatggtcaaacatcttgaggtgacaatatagccttgaactctttcattggaccttaccaattgtagtcataataaactaaacgtactatgctgatccaaatatgattctaaactataaagcttaacatacggcatgattccagatcagaaactcctgaaattcaaggatgaaattatactaaactgcaaaagatgctgtggtgtaataaacaaataagcaatttgtacttgggcaaaagatgctgtggtgtaataaacaaataagcaaagaagccagagaatttcaacttttcaagcctcagataatttgacttaggaaactgaaaagagagcataggagtgtcttgaaggcatagaagaaagggtcaacacgaaggcagacttctaacagaaaacaacaatgcatttatggtacaactagtttggcatttcgaaataataagtgatacataaagaaaaagacagttacaaagtgatttagtgtgtgtatcttttttttccaaaaacacaggagagttgtgcatcgtttcattaagaaggaaacaacaggggtttacaccccagggcaaacataaaaggacctattacagaaaagacacaaaaactacttgaccagggaaccaccaggccggacagggctaaccaagtctatccaacatccccttaacaagaaccgaaggtccttggctccagccgcacaccacagcgatccttcattggtgatgtttagaagaaccaccagggcctccagactgacgctttcaaacacacaagcattccggtgcatccaaatctcccataccattacaaaaaagagcgttgagtcctttctttagttcctttgatgccatgcatacagcattactccaccatcccttaaaacttcctccctagggttgaggcaaaacggacagtcccaggccatgtaggattagaaaccaaacttgtttggcaaaaacacatgaaactagaagatgttgtatcaactctgcctcctggtcacaaagcgggcaggctgctaggtgcggcagccctctcttcgcaagacgatccacagtccaaactctatttttcagcaccaaccacataaaaaggttgcatttgggggtagcccaggacctccagaccctcttccaaggtgcaaaatgtattgttcccacaaagaaagcattataggcagatttggtagagtaagaaccattctttaggtgttgatcagcagcctcttgctgcaagtgccagttatgcactaagtcccaaagcagaaggtactcacttagaacttggacagtgagtgcacctttgatgtcgacaatccaccccctgttcagcagcgcttgggacatagtccgatgcttgattattctcttggggatggctttgaagaggttgggggccaactcttggattgtatttccctccagccatttgtctacccaaaacaagagtttgcccatcccccattattgtttggactgccatattagagagctcgggcattatttggcacatggatgggtaatcctttccaaggtctgcaagaatctgttttttccagccaaatccaccagacatgaagggcccaactcattacctctaaattcagaacacccagcccaccatattggagaggtcgttgtattgaatccgaagatatcatacagtttcctccattagctttatcttttccgacccaaagaaagcctctgcgcttcttgtcaattgccttgaacacccatttaggtagatcaagggcagtcatgtgataaatatttagggcggacaggacagcctttacagtgaccagtcaggcagccttgtttatgagtgctcccttccattttgggaggttgtctgccaccttgtcaacaatcttgtgaagttcagctcttgagagtttatgaacgctcaagggtaggcccaaataggaacatggaaattccttgatgtcacaagccaggatgttagtaattagggaccaatcttcatcatgtgggtttctgaagaagtaaattataaataaaactattgctgtggcaagaaatgagagaaaacaaaacatatatgttgtaacaatacaatccctaacaatcacctcaaccttggtctactttaacctggatcccagtccatggtcagtctaatataacacagcccaagcaccacctgagcttctaggtccaacctaactttagcctgaacaaggaccaatcacagcccaaaccactttccgtttgaggatggagtatagtcttgctcagaaaatgtctacgagtattagctggtcaatcaaagtaccaaactaatgatgttaatttaataatctgacatgacataataatgaagcccaatttggacttaagttcggacgaataatatatataatagataaagaagtagaaccaaatatctttgagaagtggagcttcattctgtagaatattaatatcttatctaaagtttgattgtctgtcacatcgtcaaataaaataaaacaaacaaaagtttgactgactaagcaataataatctgcccattcaacaccaaacactccagattggactatgatttggtcttatgaagctagagcaggttgggtgttgagcttgggattgatggacttgagtcatcctttggccagggcaggccttgactgggccaagatctgcaaagcctatgttgggtaggacgtgggacaatattttagtaaacgttaaactgagcttagttgtaaggttgaacattcataatctaagtcaaacactcaaaactgctcatttataattctatagatgaaatatatttttttaaattcaggataaggataagcaccccattggcttataagattcaattaaggatatacagtacggtcactattcaccctaaatgaaggacaatcgtgtcatttggcccctgaaaggttggactgttaaaacccatttaaacagtctaaacgatccaagcagcataaaaagatagagttcatgattaaatggactaaatgactatttaactcactgtttagtcaataaaaggattacgaccaccacatcggtacccaactaatcaatgttttaaatatataaggtggagtcagatttagtttcttcctaaaaaaatatttgctagcatagatatttttatatagacaaatgtgtatactttcttgtatattaaaattttgcatacatatatatatgtacattttagtggtactatacaaaaccgtttagaccatttaactccatttaaacaccgactaactaaacagcataaacagtaaactactatttacggtttagcatttaggataacactgagtatgatagcctctctagtgtgcaagttccaaagccatcaaatgaaagaatccagggacaataaaaggtgcaaaaaaaagatctaataaataacatgtaggaaaagacaaacaaactgaaacctcaatgctcagtggtcactagaactgacagtacattaaaatgaaagggacaacaacatataaaatattaagttcctaagaaatcacactactgatttcccaaatgcctaacaaagtgatagcttaaaagctagccttataaccaacaatatcaccaaacccactccaaaatggttgaaactcactgggtaaacattaagaactatgttacactatagtggattccttccccatggagcctgacaacaactcaaggatggtcagaatgaaaacactgtctcaccgatttcccaatctcctagctaattctcccaaactaaagcctatgcacaagaataagaccactagtttccgcaacaataacatttgcagcagcacggcaaaagagggggacacagatgagcaacctcgacagtccatatgaagaaatcgagcggttccggcgaccgcccacggcccatctccttccttccaggagcggacttcgcttgggtcatgggggttcagtggaaccaaacccaaatttgtggagggcaaaccgcacccgcgatccaatcaggcaccacgaagtgctacaatcagtgtcaaccagtggcgaactcgcgagctggagaagagaccctaatcgagccatgaatggacagatcaggttagcagcacacatacccagagctaagaccgaatggacagggagaagaatctgggttttgtt

SEQ ID NO: 115440 - DNA, 420 bp, Zea Mays
atgatgcaccaagagcgaaaacagacagcttccatgccactctggactagcgcacgatggtgtgcgcaggctgcctcctatagagctggaggattggagcacaggcggcgacgattccaagtgcttgacaagcattatggttccagcttcaaggagacgacacgggacttcctgttctgcttggctgccctcacgaacactatggagaggcatgccggcgcccaccatggcctgcggacttcttgctcccctttgaggcaggcgactttaatgcgcctcaactctttgcacagtgtgataaagtctccccatttcatatggcaccgcctaataaaacgcagaatctgctcagtagtaaacatggacaagctttctagatattctccgttgacaccattttcttcaaatacttgtctgtag

SEQ ID NO: 115441 - DNA, 102 bp, Zea Mays
gttttgatttttttcagacttcttttctattgacactcctctcgttgcatttaacttccttgcagccaggatttgcacggcaaaatcgacccatcaaagatt

SEQ ID NO: 115442 - DNA, 342 bp, Zea Mays
atggctgagcacttcccctctccgcggcgccttctccctcctctctccctctctagcgtagggaagcttctatttttttctttcctccatggcgctcctgctcgggtcgtgcatccgccgtctctgctgcgcgcggcactcgggcctgctttgtcctctgccgtgctgtgccgccgccttagagctcaccctggcgctcgctggtgcccctgctgcgcgacgtcggccaggagcgccgtcgctggcttctctgttcgggagcaggccatgtacatgagtttgaggaagaagatgatccatgtgtctatggcaggtgggcctaggtcagatgcatgtgtctag

SEQ ID NO: 115443 - DNA, 1023 bp, Zea Mays
ccctcactagctagaggctagagctgtgtcctgactgcagctcagctcaccaccaccaaccaaccacaccttcttcccatataaccatccatcgatcagcagcagcaactcaaggccggccgctggggagtctggaacatacctctagcagcctcgcctctgtagctaggcattgtagtagaggggggaaagaagaagactagaagaaaagggccatggcgacctccttccagggaaccaccaccaagtgcaccgcctgcgacaagacggtgtacctcgtcgacaagctcaccgccgacaaccgcgtctaccacaaggcctgcttccgctgccaccactgcaagggcacactcaagctcgccaactacaactccttcgacggagtgctctactgcaggcctcacttcgaccagctcttcaagaggaccgggagcttggacaagagcttccaaggaaccccaaaggttgtcaagccagaaagaaacgttgggaatgagaatgctactaaagtctcgagcgccttcgctggcaccagggagaagtgtgtcggatgcagcaagacagtctatccaattgagagggttactgtgaacaacaccatgtaccacaagtgctgcttcaagtgctgccatggaggatgcaccatcagcccttctaactacatcgcgcacgaggggaagctctactgcaagcaccaccacgtccagctgatcaaggagaaagggaacttcagccagctcgagaatgaccacgagaagacatcgcaggctgggtcgctggaggacgacgaagaagaagagtattaattaatcgctgagcaaaaatacataccaccagaagaataattaatcttccttcttgcactatatatttctgtgccatttcagtcttaccaatggagatcatatgtgcgttcagagaacaatgatatcgttttcttgtatctgcatgtaaaccacgtctactacctgatttcaccatttgcattgatcaggtggtaatctagaccctgtttggaacttt

SEQ ID NO: 115444 - DNA, 1511 bp, Zea Mays
agcaaagcacactgagaaatcttgttggagcgcagttaatgcatgcacacgtacgcacgcaggaagcttgttgctgactacatatatgtttcatgttttttttaccactcttctgaaggcccaaattaactagtgcgtggtctggtctccatctcgatcagagagctccgtccgtcactttcccctcgttccattcatggagaatatgctccacctagccccgtcgtcccaggcccaggcattggccttggaccgctcctccgtcttctcgcgtgagcacgtgccgccggccgtctccgctgtcacctccctgccagttatcgacatgtctcgcagccgcgacgaggtccgccgcgctatcctcgacgccggcatggagttcggcttcttcctggtggtggagcacggcatcccagaggaggtgatgcgcgacatgctggaggtgtgcgaggagttcttccagctgccggcggcgagcaaggcgtacatgtactcggaggacagtcagagacccaaccggatcttctccggcacaacctacgacacgggcggcgacaagtactggcgggactgcctccgcctcgcctgcccctcgtccttcccggtcggcagcggcacaagggacgactggccgcacacgccccagcggctgaggggtgtcgtggagcgtttcaccgctctgacgagagggctgggggtggagctgctgcggctgctgtccgaggccatggggatccggcccgactacttcgagggcgacatcagcgccggcgacgtggtcctcaacgtcaaccactaccctccgtgccccagcccggagaagacgctcggcctgccgccacattgcgaccgcaacctcatcaccctcctcctccaaggctccgtctatggcctcgacgtcgcctacaggggagagtggataaaggtcgagcccatgcccggtgccttggtcgtcaacttcggccagcaactcgaggtggtgaccaacggattgctgaagagcgttgagcaccgcgtggtgaccagctcgacgctggcgcggacggcggtggccacattcatcatgcccaccccagactgcctcatcggcccgtcaaaggagttcctcgccggggacaagccaccgtgctaccgcaccatcaggttcggtgacttcatgcgcatgtacaacactgtcaagctggggtcatccatcaaccagactacagatcttaagaatatccagaagaagatatgagcatatttatttaccagagagatcgtccggccagcaggggtcctccaagattttattcctttaataaaacgtacgacgagcatatttatgtcaagcaataaaacgtacgacggacaacttttaaaaatattattattaatcggaggcagcatggacgccattcctttatgagatatgctaaaaaaacaaatgtgctgaaatatctcaaagatgagagacatgcatgtggcgatatatgctgtggtataatctaatcattattgtcgttagtatc

SEQ ID NO: 115445 - DNA, 1598 bp, Zea Mays
agcaaagcacactgagaaatcttgttggagcgcagttaatgcatgcacacgtacgcacgcaggaagcttgttgctgactacatatatgtttcatgttttttttaccactcttctgaaggcccaaattaactagtgcgtggtctggtctccatctcgatcagagagctccgtccgtcactttcccctcgttccattcatggagaatatgctccacctagccccgtcgtcccaggcccaggcattggccttggaccgctcctccgtcttctcgcgtgagcacgtgccgccggccgtctccgctgtcacctccctgccagttatcgacatgtctcgcagccgcgacgaggtccgccgcgctatcctcgacgccggcatggagttcggcttcttcctggtgagatgcaaatgcaatgcaactattctcggcactggctaactatattgttttaacacgtactatacgtactgtgcactgcaacgcaaaaggtggtggagcacggcatcccagaggaggtgatgcgcgacatgctggaggtgtgcgaggagttcttccagctgccggcggcgagcaaggcgtacatgtactcggaggacagtcagagacccaaccggatcttctccggcacaacctacgacacgggcggcgacaagtactggcgggactgcctccgcctcgcctgcccctcgtccttcccggtcggcagcggcacaagggacgactggccgcacacgccccagcggctgaggggtgtcgtggagcgtttcaccgctctgacgagagggctgggggtggagctgctgcggctgctgtccgaggccatggggatccggcccgactacttcgagggcgacatcagcgccggcgacgtggtcctcaacgtcaaccactaccctccgtgccccagcccggagaagacgctcggcctgccgccacattgcgaccgcaacctcatcaccctcctcctccaaggctccgtctatggcctcgacgtcgcctacaggggagagtggataaaggtcgagcccatgcccggtgccttggtcgtcaacttcggccagcaactcgaggtggtgaccaacggattgctgaagagcgttgagcaccgcgtggtgaccagctcgacgctggcgcggacggcggtggccacattcatcatgcccaccccagactgcctcatcggcccgtcaaaggagttcctcgccggggacaagccaccgtgctaccgcaccatcaggttcggtgacttcatgcgcatgtacaacactgtcaagctggggtcatccatcaaccagactacagatcttaagaatatccagaagaagatatgagcatatttatttaccagagagatcgtccggccagcaggggtcctccaagattttattcctttaataaaacgtacgacgagcatatttatgtcaagcaataaaacgtacgacggacaacttttaaaaatattattattaatcggaggcagcatggacgccattcctttatgagatatgctaaaaaaacaaatgtgctgaaatatctcaaagatgagagacatgcatgtggcgatatatgctgtggtataatctaatcattattgtcgtta

SEQ ID NO: 115446 - DNA, 1316 bp, Zea Mays
atgatgaaaatgatttctagtggcggtgccccgtcgtcccaggcccaggcattggccttggaccgctcctccgtcttctcgcgtgagcacgtgccgccggccgtctccgctgtcacctccctgccagttatcgacatgtctcgcagccgcgacgaggtccgccgcgctatcctcgacgccggcatggagttcggcttcttcctggtggtggagcacggcatcccagaggaggtgatgcgcgacatgctggaggtgtgcgaggagttcttccagctgccggcggcgagcaaggcgtacatgtactcggaggacagtcagagacccaaccggatcttctccggcacaacctacgacacgggcggcgacaagtactggcgggactgcctccgcctcgcctgcccctcgtccttcccggtcggcagcggcacaagggacgactggccgcacacgccccagcggctgaggggtgtcgtggagcgtttcaccgctctgacgagagggctgggggtggagctgctgcggctgctgtccgaggccatggggatccggcccgactacttcgagggcgacatcagcgccggcgacgtggtcctcaacgtcaaccactaccctccgtgccccagcccggagaagacgctcggcctgccgccacattgcgaccgcaacctcatcaccctcctcctccaaggctccgtctatggcctcgacgtcgcctacaggggagagtggataaaggtcgagcccatgcccggtgccttggtcgtcaacttcggccagcaactcgaggtggtgaccaacggattgctgaagagcgttgagcaccgcgtggtgaccagctcgacgctggcgcggacggcggtggccacattcatcatgcccaccccagactgcctcatcggcccgtcaaaggagttcctcgccggggacaagccaccgtgctaccgcaccatcaggttcggtgacttcatgcgcatgtacaacactgtcaagctggggtcatccatcaaccagactacagatcttaagaatatccagaagaagatatgagcatatttatttaccagagagatcgtccggccagcaggggtcctccaagattttattcctttaataaaacgtacgacgagcatatttatgtcaagcaataaaacgtacgacggacaacttttaaaaatattattattaatcggaggcagcatggacgccattcctttatgagatatgctaaaaaaacaaatgtgctgaaatatctcaaagatgagagacatgcatgtggcgatatatgctgtggtataatctaatcattattgtcgtta

SEQ ID NO: 115447 - DNA, 1536 bp, Zea Mays
gtcccgccacccgaattctgggacaccgtaggggtctgctgagcttcttccgcaggagtcggagaccgacgacggcgacactctgcatctcatctcaccgtaacagcagactgaaaaacaataatttggtccaaggcacaatctcagccccaatagcacctcgccagcttgcctcacgcacacgcttgcacaacaccgcccaagctcggacgtgtcttctggtcggtcggcagatgccacacccagaactcgtccttggtgccggcgctggggtgcttcctagggctcgccttgggcgacatggacctgcgccggtggccgaggacgtccttccttggggcccgctccttcttctcctccacgacggccgctacgaataacacgacggggccggcgtggcccaggggtgccacaggcacgtcgtcgtcaaggtcgagcaggggctccagcgcctggacgacggtggacatgtccagccggttcttggggctgccgctgaggcaccggtacgcgaccagcgctgcgctctgggccgcccgcgccgagtactggcccttaacgcgagcagaatccggggcggggccagatccgtggatggcaagggagatgcggggcgaggaggtctgccccaaatatttggatggaaacttctcccccatatagaggacgagtgcggtgggggcgaggtccgcgggtggaggacctttccatggagaccgagcggggagcgtggacgcggacgcggatccgaggtggaggatggctgggacgcggatctggggcgaaggtggaggacccttccatggagaccgagcagggtttagggatgacgtgagcatcacggacgccttccatggagagtgtggatgtggacgcggatccggggcggaagatggcagggacgcggatttggggcgaacgcccttgccgagggcgtgggggaccgcggcgtgcgttacggggactgggcgggcatcgcgaggacgggtgcgggagcggagccacgaagcgcgattgcggcggcggaagtaagaggcgatggggcactccaacgtgtggaactcgcaccccaagaactacgggcccggatcccgcgtctgccgggtctgtgcgaaccctcatggactgatcaggaagtacgggctgatgtgctgcaggcagtgcttccgcagcaacgccaaggacattggcttcatcaagtaccgctgaagtcagctgggcgggctatctgaatgccatctcttggacagtgtagtagaggcgatgccacaattttaattactgtcatttagatgttcccttcagaactctgctatttaagtccgccatgtttgtgatggagaactgaagctttgtttgttatactgattatgagttacctgtgctttgcctaagctttcttgtcttctactctcatatttggatggctaaggtgtcataatagttgtacgtggattagatgccttcattttagaaggctgcagtcattgttcgtattaactcgcagcaatagtataattcggacggattagactg

SEQ ID NO: 115448 - DNA, 88 bp, Zea Mays
ggatctgattccgttgatgttgacattcaccagttaatgggagtccttagtgcacaacctgctgtgcatctgacatggacatctgacc

SEQ ID NO: 115449 - DNA, 487 bp, Zea Mays
ggaaattaccggatttgtgtctcggaatttttcggaattgtgtctcggaatttttcggaattatgtcccggaattttttggaattttccagcatgtgattttttgcatcgcctatatgtctctagataaggattacttatttttgtatttttggacacctttagattttttttggatagatggtgttggaagacagttgagattaaggatttggtattttccacacactaggttttagggttttcctgtgaggttgtgaaaaactctttatgtgaggaaaaaatatttcataagtaagcatgccatgtcagctagatcgagtggatattgtgaattatgaactttgagtctatgaacttgtgatctttatgaacttgttatactgtgaacttgttatctttgtacactttttatattataaatttgtgatccttgtgaactttttatattgtgaacttgttatatcatgaattgtgaacttgtggtc

SEQ ID NO: 115450 - DNA, 149 bp, Zea Mays
gatctagttcccgccatcacaagcgggcttttatattggccaacttgtgatctcattactttcaagtttgttccagttcatttacagccgctagtgagcaattcattctcattcctttggaccatctacataacatatatggccagctt

SEQ ID NO: 115451 - DNA, 835 bp, Zea Mays
ggctatcagctatttcaccacttctgtagtcagtgttcctatgtttgttagcactatcatatttatcttgataatttaatacttggtgtcccctggatgggattttcactgctatttatactggctattacagttagatgttgcttctaacacgctttcatttgcttttgctatttcattgtcagatgctcacgcttgatcctgaggattcacttgattttcttaggacggcacgtatggctacttatgtgtttctgatctctggacctaccctccatctttggttcaattttatctcaaaattgttccccaaaaaggatgtagtgaacacattgaagaagatggctctagggcaagcagtctatggaccaattatgaagtcagttttcttctcgtataatgcaggattacaaggtactattgcttacatgcctccatatagacatgcttgagaattgagatacatggaaataattttctggtctagttcttattgagttgcacaaaaatcatctgttgaatttcagtactctgttcatttttctagtgtagcttgactctgcaaaatcatcctttgaccgcaagttacttctacaatagtttattagtagttaaaaatcataattattgacaggtgcttttgaattctaatccgatgttatcaattttgtggcacatgacttatatattgttagattttggtctatgcatgaatttggacagtcagaccatgccttacaaaaatgattgtgtcagtacttatttgttgcgcatgcttctgttaccttattttgacattgtcctattaactctacctattctgtttcctatgctg

SEQ ID NO: 115452 - DNA, 114 bp, Zea Mays
cggcggcggtgctctctgatcaggcgcggacggtccgcggcctggggccggacggtccgcgacctggcgcaggggctagggtttcctgcctaacggccggacggtccgcgcgtg

SEQ ID NO: 115453 - DNA, 1835 bp, Zea Mays
gagcctggcctaaaagcgacgggaaagcctatcagccagtgaagcccactacggtccgaccgatgtctcgctgacgtcacctcgtgttcaccagttaccaccggagtccggagtgaagcgcaggtcgggttcgcttttttcctcggcttcttctctctcgtccatcaacccagggggaaggagcgggagggagcgagccatggtagtcagcacgttcaatggacccgggattgggatcgggttcggtgtcggctgcgggttcggcgtcgggtgggggttcggaggaatgcctcttaacatgttcggcttgggtatcggtgggggttgtggatttggtcttggactaggatggggctttggaaatgcttttggttgtcagtatcgatcttcaagagttcagttccaaggcattgaatttcagaagaaggcggaaggagatgatgcaccaaaagttgtttcaccggagcttgctcaaaagtctcgtccttatggctagtatgcctgctaccataaaaattcagagactgttttgtgtgatgaatcacagtttaattacatacctacgtgttccttgttagtaatgttatgctacacttattttcgtttctgttgtaaccaggatgaagttaatcgatgggattttcaattaggaagaaatgacactaatgtttgccctacatgctatccatttacttttcatggctgaaggatcttcgctatgatttgtcgctgtgctttatgctgtacagctaccatatcgtgacttggtctgaaatttgaattggcagaaaaatattgaaaataaatttgctgaaaccatcagtattatgatctttcatgtttgcctctcctttaacagtatgagaaccaaagctttgattggtttcttttcttaggacaagcttaaaaataaaataaaataactgctgctctaaaggtacagtttaggacaggtctttcaagttgaaccaacagaaggttaagaaaaaaatacaaaagaaaggcggacattgtttccgatctgtaggtggttgctgcgactgcaccctgggaatcagaacaactgtgcaaagcctctcatatatcaagcaaatggatggtcaaaggaagtagaatcattctttgatgtaatagagcttgctggctctgcctccccagtcctgaaccagtatgactgctggaatgaagctgcgctgctggggacatcctccatgacccattcaaagcccttggggtagtagatccctgtccttgggtgtggtacccacaatgatgtttgtggagacctcgcttctgtaggctccagtcgcttcacaaggttcagagtggatcaaagttaccggagcagagctgccgatttcgcaagcgcatggcgacccatgaatgcaggctggggtgtttatcaggatgcactggtggttatccttggtagcaaccagctgatgccagttcctccttgtttggtacctccctcatcctcaaaccagcttctgattgggcaactaaaatgatggttttgagcctctgattggactcctctggacaaaacaccgccggaactgattctcccaaaatctgaagacaattttgccgaggagtgcagtcttggattgcaatgttttgctactttgtggaatcatgcgactcaccaccaatgctgtagctagcattattagtaaagtggaaccttggccttttgaacaaaagatggaagcaggacacaatcattagaaaactgcacagtaatacacaaattccactatgaagggttgatagctgcaaattgttttgttataaactcattcctcacgcatatttcaagatacatatatctc

SEQ ID NO: 115454 - DNA, 1883 bp, Zea Mays
gagcctggcctaaaagcgacgggaaagcctatcagccagtgaagcccactacggtccgaccgatgtctcgctgacgtcacctcgtgttcaccagttaccaccggagtccggagtgaagcgcaggtcgggttcgcttttttcctcggcttcttctctctcgtccatcaacccagggggaaggagcgggagggagcgagccatggtagtcagcacgttcaatggacccgggattgggatcggtgagcgaaccaaagttctcctttcaggcgccaagatcagatcttgatggttcggtgtcggctgcgggttcggcgtcgggtgggggttcggaggaatgcctcttaacatgttcggcttgggtatcggtgggggttgtggatttggtcttggactaggatggggctttggaaatgcttttggttgtcagtatcgatcttcaagagttcagttccaaggcattgaatttcagaagaaggcggaaggagatgatgcaccaaaagttgtttcaccggagcttgctcaaaagtctcgtccttatggctagtatgcctgctaccataaaaattcagagactgttttgtgtgatgaatcacagtttaattacatacctacgtgttccttgttagtaatgttatgctacacttattttcgtttctgttgtaaccaggatgaagttaatcgatgggattttcaattaggaagaaatgacactaatgtttgccctacatgctatccatttacttttcatggctgaaggatcttcgctatgatttgtcgctgtgctttatgctgtacagctaccatatcgtgacttggtctgaaatttgaattggcagaaaaatattgaaaataaatttgctgaaaccatcagtattatgatctttcatgtttgcctctcctttaacagtatgagaaccaaagctttgattggtttcttttcttaggacaagcttaaaaataaaataaaataactgctgctctaaaggtacagtttaggacaggtctttcaagttgaaccaacagaaggttaagaaaaaaatacaaaagaaaggcggacattgtttccgatctgtaggtggttgctgcgactgcaccctgggaatcagaacaactgtgcaaagcctctcatatatcaagcaaatggatggtcaaaggaagtagaatcattctttgatgtaatagagcttgctggctctgcctccccagtcctgaaccagtatgactgctggaatgaagctgcgctgctggggacatcctccatgacccattcaaagcccttggggtagtagatccctgtccttgggtgtggtacccacaatgatgtttgtggagacctcgcttctgtaggctccagtcgcttcacaaggttcagagtggatcaaagttaccggagcagagctgccgatttcgcaagcgcatggcgacccatgaatgcaggctggggtgtttatcaggatgcactggtggttatccttggtagcaaccagctgatgccagttcctccttgtttggtacctccctcatcctcaaaccagcttctgattgggcaactaaaatgatggttttgagcctctgattggactcctctggacaaaacaccgccggaactgattctcccaaaatctgaagacaattttgccgaggagtgcagtcttggattgcaatgttttgctactttgtggaatcatgcgactcaccaccaatgctgtagctagcattattagtaaagtggaaccttggccttttgaacaaaagatggaagcaggacacaatcattagaaaactgcacagtaatacacaaattccactatgaagggttgatagctgcaaattgttttgttataaactcattcctcacgcatatttcaagatacatatatctc

SEQ ID NO: 115455 - DNA, 1962 bp, Zea Mays
gagcctggcctaaaagcgacgggaaagcctatcagccagtgaagcccactacggtccgaccgatgtctcgctgacgtcacctcgtgttcaccagttaccaccggagtccggagtgaagcgcaggtcgggttcgcttttttcctcggcttcttctctctcgtccatcaacccagggggaaggagcgggagggagcgagccatggtagtcagcacgttcaatggacccgggattgggatcggtgagcgaaccaaagttctcctttcaggcgccaagatcagatcttgatgttgctctctctgatttttcgctccttatttggtttgttgaattcttctctttctgtttgatgcggtattgcggtgcagggttcggtgtcggctgcgggttcggcgtcgggtgggggttcggaggaatgcctcttaacatgttcggcttgggtatcggtgggggttgtggatttggtcttggactaggatggggctttggaaatgcttttggttgtcagtatcgatcttcaagagttcagttccaaggcattgaatttcagaagaaggcggaaggagatgatgcaccaaaagttgtttcaccggagcttgctcaaaagtctcgtccttatggctagtatgcctgctaccataaaaattcagagactgttttgtgtgatgaatcacagtttaattacatacctacgtgttccttgttagtaatgttatgctacacttattttcgtttctgttgtaaccaggatgaagttaatcgatgggattttcaattaggaagaaatgacactaatgtttgccctacatgctatccatttacttttcatggctgaaggatcttcgctatgatttgtcgctgtgctttatgctgtacagctaccatatcgtgacttggtctgaaatttgaattggcagaaaaatattgaaaataaatttgctgaaaccatcagtattatgatctttcatgtttgcctctcctttaacagtatgagaaccaaagctttgattggtttcttttcttaggacaagcttaaaaataaaataaaataactgctgctctaaaggtacagtttaggacaggtctttcaagttgaaccaacagaaggttaagaaaaaaatacaaaagaaaggcggacattgtttccgatctgtaggtggttgctgcgactgcaccctgggaatcagaacaactgtgcaaagcctctcatatatcaagcaaatggatggtcaaaggaagtagaatcattctttgatgtaatagagcttgctggctctgcctccccagtcctgaaccagtatgactgctggaatgaagctgcgctgctggggacatcctccatgacccattcaaagcccttggggtagtagatccctgtccttgggtgtggtacccacaatgatgtttgtggagacctcgcttctgtaggctccagtcgcttcacaaggttcagagtggatcaaagttaccggagcagagctgccgatttcgcaagcgcatggcgacccatgaatgcaggctggggtgtttatcaggatgcactggtggttatccttggtagcaaccagctgatgccagttcctccttgtttggtacctccctcatcctcaaaccagcttctgattgggcaactaaaatgatggttttgagcctctgattggactcctctggacaaaacaccgccggaactgattctcccaaaatctgaagacaattttgccgaggagtgcagtcttggattgcaatgttttgctactttgtggaatcatgcgactcaccaccaatgctgtagctagcattattagtaaagtggaaccttggccttttgaacaaaagatggaagcaggacacaatcattagaaaactgcacagtaatacacaaattccactatgaagggttgatagctgcaaattgttttgttataaactcattcctcacgcatatttcaagatacatatatctc

SEQ ID NO: 115456 - DNA, 2212 bp, Zea Mays
gaaggcagtctgcagaggggaaggtagccaaagtcagactctgttcatccaaccccaaaaaaacctacctacacaaaccaaagtcaacgccgaaaaccaagaacaggggaatcctttctctttctccctctagaattcctctcttgcctcctgcgaccatgtccgcgcgcccgccgccgccgccgcgcccgcgtctggcgctgccaccgcgctcaacggcggagtcgctctttacgggcgccggcgacgccagccccggcccgctcacgctcgcctcagcgctcttcccatctgatgccgacggcggcggtggccccggaggcgcctcctcctccgcggccggggccgcaaccttcacgcagctccttactggctccctcgcgccgcctccgcagcagcagcagcatgaagcgcagacgggaggaggaggggtcgcgagggccggcccggcgctctcggtggcgccgccggcgtcctcgttcgctggcgcgtccctgttcacggtgccccccggcctcagcccctccggtttgctcgactcccctgggctgctcttctcgccggccatgggggggtttggaatgtcgcaccagcaggctctggctcaagttacagcccaagcaacccattctccactcagaatgtttgatcaccttgaacagccatctttctccacagctgcaacaacttctggagctctacaccatatgaattctgcagccagtatggcaggaatttcagatatgacaatggcaacagcaaacaatgagaatccatcctttcagtctgctgaggcatcccaaaggtatcaagttaatgcccctgttgataagccagctgatgatggctataactggcggaaatatggtcagaaggtggtaaagggcagtgattgtccaaggagctattacaaatgcacccatcccaattgtcctgtcaagaaaaaggtagagcatgcagaagatggtcagatatctgagatcatatacaaaggcaaacacaatcaccaacgtccaccaaataagcgggcaaaagacggcaactcttcagcatttgatcaaaatgaacaatctaatgataccacatctggcttgtcaggtgccaagagagatcaggacaatatatacgggatgtctgagcaagcatatggtttaagtgatggagatgatatggatgatggtgaatcaaggccacacgaagtggatgacgctgataatgagagtaaaagaaggaatatacaaatttcttcacaaaggaccttgtcagagtctaagatcattgtgcaaacaactagtgaggttgatcttttggatgatggttatagatggcgcaagtatgggcagaaggtagtcaaagggaattctcatccaaggagttactacaaatgcacatttgctggatgcaatgtccggaagcacattgagagggcttcgtcagaccccagggctgtcataacaacctatgaaggaaaacatgaccatgaaccgccggttggtcggggcaacaaccagaatgcaggaataccacaacagaaagaagggcagaacaatatatcaagtaatcaagcttcacttttcgaggccagattttagcaacgctaaccagatgccaattggaatcttacaattcaagagcgagcaatagtgacatccatttttgactctgctgggaaccttgctgctcgctgttgtttggatgacgttcttttggtaaataccggatgcctgcaattcgtacagtcatatggcatcaaagtttcttaaaagcctgataatcaaatggtatcagtttgcagtttttcccccatagttacacatgatagcgggtacggcaccatccatttctagtatgtacatgttattaagtcgaagcatgcagaatgtgatatcagctagatggaagttgtttatttatatgtgcttatgatgttctatagatggatcagtggtatagtacatgttcatcttctgattttattcctgacatccaacaagatcttgtatgtgtattgtaataagattgaaaagagaaatttgaatgtacagatgtttttcagttacattttgcttcctgtaatttgtaacttcaaagatgttctagttttctatgtccttttcctttcctcccaaatttggtttgctcttagtcttctgtgatcactattatcaacaatacgttgaaggtactacaataaagcaccattttgcatctg

SEQ ID NO: 115457 - DNA, 1541 bp, Zea Mays
atggaccacagtgtgtactactgccttgtagctcttcttccacttgtttacttccttctcaagtcgtcgtggaagaaagctcccttcggatctggtagccgccatggactaaagctccctccaggcccatggcagctccctgtcatcggcagcatccaccatctccgcggctccctcgtgcaccacgctctgagggacctatcgctccgccatgggcctctcatgttcctcaagctgggcgaggtcccagtggtcgtagcatccacgccggaggctgcgaaagaggtgatgaagacccacgacgccatcttctcgaccaggccactgagctcaaccattaggacggtctccaaggatggcctgggcatcgtctgggctccgtacggcgaccactggcggcagctccgcaagatctgcaccatgcagctgctcggcgcgcggcgcgtccagtccctgcggcccgcgcgcgaggaggaggcgttccggctggtccgagccgtcatgtcctcgtccaccgcggcaggaggagctgcgccgccgccgctcgtggacctcggcaagctggccgccgtgtacgtcgccgaggcgtcgttgcgcgccatcttgggcagacggttcaaggtcgaggaccgggacacgctgctgcgctacgtggatgacggcgtccggctggccggcgggttcacgcccagagacctgttcccgtcgtcgtggctcgtccgcgccctgacccaccgggccgatctgatcggagggggtatcgagacagcaacaacaacgctgcagtgggcgatggctgagctgatgaggaatccaggcatcatggccaaggcacaggccgaggtcaggggattgttcatgggccaaaccaaggtaaccgaagaccggctaggtgagctaccctacctgcagctggtcatcaaggagacgctgaggctgcatgtcccggggccgctgctgatcccaagggagtgccaggagcagtgccggatactgggctacgacgtgcccaggggagccatggtgctcgtgaacgcctgggccatcgctcggagcccggatcactgggaggagccagacgcgttcgtccctgagaggttcgtcggtgacgcgagggatttcaagggcaacgacttggagttcatcccgtttggcgccgggaggaggatctgccctgggatgtcgttcgggctggccagtggccaacgtcgagctcggtctcgccagcttgctcttctacttcgactggagtctcccggcgggcgtccttcctgctgagatggacatggccgagaccatggggatcactgctaggaggaaagcagacctcttcttgtctgctactctgcgtgtcaaactgccttaattttcatctgatctgatggtactctatgcctatgagatatgcagtgactgttacgggacgggctatctgtgctgcagcgtgtggagcagagtatttccagtttttctcccttagaccgtcttccacagttcaccgcctaaaacactattttacgttgtatatcccaattttcgtg

SEQ ID NO: 115458 - DNA, 1851 bp, Zea Mays
tgtaacttgtcagctcctctgcatgtgtacttccgaggccaatatggaggcacactatactatagtagccaaagcatcaacttcggcaatcatggaccacagtgtgtactactgccttgtagctcttcttccacttgtttacttccttctcaagtcgtcgtggaagaaagctcccttcggatctggtagccgccatggactaaagctccctccaggcccatggcagctccctgtcatcggcagcatccaccatctccgcggctccctcgtgcaccacgctctgagggacctatcgctccgccatgggcctctcatgttcctcaagctgggcgaggtcccagtggtcgtagcatccacgccggaggctgcgaaagaggtgatgaagacccacgacgccatcttctcgaccaggccactgagctcaaccattaggacggtctccaaggatggcctgggcatcgtctgggctccgtacggcgaccactggcggcagctccgcaagatctgcaccatgcagctgctcggcgcgcggcgcgtccagtccctgcggcccgcgcgcgaggaggaggcgttccggctggtccgagccgtcatgtcctcgtccaccgcggcaggaggagctgcgccgccgccgctcgtggacctcggcaagctggccgccgtgtacgtcgccgaggcgtcgttgcgcgccatcttgggcagacggttcaaggtcgaggaccgggacacgctgctgcgctacgtggatgacggcgtccggctggccggcgggttcacgcccagagacctgttcccgtcgtcgtggctcgtccgcgccctgacccaccgggccgtgcgcgaggtggatgcctaccgagactccttgttcgccttcatggatgtagtggtaggtgagcgcttggatcgacgagaaggtcaactgaagaagaggaggaggagggagaggatctgattgacgttctcctccggagccacaaggaaggaaacctcccgttccctctcaccatgaggacaatcgaagcggtcatatttgtcagtgtccttgtttatttgctaattaatgtcaactgatctgaggttccctaactgaattgtgcgtgtgtatatgaacaggatctgatcggagggggtatcgagacagcaacaacaacgctgcagtgggcgatggctgagctgatgaggaatccaggcatcatggccaaggcacaggccgaggtcaggggattgttcatgggccaaaccaaggtaaccgaagaccggctaggtgagctaccctacctgcagctggtcatcaaggagacgctgaggctgcatgtcccggggccgctgctgatcccaagggagtgccaggagcagtgccggatactgggctacgacgtgcccaggggagccatggtgctcgtgaacgcctgggccatcgctcggagcccggatcactgggaggagccagacgcgttcgtccctgagaggttcgtcggtgacgcgagggatttcaagggcaacgacttggagttcatcccgtttggcgccgggaggaggatctgccctgggatgtcgttcgggctggccagtggccaacgtcgagctcggtctcgccagcttgctcttctacttcgactggagtctcccggcgggcgtccttcctgctgagatggacatggccgagaccatggggatcactgctaggaggaaagcagacctcttcttgtctgctactctgcgtgtcaaactgccttaattttcatctgatctgatggtactctatgcctatgagatatgcagtgactgttacgggacgggctatctgtgctgcagcgtgtggagcagagtatttccagtttttctccctta

SEQ ID NO: 115459 - DNA, 1180 bp, Zea Mays
atggatccatttgctcgactcatcatctggggtaacttgagaggtgccccaacatctgttgttgaggcacaagatgaagccaacccacctaattttgaacaaatacctaataaccagccccctaaaaatgtggtccctaaaaggtgcaagaatttcacagttagcgaagatgaatgcctagtctcagcatacctaaacataagcaaggaccccatcatagggaccaaccagccaataaaaggttactggcaaaggataactgagtactttcacgagcataagagcactccttatgatagatcacagtcttctttgcaacaaagatggggagacattcagaaagaaacttctaggttctgtggattctatgtggaagtagagaggagaaagcaaagtggactcaacgttgatgacaagataaaagaggccatggcgatgcacgagcgtatagttggcacaccgttcaagtttatgcactgctggttaattttacgtcacgagatgaaatggaatgcattgcttgattcaatgaatccaacagatgctaaagaaacagaacaaaaggggacaaatatcatggaagagttgcttccccccaaaattgcacgcccaacgggaagagatcatgataagaatatgaagagcaacatcagctcaagctctttcactgcttgcattaatgtgctccaaaagttgtcaatggagcatggagcatttgaagagaggcaagatgctacaagtagggaggaagcaacacacatggtagtaaggtcggatcgcaaactggccctacaagaggaagttataataattcaaaaagcaagcctcgaaatccagcagcaaatgcttaagctacaagaagaagaacgtgaggagagggtgatgacaatggatgtaaacaagatggagccatgggttcgggagtactacatcaacaagcaaaagaagattgcagcctctagtatgaatgtagaaacatcgagtgcacgtgagccaagttaaatattagttcttctttaagttgttgctactagtatgtagactttaaatcatttagagaatttcttttcctagtatttgtgcaaatattgatatttctattatgttgtacaacaaaaaaactcaatggtatcactgtgtcatggattcattaagaccaatttggatgttccacttcatt

SEQ ID NO: 115460 - DNA, 700 bp, Zea Mays
ctccagcaaccgcgaaccacctgctcctctccccatcccaacccgccttctatctcgtctccggcgccaagagcgccattgtgaccgcggggcgtgcagagtcaccaccaggctggtttaggtcccttccattcggaacgccagcgagaagttgttccgcgaggagctagtcgtcaaccccctgcggcagcaatgtctgtggaactcatcctgtggctcttctccttcgcctccgtcgtgctcctcgtcggcctcaccgtgtaccagcttttgtgtctggtagatttggagtatgattatatcaacccatttgattcatcatctcgcgtcaatgctgtggtgatgaaagaatactcactccaaggggcactttgtgcttctttcctcttgacattgcattggctgccgtttctactcatggcgccagtgacatactaccatgtgaaactgtacttggctcggaaacatcttgtagatgtcactgaaatttttagacaattaaatggcgagaagaagtacaggacgatcaagcttgccttctacttctgcctgtttattgtaactatttacaggtttgactttggttatatcttaattaatattttggtgaactgaatacaatatgcattcatttgttagtgctaactgatattagttattcaaaaacatctacgacattatcaaaaaccattataaatgg

SEQ ID NO: 115461 - DNA, 663 bp, Zea Mays
gatccaaggctagcagcagctgcatctctacacaccccgcggccgccacccattcagcaagaaacacccatggccataatccaaccacctagccggcaacaagtcgttgtattaaagatagcaatcgatcctcgccatggcctcccgttgctcttgtcccactcggttgagcaaccagcagccattccgcagcagcaggcagccactccatctggcctgccggttcatacgttcagggtagcgactgaccctagggacggccacattgcgatcttgtctcacacagttgaagcaacgactcggcatcatgctgctgccagctctgtggccgccgctgatcaacccggtggcagcggtgtgatgagggccagagaagctcgtgatggcaacagccagaccacgacgcggatggtgtttagaaccgcgctgaaagagttcgtgacgaaacaaatcgcggaaacaaggggccagcaagctagcctcacaacagaagagctccgtggtttcgttgtgcgcaaggccgtggacaatatcatgcggtcagagaaacacatccccggcacacaagagaggattgggaagtacctgaggttctgcagggggaaaataaggaagctcatacaggagtactttcacaagtacgagggaagatttcctcggtga

SEQ ID NO: 115462 - DNA, 1325 bp, Zea Mays
tcaccgccctcggcagttgaatagcaagtattgaatggacggctgatccagcggcgcttgatcctatcggacggtcgcgaggatcccaggagccctatatccccatcctcgccccccacctccttcgcttcactcgcgtccgcccccgccgccgcctttcgtcccagcccctaaaccattctccattcctctcctcagtttagcacaatggcactggctaataagcttggtggtctgctcaagaaagccacaagttcaaatccgtctgtctaccaagcaatcagatgcatgtcatccaagctctttgttggagggatttcttatcaaactgatgatcacagtctcagggacgagtttgccaaatatgggcaagtcattgaagctaggattatcattgaccgtgagtctgggaggtctagaggttttggctttgtaacttacacgtcttctgaggaggcttcagctgccattactgccttggatggaaagactctcgatggacggagcatacgggttaatcatgctaacgagaagaccggtggctttcgtggcggcggtggctatggtggcggcggctatggtggtggtggaggctatggtggtgctggtggaggcggtggatacggtggcggccactatggtggtggtggtggcagcggtggatacggtggcggcgactatggtggcaactacagcaacaggggtggtggtggtgattatggagttgctggtggaggtggaggcaactttactgctggaggtagcgacagctttgccaacagtaactttggttctgacagtagttttggtggaaacggtgctggtggctttgatgcaaccggcggttccacaggcgatgatgggttctctggcacacctgatgataactttggtggtaacaagaatgaagaaaccatggatgatatcttcaaggacgatgagccggacagctacgccgacaagaggagctagtttgtgccttctccaaagagtgctcatcaatacgattccagaacgatatgtattggctagtgtttgctgttaacatcatagcggcctgtatgttcaaataatggagcgagtaattctgatgagtttgagttgtcgggggctgtggaactttcaaacatggcgtgcatccacgttataatgtcgttttgctagatgctatgctttcatcgtggcttggaaatcggggtcttgtcaagcttcagctcagacggatctgtaaatggtactgaaccctacattttatgttttctgtggatgctctgcgtatgtgacaaaaaagcagtaaaaatgaagtgtgagtttaatttcagtac

SEQ ID NO: 115463 - DNA, 96 bp, Zea Mays
cctggcttgggcagacgaggagagaagtcgttgggaggcagctggggcgaaggccctatgttctctggctgcttctgcagctgctccctagagtgg

SEQ ID NO: 115464 - DNA, 1490 bp, Zea Mays
attgccatctctttcaatcaccttcttcgtttcatcctctgattctccccctgctggtctgctctgctcccatcccatggagcccgacgccgcccaaaaccctagccccagccccgtccccccgcccatctccgcctactaccagacgcgcgccgaacaccacgccgtcgtaactagcgactggctcgcccacgccgccgccgcagccgcagccttccccggcgccgataccgccgatgccgccccgcccccgtcccccgggggcggcggcgtgatcgaggagttcaacttctggcgccgcaagcccgaggccgccgaggcggtggccgccatcatggctctcgccgccgtcatccgctccagcagggccaccaccatgatggagctcgagatcgagctcaagaaggcatctgacaagctcaagtcctgggatgctacatccatttctctttctgctgcttgtgatttgttcatgcggtttgtaacgaggacctcacatctggagcatgagaagtttgatgcagcaaaatcgcggctaattgagcgaggagaaaaatttggggagatatctttaaaggctcgcaagacaattgcaatgcttagtcaggattttatttatgatgggtgtactatacttgtccatgggtattccagagtagtactggaagttctaaagcttgctgcatccaatcgcaagctcttccgggtactatgcacagagggcaggccagacagaactggtttaaggatgtcaaatgaacttgcagcattagggatccctgttaaggttctaattgattcagctgttgcttattccattgatgaagttgacatggtttttgttggcgctgatggggttgttgagagcggaggaataatcaatatgatgggcacttatcagatagctcttgtggctcatactatggacaaacctgtttatgtggcagctgaaagctacaagtttgctcggctatatcccttggatcaaaaggacatgacgccagctcaccgaccaatagattttggagtcccaatacccattggtgtggaagtggagacatctgcaagagactacacacctccccaatatctcacactcctcctgaccgaccttggtgttctgacgccgtctgttgttagtgatgagctcatccaactgtatctatgatctttgcggcaggcgccgttgtttcattggcatgtaacatctacagttgagtccagggtttgccctatcagttttgactatgatgtatgcttgactttgtggtgctgatgcgatgtagaagaatttctcggaacgattatgctgagagaaatcaacagtttgtaagagcttaaagtacagtcatggttacgaatctgccccagaccattttcagcactaacctatttgtaggacatgctctgttaaaattatggttccctcaaacagtaagtgtaaatggatctccacaacagaatatgaatccattagtattgcctatata

SEQ ID NO: 115465 - DNA, 853 bp, Zea Mays
catctctttcaatcaccttcttcgtttcatcctctgattctccccctgctggtctgctctgctcccatcccatggagcccgacgccgcccaaaaccctagccccagccccgtccccccgcccatctccgcctactaccagacgcgcgccgaacaccacgccgtcgtaactagcgactggctcgcccacgccgccgccgcagccgcagccttccccggcgccgataccgccgatgccgccccgcccccgtcccccgggggcggcggcgtgatcgaggagttcaacttctggcgccgcaagcccgaggccgccgaggcggtggccgccatcatggctctcgccgccgtcatccgctccagcagggccaccaccatgatggagctcgagatcgagctcaagaaggcatctgacaagctcaagtcctgggatgctacatccatttctctttctgctgcttgtgatttgttcatgcggtttgtaacgaggacctcacatctggagcatgagaagtttgatgcagcaaaatcgcggctaattgagcgaggagaaaaatttggggagatatctttaaaggctcgcaagacaattgcaatgcttagtcaggattttatttatgatgggtgtactatacttgtccatgggtattccagagtagtactggaagttctaaagcttgctgcatccaatcgcaagctcttccgggtactatgcacaggtacaatgatttagttgcaagatgtgataatctgtttctacaaagatagcttgcctgtggcaaatatgtcatacacatacatggcatttagtgatatatttcaaaggcatcatctaggcatctgggtggacctaattct

SEQ ID NO: 115466 - DNA, 896 bp, Zea Mays
catctctttcaatcaccttcttcgtttcatcctctgattctccccctgctggtctgctctgctcccatcccatggagcccgacgccgcccaaaaccctagccccagccccgtccccccgcccatctccgcctactaccagacgcgcgccgaacaccacgccgtcgtaactagcgactggctcgcccacgccgccgccgcagccgcagccttccccggcgccgataccgccgatgccgccccgcccccgtcccccgggggcggcggcgtgatcgaggagttcaacttctggcgccgcaagcccgaggccgccgaggcggtggccgccatcatggctctcgccgccgtcatccgctccagcagggccaccaccatgatggagctcgagatcgagctcaagaaggcatctgacaagctcaaggttgataacccggccgattcacctgctcggctgctctgtcgttcccgcttgctgtgctagcgtatattctatatttctattattctttgttgatcagcatgattccctgagctgttcttgcattctgtgtgctgatggcttatccgttgcggaaatttaagcaggatagtaaatcagaatttcgtttgcataaaagtggctcagaccttaattagtgcttctgccctagtttttagtggcacactctcacctttattacaatgctctgaatgacatgtatagtcgattgaccacacattatactatggaaagccaagcatttatttgttataagcattctaattataatacacaaaagtcctcacgttatgccgttaatactcatggttactggccccatcatgagaagcttgagttgtgtgcacatctattcctgaacagtaatgtcagctcttgttttttgcactgtcttccttt

SEQ ID NO: 115467 - DNA, 375 bp, Zea Mays
atggtgctgggacttctccttctcggccgcccaaccttcctgctcctccctgctgtcgtgtccctggcacctgctctcttgttcctggcgcgtccgcccctgcctgctcaccttcaggtttgccgcgctcctccgctcggaccgcgtccctctctgctcggccatggcgagtcccttctagccacggctcggtgtttggcccgcgccatccctgctcctcctcagcttggcctggctgcgcggccatgctcctcggcgacctcgcaaccagctgcttactcctgtcaccgtgcaagacgccaggtcgccgaacactgctcccagctcgccatggggctcgccggtcctcacctctggtccttgcctcgggcgtag

SEQ ID NO: 115468 - DNA, 1083 bp, Zea Mays
atataaaagctgccctcgcgacctagcaccagcccagccactccactcctaccccacacagaagcggcggcggcggagcaaacgcaggcgaaggcgagggtgtgagggaaggagcaccagccatggtgcacgtcaacttctaccgcaactatggtaagacgttcaagaaaccaaggcgtccttatgagaaggagcgtcttgatgctgaactgaagctggttggtgagtatgggctgaggtgcaagcgtgagctttggagggtccagtatgcactgagcaggatccgtaatgctgcaaggcacttgctcacccttgacgagaagaacccccgtcgtatctttgagggtgaggcacttcttcgccgcatgaaccgctatgggctgcttgctgagggtcagaacaagcttgattatgttcttgccctcaccgctgagaacttcctcgcaaggcggcttcaaacacttgtcttcaaggctggcatggccaagtccattcaccatgctcgtgtcttgatcaagcagcgtcacatcagggttggcaggcaaattgtcaacgtcccatcattcatggtgagggtggagtctgagaagcacattgacttttcactgtcaagcccattcggtggaggccccgcaggaagggtgaagagaaagaatcagaagaaggcaagcggtggcggggatgctggtgatgaggatgaggagtgaggatggacaagtagtgttacaccaatataataatattatctagttttcttgaacttgttcgaatgatgagtgcttagctgtgtgatctgacgcagagtcccctgtgctgactctgtgtcatggatggtccattttatcttgtggtattatcagcctttacataactgctatgtttggatatgttcaattctgttgcaattttatgtggttgtttttttgcgttttgttgctattaagctgttctttcaatcggctaatgatttgcttaaatgttatttataatctgcttcagcttgttgtactgattgggtatatgatacgcttaaaattttgttgctgtgacagtattgacaactggtctgtgaacatttgatat

SEQ ID NO: 115469 - DNA, 1542 bp, Zea Mays
tcgcgacctagcaccagcccagccactccactcctaccccacacagaagcggcggcggcggagcaaacgcaggcgaaggcgagggtgtgagggaaggagcaccagccatggtgcacgtcaacttctaccgcaactatggtaagacgttcaagaaaccaaggcgtccttatgagaaggagcgtcttgatgctgaactgaagctggttggtgagtatgggctgaggtgcaagcgtgagctttggagggtccagtatgcactgagcaggatccgtaatgctgcaaggcacttgctcacccttgacgagaagaacccccgtcgtatctttgagggtgaggcacttcttcgccgcatgaaccgctatgggctgcttgctgagggtcagaacaagcttgattatgttcttgccctcaccgctgagaacttcctcgcaaggcggcttcaaacacttgtcttcaaggctggcatggccaagtccattcaccatgctcgtgtcttgatcaagcagcgtcacatcaggtacgcttacatggctgcttgtagtacgcttgctcttggtattgtttatttaaaaacctccatttcaatggaagcgcctgatatgagcatggagtattaatgatgctgcctatgttgtaataaatgaattgtcagtgattacttgcatgtcttgtgaaacatttcatgatttctttgttctctgtttgactctgtaaatgcttgtgcctatggattaacttctcaaaatagcacataactttagtttatgtttttaagttcattgcttcgtttgcctgtccctaaatgttttcttgggtttataatgattttctgtagtcatttcaggcagtgattagaataacactattgaagtatatatctgtgtttatcttaagctgtttctgtaacattaaagaactcatgatataccatttttggaatctactatcttgtatagattagactagcatggttagttgtcccctgaatctattatcttgctgaaattatttttaaactatgatgttaaaggagatatcaatgtttgtttgtggaaccttgcagggttggcaggcaaattgtcaacgtcccatcattcatggtgagggtggagtctgagaagcacattgacttttcactgtcaagcccattcggtggaggccccgcaggaagggtgaagagaaagaatcagaagaaggcaagcggtggcggggatgctggtgatgaggatgaggagtgaggatggacaagtagtgttacaccaatataataatattatctagttttcttgaacttgttcgaatgatgagtgcttagctgtgtgatctgacgcagagtcccctgtgctgactctgtgtcatggatggtccattttatcttgtggtattatcagcctttacataactgctatgtttggatatgttcaattctgttgcaattttatgtggttgtttttttgcgttttgttgctattaagctgttctttcaatcggctaatgatttgcttaaatgttatttataatctgcttcagcttgttgtactg

SEQ ID NO: 115470 - DNA, 882 bp, Zea Mays
atataaaagctgccctcgcgacctagcaccagcccagccactccactcctaccccacacagaagcggcggcggcggagcaaacgcaggcgaaggcgagggtgtgagggaaggagcaccagccatggtgcacgtcaacttctaccgcaactatggtaagacgttcaagaaaccaaggcgtccttatgagaaggagcgtcttgatgctgaactgaagctggttggtgagtatgggctgaggtgcaagcgtgagctttggagggtccagtatgcactgagcaggatccgtaatgctgcaaggcacttgctcacccttgacgagaagaacccccgtcgtatctttgagggtgaggcacttcttcgccgcatgaaccgctatgggctgcttgctgagggtcagaacaagcttgattatgttcttgccctcaccgctgagaacttcctcgcaaggcggcttcaaacacttgtcttcaaggctggcatggccaagtccattcaccatgctcgtgtcttgatcaagcagcgtcacatcagggttggcaggcaaattgtcaacgtcccatcattcatggtgagggtggagtctgagaagcacattgacttttcactgtcaagcccattcggtggaggccccgcaggaagggtgaagagaaagaatcagaagaaggcaagcggtggcggggatgctggtgatgaggatgaggagtgaggatggacaagtagtgttacaccaatataataatattatctagttttcttgaacttgttcgaatgatgagtgcttagctgtgtcatggatggtccattttatcttgtggtattatcagcctttacataactgctatgtttggatatgttcaattctgttgcaattttatgtggtt

SEQ ID NO: 115471 - DNA, 651 bp, Zea Mays
atataaaagctgccctcgcgacctagcaccagcccagccactccactcctaccccacacagaagcggcggcggcggagcaaacgcaggcgaaggcgagggtgtgagggaaggagcaccagccatggtgcacgtcaacttctaccgcaactgtaagctcgcgccgatgatcccctccaccactcctctgttcgttgcgcttcgtttcctttcattttcgttgcggaggcgccatgatctggtgccgaatgggatgcgcatagtcctagttcgtcgagttcttggctagtcggccttacctgaccatggcagggcctattgaaggctctcgttgggagcaccaatgttttgtctcggtttgtgttcccatcagtgccgtagttgcgaggcgaggtgaatggttcttacgccgcgacatggagatcggtggatttagcatgtccactgctcttggtggcagtcgatctgaggttttgtagggcgttggtcggaatccggctcatgtgaagtgattataagtggtggctagcgttgttctgggatgagcgagcctaatcctctcgtttgcccatgcgaaataaacatgttatggatgaacattttgtttgtgtaaacccatcagaaatttatgtgactattatctataggttttt

SEQ ID NO: 115472 - DNA, 810 bp, Zea Mays
atggattttagtactgctgcaaccccaccagcctgcacacaacatctatctcaacatgagtcgacagtcggcggtgggaatccctcctggatgtctgattatagatctgatgttgttgaggaccttgataatgaagtgaaagaattgccagggctgaatgaaataaactcacagccgattaagaggggtcgatccaagaatttcagtgtagaagaggacctaatgttggtttctgcttatcttaataaggaagtgaatatttttcaaggttactatgatgccatagaaaggaaagatcaaagtggcaagacgagtgatgacaagcttgctgaagcaaaggcagaatttcgggaaagacaacatgggagggcattctctgtcttccatgtgtggatgattcttaggcatgagccaaagtgggcattcagagaatcaaagctaaaagacccacaagaaacaaataatgctagtagtgatgctcctatcaacattgatagaccaccagggagaaaagctgagaaggaaaaagcacgggctagaaagcatggtgcctgtgatgttgatggtgatcctttctttgaagaattaaaaaagatgagagaatcccaggaagaaaatgacaaagaccgaaaggcccttgatgagaagttctatgagttggaaaagattaaggttgaagcagagcaagatcgtcaagtcaaagagataatgcaaactgacacaagcacaatggatgacgaatcaaaacaatacttcaagttgatgaaaaaagagattttgattcgtcgttttgggagtagtcagccatag

SEQ ID NO: 115473 - DNA, 1962 bp, Zea Mays
tggctagcataagatgagggacacgataagacacgagatgccgcgagcgtgcacaggacaaggagtgaggaaccagatccttgcttgcattggcggagcagcatcatgccttccacgacagcgcagcagaagccccacgtcgtgctggtgccgttcccggcgcacggccacatcgcgccgcacgtgcagctggcgcgcgccctccgcgcccgcggcgtccacgccacgctcgtccacaccgagctgtaccaccgccgcctgctgcgcaccaagcagcagcaggccacgggcggcgacgacgccctggacccggacgagggcttctccgtcgaggtcatcccggacgggctatcgctggaggacccaccgcgcacgctgcgtgcgtaccacgaggcgatggagcgcaactgcctcgagccgttcaaggcgctgctgcgggacctgctgctgccgcccaccggcgtgccgccggtcagctgcgtcgtggccgacaccccgatgccgttcgcggccgtggcggcgcgcgaggttggcgtcccggacgtgcagttcttcacggcgtccgcgtgcggcctcatgggctacctccagttccaggagctcttggcgagggaggtcatccctcttagacccacctacgagaccgacggctccctcgacgccccgctggactgggtgcccgggatgaaggccgtgcgcctaagggacctgccgacgttctgccacaccacggacgccgacgactggcttgtgcacttccacgtccaccagatgaagacggccgccgcctccaaggccgtcgtcctcaacactctctacgacatggagaaggacgtcgtcgacgcgctcgcgccgcacttgccgcccatctacaccgtcggcccgctcgcaagcgtcgtcaaagcgtccttgcccgctcctccgcgcggcgccggcgacgacaccagcgtccccgccgccggctcggtgaggagcagcgccatgctgggcgtgttacaggaggacagggagtgcatggcgtggctcgacgacggcaaggcggcgcgctccgtcgtgtacttgagcttcggcagccacgccagcatgggcgacgcgcggctcaaggagatcgcgtccgggctagcacgctgtggctctccctacctctgggtcctcaggccagaaatggccgccgcggtcgaggtcggcgagaacggcctcgtcgtgccgtggtgcgcgcaggaggcggtgctgagccacccggccgtggggctgttcgtcacccactgtgggtggaactccattctggagagcgtcgtcgccggcgtgccggtgcttggatgccccgtgctgtctgagcagaccacgaactgccgccaggtgtgcaccgcgtggggcatcggcgccgagctgccgcaggaagctggcagcgacgaggttgcggcgctcgtgagggagatgatgaccgggaggaaggggaaggacgcaagggagaagacgctgcagtggaagaggctggctcaagtcagtgcacaaccaggggggctatcttacaataatattggtcggatggtggagaatatcctactcaaacacatctgacttcaaatcatggtcatgtttttgtcatagcgactgaggggagaaagatcgtcaataaccaacagctgaaccgtatctccctgatcctatagcactattaaattaaattctgtacctagcattaaaatatctcataccatatagtccaatataaataaatcagttcatattccacctgattgaatggctgtgcgtgaggttcaggctcgcgcgacgctgaccgaccagatacggcattttccggtgtatgtgtaggtgtcaaatggccttaatggcttgctttgtatccgcttatgcaacatgcgtcttctgcgtgcagtcaaccaaacatgagttgaggcaagtcaacacatataatgggaaacgaatcacgtgagaccc

SEQ ID NO: 115474 - DNA, 1440 bp, Zea Mays
ccttccacgacagcgcagcagaagccccacgtcgtgctggtgccgttcccggcgcacggccacatcgcgccgcacgtgcagctggcgcgcgccctccgcgcccgcggcgtccacgccacgctcgtccacaccgagctgtaccaccgccgcctgctgcgcaccaagcagcagcaggccacgggcggcgacgacgccctggacccggacgagggcttctccgtcgaggtcatcccggacgggctatcgctggaggacccaccgcgcacgctgcgtgcgtaccacgaggcgatggagcgcaactgcctcgagccgttcaaggcgctgctgcgggacctgctgctgccgcccaccggcgtgccgccggtcagctgcgtcgtggccgacaccccgatgccgttcgcggccgtggcggcgcgcgaggttggcgtcccggacgtgcagttcttcacggcgtccgcgtgcggcctcatgggctacctccagttccaggagctcttggcgagggaggtcatccctcttagacccacctacgagaccgacggctccctcgacgccccgctggactgggtgcccgggatgaaggccgtgcgcctaagggacctgccgacgttctgccacaccacggacgccgacgactggcttgtgcacttccacgtccaccagatgaagacggccgccgcctccaaggccgtcgtcctcaacactctctacgacatggagaaggacgtcgtcgacgcgctcgcgccgcacttgccgcccatctacaccgtcggcccgctcgcaagcgtcgtcaaagcgtccttgcccgctcctccgcgcggcgccggcgacgacaccagcgtccccgccgccggctcggaggacagggagtgcatggcgtggctcgacgacggcaaggcggcgcgctccgtcgtgtacttgagcttcggcagccacgccagcatgggcgacgcgcggctcaaggagatcgcgtccgggctagcacgctgtggctctccctacctctgggtcctcaggccagaaatggccgccgcggtcgaggtcggcgagaacggcctcgtcgtgccgtggtgcgcgcaggaggcggtgctgagccacccggccgtggggctgttcgtcacccactgtgggtggaactccattctggagagcgtcgtcgccggcgtgccggtgcttggatgccccgtgctgtctgagcagaccacgaactgccgccaggtgtgcaccgcgtggggcatcggcgccgagctgccgcaggaagctggcagcgacgaggttgcggcgctcgtgagggagatgatgaccgggaggaaggggaaggacgcaagggagaagacgctgcagtggaagaggctggctcaagtcagtgcacaaccaggggggctatcttacaataatattggtcggatggtggagaatatcctactcaaacacatctga

SEQ ID NO: 115475 - DNA, 1467 bp, Zea Mays
ggagctcgattcgctgcgtcgctgagcctgagtaatcgattcgtgctgggcggtggcgtggtcggagggatctgaatcctagcgccgtccgtatctgaaacccgcgccggcgagctgctcggcgcctcggtggcatgggtggctggaaagcgggggagaggagaagcagcggagatatgaacggaggcggcggcagcagccgggacgagttcgggcgggcggtggcgcgggccgcggtggcgcaggcactgcaggccgcggggttcgattgcgcgcaccgctccgcggtggacgcggtcgtcgacaccgtcctgcgctatatcacccacctgggccggtctgccgccttccacgccaacctcgccggccgcgcgcacgctaatgagctagacgtcatccaggcgctcgaggaggtcggcgccgacacgtatggtttcgctggcgcggcaaccacgggccactgcctcgtcggctctggcgtcgtcaaggacctcatggcgtttgtccattccaaggacgaggtgccgttcgcgcggccgctgcctaggttccccatccagcgcgtggagccgcagccttctgccagcttcactgtgactgggagggagactgggatgaagcacgtgccggagtggctgcctgctttcccagatccgcacacctatgtgacgacggaggtgtgggttgagccgccggcgaccaaggacagggttgacaaagtggagcaggtgcggcaacgaaggaaagctgagaagtccctgctcagcctgcagcgaaggctggctatggctggtgcggataggtttcgtccagctgtggcacatgataatgcgctgaaggggaaggagatacaggcagctgggacgaagagaaatccatttcttgagccagcattgttacctggacagaaggatgtatcagaggttgatatgcctccggaaaagaagaaattctctgtccttgaggcatttgcaccagctattcaagctagaaccatcagggagattgatgctagtgctgggttggatcaaaatcaaaggaacattgttccaaaagagagggctccagttcatcttaagattggatttagtaataagtcattagcagcagctcagaattcaagagccctggatctgagggatgatcttttcttcttgaaagaggaaacaaaggatgataagaagcggagagcgggcatgatattaagggcatcaatggagaacccacaagaacttcctcagctctaaagttgtttatggaggaagtctggtactaatagtggagtcgcatcgtgttgttgtgatcatggaacttcagtttctagaatcttgaggtaaacatttatcttgtggtaactcattggtctatgctgtcaaatgctctagaggcccatgcggatgaaacccatgtagttgaaaatcctgtgtgcatcaaaatggtggaacaatttgccaaatttagctgggc

SEQ ID NO: 115476 - DNA, 1373 bp, Zea Mays
agggtcaatggtgtgccagataggcccgcgcaaactaactattggacgcattggaaggcccgcgactgcggctgcgcggcctgcgcctgcgcctgcgcaggcgcgcgtgtgaacaaacgtaggaggacctatctcttttcgttctccgagagaagtcttctctgtcacagcgccgacgcttctcaattccttccaatcggcacctcgccgtcctcgtgtgcaatccccagctctcctcgcccctccctcccaaactccagcggcccccctgaccaagctccggggacggatggacggaggagccggctttccgggcacgcagccggtctcccgctcgccggaggacgtcttccgggactaccgcgcgcgccaggccggcctgatcagggcgctcaccaccgatgtggagaagttctacgtgatgtgcgacccagagaaggagaacttatgtttatatggacttcctaatgagacatgggaaataaacttgcctgctgaagaggtccctcctgaactgccagagccagctcttggaattaattttgctcgtgatgggatggatgaaaaagattggctatcacttgttgcagtgcatagtgattcttggctaatgtctgttgcattttattttggagcaaggtttggattcgataaagaatccaggaaacgtctcttcaccatgatcaataaccttcccagcatatatgaggttgtcacaggaacagccaagaaagagcccaaagaaaaaactcctaaaagcaacattaagactaacaaatctggctcaaagccctcgcgccatgcggaacccaactcaagggtcccaaagatgccacctccaaaggacgaggagagtgaagaggaggaaggggaaccacaggaagaccaggagagtgcgctgtgtggcgcatgtggcctaggttatgacgacttctggatctgctgcgacctatgcgagacatggttccacggcaagtgtgttaagatcaccccagctaaagcggaccacatcaagcagtataagtgcccctcctgcacgggaagcaagagggccaaggtttgatccacgatccaaggagcctttgacgagagctgtaagctgactcttcgtgctagggcagctaatagattcgaatgcttgttttgatacaaattatgagtactgacgaaccgtaaactgatgtagtttgtgtggccctcaaagcatctatgtcctgacttgtgtggtttaggtttcctttggcacagtttctaagagctgattgtctatgaatctaatatgagttttgtcaattagagagaagttgctatgctgaatttatgagctgattttataaagtgatgatataaaataaactaaaagaccagagccg

SEQ ID NO: 115477 - DNA, 866 bp, Zea Mays
agggtcaatggtgtgccagataggcccgcgcaaactaactattggacgcattggaaggcccgcgactgcggctgcgcggcctgcgcctgcgcctgcgcaggcgcgcgtgtgaacaaacgtaggaggacctatctcttttcgttctccgagagaagtcttctctgtcacagcgccgacgcttctcaattccttccaatcggcacctcgccgtcctcgtgtgcaatccccagctctcctcgcccctccctcccaaactccagcggcccccctgaccaagctccggggacggatggacggaggagccggctttccgggcacgcagccggtctcccgctcgccggaggacgtcttccgggactaccgcgcgcgccaggccggcctgatcagggcgctcaccaccgatgtggagaagttctacgtgatgtgcgacccagagaaggagaacttatgtttatatggacttcctaatgagacatgggaaataaacttgcctgctgaagaggtccctcctgaactgccagagccagctcttggaattaattttgctcgtgatgggatggatgaaaaagattggctatcacttgttgcagtgcatagtgattcttggctaatgtctgttgcattttattttggagcaaggtttggattcgataaagaatccaggtattccatttgttttattctaagataagatttttatgtttgactgttatataaatgtttcttgccaatggacctcccttaagtatctcatagtttaggaaccagttattgtttgtcacgagtattcattttctgtacatgagaggtttcatagccttgcgtttgtgatttcttagtagcagctccagcgcctgggtttgact

SEQ ID NO: 115478 - DNA, 306 bp, Zea Mays
tatatgatttgtattggacaattgcctcctacatcgatacagtgagcacacgcccagcctctccatcatcgatggccatactccattctactgagctagatactgcagtttggactagtgctcaagttcttagtatcacttgttataaactaagcaatacgagatattcttaatatttgaatctgttttgcatataaatatgatttcagtcatgtcaccttattaggtgcatgcctttatgaatctatgaatgtgtatccaattagttgcctataaatactaattgcaaatcagtgaatgcgtatt

SEQ ID NO: 115479 - DNA, 2580 bp, Zea Mays
gttttcgctaagtccgtcaactagtcaacatatccatgcgttgttcggcggccgactccactgggcactgggtaggctgtggcgctgtgcgacggtgagaattccaacaggactgccgcgcgcgcgcgcaccggctttatcgtcgacgtcaccatccaatcccctcactaatagtaacggcgcatgcaggcgggcggcagctcaccgtgtgtgtatttaaacgcctccggccgtatcaatcatcccgactggtcactgtgccattgccgccgtccgtcctaggctcctagctagctagctagcaagctccgccgacgacggtacgtcaatcgagctagccctgcccatccactacactaccgcagcggcaagcaatggcgtgcggctctgctaccgccgctcgaccagcagcccgcctctggctgctggcggcggtggtggtggcgacctccttcctcgccgtcgcggcgccgccgggcgcgctggtgacgagcgtcccggggttcggcaacaagcagcagctgccgtcgaagcactacgccgggtacgtgacggtggacgagcggcacggcaggcggctgttctactacctggtggagtcggagcgcgacccggcccgggaccccgtcgtgctctggctcaacggcgggcccggctgctccagcttcgacggcttcgtctacgagcacgggccattcagctttgagtcatcaggagggtcagctgggagcctgccaaagcttcatctcaacccttatagctggtctaaggtgtcgagtgtgatatacttggactcccctgccggcgtcgggctttcctactcaaacaacgtttcggactacgagactggcgacttcaagaccgccgccgattcgcacactttcctgctcaagtggttccagctctaccctgagttcttggcaaatccgttctacatagccggagagtcgtacgctggcgtttatgtccctaccctttcaagcgaagtcgtcaaaggaatccacaaaggagtgaagccagttataaactttaagggctacatggtcggcaatggtgtgtgcgacaccgtctttgatggtaatgctcttgtgccgtttgcgcacgggatggctctcatttcagagagtatatacaaggaagccagcactgcatgtcaagggaattactggaactctagcagtgcaaaatgcgacgaggcgctgtcaaaagtcgagacggaaatcgacggattaaatatctacgacatccttgagccatgttaccacgccccagctgataccaaacaagcagcagtgaccccacaggcacagagtactagcgagctgcctcagagtttcaaagacctcggcgtgaccagcaacaagcctctccctgtaaggacaagaatgcacggacgggcgtggcctttgagagctccggtaagagacggccgcgttccgtcgtggcaggagctggcggctgatgtagcttcgacttccagtggagttccgtgtatgagcgatgaggttgcgacagcgtggctaaacaacaatagcgtcagatccgctatccatgccgaaccagtcagttcaatcggaccctgggaattatgcacggataaactggattttgatcatgatgccggcagcatgatcatctatcacaagaacctcacgagtcagggctaccgtgctttcatctacagcggcgaccatgacatgtgtgtaccttacaccgggactgaagcatggactgcgtctttaggctacgccgtcgttgatccgtggcgacagtggattgtcgacgaacaagttgccgggtacacccaaggatatgaaaagggccttacttttgccactattaagggtgctgggcacacagttcctgagtacaaaccacaggaagcactagctttctacagccgttggcttgccggtgctaaactgtgaggaggcctattttgtgtgcaaaggtcatgcagtactgaatcaaacagaagttggataaagcatgcagcaataaggcagtcgaaggatcaaagtatccaacgcgccaactacaatgttgcattcattttcacatgttataccaatgcagttgctaattacctgcattgttcatgagttcacagtccatctaattggttgaccacaccgtctcatcttgcaccactatatacgttaactttattttagccttttaataccatttgactgcacccacacatacgccagaaaacgtcgtatctggccagccaacatcttacgaacctgcacctgagcgcacaaccatccaatcatgttgagtgtgaccaaacatttgtgaaaattttcccgtgattttttttaataatagtatatacggtggttgggctgtgcggctgtgcctcttggtgtccatgtctctgatttattctgatcgttcgacagcgtaaataaagttattacggtaatacaacagtccctccaccccccaatgttgtggcagcgtggtggtcgatgaggagtacgcagaggagagtagctcgagattaggaacgcagaatgtagcgaggacgaagaggaggactgtcgtcgccgacggctgaataggcgccaccat

SEQ ID NO: 115480 - DNA, 2611 bp, Zea Mays
gttttcgctaagtccgtcaactagtcaacatatccatgcgttgttcggcggccgactccactgggcactgggtaggctgtggcgctgtgcgacggtgagaattccaacaggactgccgcgcgcgcgcgcaccggctttatcgtcgacgtcaccatccaatcccctcactaatagtaacggcgcatgcaggcgggcggcagctcaccgtgtgtgtatttaaacgcctccggccgtatcaatcatcccgactggtcactgtgccattgccgccgtccgtcctaggctcctagctagctagctagcaagctccgccgacgacggtacgtcaatcgagctagccctgcccatccactacactaccgcagcggcaagcaatggcgtgcggctctgctaccgccgctcgaccagcagcccgcctctggctgctggcggcggtggtggtggcgacctccttcctcgccgtcgcggcgccgccgggcgcgctggtgacgagcgtcccggggttcggcaacaagcagcagctgccgtcgaagcactacgccgggtacgtgacggtggacgagcggcacggcaggcggctgttctactacctggtggagtcggagcgcgacccggcccgggaccccgtcgtgctctggctcaacggcgggcccggctgctccagcttcgacggcttcgtctacgagcacgggccattcagctttgagtcatcaggagggtcagctgggagcctgccaaagcttcatctcaacccttatagctggtctaaggtgtcgagtgtgatatacttggactcccctgccggcgtcgggctttcctactcaaacaacgtttcggactacgagactggcgacttcaagaccgccgccgattcgcacactttcctgctcaagtggttccagctctaccctgagttcttggcaaatccgttctacatagccggagagtcgtacgctggcgtttatgtccctaccctttcaagcgaagtcgtcaaaggaatccacaaaggagtgaagccagttataaactttaagggctacatggtcggcaatggtgtgtgcgacaccgtctttgatggtaatgctcttgtgccgtttgcgcacgggatggctctcatttcagagagtatatacaaggaagccagcactgcatgtcaagggaattactggaactctagcagtgcaaaatgcgacgaggcgctgtcaaaagtcgagacggaaatcgacggattaaatatctacgacatccttgagccatgttaccacgccccagctgataccaaacaagcagcagtgaccccacaggcacagagtactagcgagctgcctcagagtttcaaagacctcggcgtgaccagcaacaagcctctccctgtaaggacaagaatgcacggacgggcgtggcctttgagagctccggtaagagacggccgcgttccgtcgtggcaggagctggcggctgatgtagcttcgacttccagtggagttccgtgtatgagcgatgaggttgcgacagcgtggctaaacaacaatagcgtcagatccgctatccatgccgaaccagtcagttcaatcggaccctgggaattatgcacggataaactggattttgatcatgatgccggcagcatgatcatctatcacaagaacctcacgagtcagggctaccgtgctttcatctacagcggcgaccatgacatgtgtgtaccttacaccgggactgaagcatggactgcgtctttaggctacgccgtcgttgatccgtggcgacagtggattgtcgacgaacaagttgccgggtatgtatctggattctgaacacaagcatatatgcattgaccctttatttcctcctaagatctttgaaccgtttagtcgatcctagatcgatgttgagtaattgctagctcttggacgatatgaattcactactataatcaacaaaaactttggcattatttatatatttcacgaaatattcagctcgatgatttgttatcatgttccatttgttccagtcaaatgtttgtatttttgctcccaggtacacccaaggatatgaaaagggccttacttttgccactattaagggtgctgggcacacagttcctgagtacaaaccacaggaagcactagctttctacagccgttggcttgccggtgctaaactgtgaggaggcctattttgtgtgcaaaggtcatgcagtactgaatcaaacagaagttggataaagcatgcagcaataaggcagtcgaaggatcaaagtatccaacgcgccaactacaatgttgcattcattttcacatgttataccaatgcagttgctaattacctgcattgttcatgagttcacagtccatctaattggttgaccacaccgtctcatcttgcaccactatatacgttaactttattttagccttttaataccatttgactgcacccacacatacgccagaaaacgtcgtatctggccagccaacatcttacgaacctgcacctgagcgcacaaccatccaatcatgttgagtgtgaccaaacatttgtgaaaattttcccgtgattttttttaataatagtatatacggtggttgggctgtgcggctgtgcc

SEQ ID NO: 115481 - DNA, 1264 bp, Zea Mays
aataacagaaggctgccgctgatcggtttcctttccgtgttaatttttgaaccccctgcagtggttccagctctaccctgagttcttggcaaatccgttctacatagccggagagtcgtacgctggcgtttatgtccctaccctttcaagcgaagtcgtcaaaggaatccacaaaggagtgaagccagttataaactttaagggctacatggtcggcaatggtgtgtgcgacaccgtctttgatggtaatgctcttgtgccgtttgcgcacgggatggctctcatttcagagagtatatacaaggaagccagcactgcatgtcaagggaattactggaactctagcagtgcaaaatgcgacgaggcgctgtcaaaagtcgagacggaaatcgacggattaaatatctacgacatccttgagccatgttaccacgccccagctgataccaaacaagcagcagtgaccccacaggcacagagtactagcgagctgcctcagagtttcaaagacctcggcgtgaccagcaacaagcctctccctgtaaggacaagaatgcacggacgggcgtggcctttgagagctccggtaagagacggccgcgttccgtcgtggcaggagctggcggctgatgtagcttcgacttccagtggagttccgtgtatgagcgatgaggttgcgacagcgtggctaaacaacaatagcgtcagatccgctatccatgccgaaccagtcagttcaatcggaccctgggaattatgcacggataaactggattttgatcatgatgccggcagcatgatcatctatcacaagaacctcacgagtcagggctaccgtgctttcatctacagcggcgaccatgacatgtgtgtaccttacaccgggactgaagcatggactgcgtctttaggctacgccgtcgttgatccgtggcgacagtggattgtcgacgaacaagttgccgggtacacccaaggatatgaaaagggccttacttttgccactattaagggtgctgggcacacagttcctgagtacaaaccacaggaagcactagctttctacagccgttggcttgccggtgctaaactgtgaggaggcctattttgtgtgcaaaggtcatgcagtactgaatcaaacagaagttggataaagcatgcagcaataaggcagtcgaaggatcaaagtatccaacgcgccaactacaatgttgcattcattttcacatgttataccaatgcagttgctaattacctgcattgt

SEQ ID NO: 115482 - DNA, 1095 bp, Zea Mays
gttttcgctaagtccgtcaactagtcaacatatccatgcgttgttcggcggccgactccactgggcactgggtaggctgtggcgctgtgcgacggtgagaattccaacaggactgccgcgcgcgcgcgcaccggctttatcgtcgacgtcaccatccaatcccctcactaatagtaacggcgcatgcaggcgggcggcagctcaccgtgtgtgtatttaaacgcctccggccgtatcaatcatcccgactggtcactgtgccattgccgccgtccgtcctaggctcctagctagctagctagcaagctccgccgacgacggtacgtcaatcgagctagccctgcccatccactacactaccgcagcggcaagcaatggcgtgcggctctgctaccgccgctcgaccagcagcccgcctctggctgctggcggcggtggtggtggcgacctccttcctcgccgtcgcggcgccgccgggcgcgctggtgacgagcgtcccggggttcggcaacaagcagcagctgccgtcgaagcactacgccgggtacgtgacggtggacgagcggcacggcaggcggctgttctactacctggtggagtcggagcgcgacccggcccgggaccccgtcgtgctctggctcaacggcgggcccggctgctccagcttcgacggcttcgtctacgagcacgggccattcagctttgagtcatcaggagggtcagctgggagcctgccaaagcttcatctcaacccttatagctggtctaaggtgtcgagtgtgatatacttggactcccctgccggcgtcgggctttcctactcaaacaacgtttcggactacgagactggcgacttcaagaccgccgccgattcgcacactttcctgctcaagtggttccagctctaccctgagttcttggcaaatccgttctacatagccggagagtcgtacgctggcgtttatgtccctaccctttcaagcgaagtcgtcaaaggaatccacaaaggagtgaagccagttataaactttaaggttagttttcgttatacatgcataacacaatggttgaacttgtgttctctgtacgtactcc

SEQ ID NO: 115483 - DNA, 168 bp, Zea Mays
atggcgcaggcgcgcagcttgggcctcggggacggcgcgggcgcagctcgggcctcggggacggcggacggcgcagctagtggatatccatggataaaatatactatccgtaccctacccgacgtatttcgggtactcgacccgataggatccacggaaaaatattaa

SEQ ID NO: 115484 - DNA, 583 bp, Zea Mays
ttcgtccgacgactcgttcacaggcacaggacactacaggcaggtgaacatggtgcttggtaatcttgttcgtctgcactggcctggtgttgtgactttgcctactggcgagtctgtccccgccaccacttgggagcattatcgctatggtgtctgtagaacgtttggcaacacacaggcactagtttgggatgcattctggaaacggtacaagttgccggacgatggatcatatgatatgaacgctcgttacgtgtttgagtataacgcgaacgatgtcgttgcagatgcaatgtactatgcacgaattcaggctataaaggcatggtacagagcaaatgctgatgatcgaccgatgccaaataccaaggccgagtggtcatcaatttacttgacggaggagcaatacctagaggtgtcggtgccgtggatggccacccgatcggagggttatcgggcattgtgcagatggtgggcttcccctgagtttcgtgccatttccgaaaggaacaggggaaaccgtgggaccgagtcgttccacaactacggtggtgatggtcatgtgcgcttggctaagcgaatg

SEQ ID NO: 115485 - DNA, 963 bp, Zea Mays
acaagaaccgctccacccaccgaggctccgacgatcagaggtaagcggttgttcgccttcgatttggaaggtattagcaccactacgtccatgaaaaaaaagcagtaaatagtaaaaaaagcagcaggaggtgtaactactttcctttcgtgaatgaaaatgaatgatcttgttgttaccattggcaaagctgtacggctggccaagaaaatagtacggaccgaatactgagggtggcttatacgtctggttgctgagtatgaacccgatgtcagagatgtcctgctcactaaactgggtcttgccgctggggaacacctccagcgcgagctgcaggttgttgaccgagttgacggacggatcgtggagcgcaaccgagtcgacggggacgctgagactccggaacttggctctgatgccggtctccagctggccccagtacgagccgttgctgaggtcagagaaggacggcgacctgaagaacagggtgcccctgtagggcacggcgcagacgcagcctgggctcacgagctggtccgagaggcacggcggcggcagccccgagcagttcatcggggtgctgtacggcggcggcgccgcctggttggactgccccggcgacgcgcagtatttctcgctgctccccgtccccgggctgcagatggggttcccgactagtctgtggaagaagacagcagatgcacgcgtgcgatttgtgaggaacgaacgatgaactgcaaaataagctgttgcttgctacatgatgagctcggttcctctcttcctacatgagctgcttgttgtactgtgatccgccgacagttatctggctgatttggttgtctcgcagatcgattagctggagctgagtgctgtagtctgatccgatagttagcgtgccgttgaaacggtttccccggagcctcctgcaaactctatatatgatcgatcgttttctacatg

SEQ ID NO: 115486 - DNA, 1346 bp, Zea Mays
gtgtatttgatgacatacatgaaatatattagcatgtcaacaatccaattgcatatctatcttaaatacatagcaaccaaaattatcatgtaaacaatcgttatcaagaaatcagttcttaatccaatcgcacacctatcatagtaaccaaaattataacactaataattacaataccctgtacattcagagctagcttttgttgaagagtgaagcttttccgcatgtactcgcggcgcgcgctgtagattcacttgggctcaaccctcgcggacggcaacccgctgttgctgtggtcgaaggggctgtcgccgccgtaggggtgacgcggcgtccggctggcgtagctcatggagttggacgcggactcgggccccgggccgccggccatcttgagcacccgctcgatctcgccgaccacctcgcccatcgatggccggtcggcgccggcctcctcgacgcagcgcagcgccagatccacgtactgctccagcccggccagcgcggacggcgacgagcccagcaccgggtccagcaggtcgtgcaggccgtacaggtccttggtacggtccagcgccaccttcatctccctgacaatgtaccggccgcgctccagcggcttcctcgccgtggccatctccagcatcagcacgccgaagctgtacacgtcgctcttgtccgtaagctgctgcgtcatgtagtactcaggatcaaggtagccctgcaacatcacatccatcaacgttagcttgtctgaacgagtgaattagttcgttgtgtgtgtgtgtgtgatgactgatgaatgaagcaggcaatgccagcctgaccatcgtgcccttgacttgcgtggtgacttgtcccctgccgtcctctccgaggggcttggagaggccgaagtcggagaccttggcgttgaggcgctcgtcaaggaggacgttgctggacttgatgtcgcggtgcacgataggcgggtcggctagctcgtggaggtaggcgatgcccttggcggcgccgagcagcacccggaggcgccgccgccagtccagacgcacgccggacttgcccgtgaggctctccttgagcgtgccgttggggacgtactcgtagacgaggatctgctccgcctggtccaggcagaagcccactaggctgaccacgttcttgtggtgcacccgggagagcagctcgatctccgtcctgaattcgaggctcccctgcagggacccctgctggcacctcttcacggccaccagctgcccgctaggcagggtccctctgtacaccttcccgtagccgccgttgccgatgtcgttcgcctccgagaagttgctggtgatcttcctcag

SEQ ID NO: 115487 - DNA, 1283 bp, Zea Mays
tgaagtttaaaatataagttataataaaaaatatatatatgatacgttggagatggcccctacaagtcgtaaaggccctggcccccaccgttgcttccagtaggtcatgatgcagcgcacctgtcctcccgcgctgctccaccccttcccactcctcccatttgcaagtcccagtaccaggttttcaaaaccgccttcacgcagtccacagataaaataccggcctcctcctccctttccccctccgattcccgcgcccgcccctacgctgccaaaagcgggggacaccgcccgtccccctccccgtccgggtctccacaagcgcacctgcgcgcgcgcgcccggcttccgttgcgcagcagggcagctgggcagggcagggcaggtcgccatttagtcctctgcgctttttggcgttggttcttcttgcacaactcttctgctggattccagctctgtttttctttctcctgtcctgctggtcagtcaaatatatcctcctggtcctgggtagcttttgggttccggcgccttgccgttcgcagtttgtgttcttggtcatctgatctgggtggtattaatctggagacccagtcactcggtcgggacgagatcaataaaaaggaagaaagaagcagcgcggcaagccggcggcgtcgcgaagcttaagatcagagacaccgttggttgggcgttgcttcagatataatctacaagaccaagctcagattccatcagtcggtacgtacgtcggaacagcctcacttcgctcgctgctgcgcgttagatgccggttgcttcgtcgctaatggcgatggagttggagacggaccaactcgcctgggcggagcagcagcggcagcagaataggaggcagaccatggtcgtctgcagaaagagcgacgcagcggtggccaaagggcagcagcgtcagaacgcttcgccgccgtcgcccaagcctccgcccgcgggcgggctcagcgcggaggcgttcttggttctggcgtgcgtcgccgtgtcgctcatcgtgctgccgctggtcctgccgccgctgtcgcccccgccgcctctgctgctgctggtgccggtgtgcctgctcctgctcctcgccgcgctcgccaccttcgtgccgtcggatgtcaggagcatgccatcctccaacttgtaactactagttgttttgctagtcaatatccataaattctttttgttcaagtcggcatttatgtctgtgcatatggcataaaatgagtgtaatgaaatggaaatcttgtcttatcttt

SEQ ID NO: 115488 - DNA, 1874 bp, Zea Mays
acccgaacgaagagcaagactcaatacacaagcagagctcaaacaattcttgcttcccgctagctagctcgcaagaaataatggctccacttcttcttgcttctcgcacagcctgtcatcctggccttacaagcagccgccatgataatggccggcacggcctttcttcttcaccgggaagtagtagtaagcgaagccgtagccttagcttcataccacgagctgaaaagacgacgacaggcggtgagggtcatgttgtgagcgaaaagctgagcccctggcaaatccccaggagggagtggttcccccctagctttatctttggtgccgccacttcagcataccaaattgaaggcgcttggaacgaaggtggcaaggggccaagcacttgggacgatttctgccacaaatatccggagtggatagcggacgggagcactggggatgttggagcgaactcctactacctgtatagagaggatgtcagattgctgaaggagatgggtatggacgcctacaggttctctatcgcttggtccagaatactgccaaaggggacgctcgagggaggcattaaccataaaggcatcgagtactacaaaaggctcatcaacttgttgaaagagaacggcatagaaccatatgtgacacttttccactgggacacacctcaagcgctggtggacagctacggtggcttcttagatgacaggattgtaaaagattacacggactttgccaaggtgtgctttgtgcacttcggcgacaccgtgaagaactggttcaccttcaacgagccacagacgttctcctctttttcctacgggaccgggatctttgcaccggggcggtgctccccgggacaaaaatgcgctaacccaaccgggaactcactcaccgagccatacattgttgcccacaacctcctccgagctcacgctgagactgtccatgagtacaacaagcattacagaggtaacaaggacgcacagatagggattgcgttcgacgtgatgggccgtgtgccatatgacaatatgtttctcgacgaccaggcccaagaaaggtccatcgattataacctaggatggttcatggagccggtcgttcgcggcgactaccctttctccatgagatcattgatcaaggatcggctaccctactttaccgacgacgagaaagagaagctagtgggttcgtatgacataatggggataaactactacacctcgaggttttccaagcacatcgacatctcgccaaagtactcgccagtgctcaacaccgacgacgcctatgccgcccaagagacgaaaggaccagacgggaatactattggtccatctatggggaatccgtggatttacatgtaccctaacggcctaaaggatatccttatgttcatgaagaacaaatacggaaacccaccggtctacatcactgagaatggaatcggggatgttgacaccaaagataaacctctacccataaaagacgcgttgaatgaccacgtgaggctagattacctccagcgccacatttcagttctcaaagacgcaatagacttgggagcggacgtgcgtggccacttcacctggtctctgctggacaacttcgagtggtcggccggttacacggagcggtacggcatcgtctacgtggaccgtggcaacggctgcaagcgccgcatgaagcgctcagccaaatggttgaagaaattcaaccgagccgcgcatacgaagaagaaagatatgacgggcattattccgccgtcagcttattagaacagtgcagctagctagctgccatatgcatatgttttaagatacagatatggtgtgtgtgtggtaagtatggtgcatgtatgttgtttg

SEQ ID NO: 115489 - DNA, 1757 bp, Zea Mays
atacaaactaaaaaaacgaacacccccgttcaccgaatcaccgcctcgtcacactccagcccttccccccgcgccggcgcggcgaggccaccgaccggctggcgggtgttgcttcttcttctcccggcccacccggcctgcccgcaccaccgacccctccgctgagcgcgctcccacgcccattgaatcatagcgcgccgctcagtcgagcgaggatttctctaggatagcagccgccatcacctcctcgcctcgccgcgctccgctggtgctgctgggtcgctgctgagcggagcgggaatcggaccggactcggttcgaattcgtcctcaccttttcgtcgttcggatgccagaagccgagtggaatgatgaacacactaggattgtctgcgaactctttgaagaacaagttcgggctgggaacaggccaaacacgcatctgaacaacattggttaccgccaagttgcggctaagtttcagcagaggacagagcttctctatacaaaattgcagcttaagaacaaatgggacaagtttaagaatgattacatcacctggaggaagttgcttgtagtagggaagggtttaccctgggacacagcaaaggggacatttgttgctgacgaagaatggtggaagaagatcaataaggagctgccgggtgcaaggaaatttcgacatggcggtctacatcatgaggataagttgaatgtaatgtttgactacatcaccagtaatggtgtggatccttcaccgcctgcgccggaaagcccgaagaatggggtgaatcattcgccaccggctgcaactggtttgccatctgctccagactgcgcgctcaatggagtggatcattcgcctgtgactgcacatggtttgccatctggtccatacagccccatgaatgggatggatcagttgccactacccgcacatgatttgcgaagtgttcaagaaatccccatgaatggtgtgaacctcgatggattggacaacaacactgaagataatgatgacatttatcaagagcctgtgtttcagtatacttcaaacaggaagaagagaccgattagtttcagtgctacaaagaagaacaagaaaaacaaggctgaaactgctctgctcatgcaagctcatttgtatcgcataactgagctggctcagaaagcacaggatactttcaaaaagttcagctcccaagctgacttggtgccatggcctagcatccaggatgttatgacacttgtctgggaatgcggagcacggtgtggaagcaatgagcatttcatcgcaactgaactgtttgtcagtagagaacagagggagatgttcctgaccatggaaacggctgaggaacggttccagtggcttcgaagaaagtacattgtcaagtatttgtcaggtacaacgggtacaaatctgggtactagataaaatgatcctgggcatttgcattagattttctcccatgtctgttaggctctgttttggaccagcttcagaaaatttgatggagttgtgaatctttaaaagatatttagataagtcattttgtttattatttagattagaaatattttctaaaactatttaaatttatattataaaatatagccacaccctggagctggaacctgtagcagtctaaacatccccttaatatccgacatgacacatcacattttgtattggatcctgatatagcatgctttgcatcttgacaagtatggttgtatgaatgtatattctgatat

SEQ ID NO: 115490 - DNA, 1749 bp, Zea Mays
atacaaactaaaaaaacgaacacccccgttcaccgaatcaccgcctcgtcacactccagcccttccccccgcgccggcgcggcgaggccaccgaccggctggcgggtgttgcttcttcttctcccggcccacccggcctgcccgcaccaccgacccctccgctgagcgcgctcccacgcccattgaatcatagcgcgccgctcagtcgagcgaggatttctctaggatagcagccgccatcacctcctcgcctcgccgcgctccgctggtgctgctgggtcgctgctgagcggagcgggaatcggaccggactcggttcgaattcgtcctcaccttttcgtcgttcggtgcagatgccagaagccgagtggaatgatgaacacactaggattgtctgcgaactctttgaagaacaagttcgggctgggaacaggccaaacacgcatctgaacaacattggttaccgccaagttgcggctaagtttcagcagaggacagagcttctctatacaaaattgcagcttaagaacaaatgggacaagtttaagaatgattacatcacctggaggaagttgcttgtagtagggaagggtttaccctgggacacagcaaaggggacatttgttgctgacgaagaatggtggaagaagatcaataaggagctgccgggtgcaaggaaatttcgacatggcggtctacatcatgaggataagttgaatgtaatgtttgactacatcaccagtaatggtgtggatccttcaccgcctgcgccggaaagcccgaagaatggggtgaatcattcgccaccggctgcaactggtttgccatctgctccagactgcgcgctcaatggagtggatcattcgcctgtgactgcacatggtttgccatctggtccatacagccccatgaatgggatggatcagttgccactacccgcacatgatttgcgaagtgttcaagaaatccccatgaatggtgtgaacctcgatggattggacaacaacactgaagataatgatgacatttatcaagagcctgtgtttcagtatacttcaaacaggaagaagagaccgattagtttcagtgctacaaagaagaacaagaaaaacaaggctgaaactgctctgctcatgcaagctcatttgtatcgcataactgagctggctcagaaagcacaggatactttcaaaaagttcagctcccaagctgacttggtgccatggcctagcatccaggatgttatgacacttgtctgggaatgcggagcacggtgtggaagcaatgagcatttcatcgcaactgaactgtttgtcagtagagaacagagggagatgttcctgaccatggaaacggctgaggaacggttccagtggcttcgaagaaagtacattgtcaagtatttgtcaggtacaacgggtacaaatctgggtactagataaaatgatcctgggcatttgcattagattttctcccatgtctgttaggctctgttttggaccagcttcagaaaatttgatggagttgtgaatctttaaaagatatttagataagtcattttgtttattatttagattagaaatattttctaaaactatttaaatttatattataaaatatagccacaccctggagctggaacctgtagcagtctaaacatccccttaatatccgacatgacacatcacattttgtattggatcctgatatagcatgctttgcatcttgacaagtatggttgtatgaatg

SEQ ID NO: 115491 - DNA, 1301 bp, Zea Mays
aacaacaaatgcacgccgcagtgctccattcctctcctgtgcttcattctgccgagcaaaagtttttcaacagcagcagaggggaacgatgacaacacacacacagctgcattttattctttcaaaagtttcgcaatgggaagcttgttcacatgcatgcatgcatgcattgactgggccgggtgtagggaaaattttcacctcacaatttaatagctttcgcctgtttcgtgttgctgtggcctcgagaacacagaaggagctataggctgcattgtcacttcagtattactgacaacacaccatgcatgcatatgcatcctccatgccttttgctttgttccactaattgattggtctagctgctgcagtgtcaaggctactattgagaggtacaagaaggcacacaccgttggctcttcctctgggccaccgctcctagagcacaatgcccagcaattctaccagcaagaatcagcaaaactgcgcaaccagatccagatgctgcaaaacactaacaggcacttggttggtgattccgtgggaaacctgtcactcaaggagctgaagcagctggagagccgccttgagaaaggcatctctaagatcagggccaggaagagtgagctgctggctgcggagatcagttacatggccaaaagggagactgagcttcagaatgaccacatgaccctcaggaccaagattgaggagggagagcaacagctgcagcaggtgaccgtggcacggtcagttgcagcagcagcagcagctgccaccaacttggagctgaacccattcttagagatggataccaaatgcttcttcactggcggccccttcgcaacgctggacatgaagtgctttctccccggcagcttgcagcagatgctggaggcacagcagcgccagatgctcgccaccgagctgaacctcggctaccaactggcgccgcctggttctgacgctgccgacaataaccctcatcatcagttctaaactggatgcatgcacgagaagcttttcaagcgaactgtgaacgatggaagctggctgttgcctctagatgttcttggcttccatgacctagcttattatggtgtgtattgttgttgccttttgtgtgtgattctccttgctactctactgatggagaactaaacctaatcgattggacataatgatcaaatgctacagatcctgtgatgctgtgatcaggttaaggcaaaacatgtatactgattgcttaaatgggtttacgagtgacgacaatgctatttgttgcttctattactgctcaa

SEQ ID NO: 115492 - DNA, 1347 bp, Zea Mays
gcctcttgctttatgataattcaacttgcgctgattatattcttggctacctagaaatgtctaattaaactttgtttgctagctagattttgttgcttcctttcgcatctgatctttttatctcttctgagtgctccgcaaagccttccagtgttgaagaagctgctggaagaacgaagagatgagctttctcttgaaggaaaaagagatgatcattgctgctggtatcgccagcatgggtaggggaaggattgagatcaagaggatcgagaacaacacgagccggcaggtcaccttctgcaagcgccgcaatgggctcctcaagaaggcgtatgagctctccgtcctctgcgacgctgaggtggccctcatcgtcttctctagccgtggtcgcctctacgagtatgccaacaacagtgtcaaggctactattgagaggtacaagaaggcacacaccgttggctcttcctctgggccaccgctcctagagcacaatgcccagcaattctaccagcaagaatcagcaaaactgcgcaaccagatccagatgctgcaaaacactaacaggcacttggttggtgattccgtgggaaacctgtcactcaaggagctgaagcagctggagagccgccttgagaaaggcatctctaagatcagggccaggaagagtgagctgctggctgcggagatcagttacatggccaaaagggagactgagcttcagaatgaccacatgaccctcaggaccaagattgaggagggagagcaacagctgcagcaggtgaccgtggcacggtcagttgcagcagcagcagcagctgccaccaacttggagctgaacccattcttagagatggataccaaatgcttcttcactggcggccccttcgcaacgctggacatgaagtgctttctccccggcagcttgcagcagatgctggaggcacagcagcgccagatgctcgccaccgagctgaacctcggctaccaactggcgccgcctggttctgacgctgccgacaataaccctcatcatcagttctaaactggatgcatgcacgagaagcttttcaagcgaactgtgaacgatggaagctggctgttgcctctagatgttcttggcttccatgacctagcttattatggtgtgtattgttgttgccttttgtgtgtgattctccttgctactctactgatggagaactaaacctaatcgattggacataatgatcaaatgctacagatcctgtgatgctgtgatcaggttaaggcaaaacatgtatactgattgcttaaatgggtttacgagtgacgacaatgctatttgttgcttctattactgctcaa

SEQ ID NO: 115493 - DNA, 2087 bp, Zea Mays
ctttctatatgtatgtatctgggctgtcttcccctgcgtctcgttactgctaagctttggaaggtttcaactctttgtatacgatgaggtttctgctcctagtagcagatccgcgcatatgactagatgtttgaggaaaagaaaagggcaagacgctatatatatatgcagcacgcagtcgcacatatattcagttttccaatctgcctcttgctttatgataattcaacttgcgctgattatattcttggctacctagaaatgtctaattaaactttgtttgctagctagattttgttgcttcctttcgcatctgatctttttatctcttctgagtgctccgcaaagccttccagtgttgaagaagctgctggaagaacgaagagatgagctttctcttgaaggaaaaagagatgatcattgctggtttgttgttgtttcgtgtttttttagcttcttgtcccccatttatatttcgcgcctaatgaacgagctcgtagatcttgtgttcttgtggctggttttgttggatctcgatctcggttacgtttacatgagtctactcttgcctaacatacatctgtgttctttttctaggctgagagaaacttaactgatcgagtctgcctggcaggcatcgatctatccagtcgtcagttcgtcacatccgctttttcgtatatatcatcttcagattttaattgtccatctgtcaaatcatggaaaatctgtcgtctttgcttgtattctcttctgtcattcctgctgcctccggcggatcaattcttgaatcgacccgtgttcctattcccttttgttagacagcccaaatcgcttgctcgatcgtagtgtactgtactactgcggctagctagatcttccaagctagctagttcgtcggtccctttgatctgctccacttgaactcttttgcgcttatgagaaaacttgctgctttcagctggtatcgccagcatgggtaggggaaggattgagatcaagaggatcgagaacaacacgagccggcaggtcaccttctgcaagcgccgcaatgggctcctcaagaaggcgtatgagctctccgtcctctgcgacgctgaggtggccctcatcgtcttctctagccgtggtcgcctctacgagtatgccaacaacagtgtcaaggctactattgagaggtacaagaaggcacacaccgttggctcttcctctgggccaccgctcctagagcacaatgcccagcaattctaccagcaagaatcagcaaaactgcgcaaccagatccagatgctgcaaaacactaacaggcacttggttggtgattccgtgggaaacctgtcactcaaggagctgaagcagctggagagccgccttgagaaaggcatctctaagatcagggccaggaagagtgagctgctggctgcggagatcagttacatggccaaaagggagactgagcttcagaatgaccacatgaccctcaggaccaagattgaggagggagagcaacagctgcagcaggtgaccgtggcacggtcagttgcagcagcagcagcagctgccaccaacttggagctgaacccattcttagagatggataccaaatgcttcttcactggcggccccttcgcaacgctggacatgaagtgctttctccccggcagcttgcagcagatgctggaggcacagcagcgccagatgctcgccaccgagctgaacctcggctaccaactggcgccgcctggttctgacgctgccgacaataaccctcatcatcagttctaaactggatgcatgcacgagaagcttttcaagcgaactgtgaacgatggaagctggctgttgcctctagatgttcttggcttccatgacctagcttattatggtgtgtattgttgttgccttttgtgtgtgattctccttgctactctactgatggagaactaaacctaatcgattggacataatgatcaaatgctacagatcctgtgatgctgtgatcaggttaaggcaaaacatgtatactgattgcttaaatgggtttacgagtgacgacaatgctatttgttgcttctattactgctcaa

SEQ ID NO: 115494 - DNA, 1368 bp, Zea Mays
gtcatcagtagtagtggccttttgcccttgcccctctctctcacctctcttttctcagccttgcttccgatggatcccatcccactgccatcctttctttcccttgcgcgcattgcctagccggccggccggcctgctattaaaccactttacccgccccctctcgctcacgctcgacgcagctcccttttccttgtttgcttattgcaagtctctgcaagaacctgctagagaggaacaagctggtatcgccagcatgggtaggggaaggattgagatcaagaggatcgagaacaacacgagccggcaggtcaccttctgcaagcgccgcaatgggctcctcaagaaggcgtatgagctctccgtcctctgcgacgctgaggtggccctcatcgtcttctctagccgtggtcgcctctacgagtatgccaacaacagtgtcaaggctactattgagaggtacaagaaggcacacaccgttggctcttcctctgggccaccgctcctagagcacaatgcccagcaattctaccagcaagaatcagcaaaactgcgcaaccagatccagatgctgcaaaacactaacaggcacttggttggtgattccgtgggaaacctgtcactcaaggagctgaagcagctggagagccgccttgagaaaggcatctctaagatcagggccaggaagagtgagctgctggctgcggagatcagttacatggccaaaagggagactgagcttcagaatgaccacatgaccctcaggaccaagattgaggagggagagcaacagctgcagcaggtgaccgtggcacggtcagttgcagcagcagcagcagctgccaccaacttggagctgaacccattcttagagatggataccaaatgcttcttcactggcggccccttcgcaacgctggacatgaagtgctttctccccggcagcttgcagcagatgctggaggcacagcagcgccagatgctcgccaccgagctgaacctcggctaccaactggcgccgcctggttctgacgctgccgacaataaccctcatcatcagttctaaactggatgcatgcacgagaagcttttcaagcgaactgtgaacgatggaagctggctgttgcctctagatgttcttggcttccatgacctagcttattatggtgtgtattgttgttgccttttgtgtgtgattctccttgctactctactgatggagaactaaacctaatcgattggacataatgatcaaatgctacagatcctgtgatgctgtgatcaggttaaggcaaaacatgtatactgattgcttaaatgggtttacgagtgacgacaatgctatttgttgcttctattactgctcaa

SEQ ID NO: 115495 - DNA, 465 bp, Zea Mays
atggaggatgagtactgcgcccactcaccggattcatctcccggcgatgaaagtgagccaccccttccttgcctccccacggtttctcctgtggaaagagtggatctaccggctccgagctcggatttgtcggatccccaagtttttatgtttggggatgaacatagaatggaggttttagaaattgattggggggcaatacagattgatgatagatgggaagaaaaaggagaacaagagattgcctctgagtcagtgatgtatgatcggttaggattgctagcagaagatgaacgtgaaactactgaaaggcaagatgcttttaccagtagaccatttggtgtccgccgaagcgatgaatttgatgatgaaacagctgcattgccctgcaccgattgcataccacaagaaagggtgaagctgaacggtttgcacccaagaactgaaaagagcaaaatattatga

SEQ ID NO: 115496 - DNA, 538 bp, Zea Mays
catgccaacaaaatgcaagaacattacttatttctctggtggcaatacattagaacaacatttgtgcaatatgctataacaatgagaagcgcatagtaaagaaattttccaaacacaaaataatctcccgtgccatggcttgcataagtccacggcaataacatctgctattggagcattcaagtggaccaacactcgcggtacaagcgttaaacaacttggtagttagcagtgagcaaacgagcccgctgagaaaacttgggagggttgccttccttcagaggaagaattccaccaaccttcagatcactgaaagtactcgatgcagaaaatccaacggagatggggaaaaacgatgatgggtcagctgggggaacaacaaattccatggaaccactgcaaacggcacagatggaaatagtcaatctacaagattggatgacagtcaaaagctaaacagtcgaatatttcagacctgcgattcgactgatcgataaggagaatagaccattccaacacagagtttcttgagtcgaac

SEQ ID NO: 115497 - DNA, 1677 bp, Zea Mays
ataaacgaacaacaaacttgttattccttatttacttcatattttttatcaattggtgaatgtatcaatagtcggtgagagtgttgcttgcttgatattatagtttttactagcgttatatatgtggtggatggataacttagtgcaaggtcacttaattatacaacttattatttgtatttcattctctctactaataatttttatactaaatcatgaactcgttgttcattacatagattttggatcatgatatcattaatcattatgatacttattgattatgagaagaacaagtatattggagatgaaacccgcgggtaacccatgggtacccgttaacccgatgggtacgggtttgggcaaaatctcaaacccgtcatgggtacgggttttttaatgggcatagatatttttcacgggtacgggtttgggacggtaaaacccagcgggtttgtacccgttgccatctctaggaaggatggatggggcaaggacacgcaaagaccttggtgaggtgccaattactaagtatgaaaaggagagggctttaaatgtgatgaggaacaacaaaatgttgagtagccttggtataactggattaacatcacttattcgatcaagtagtacaaggaagaactctatcgctcgtgaagactttgatccattgtatgaacctgatcatagtgaggacaatgatcatcatgtggctgatcaggccatgcaggatgaacctttctacattgaaagaaggaccaccaacatgtctactggttttggaggaacaaaaggatccaagagagtggtagcacctaatgtagaagaccaagttggtagagtaactaggcagaagacaaaggaactatccttagttgagaaagatatacatggtcaaatagatgtcatgacagataaatggataagggggaaaagtatgggcaaacaattggaaaggataagtcaaggcttaaacactaagatcccattggtcatcaccgaagggaatagacgtcctaaggttcctatgcaagctgcaatgcttgcatcagaaggaggaattgtaattaggcaacatatgccgatcctaacacactcgaaggaatacaagaatgacaaatcctatttggaagactttgtcggtagaattggtggtcaatttgccatagacaccaaaaaccaagatgtcaaatatgcatgtgctgatttgatgaggtgtaatcagcgacaaatgagatataagctcaagaaggcttactttaatggtgtggcagttgacaaagtgagaacaacatcaccgttgagtactatgacagatgagcaatggatgcaactagtcaatatgtggtctaccccaaagcacaaggacaaatgtgtgaacaacaaagtgattcgtggaaaagttcggttccagcaaaagacaggatctcggagttacattgcacatatgcatgccaagcaagccaaatatggagatgcaccaccaagtgcgattgatctttttaaagagtgccattgtagtaggaagactggttttgctgagcctgtaaaggaagcaattgacacaatggaagcacttgtggctgagcctggagtagaagggaaagaatctaagacccctacagaagcagttgctcaagtgttgtcttcatcaaaatttctttataatattggtcttgt

SEQ ID NO: 115498 - DNA, 743 bp, Zea Mays
aaagagaagcacttggagtatgaggaagagatgaagcaccaggaggaattttttcatagtcaaattgagggtattcacaaggccacagaggataaagaaaaacgatttgagaagttgctgcaggaggagcgctcaaaggctagacgctttgatgttgattctggaactaccgaagaagatcgtaagctaaggaaggaacatgtacagaagttcattgattgccaggtcaagaatgtggcagagtttgaagctgagcgggatgagctgatcaaaggccacgaggagaagaagatgaagctcaagaaacaatacatggagaaggagctggagctggagagggatcacgacgcagccctgacggccctgatggagaagcataagccagatacttttgaggcctccagctcgtgaataggcttcagcgagatattcaatagatgttgctaaaacatggtgtctgttgtggtagtgtgcgtgatatggagacatgacatgaccaacaccgcgttatatgatcgtactgtgtggttcgagcatctgaacactgagcgtattgcctgtgaggctgtgatggcatatggggtcaaaccacagcttcgattttgccctctaagccatctctatagactgctgtctatagagtaaagagtttgtaacatgaagtgagatagggaagccatctctagcagtttactcatactcatattcaaacttcattctatgagcagtgcggtctacagtgc

SEQ ID NO: 115499 - DNA, 492 bp, Zea Mays
atggccagcagctactactccctcatgctgctcctgctgctggcggccacggccgtagcagaagaagcagccgccgaggcgtccggaggcggcggcaacgcgaccgagacgtcgccgacggcgtacgagatgctggagcggtacggcttcccgcggggcatcctgccggcgggcgtgacagggtacgagctcggcgcggacggcgccttcgaggtgtacttcccgcgggcctgcgagttcctgctggcgaggacgtggctggtccgctacgaggcgcgcgtgtccgggtccgtcgccgccggctcgctcacggcgctgcgggggatcagcgtgaaggtgctgttcctgtggctcggcgtcggcgaggtggaccgcgccggggagacgctcagcttctacatcggccccgtcgccacgtcgttcccgatcgacgacttcgccgagagcccgcgctgccgcggctatgatgccgaggcggcggcctcgtcgtga

SEQ ID NO: 115500 - DNA, 2493 bp, Zea Mays
ggagcaagaacacccagcccactgcccacgccgtgctggaagtggtccgtgctccggcagcggcggcgggaggaagagggaagcgaggggatggcgcagccgagcaaggagccgtgcaagaaggaggcgtgcgacatccaggcctgcctctccaagaacatgttcgactccaggaagtgtgtgagagttattcagttacttcagtcatgttgtgagcagtgtgagtacaaatcaacacactgtggttccttgtccggattactcaagaacatttctaagtgaggaacaataccgacatactttactgcagccattgaataaaagtttcttttaggttagtttagtactttatggggctcacggcaatctctcttacggatcaaggtatcgtataatatggcagttcatgttcatgtttcgttgttttactggtcaccttaacctaccgtaccaggttccagtttcgatgctatttaagaatgtttcttcttcaaacatgattcgcggggcttcaataatgcagacacccctcaacctgcagaatgatgctctggtcgctgagttgtatggtaccgagtggaaacagcaaagtggtttgttaatgatcgattttaatgcctgtatacctatggtatccttcgtagttcgtgtgctcttctacacatgtaaccccatgttcccgtcttgaaccgcaaaataagtgaaccccatgcacatggagatattttggtgaccccaaagttgtgtataccatttcattgctttaccctaccatgttctgtggcaagagaatcaaatctggataaacatctgggatgataatttatctcttgggcaagaacttgtgatgtaagatatgattcaaataaacaactttgtggggtcatttcagtatcacagttggcaaaaaaaaatggcaggtccaggtttctgggaaataccagttgaagcaattcagtttttgtgttgtactgccacgtacatgcgttgtctaagccaacaaaccttttggcttttgcttgtgaaatgaaacttgtgtgttctgtgtgatgcaatacctaccactagcaggcaagtgtataagctggtatgcatgcgatggcttgaagctgacacgctcagtacattctctacaactaattcttgttgtctacttgggaccaaccagttggttggtgtgtcgtctaccgccacggctgcactccacatgtcccttctttatcatgttgctcatcttcgatagatgtcatgattcagtgaattaagcatttatatttgagaaaggggaccggttttatgaataaaaaaaatgacaggattgtatatttgtatacgcaaaccgctttaattcttctttagacgggctagcgacatctaaacggccgaaagcagcagcagaaaaaggtgtgactaggagtccatattttgaatttgggaaatgcggatcctccccccttttttttgtcattttcgcaactgtagcagagtcagatattcttaatttgtgcacagttcactacttcactctaacagttgtgtcttcacttgagctgatgatgttgagttggagttgagcagattacacagcacgctttgcaaggcggcattctaacgagttgtgtagctttggaaaaagctaaggaacttgacaaaggatgcaaaaatgtgactgattttacaaataatattgttcaatgcagaattctggtagctgccctccctgatttcagtaacatgttgcagctcgtcaaagtttaagcaaaacccaaggcataaccagactctcgacagtgactcaggtacacaagagaaacttgtaagagaaatagaacatgaaacagcaagttcttggtcctgtgctaccgagacgagagaagcatgcgtgtattgatcacctccgtatatacacctgacacatcatcatgcactactcatcaaaggcttgattttttttcagctgcgtcagatgggcggcgccttccgcgacggggcggcgccggacttgtgcgccaggaagagcttcttgagcagcctgagcatcatgaggaggcccatcctccgccggcggacgacggcgtgcttgcgcgtctccaaggcgccgtcgagccagggctccctcgcggccgcccacgacggcgtccccctggtgagcgggcagggctgcgcggcccgtgcgagctcctcgttgaagtcctcccacagcatgtccatcttgtcctccaccgcgaacctcgccgagccgtggcggccacccagctgctgctggtcgccgcccgcggcttgctgctccacggccgagacgctcctccggtggtcgtgctcgtgcactgccgccgtgccaacaacgccgccgggaacgagcagccacggcgacgcggaggcggagaagtcggcgttgcattgctcgagtgggaagctggggaatgcgaactcttccattgcaaatctctttctctctctctaggtctgagctgtgagctctgactctattgt

SEQ ID NO: 115501 - DNA, 1961 bp, Zea Mays
ggagcaagaacacccagcccactgcccacgccgtgctggaagtggtccgtgctccggcagcggcggcgggaggaagagggaagcgaggggatggcgcagccgagcaaggagccgtgcaagaaggaggcgtgcgacatccaggcctgcctctccaagaacatgttcgactccaggaagtgtgtgagagttattcagttacttcagtcatgttgtgagcagtgtgagtacaaatcaacacactgtggttccttgtccggattactcaagaacatttctaagtgaggaacaataccgacatactttactgcagccattgaataaaagtttcttttaggttagtttagtactttatggggctcacggcaatctctcttacggatcaaggtatcgtataatatggcagttcatgttcatgtttcgttgttttactggtcaccttaacctaccgtaccaggttccagtttcgatgctatttaagaatgtttcttcttcaaacatgattcgcggggcttcaataatgcagacacccctcaacctgcagaatgatgctctggtcgctgagttgtatggtaccgagtggaaacagcaaagtggtttgttaatgatcgattttaatgcctgtatacctatggtatccttcgtagttcgtgtgctcttctacacatgtaaccccatgttcccgtcttgaaccgcaaaataagtgaaccccatgcacatggagatattttggtgaccccaaagttgtgtataccatttcattgctttaccctaccatgttctgtggcaagagaatcaaatctggataaacatctgggatgataatttatctcttgggcaagaacttgtgatgtaagatatgattcaaataaacaactttgtggggtcatttcagtatcacagttggcaaaaaaaaatggcaggtccaggtttctgggaaataccagttgaagcaattcagtttttgtgttgtactgccacgtacatgcgttgtctaagccaacaaaccttttggcttttgcttgtgaaatgaaacttgtgtgttctgtgtgatgcaatacctaccactagcaggcaagtgtataagctggtatgcatgcgatggcttgaagctgacacgctcagtacattctctacaactaattcttgttgtctacttgggaccaaccagttggttggtgtgtcgtctaccgccacggctgcactccacatgtcccttctttatcatgttgctcatcttcgatagatgtcatgattcagtgaattaagcatttatatttgagaaaggggaccggttttatgaataaaaaaaatgacaggattgtatatttgtatacgcaaaccgctttaattcttctttagacgggctagcgacatctaaacggccgaaagcagcagcagaaaaaggtgtgactaggagtccatattttgaatttgggaaatgcggatcctccccccttttttttgtcattttcgcaactgtagcagagtcagatattcttaatttgtgcacagttcactacttcactctaacagttgtgtcttcacttgagctgatgatgttgagttggagttgagcagattacacagcacgctttgcaaggcggcattctaacgagttgtgtagctttggaaaaagctaaggaacttgacaaaggatgcaaaaatgtgactgattttacaaataatattgttcaatgcagaattctggtagctgccctccctgatttcagtaacatgttgcagctcgtcaaagtttaagcaaaacccaaggcataaccagactctcgacagtgactcagctgcgtcagatgggcggcgccttccgcgacggggcggcgccggacttgtgcgccaggaagagcttcttgagcagcctgagcatcatgaggaggcccatcctccgccggcggacgacggcgtgcttgcgcgtctccaaggcgccgtcgagccagggctccctc

SEQ ID NO: 115502 - DNA, 1683 bp, Zea Mays
ggagcaagaacacccagcccactgcccacgccgtgctggaagtggtccgtgctccggcagcggcggcgggaggaagagggaagcgaggggatggcgcagccgagcaaggagccgtgcaagaaggaggcgtgcgacatccaggcctgcctctccaagaacatgttcgactccaggaagtgtgtgagagttattcagttacttcagtcatgttgtgagcagtgtgagtacaaatcaacacactgtggttccttgtccggattactcaagaacatttctaagtgaggaacaataccgacatactttactgcagccattgaataaaagtaagtttccgatacatttaggaattctgtggttactacagtttgtttctgtttctacattttctcactggaaattttaaaaccgagtttcattcttgtgttaaggtttctaactcctagttttatgcaaataacatcataatagactatgatgaatttgagttatctattctggtaaaaggttatcatattttatcttcatcctgagagcacccatttttatcactgtttgtgtatggtttacacttaatatactaagttcagcactattagctattccgatccaagcataattcattaatatttcttctgcgaaacttcgacaacattatttgttttgatatccctgagccttgaaaaccaccaaagcttattggtttatatgagcgaatggtcacactgaaagctaagatagcttgaaggagaatttgacacttcctttgacgagatcctatctgtcaattcatctagatggtcagattttgcaagcagaatcatgcgctacctgttattagataactgcattgttaagttgaccatatactgccatgtgcagccaagggtagcagtagctgagcgaatcccacttgctcttctctatgcatgattgagaagaatatcaggaaaaatgttctctctgtgaggtccaaatgcggatgacttctttttgctatacataaagttctgaagttttgtgatgctttgttataagcaccgattttctgattcatatagaggttgattttgaaatacagttgacagagaattgcttttacaggtttcttttaggttagtttagtactttatggggctcacggcaatctctcttacggatcaaggtatcgtataatatggcagttcatgttcatgtttcgttgttttactggtcaccttaacctaccgtaccaggttccagtttcgatgctatttaagaatgtttcttcttcaaacatgattcgcggggcttcaataatgcagacacccctcaacctgcagaatgatgctctggtcgctgagttgtatggtaccgagtggaaacagcaaagtggtttgttaatgatcgattttaatgcctgtatacctatggtatccttcgtagttcgtgtgctcttctacacatgtaaccccatgttcccgtcttgaaccgcaaaataagtgaaccccatgcacatggagatattttggtgaccccaaagttgtgtataccatttcattgctttaccctaccatgttctgtggcaagagaatcaaatctggataaacatctgggatgataatttatctcttgggcaagaacttgtgatgtaagatatgattcaaataaacaactttgtggggtcatttcagtatcacagttggc

SEQ ID NO: 115503 - DNA, 594 bp, Zea Mays
ggagcaagaacacccagcccactgcccacgccgtgctggaagtggtccgtgctccggcagcggcggcgggaggaagagggaagcgaggggatggcgcagccgagcaaggagccgtgcaagaaggaggcgtgcgacatccaggcctgcctctccaagaacatgttcgactccaggaagtgtgtgagagttattcagttacttcagtcatgttgtgagcagtgtgagtacaaatcaacacactgtggttccttgtccggattactcaagaacatttctaagtgaggaacaataccgacatactttactgcagccattgaataaaagtttcttttaggttagtttagtactttatggggctcacggcaatctctcttacggatcaagacacccctcaacctgcagaatgatgctctggtcgctgagttgtatggtaccgagtggaaacagcaaagtggtttgttaatgatcgattttaatgcctgtatacctatggtatccttcgtagttcgtgtgctcttctacacatgtaaccccatgttcccgtcttgaaccgcaaaataagtgaaccccatgcacatggagatattttggtga

SEQ ID NO: 115504 - DNA, 116 bp, Zea Mays
aatagatcgttttcttctttagtaactctaccaacgtctatagtcatagtgatcctcctattcaattacttcaaccattttcgagcatctcatattacttccagggcatacgatag

SEQ ID NO: 115505 - DNA, 992 bp, Zea Mays
aaaacacctcatccacacgcagagacgaaggccctgcccacctcacgttgctgctcccaaatatctggcagggaaacaaatcctatcccctcctacgccccggccattcactcacccacctagctagtcatcactagtcacgttcgtccaccagagacaacaatggccatggagacgtgcttcagagcgtgggcgctgcacgcccccgctgggcagcaaaggacaggctcctcgtcggcaacctggtgctgccgtcgaagcgggcgctcgcgccgctgtccgtgggcccgcgtcgccacgcgccggccgcggcacgtctgccagtccaagaacgcagtggacgaaagttgtggtggcggacgagaagaactgggacgggttggtgatggcgtgcgagacgccggtgctggtggagttctgggcgccgtggtgcgggccgtgccggatgatcgcgccggtgatcgacgagctggccaaggactacgccggcaagatcacgtgctgcaaggtgaacacggacgacagccccaacgtggcgtctacctacggcatccgcagcatccccaccgtgctcatcttcaagggcggcgagaagaaggagagcgtcatcggcgccgtcccgaagtccacgctcaccaccctcatcgacaagtacatcggtagttcatgagcatgccatgccatgccatgcatacatgcatcgacgactaaacacatatgtgtatctctagtagcctttgcatacgggatatgatcaattcaagcagccagccgtctgctactgctgtgttatatataccatacctccatgtcgaatccagagtacattaattagtttcagttcacgatttcgattcagtatatatatatatatatatatatatatatatatatatatatatatatatattaatgcatctgtgtgtattaattcatctgtgtacatattaattaatactagtgaacattcatcagaaaagaaaagaaaaaca

SEQ ID NO: 115506 - DNA, 98 bp, Zea Mays
cgcctataagaatggagagggagggctcttccagttgcgcgaattatctcaggcgaattgcaaacaacacattcccgtcccatcttctgcgagcacag

SEQ ID NO: 115507 - DNA, 447 bp, Zea Mays
gcgaatgacgacgaagcgagagaattgcgcgagttcggataaaggaagcgcgtcgagcacgatggcttgctgggcgtgaggaacggcaaggcaggcggctaacggcttcccgatgacaccgcaagcacgacgaggttggtggagaggttgtgcgtcgtggaaatcgatggcacgaaggagctgccgggttgaacgtggccgacgaggaggcggcaacgacgagcacgctgtagctcacggcatggacggggaacgacagcgagtacaacgagcaaggttccacggcgagcgtcggtgaggttgaggcgcacgcacgtctagcggcgtgaccgagcccgtccgcagcagggacggcagcgttcggatgctggagaccagggcgtgcgggcgacaaagatgtaggagcaggatgccgatgcggcaacgccagtgcttggacagggtcga

SEQ ID NO: 115508 - DNA, 1149 bp, Zea Mays
aactgcctccgcagcatggatccagcaaacgaacagaagagaagtctccagcaggcagcagcccatcgtcccacaccaagaacaaccagagaggcaagcaggggagaatcgcggaggtctgggaaacaccatcctgcagagatgacagtgctgctctccccgagctcctccctgttcctcgccaaaccttctgccgtcgccaagggcagggcggcggctgtgacgtgcttcagcgggccctccctgtcagtggggcgtgaagatcaggagggtgtagcagtggtggtggggaggcgtgcgttggcttccgcagcagctgtcgcctcagtgcttgggtttgcaggccgtggtctggcggccaaccagggcctgctcgccgggagggtccccggcttgtctgaacctgacgaaaatggttggagaacgtaccgcaggccagacgacaagtccggtggccacggagttggctggagccccatcatcccgtacagcttcaaagttccagacggctgggatgaggtcccggtgtccattgctgatctgggcggcacggagatcgacctgcgcttcgcaaaccccaaggaaggccggctgttcgtcatcgtggccccagttcgccggttcgcagatgacctggacgacgcgaccatcgagaagatcggcagcccggagaaggtgatcaccgccttcggtccggaggtcatcggagagaacgtggaagggaaggtcctgtcctcggagacggcggcgcattcgggaagaacttactaccagttcgagctggagccgccccatgtgttcatcaccgccacggcagctgggaacaggctctacctcttcagtgtaactgcaaacggtctgcagtggaagaggcattacaaagacctcaaacagatagcacaatcatttcgagtcgtgtagggttccaattcctactactactttttttttacagcgcctggctcttgttgatatgattagaggacatgggagacggtaatacggagagaggacaagtgagcatcgcttctgatgaccactctaactctgtaaggttacaaagctgcagcagcagttcaacagcttgtgtaaacctgctcgctaaggctaaatgcttttactatattttttttccccctgatgttgcct

SEQ ID NO: 115509 - DNA, 2036 bp, Zea Mays
gaaaaaaagtttcactcctccatccccattcccgaagtcataaacctccactcgcggacttgccatgacgtccgtaccgctaccacccctctccgccgccctcgcccaatatcgcccctccgcggccgccacccttcgcttccgcaccccctcttccgcgcccggcgtttcggcttcttcgtctacccgggcgcgcaggttctcggttatcgcgtcggcgcgcgagatgccgtggccgcacgtgctgacggtggccggctccgactccagcgccggcgcgggcatccaggcggacatcaaggcgtgcgcggccctaggagcctactgctcctccgtaatcactgctgtcaccgcgcagaacaccgtcggcgtccaggggatccatgctgtgccggagaagttcgtgggagagcagctcaggtcggttctctcggacatgtcggtggacgtggtgaaaacagggatgctcccttcagctggagtagtcaaagttctgtgtgagagtcttaggaagtttccagtcaaagctctagtggtggatccggtcatggtgtccaccagcggtgatactctttcaggaccatctactctcgctacatatagggatgaactattttctatggctgatatagtcactcccaaatgtgaaagaagcatctaagttacttggtgatgtatcattgcatacaatttctgacatgtgcaatgcagctgaatccatttataaacttggtcccaaatatgtgcttgtgaaaggcggggatatgccagattcatcagatgcaattgatgtgttatttgatggtaaggagttcactgagcttcgtggtctgcgtataaagacccgtaacacacatggaactggttgcacattagcttcatgtattgctgctgaattagcaaaaggcgcaacgatgctgcatgctgtccaggctgcgaagaaatttgtggaatctgctctttatcacagcaaagatcttgtgattggaaatggacctcagggcccttttgaccaccacttcgagctcaagtctccatcatacaagatgggatcactgcaaaagttcaatccagatgacctcttcctgtacgcagtgacagactctgggatgaacaagaagtggggtcgttcgataaaagatgccgtgaaagctgccattgaaggtggcgctaccattgtccaactgaggttatctttcttgaaaacgaccaaagttcctctagtgattcagtctgtcttcattcgatttcgttgaccgtgctttgagtgtccaatgttcagagaaaaagacgccgagacacgggagttcttggaagctgccaaggcctgtgtggaaatctgcaagtccagtggagtgccgctactgatcaatgaccgcgtagatgttgctctggcatgcgacgcagatggcgtccacgttggccaatcagacatgccagcatgggaagtacgacggctcctaggacctggaaaaatcatcggcgtctcatgtaaaaccccggcccaggccgagcaggcatggaaggatggcgcagactacatcggctgtggcggtgtcttcccgaccacgacgaaggcaaacaaccctaccttagggttcgagggcttgaggactgtgtgcttagcttcgaagctacctgtggtggccatcggcggcatcaatgctggaaatgcaggctcggtgatggagcttgggctcccaaatctgaaaggtgtggctgtggtctctgctctgtttgaccgggaacgtgtcgcggctgagacaagaaacctcagatccatcctgatgaagaatgcttactcaaggtcttagagcaagttgggatatgccgcctgttcatttactttctttgtttaggcccgaaataagtttgtaatcaatcactttgtcataaggagaaaccaaacaggcgctgcaatcttcaataaaccggagtcattatttctctggaaaagaacaattctgtgacatttccgaagtgtgatacatttcaaaggcactgaactgtgtaataagaaatcaataatgtaccag

SEQ ID NO: 115510 - DNA, 1869 bp, Zea Mays
gaaaaaaagtttcactcctccatccccattcccgaagtcataaacctccactcgcggacttgccatgacgtccgtaccgctaccacccctctccgccgccctcgcccaatatcgcccctccgcggccgccacccttcgcttccgcaccccctcttccgcgcccggcgtttcggcttcttcgtctacccgggcgcgcaggttctcggttatcgcgtcggcgcgcgagatgccgtggccgcacgtgctgacggtggccggctccgactccagcgccggcgcgggcatccaggcggacatcaaggcgtgcgcggccctaggagcctactgctcctccgtaatcactgctgtcaccgcgcagaacaccgtcggcgtccaggggatccatgctgtgccggagaagttcgtgggagagcagctcaggtcggttctctcggacatgtcggtggacgtggtgaaaacagggatgctcccttcagctggagtagtcaaagttctgtgtgagagtcttaggaagtttccagtcaaagctctagtggtggatccggtcatggtgtccaccagcggtgatactctttcaggaccatctactctcgctacatatagggatgaactattttctatggctgatatagtcactcccaaatgtgaaagaagcatctaagttacttggtgatgtatcattgcatacaatttctgacatgtgcaatgcagctgaatccatttataaacttggtcccaaatatgtgcttgtgaaaggcggggatatgccagattcatcagatgcaattgatgtgttatttgatggtaaggagttcactgagcttcgtggtctgcgtataaagacccgtaacacacatggaactggttgcacattagcttcatgtattgctgctgaattagcaaaaggcgcaacgatgctgcatgctgtccaggctgcgaagaaatttgtggaatctgctctttatcacagcaaagatcttgtgattggaaatggacctcagggcccttttgaccaccacttcgagctcaagtctccatcatacaagatgggatcactgcaaaagttcaatccagatgacctcttcctgtacgcagtgacagactctgggatgaacaagaagtggggtcgttcgataaaagatgccgtgaaagctgccattgaaggtggcgctaccattgtccaactgagagaaaaagacgccgagacacgggagttcttggaagctgccaaggcctgtgtggaaatctgcaagtccagtggagtgccgctactgatcaatgaccgcgtagatgttgctctggcatgcgacgcagatggcgtccacgttggccaatcagacatgccagcatgggaagtacgacggctcctaggacctggaaaaatcatcggcgtctcatgtaaaaccccggcccaggccgagcaggcatggaaggatggcgcagactacatcggctgtggcggtgtcttcccgaccacgacgaaggcaaacaaccctaccttagggttcgagggcttgaggactgtgtgcttagcttcgaagctacctgtggtggccatcggcggcatcaatgctggaaatgcaggctcggtgatggagcttgggctcccaaatctgaaaggtgtggctgtggtctctgctctgtttgaccgggaacgtgtcgcggctgagacaagaaacctcagatccatcctgatgaagaatgcttactcaaggtcttagagcaagttgggatatgccgcctgttcatttactttctttgtttaggcccgaaataagtttgtaatcaatcactttgtcataaggagaaaccaaacaggcgctgcaatcttcaataaaccggagtcattatttctctggaaaagaacaa

SEQ ID NO: 115511 - DNA, 1873 bp, Zea Mays
gaaaaaaagtttcactcctccatccccattcccgaagtcataaacctccactcgcggacttgccatgacgtccgtaccgctaccacccctctccgccgccctcgcccaatatcgcccctccgcggccgccacccttcgcttccgcaccccctcttccgcgcccggcgtttcggcttcttcgtctacccgggcgcgcaggttctcggttatcgcgtcggcgcgcgagatgccgtggccgcacgtgctgacggtggccggctccgactccagcgccggcgcgggcatccaggcggacatcaaggcgtgcgcggccctaggagcctactgctcctccgtaatcactgctgtcaccgcgcagaacaccgtcggcgtccaggggatccatgctgtgccggagaagttcgtgggagagcagctcaggtcggttctctcggacatgtcggtggacgtggtgaaaacagggatgctcccttcagctggagtagtcaaagttctgtgtgagagtcttaggaagtttccagtcaaaggcagctctagtggtggatccggtcatggtgtccaccagcggtgatactctttcaggaccatctactctcgctacatatagggatgaactattttctatggctgatatagtcactcccaaatgtgaaagaagcatctaagttacttggtgatgtatcattgcatacaatttctgacatgtgcaatgcagctgaatccatttataaacttggtcccaaatatgtgcttgtgaaaggcggggatatgccagattcatcagatgcaattgatgtgttatttgatggtaaggagttcactgagcttcgtggtctgcgtataaagacccgtaacacacatggaactggttgcacattagcttcatgtattgctgctgaattagcaaaaggcgcaacgatgctgcatgctgtccaggctgcgaagaaatttgtggaatctgctctttatcacagcaaagatcttgtgattggaaatggacctcagggcccttttgaccaccacttcgagctcaagtctccatcatacaagatgggatcactgcaaaagttcaatccagatgacctcttcctgtacgcagtgacagactctgggatgaacaagaagtggggtcgttcgataaaagatgccgtgaaagctgccattgaaggtggcgctaccattgtccaactgagagaaaaagacgccgagacacgggagttcttggaagctgccaaggcctgtgtggaaatctgcaagtccagtggagtgccgctactgatcaatgaccgcgtagatgttgctctggcatgcgacgcagatggcgtccacgttggccaatcagacatgccagcatgggaagtacgacggctcctaggacctggaaaaatcatcggcgtctcatgtaaaaccccggcccaggccgagcaggcatggaaggatggcgcagactacatcggctgtggcggtgtcttcccgaccacgacgaaggcaaacaaccctaccttagggttcgagggcttgaggactgtgtgcttagcttcgaagctacctgtggtggccatcggcggcatcaatgctggaaatgcaggctcggtgatggagcttgggctcccaaatctgaaaggtgtggctgtggtctctgctctgtttgaccgggaacgtgtcgcggctgagacaagaaacctcagatccatcctgatgaagaatgcttactcaaggtcttagagcaagttgggatatgccgcctgttcatttactttctttgtttaggcccgaaataagtttgtaatcaatcactttgtcataaggagaaaccaaacaggcgctgcaatcttcaataaaccggagtcattatttctctggaaaagaacaa

SEQ ID NO: 115512 - DNA, 1662 bp, Zea Mays
atgaagaacgccgccgctgccaagatcgccaagaaacgcagcagaagtaccagcgaggagcagggacggcgaggcgcctccatttttatcttgttgctgtgcgccggccggccggctctctctttctctatgctgtccgtctttcgtggagattattcttgggtctcgaaatttggagcgtggcagaacattcctatcacgatcgccgtcgcctactcgcgactcaccgcggacccgccgccgcgcggggaggccgcacccgcgctgaagcagagcgccagcatcgaccggataccggtggacgagcgccgcatcctgcaccgcctcgcgcggagacctctggggcggcgacgtggaccccggcgtgctggccgtgtcccagctcaggggcgccatgaccaacgagggcaatggccgcaaaaggtgctcgtgcgcatctacggccggggcgtcgaggtcttcttcgaccgtgccgacgaggtccgcaccttcgagtgtatgtcgtgccacgggcaggggccccgcctcctgggccgcttcgccaatggccgcgtcgaggagtttcatcaacgccaaggagaagagcaacaagagtacaggactcagtgcaccaagaataggaaagaccagaacaatttgcggtgcaatgtttcatttgtcagtccttgtgttcagaatgcctggttagtggccaacaagataggttatgtagtaggtttgatcttcaatggtgtgttcctcaaagtcaacaaggcgactattaacatgctacgcagggttgagccatatgttgcatatgggtacccaaacttgaagagtgtcagggagttgatctacaagaggggctatggaaagctgaacaagcagaggatccctctgtccaacaaccaagtcatcgaggagggcttgggcaagcacaacatcatctgcgtcgaggatcttgttcacgagatcatgactgttggcccacacttcaaggaggcaaacaacttcctgtgcagggcggtgatgccgggcggtgatcaagtggaaggaaacaaactccaaataggtggtgtggcagagcacgaagaagacgctggtgaaggagccccacaggccacggtgttgcagaacacaggagccttccagaactctgaaagaattggacggtcgcatcgacgccaggttccagcagaggagtttttgaagatcatccatttactcaacaacagcttccagcttgcaagactatacttgcgactcagacagtcattcttgtacttctgtttatggtggaaccagcacggcctaggcggtgacaacgtgttcggtagctgccgtcctctccataacgggctcgtcagcctcatgcactggtctgggaagggcaagccatgggaccgtctcgacgccgacaagccttgcgcactggaccacacctggaaggtgtacgacctctacattggcgagaatgattcatcatcagcatcaacttcatcgggcgtggtcttgctgtatcgctcgcaaggcaaggtgatgaactgcggtggcggcggaagttgtggcacttgcatcgtcgagataatcgatggaaaggagctcctgaatgagaggacgagcaccgagaatcgatacctgaagaaggttgtcgtccaacggctgccccagtggaagagatga

SEQ ID NO: 115513 - DNA, 2188 bp, Zea Mays
atggcaagggccaaggaagacgagcagatcatgggaattgacctagaatcttgcaatctagcaaaacgatcattttatgatgccatgcaacatgacattctagaaatatgggtggctaccacgaaaagctacaatatatctttccaagcaagctatattaacatgcaccaagggggaaaaaggaaagagtattggcgcaaaccttgggcttgctggagcaatccccaaagccgggttagcagcaggagcgacgagcccaaaccttcctacccctcgtcgtcctcggctaatccgccgcgcctccgatactcccaaggcagcgcccgccagctgcaacaacagcatcagcaagcgaggagtagccaccagcccaccacgatctcatcagactcctctcaaatcctcccgcccactctccatttccctcccctcccccgccaccctgcaatggccggtctcctccacctccagtccacgcttctcccatcggcgtccgcgctccgccgccgtgcaggcgtgccggtgccatcctcgtcccgccgccgatgccggattgaggccaagatccgggaaatcttcatgccagcgctcagctccaccatgaccgagggcaagatcgtctcctggaccgccgctgagggcgaccgccttgccaagggcgaccccgtcgtcgtcgtcgagtccgacaaggccgacatggacgtcgagaccttctacgacggcttcctcgccgccgtcctcgtgcccgctggcgactcagcgcccgtcggctccgccatcgcgctgcttgccgagtcagaggaggacatcccagtggcccagtcacaggctgcctccttctcctccacgtcccccttaccgtcgcctccgcaagaaactgctgctcaagaagcatccccttccccgccgccacctcctcccccagggccggtgtcagtctctgctcccacgccgcctttgccagcaacacaaggcgagcgtgtggttgcttcaccctacgccaagaagctcgccaaggacctcggcgttgatcttttctcagtcacggggtcaggcccctgtgggcgaattgtggccaaggatgtcgaggctgcgcttgctgcgcccaagaaggccgcaccagtgactgctccacggccggatgtgccattggggtcgacggtaccattcacgacaatgcagggtgctgtcagcaagaacatggtggagagccttgccatcccgacattcagggtcggatacaccatcacaactgatgctcttgatcagctctacaaaaaaattaagtcgaagggggttacaatgacagcactgttggctaaggcgacagcaatggcgctggttcagcatcctgtggtgaactccagctgcagggatgggaagagcttcacctacagcagtagtatcaacattgccgtggcagtggccatagatggtgggttgattacaccagttcttcaagatgctgataagcttgacatttattcattgtcaaggaaatggaaagagttagttgataaggcgcgagcaaagcagttgcagccccatgagtacaactctggcacgtttactctctcgaatcttggtatgtttggagttgataggtttgatgcaatactgccacctggaactggagcaatcatggccgtcggggcatcagaacccaccattgttggtacaaaagatggtagaattgggatcaagaatcaaatgcaggtaaatgttaccgccgatcatcgggttatttatggagctgaccttgctgcttttctgcaaacacttgccaagataattgaggatcccaaggatcttacattctgaatgtcccaactgattgtttttccctgaggcaatcaaaaccgggtgcttcttacctatcagtagatgtgtagtttgtcttctgtttatgtgattaggtgttttaagctgtcaccaatgtcagcatcaggtaaattttccctgttggttaccttattatcatcggtttgtgtttcaataaaattcttttttttgtcttgcttaactaaaataggtgtatctaccatttttactggacgtttcatggatagtggattttgttgagctcctcaatgtaccgtatccttgtgggatacaaagaatgaaatgtaccttgtaccaccctgtggttgatttctcatgcttgtcaaacagaaatatggttgacgct

SEQ ID NO: 115514 - DNA, 2674 bp, Zea Mays
atggccggatctgttcggatccgttgcgcttgcgcagctccatgcacatctcgaaaccctaaccacgattcccaggtaacgtttcccactttcccaggaatcgaagcgccgccgtcctcccgcggtcccgcagcgccgaattgccgatgcctgctcaaatgctcaagcagctcaacggactccgcgtcttcgtcaagccccaagtggtactctctaccccgatccagtaccccgatcctgtggttctatgtctggttctacacttctacaatggggaggaagaggttagttgttagaaaagcttctggtcctagtaggatagatgattccagcaatcctagcgaactatcagatggtactggaggtgtttctagtcccttacctagttctagtcccttacctggttcatgtcccttacctggttctagttccttacctggttcatgtcccttacctggtcgtagtaggatagatggttccttaccagtaccatcaaatggtactggaggtgtttctaatggtgatggggatattggtggtgatgtgccagtgccagtaaagggtgctaaaccaattgtttcaagggcagagtgctggaagcatatggataagcgagagattgttgagaatggtataaaaagttatattgctgtatgtcactattgtaaaactgagttgagtgcagattctgctggtggcactgggcatttgaatcgacacttcagagcttgtatgaagaaggcagggcaaacttttggtacaggtgtgcaaactcaactaaacttcgccgcagacggcactgtaagtacttgggtttacaatcctcaactagctcgtgaagaaattattaaatacattgtttctgaacacttacctattatgatgggagaaagccctaattttaagaatctgattcagcgtgctttctgcccacaataccaacctgttagtagaactactataaaatctgatttgatgtctcagtatcacaaacaacttgctgttcttaaagaaaattttaaaaaagttcagttttcgtttgctttaacttcagatatttggacttcatcacatcaaaagactagttacatttctgttgttgcacactatttggataattcatattgtcttcataagcgtgttataggttttagagtgatgtatgattcacatactggtactgcaattgctaatcatattcttgaggtggttaatgattttaatataaggaataaaattctatctattactcttgataatgcttcctcaaatacaaatgcgatagactctcttgcccctcatctgaagtcatacatagatggttatgtcgtccaccaaaggtgtgtgtgccacattattaatctggttgttcaggatggcataacagttgttagtaagtatttggataatgttcgtgatgctgttcgtttcataactagtactcctcaaatgattaataaatttagtgagtattgcaaggcaaataatatgaaatcaaggaaatttggccttgatatgaagataagatggaatttgacctaccttatgcttaagaaactagaaggttatgaaaagattataactgtctttgtgaatgctaatgctcttgatattgatttggttctaactgaagctgattggtatatggtcaaacattttagagcgttcttgatgcccttttatgtagccacaaatgttttatcaggtgtttactatcctacatcctgcttagtcattgattacatttggttaattgctgagtcatttgctaagcacagatctgattcccttctttgcactgttgttgctccaatggaactaaaatttctaaaatactttgataacatatcccatatatattgctttgcaactattttggatcctagaaataaacttgatgggttacaatctgctttagaaggaattggtgacttgctagatatggactattcagatgcttttaatcatgtgaaagatgaattatttcgtgtttttggcttttactataacaaatatggtgaaagtgatgttacaggaacaatggatgaaactgacatagaacaatcagatagttctttgatagcccacttatggaagagatcgaagggaaaagaatctgctaactcaacagtaaatcaaaggtggaatcctaatgctgaattgaatcattatctgtctactaactttgcagccactgatcgcaccttgaagggagataaggtaaaattacttgaatggtggagggaacacaagtacagttttccagtattatctcattttgctagagatattcttcttgttcctgtttcaactgtttcctctgaagcaacatttagcacagtgggtagaattattgaagaaaggaggtcctctctttcacctgagacagtggaggccatcacctgccttaaggactggaaaagagcagaagatagaaagcagcatcaacttgaagatcctgagattgaacaagcttttgctgatttcagccaagattagtgttacttttatctagttcatatggactgttattgtaatatggaccattattgtaatatggactgtggacattaaaactttatccgatctgtactcttttccttacagagggagccccacactggggtgtaaggtttttaacgaggcagatcgaggaataaaaaacattttccct

SEQ ID NO: 115515 - DNA, 2876 bp, Zea Mays
cactgctatcgcacgtgcttcccgaccaaccgccgtggtcccctcactcgcggacactctccgggcgcccaccacctccgcctcttccgccgccgtgtgtgccggcgacgatgccgcgcaaggcctcctccaactcagatgcgcgggccaagtcgcggaagcggaagcgcgccgccgccagcgcctccccgtccaagcagccggacgaccactcagacgactccgacaccgccgcggcggcgaacggcgacgatgagacgtcccgcgcagcatccgttaacgggggcggaggaaccctagccggcgtcggcggcgatgacgaccccgtgctcgaccttcgtgcggcggaggtgctctcctcctccgccgagcccgtttccgccttccccgccgccgtccgccgtgccgtgagccggcctcacccctcggtgctggctgtaatcgccgccgagcgtgcggcggccagttccgacgatgctccggtcaccccagcctcggtacccgttctcgagaatatttcgcacgggcaactccaggtgatctcggcgatgctgcccgaccatccgtccctgtcctacgaccctgacaagccgtccacgtatgtctgcaccccacctccactgatggagggatgcggagtgcacaaacagttctatgacaaacttcacatcgtgcccaggcactcagattggtttgtgccacagacagtgcacaggttggagaggcaggttgtgccacagtacttctctggaaaatctcaggggcaaacaccagagaagtacatcatgttgaggaacaaggtgattgcgaaatatttggagcgacctgggaaaaggcttgtgtttgctgagtgccaggggcttgtcacaagcacacctgaattgtatgatcttagtaggatagttaggttcttggaatcttgggggatcattaattaccttgcaacagggtcagtgtaccgtggcccgaggacggcatcatctctgatcaaggaagagacaacaggggagcttcagctggtctctgcaccaatgaaatcaattgatggtttgattttgtttgatcggcccaaatgcagtatccaggcaaatgatatatcttcgttggtgtcaacttcatctgctccatttgtggttaatcatgacggtgattcagcaaatttggatgagaagatttgggagcgcttatcagagagttcttgtagtttctgctcacaacctttacccagcatgcactatgagtcacaaaaggagacagacattgctctttgttcagactgcttccacaatgcaaaatttgttactgggcattcaagcttagattttcagagagtggatgcgatgaaagatggatcagacactgatggggacagatggacagatcaggaaactttgctgttgttggagggcatagaaaagttcaatgataactggaatcatatcgcaggtcatgttgggacaaaatcaaaagcacaatgtattcaccatttcattcgtctcccggtggcagatggtttgttagagaacattgaagtgccagaagcatcccttccatctggaatgcaaagcagtggatttttgcattcagattccaatggcagtacttcaggtgtgttttctatttgttcaactggcaaacttctcagttctgttatgtttcagtattcatggttacaaaatgtattggggttctatatttttgactgatgatttgttcactttgctttcatcaaggtagccaacctggaaaccagattccattcattaattctgctaatccagtcatgtcactggttgcatttttagctgctgaagtaggaccaagagttgcagcatcctgtgcaagtgcagcattatcggttttgacaagggaagattccaggatgaatgcagaaggcattgatgctatgggccatggtactcatctcaactatggaccctcatcatccatttcttctgaaactgtgaaaaatgctgcaagctgtggcttgtcagcagcagcaacaaagtccaagctttttgcagaccaggaggagcgtgaaattcagagattatctgccaccatcataaatcatcagttaaagagactggagttgaaactgaagcagtttgcggaggttgagacaatgctcttgaaggaaagtgagcggttagatctgatgaggcagcagctggtaactcagcgtatccggatgttatcaacccggttcacttccacaggtggtacaatacctggaggcagcagcggtatggtttcaaacctgatgaatcaggccagcggccttagaccgccgctgatgatgccaggctcggtgacccagtccagcatgccggcaatgtatgcaaataacatgcaggggcatccccagatggctctgctgcaacagcggcaacagatgctctcgttcggacctcgtttgcctctctcggccatcaaccccggctcatcctcgtcggcacccaacatgatgttcaaccatggcatgcccaactcggcagctcctaatcatcaccctttgctgagatcaccctcaggggacaattcaaatgtaggttagtgagatgagtttttcatttttttgggtcttagattcctgagctgtagcccttgactcgtgatcattaaccattgtaattcgattgcacaatcacatatagaggttgttaccagcgataggttctcattttctcttaggctgtggaccgtgtgtgcgtgactgtttgctcggatgagattgatgttgctagtggcttaggcgatgcacagaggatgtagagtttctttcaccctgactaattgttattactgcgccaccttagaatgatgtaaaaaatgaatccgcatgaattccccattcttcatcttggtttgcatct

SEQ ID NO: 115516 - DNA, 766 bp, Zea Mays
ggttaaaaccatcctttaataactatcaagaagattcaaccaagctcaatcaggttttgttttgaaggatattgaaccacttactcattttttaaattttatacttgtaattctggataaaaggcatataactttcagcttgttactcatttttatggacatgcagttaaagagactggagttgaaactgaagcagtttgcggaggttgagacaatgctcttgaaggaaagtgagcggttagatctgatgaggcagcagctggtaactcagcgtatccggatgttatcaacccggttcacttccacaggtggtacaatacctggaggcagcagcggtatggtttcaaacctgatgaatcaggccagcggccttagaccgccgctgatgatgccaggctcggtgacccagtccagcatgccggcaatgtatgcaaataacatgcaggggcatccccagatggctctgctgcaacagcggcaacagatgctctcgttcggacctcgtttgcctctctcggccatcaaccccggctcatcctcgtcggcacccaacatgatgttcaaccatggcatgcccaactcggcagctcctaatcatcaccctttgctgagatcaccctcaggggacaattcaaatgtaggttagtgagatgagtttttcatttttttgggtcttagattcctgagctgtagcccttgactcgtgatcattaaccattgtaattcgattgcacaatcacatatagaggttgttaccagcgatagg

SEQ ID NO: 115517 - DNA, 2432 bp, Zea Mays
cactgctatcgcacgtgcttcccgaccaaccgccgtggtcccctcactcgcggacactctccgggcgcccaccacctccgcctcttccgccgccgtgtgtgccggcgacgatgccgcgcaaggcctcctccaactcagatgcgcgggccaagtcgcggaagcggaagcgcgccgccgccagcgcctccccgtccaagcagccggacgaccactcagacgactccgacaccgccgcggcggcgaacggcgacgatgagacgtcccgcgcagcatccgttaacgggggcggaggaaccctagccggcgtcggcggcgatgacgaccccgtgctcgaccttcgtgcggcggaggtgctctcctcctccgccgagcccgtttccgccttccccgccgccgtccgccgtgccgtgagccggcctcacccctcggtgctggctgtaatcgccgccgagcgtgcggcggccagttccgacgatgctccggtcaccccagcctcggtacccgttctcgagaatatttcgcacgggcaactccaggtgatctcggcgatgctgcccgaccatccgtccctgtcctacgaccctgacaagccgtccacgtatgtctgcaccccacctccactgatggagggatgcggagtgcacaaacagttctatgacaaacttcacatcgtgcccaggcactcagattggtttgtgccacagacagtgcacaggttggagaggcaggttgtgccacagtacttctctggaaaatctcaggggcaaacaccagagaagtacatcatgttgaggaacaaggtgattgcgaaatatttggagcgacctgggaaaaggcttgtgtttgctgagtgccaggggcttgtcacaagcacacctgaattgtatgatcttagtaggatagttaggttcttggaatcttgggggatcattaattaccttgcaacagggtcagtgtaccgtggcccgaggacggcatcatctctgatcaaggaagagacaacaggggagcttcagctggtctctgcaccaatgaaatcaattgatggtttgattttgtttgatcggcccaaatgcagtatccaggcaaatgatatatcttcgttggtgtcaacttcatctgctccatttgtggttaatcatgacggtgattcagcaaatttggatgagaagatttgggagcgcttatcagagagttcttgtagtttctgctcacaacctttacccagcatgcactatgagtcacaaaaggagacagacattgctctttgttcagactgcttccacaatgcaaaatttgttactgggcattcaagcttagattttcagagagtggatgcgatgaaagatggatcagacactgatggggacagatggacagatcaggaaactttgctgttgttggagggcatagaaaagttcaatgataactggaatcatatcgcaggtcatgttgggacaaaatcaaaagcacaatgtattcaccatttcattcgtctcccggtggcagatggtttgttagagaacattgaagtgccagaagcatcccttccatctggaatgcaaagcagtggatttttgcattcagattccaatggcagtacttcaggtagccaacctggaaaccagattccattcattaattctgctaatccagtcatgtcactggttgcatttttagctgctgaagtaggaccaagagttgcagcatcctgtgcaagtgcagcattatcggttttgacaagggaagattccaggatgaatgcagaaggcattgatgctatgggccatggtactcatctcaactatggaccctcatcatccatttcttctgaaactgtgaaaaatgctgcaagctgtggcttgtcagcagcagcaacaaagtccaagctttttgcagaccaggaggagcgtgaaattcagagattatctgccaccatcataaatcatcagttaaagagactggagttgaaactgaagcagtttgcggaggttgagacaatgctcttgaaggaaagtgagcggttagatctgatgaggcagcagctggtaactcagcgtatccggatgttatcaacccggttcacttccacaggtggtacaatacctggaggcagcagcggtatggtttcaaacctgatgaatcaggccagcggccttagaccgccgctgatgatgccaggctcggtgacccagtccagcatgccggcaatgtatgcaaataacatgcaggggcatccccagatggctctgctgcaacagcggcaacagatgctctcgttcggacctcgtttgcctctctcggccatcaaccccggctcatcctcgtcggcacccaacatgatgttcaaccatggcatgcccaactcggcagctcctaatcatcaccctttgctgagatcaccctcaggggacaattcaaatgtaggttag

SEQ ID NO: 115518 - DNA, 429 bp, Zea Mays
ggcacaagagaagcacgcacgcatcttgcggcaggcgtgtgtcttcgtggggatccccaggcctggccagagatgggcaacgcgagcagccgggcggaagacctcgcggacgccgacatcgacgacgccaacaacgtgcgccgtgcctcttcctcctttgagggctacgtccggggcgatgggtcgtcattatccccgccgacgagcccactgaggccgcattcaccgcggatgttcgtgccccagagtcctgtaactccgttgcaaagagctacagaaatgcctcctccggtgttcaaccagatattgatgaatcaacaataggaggattctgatggcccgcctcaaaagaaaattcccatgttgctcacgtggactcttggagggaggaatatctacgtagaaggatcatggggcaactagacatca

SEQ ID NO: 115519 - DNA, 921 bp, Zea Mays
atgggcaatgtgagcggtcgagcggaagacctcgtggacgccgacattgatgacggcaacaacatgcgacgtgcctcttcctcctctgcgggctacgtccggggcggtgggtcatcatcatccccgccggcgagcccgccgaggccgcattcaccgcggatgttcgtgccccagagtcctgtaactccattgcaaagagctacagaagtgtctcctccggtgttcaaccagatattgatgaatcaacagcaggaggattctgatggcccgcctcaaaagaaaattcccacgttgctcacgtgcactcttggagggaggaatatctacgtagaaggatcatgggacaactggacatcaaagaaactagttgagaaatccggaaaagatcacaccattctattgatgctttcatctggagttcaccgttatagattcattgtagatggagaaagaagatttatacctgaccttccctgcgaaactgataatgtgggtcagattttgaacctagtagatgtccatgacttcgttcctgacagcgtggaaagtgtatctgagctcatggcccctccctccccggactccagctacggtttccatgttcccggcgaaaaggagttctccaaggagcctcctcagctgccggcccagctctacctcggcgtgctgaattctcggagcactgaagaaggctgcgcgaggccgaggcacgtcgtcctagaccatctctacatcgagaagggctggggcgcacatccgttggtggccctcagctacacccacaggttccgctccaagtacgtgacctgcgtcctgtacaaggccatcgagcggtagcctgaccattgctgtgttgtgggccggcaactatagctagatgtggtggacttagcatttcattcaggtttagaagtctctcct

SEQ ID NO: 115520 - DNA, 95 bp, Zea Mays
cgatctcgctcttgctggagagtggagagagcaggtagtatgacctgtgggtgccgtgtagagggtgtgggcttcagatttggagaagcgagcgg

SEQ ID NO: 115521 - DNA, 580 bp, Zea Mays
acaaatgagagataagcatatcagatctcttcgatcatcctgcagatctctattcgaccgcggcgaaccagtgaaccgccacttcgcccatccaggctccagccccgcaccgcgcgagtgcacaacgtcgccggaaccggagaaagtgagggggagctggagatggacaaggacaataggctccgcgcccgagcgggggagaaggcgtccaagagcaggagccacgggtccacggcgctgttcgtcgcggtagactacgccttcctgctcgccttcgccggcttcctcgcctacctcgtcgggtcgcggatcctcccctccgccgtcagcttcgtctagaccggcccgcgttcgtggatctctctcttttttccttccacttttttttgttgttgttgtttgcttggagccaatggtggcgagagaaccgagatcttgccggccgggtggttctcgtttcgatctgattgccgctcatgcgatgtaatccgaccgcattttgacgagaagagaactagcggtgcttcttggcagttcgcttggtaatgagacaaatctttgcctgttcagttgctagtgc

SEQ ID NO: 115522 - DNA, 457 bp, Zea Mays
gagctttgaatcagaattaggcctttttcaaaacctcccacaccacgccgccgccgccaccgcaacattaggcctccacctccgttgcctgccagccggttgtcctactacaaatgcatgacacaaaaatcagttccaggagcatagcatagcttttgtttggacgacaagcaagaaacaaacccattgcttcatgagctcttcctaaatatgaagtggctaaaggtagtatttcactgcaaagacaagaagcacagatggagagatttgtttgtagatccattgagaggatcaaattatgatgatgagtgatttgtcaattaatccatgtgtagtagataaaatgcatgtaatttttttggatgaatgtacatttcgttcctgcaacgattttatcatgcatgatttgtaatggttcaaagatgatattgttttgaaataaatattgaattgtgaa

SEQ ID NO: 115523 - DNA, 106 bp, Zea Mays
ttttttttcagagatgctaagatatgtgttatactccccatttcaaaatattagtcgttttatctcttggtttttatgtctatattcaaatggacgcggatgaatc

SEQ ID NO: 115524 - DNA, 225 bp, Zea Mays
ttgccttctgtcgagtggcgcaccggacagtccggtgcgccaccacacagtcactgtagacggtccggtgccgatctccttccttttctggcacaggcgaccgttgcagcaccgggccagttggcgcaccggacactgtccggtgcacaccggacagtccggtgcccgctaccgaccgttggagttgccacgtgtcgcccgcggattgcacggccgaccgttggc

SEQ ID NO: 115525 - DNA, 258 bp, Zea Mays
atggcgaggaagacgctggatcagccggagggctgccagtccggctgcttcctccagtccggcagtgtctgccgtgacacaccggcgctggcgctcagcaggaagaggaaggggaaggcttccggcgccgggatcaggaaaaatggagcggccacaagccggcatcagcttctcggtatagagatttttgcatacatggcaccggcttcgatgggcttcgcatgtacggcaccgcaaggacgccaattgcaaatatga

SEQ ID NO: 115526 - DNA, 917 bp, Zea Mays
ggatagtggctaaatatgtgctcatgttgtcttctgttatatttcctaaagagatgttatgacgagatcgacttacagcaacctattgtaggcaaactctgttccttcgcaattgtggtagtgtttttccagagcagaatgaatgtttctgtctattgcaattttgttgtgcagaataactcttagaattatcctcacattatattttgttattagtattgtttgactcgtataaaatttatttgtgttgtcttactcatccagatattggggtagcgcatgagaaggctagggttagccatggaagatcagccaatcagagcgtgttcctggtgaagttccagccaacaatatctgggttccaagaagccatgagagtgcatacccatttctccaccagaaaccatggcaaggaagagttccagctgatgaaaggcagcaaaggtaagaaggctgcctccactgatagcctggaagagctgctgtatgcgcatattggggtcgtggaagacctggggctgctggatgagggaacaaagaagagatgcaaggtcatgaggaagaaggaaattgaggcaaatgcagaggcaacactgaatttagaagtttattaggtctagtactaggatccgaaccatttgaagtggtcctcttttgcttcatcttgcagctgcttgcttgtccttgcggctgtaacgtcaaaagaagaaaagaagtgtaaattctgcttttgccattaaagagtgacgaaactcagttggcttctgtctgctggggaaggcctgcctcggtttgcatggcatggcaaggacataattttgtggctagatggggacaccttaacggcaaaagcagaattacctggtcgaagaaccgagtttaatctttatattatggaatcccttctttttttaagt

SEQ ID NO: 115527 - DNA, 1287 bp, Zea Mays
ggagcagtgtcccattatttcttctagttagtgcggcagagacttggggatcaatttttaacaaagttttatcttctgatgatttagtttgctatttgctctttgtgttccacttgatttttgtttgtgaaaattggtgactacacccttgtgaatcgttttaaatactgggatgtgaatgaccatgatcatggtgccctcaggaggattgttgaaatgtagtttcttttatctgcatggtttgattgactgaacaatcatttgagattctaacctgaagaaatactctgttcatttctttttttgtttacttcctacaacagtgtagcgaggaaatttctggaccttgatgcattgctatcacatgcttatgatacatgcaaggccggtttgaagacaaaacacttggggtttcacaaagcactgtgtgttctgatggggtggaattggcatgttgctccagacacatctaaatcacatcactccattccatctgaggaagtaaatgccatgaggggagacctcatgctgtggcctccagttgttgtgatacataacagctcgactggtcatgaggcaaaggatactgatgcaaagattgtgtccatagaagaaatcgaaggtgtattggcagatattggggtagcgcatgagaaggctagggttagccatggaagatcagccaatcagagcgtgttcctggtgaagttccagccaacaatatctgggttccaagaagccatgagagtgcatacccatttctccaccagaaaccatggcaaggaagagttccagctgatgaaaggcagcaaaggtaagaaggctgcctccactgatagcctggaagagctgctgtatgcgcatattggggtcgtggaagacctggggctgctggatgagggaacaaagaagagatgcaaggtcatgaggaagaaggaaattgaggcaaatgcagaggcaacactgaatttagaagtttattaggtctagtactaggatccgaaccatttgaagtggtcctcttttgcttcatcttgcagctgcttgcttgtccttgcggctgtaacgtcaaaagaagaaaagaagtgtaaattctgcttttgccattaaagagtgacgaaactcagttggcttctgtctgctggggaaggcctgcctcggtttgcatggcatggcaaggacataattttgtggctagatggggacaccttaacggcaaaagcagaattacctggtcgaagaaccgagtttaatctttatattatggaatcccttctttttttaagt

SEQ ID NO: 115528 - DNA, 2661 bp, Zea Mays
atgcgacacggaggcggaggcaggggaggtggaggtaaaagaggtcgaggaagaggagcgggctccggacgcagagacgcgcgccccggcaacgattcgtaccgcggcgaccgtggtaggcgccacgactaccgctcccgccgcaccgcttccccggaccaccgcccacgccgcccgaggggcgaggacaacgaccgcgatccgccccgcggcggtcgcatcggctacggcgaccgtagccctccccgcggcggccgcaccggctacggcgaccgtagccctcccggcggcggccgcaccggctacggcgaccgtagccctcccggcggcggccgcaccggcccgccccggcgcgagcgcgctggctacggccaccttgacgcgtcgccccgccgcgggcatgcgccgtacaaggacgccttcggctcgccgggcggcgaccgccacgcttctccccgcgggcgcagggaatacggagatagccgcgtctcgccccccgggggtagggactacgaaagggcgccctgccgcgaggagcgcgaccggtacggccgccctggccgcggtgccgatctcgggcacaactccccgccagcccacatgctcccagaccacccgtccgacctgggacgttcagcatccctacgcgctgacgaccatagccttctcaaggacgactaccctaggggaggccctcatcggagcatcagaaaggagaacgagttgtttgcgaacggtgacctgactctcagaataagtgcaactgaaatgggaaggactagcgccatgtactcccaagaccgcaggctctcacctccaccacctatttatccctatgtgccacgtgagacgggattcttgacaggcggatctgccatgaaggccagtgatggttatggtgctggaactggaagcgcccagcggctgcatgatgatgacgattttaagtaccacaaggatgccccacacattgagaggagtagagatattgataggcattattctggcagtagggacttagttgttgagaaaggtggagttgctgaaaggtatgcttctgctgatgatctgccttctgggaggattcgagaaacagagagtctttactctagtagaggtatgctggagtctgacctggtgccgtgtaggcagttgaaggttcttggtgatccttcctcagctttgcctgccaaggaccaccatccatacaggatgtacactgaacctggctacgagacaagcaacagatacatcatggagggccttggcaggtcatctcatgactcactggggcatgggagtgaccatcctcataggttttcaggaggttcattagagcatgtaagcggtcatggtgatgaaacattattggatattgcaaggcaggcacactctaagcatacaccaagagctgcatcattggagtacgatgtacatgatacgcatagtgaaccagagaacttacgtgggaatgtctcaatgacttcaaggcacacatctgtctcaacatctttgagaggtcttagggatgaaaggattaacgacaatctgaggttatcccgtaggattgaagaagatgagggtagcattgaatccatgcatcaggacacagagcacttaattcgtcattgttacaacggtgacgcttctgtacagtaccaaacagcaaggggtggtgatgatcactattcccactcccctggaactgaacctattggaattgcaaggcggctagctcatcaacatgagtttgattcctttggttactcaagtgatcaagaagcttcccttatggtttctaggaaaagatgcaggagtcctgaatatcatgatcatgagattgatatgtatcaagctgatcatgggtttgcaggacatgagcactatgatgatgatgttgttgatgaatatgatatacccccaccaagaatgtcacggtttgatgatgaatatgatgaaatacatgatgtgctagctaatcgtgatgttttctcaaggatttctttgccacatgaaaccaatcaggaatggactgatatggatcaggggaaccatcctcattctaacatcttgggttacgggtgttcaaaacacgtacctatgcatcagaggttgtctaaacccaattaccactcacaatttggggaaactcccatgcatggaagaggaagaggaagaggaggattgactaaaagtgccaaaaagggactgagaactgctcctcatcagttgcatgatgggtacccatcaggtagaaatgaatttgttagaccaaataaattttcaaagtcgtcaaaagatgaacttaatggttctgaagtgaagcatgaagatgctccagagtatgaggatgttcctctgcagaaagatccaccagaaggttcagaggagttcagtaaacaggttgatgaagcctttcttaagtacacaaagatattaaatgagagtccagctatgcagaagaaataccgggaggcgccaaaaggatctttgccatgctgtgtctgtggcaggtttgtcttcctttgcctgcgaactaaacagttcctcctctaacttcgttagcagttgcctacttgctggtatggttactggaatggagaaatccaaggaaaagttatgtcttctgtagtcacattaaaatgcacctcatactgtaga

SEQ ID NO: 115529 - DNA, 2010 bp, Zea Mays
atgtcgtcgattgatgaatggtgtgatgctaattggcaggtcatggcggcgagaagccccaacgtgaggctacagaaggctatcgacaggaagaaccagagctcgatgctgaaatgcccgcactctgcgccaccgaagcgtccgagagctcggttcgcgaggctgagcgcagagactgaggccgcggagaaggcaccggtggagcccaagccaagggtcgagcggatctgcgccatgcgagcatccccaattcgcaccaagacagcgagggtcgaatgtcccagcgagaggaagaaggcactgaccacgccgcggagcaaggccgttcggtcgaggcaggagctgttccacaacgtgaagcaccagaaggagtcgttggccgctgcagccaggaaagggacagttgtcaagtctctgttcatgagcacgacgcgaaaaaaggaaccggtccagacgctagcggcagataagagcaagggggcggtgtccgaggtctgttcgaagctgaggaagctgaacttggcgtgtcgggaggtgccgagcaggtacatatctcagcctcaaccgaagaatacgaagactgccaagaagagtgaagagaccacggtggccaagagcgagaagcgggggctagaatccaaaaccaatgccaagaagaaaattttaggacgctcagtgaagcgtgctaatgccggacctaacggagagaaccgaaatggttgcagcactgctgcagacgagagctcgcttgcagaaactgctggctcccatcaggaaaggaaggttgtgctgcgggaattgagaatcgaggtggatgcatcgcgacgtggcaattcagatgacaacaaggagaatgtgtccagtgctctgagtgaagaagcattggacaattcatcacattatggaagtgaaaacagactgttggagaacaatgagaatgttcctctgaaggagaatgttgctctgaagaagaaagtgcatcaagagcaggcaggaaagctcaagaaaaccaccaatcctagggtcttatgggatgggggccagtatgatccagccttatgggctggcaaagtgggcaatagttggcatacaactgacgacataacggttacatggaaaagcatgacatacattgctgataagaacaacaagtgggcatcatatgctggacctggtggttgggatgacccagatatgctggaagtaggcaatggtggcatgaccttagcagagtatctctcacattttagcatatgggctctcatgaaggcccctctattaattggttgtgatgtcagaaacatgacttctgaaacaatggaaatactgagcaacaaagaagtaattcaaaatcctcttggagttcaaggaagaaaaattttaggacaaggaaaatatggatgtcgtgaggtgtgggctggtcccctttctgggaatcggcttgttgttgctctgtggaaccgttgttcagatactgctaacgttacaatgaaactgccagcagtaggccttgatgggtatgctgcctattctgttagggatctgtggaagcatgaaactctatcggaaaatgtcgtaggaacttttggcgctcaagttgacgtgcatgacaccaagatgtacatctttctctgcaaccatgtcgcttcggaatactatgacccaaaccgttcaatgttggagttggtctttgctcctgtagacgaatggattggtcgaagtgacactgaaatcatcgatgcaactattgaagagctagccaagttatttcctaatgaaattgctgctgatcagagtaaagcaaagattcttaagtatcatattgtgaagacaccgagatcggtttacaaaactgtcccaaactgtgagccttgccggcctctccaaaggtcacctatcgaaggtttctatctagctggtgattacacaaagcagaaatacctggcttctatggaaggtgcagtcctatccgggaaagctttgcgcccagtccatagtgcaggattatag

SEQ ID NO: 115530 - DNA, 680 bp, Zea Mays
ttctagttaatccaatcatcaaataaacttacaaaaattataaatcggcttaccagcatcaaacgcgacccaatactcgtacgaatgctgataaatcttggctcgagctttttgtcgcgcacttggtgaatattacgctgctggctccgtcttcacttgactcttggaattttttgatgacgcacggatcgacgacgaccttcaattgaaggttggagcgagctggtgaggtggggatcgagcggggatgatgggttcgacgactcgacggcaaacgcgagcacgcgcgaaacccgatggatgaagagcgaacacacggatgggtcaaactgggactagaggacgacgaacgacatggcgggttggagaccggatttaacagcggtgttgtaccatggcgaacaggaaatcgacgaccggctaagatgcgaatcggcgagttgaacgactgacgatttgacggcggccgcgacagatcaaggctgagatgcaataattccaaatcaaattagaatgagaccaacaagcagacgacgctggtgagcaaagtaggcaggacactggacgtcgcggcgagctagaaaaagattcggcgcatgagctcgacgcgcacggatttttgtttcgttgctcgacgcacgacgcatggacagacggtaagcagggacacgcagcaagac

SEQ ID NO: 115531 - DNA, 1471 bp, Zea Mays
gaaagtacgaaaaagcaaaatcttctattaggtattgtgattgggcttagcagtggcatcgggattttacttctcggcttatgtgcaacagtgcttcttcgcaaatggaaaagggacatcaaaaagcagcaacgaaaaaaatattttcagaaaaataaaggccttctcttggaacaactgatatcatccgatgaaaatgcaagtgaaaaaacaaagattttcactttggaagacctggaaaaggcaacaaacaattttgatcctacacgaatcattggccatggaggccatggcatggtgtataagggtatcttatctgaccagcgtgtggtggcaataaaaaggtctaagaacattgaggaaggtgagatcagtcaattcattaatgaggtagcaattctctctcaaataaatcatagaaatatagtgaagctttttgggtgttgtcttgaaactgaggtcccactgttggtgtatgacttcatttcaaatggatcattgttcgaaattctacattctagttcaagcagtggtttctcattgtcatgggatgactgcttaagaatagctgcagaagctgcaggggctctctattatctacactcagcagcttcagtatcaatcttccatcgagatgtgaagtcctctaacatactactagattcaaactatactgcaaaagtttcagattttggtgcttctagattggttcctattgaccaaactcatgttgtcacaaatatccaaggtacatttgggtacttagacccagagtattaccatactggacagctaaatgataagagtgatgtatatagtttcggtgttgtgcttgtggaactactcctgagaagggagcctatcattacaagtgagacagggtcaaagcagaacttatctaattactttctttgggagatgaagacaaggccaacaaaagagatagtggctactcaggtttgtgaggaagcaaccgaggaagagattaatagcattgcctcgcttgcagagatgtgtttgagactcaacagtggggagagacctactatgaagcaagtcgagatgaatttgcagctcttgagaacaaaacggtcaaattcatgccatgttgttcaagataatgctgaagagatacaaccattgctttgtacaggagctgaatctagatacgagacgttttctattaccttgggtggtagttctaatgcagagtctcaatacagccaaagattcaatagcttggagcacgattttaaatcatctcttgggacgccacactaagggcctctttgaagtgtctgaattccactacaacataaagagcaaaagaagcttttatgaggtggatatttattttcctgcaactgcaagtcctaccaaaatactgtgttgtaaccaggcatgaacctgaacatcttaatgtgatctatctttctatccgcagaatatcatgaacagtcctttactctct

SEQ ID NO: 115532 - DNA, 552 bp, Zea Mays
ctccaaacattggtgacttatgaattccttttgtcaaaattaggatataatcctaaggaacaaaaggagaactgccagcgatcatgcggtaacatcagtgtcccgttcccttttggcttagaagaaggttgcttcgcaagaaggctatttcagctcaactgcacaaatacagcgtcttccagtctccagttcgatgacgaacatcaagtgacacgcatacatatcaatgaggggcttgtggacattaaatacaccccactttacgaacaggagatgtttagggtgtatgtatctaatgaacctggcctgtacattggctctggggaatcgtcctctgtgcaatgggctgttgccaatctgacctgccacgaagcaatgcagaacaagtcgggatatgcatgtgtaagcatcagtagcacatgtttgggtgtcaactcaacagatgattacattggctatcgatgcaaatgtctgcacggatttcaggggaatccatacatacacaatggatgccaaggtctccctctctgcctcacctttttcctataattt

SEQ ID NO: 115533 - DNA, 1177 bp, Zea Mays
tatctttgatgaaagcattggcgtaccaaccggaggcgacgacgatgacgatgactatgcgggtcttccaattcccatcaagagacaataaagcaggagcaggatcattgctaattcttttctgaatttcacacaggttataaaaactcttcaaatgaggctgctgccggattcaccactactgctgtgcgttgtgctcgtcttcactgcgattccatctgagcaagattcttctggtgtgctcggaacaagccaaagccaagcaggtggcagcaacgctcttcccgccgccggttgccctagaagctgtggcaacctcaccttcgactacccattcggcatcggctccaactgttctaggtctcccgccttcagcctcacctgcgacagcaccacgcaaacccccaggctctactttgaggacgacagcatcacggaggtcgttgcttatggaagcacctggttgcagatcagcctttcccaggccattcccatcatgcatggtggtgtcgtcagcacttacaacatgtcgtggaagtcttctggaagcggcttcaccctattctatgcgaacctgaacatcacaggctgcgacttcgatatataccaactgcaggataggcatgcgtcgtccgtgaagctctgcacagtcacctgtcctgatgcagggatcacggacaaggtggccaggcagaactgcaatggaacagggtgttgctccgtcaacttggatgttcttgaagccttccagctacagtttgtcctccgcagccacggcagagctcgacttggcacgcacactagccgaagctccctatgggatagcatcaatgtaacttccaccgatgcagaaatcctgtggagtattgtggatcaaccgacgtgcgccagcgccatggatgacagtgcaaactatgcctgtgtaagtaaccatagcaactgctatgatggcttgggtgggagattagatcttggatatatctgcagatgcgatggtggttataggggcaatccatatgtacccaatggctgctcacgggataaaggtaatcctttactaaatttcatccgtatattattgggcgatcttctacgccttccatttcaaattataagttgtttagagaccataacacctaatatagggatgtttgaattcactagagctaatagttag

SEQ ID NO: 115534 - DNA, 234 bp, Zea Mays
atggggctcttctgccgtgtgccaagggatagagagaagagatggcgtggggaggaagaggtggagatggctggtgggaggggtgggctgccacctttaaaggggtgcttgctgcagccattggtgggttgggcgactgctgcagagctcacgtcgcgtcagccagctgcagcaggtggcagagcgattttgggcgcccatttttggcattttccttttggaatcgaaccttga

SEQ ID NO: 115535 - DNA, 261 bp, Zea Mays
ttttttctcgaaaaacgcaggagaactgcgcctcattttattaagtaagaagaaatagggtcggaaaaggacccgaatacaggacctccttatggaggccagaaacaagcataaaggaaacaatccatacacaactaaaagatacaacttatctcaggcattggtactgggagcagctaaaaaggaaagacccttagctcctgcaaccatccatttctccctttcctcagcagtggcctctaatagtgtagtgatattggg

SEQ ID NO: 115536 - DNA, 597 bp, Zea Mays
ttctccacggtgcccttaaatatatcctttcgtaggggtttggctcaacagttgagggtccaatggtttcatttggtctcacttgtagcgcataccgaattgaattcaaacagggactcgttcagatggaacttgaccgccaacgggatgtttacggttaagtctctgtatctggcatctctcaacaatgggatggggatgcataataaggacctctggaaacttaggcttcctctgaaaattaagatttttatgtggtacctcaaaagaggggtaaccttcagagcaacatattggtgccacttctggtcccagcttcagcctagaagggaggaccaagagttaataaagtcttcatgtcgtaatgtggagagggtgctactacagttcttcagcaattttggataggggtctgcgttgcgtgtaactatgtagtagctgtggttcggtagctgaagttctttggtttggctagtttgggttctctgatgtggtcataggaggagttttggcaatatgctaccgtctcttgtaataaatggccgtaacctcatttgaggccaaggtcggatgatttttccattatcaaaaaaaaac

SEQ ID NO: 115537 - DNA, 330 bp, Zea Mays
atgaacattgaatactggaactggacaattcagaattcagatttcagaacatcagtcataccagtcactaacacaaagaatgaaagaatgaaagaaattgagggctgtgcaggctgctgtgcagactgcagagatgaacagatgggtgcagcaatgaacagagagatgaacataggggaattcaagaggggaacagatcacagaggagtgcagcgattaaaggtaccttcagacgatgtactcatcttgccgctgtgcaggctgctggccaccgccaccgccaaggaggcagcaaccattgaggaacaaggagagggcagccgccgttga

SEQ ID NO: 115538 - DNA, 1582 bp, Zea Mays
acacgaaaattttgccgaaacacgaacaaatacacacaaccgaggtcgataataaagttaccaagatctcagaaaaaaggagaaggtccaagaaaattactgttctctcaaatcagctggattacacctagtaggctctggctagctagtggaccaagggcttgtcgccgtcgacaagcagtggcgccgacggcccctccagcagccgcgagtccagagagctcggcgcgttgttgttcaggtcacttcccttgcctccgccgccgccgtgtcctgcatctgccgcagcgtcgaccatgtccccaacgcgcagctcgccgctggcaaggctgccgtccaccaccggatgcggcagaggctggtggagcggcgtcggcgggtactcctccttcacctgccaccgctggggaaactggaggacgtccatggctcgcggatgctccgcgggcagagggtggtgctggccctggctcttccgctgccggtggagctgcatcacctggctgtgcttgttggcgtgctccgacggctcgaaggtggggctcgccagcggccggtactccggcagcaaccggccctgcctgtaccgcacgccgcacgcgttgcacagcgtgctgcggcccagcggcccttcccgccactgcggcgtcgacgacgacccgcagtgcaagcactgcttcgccgacttcgggggccgccacggcttcctcgccgaagccgattttttcttcttcttgacgaggtacaccgctggcgctagcggcggcgccgccgcgggtaccgtcctcggaggcggcgggggtctcccccgtttcagaggcttcttcctcaccaggcgcgggagtgtgtggaccgggggccggggcctggcgcacgggcaggcgctggtgacgaggacaggaacggtcctcctcggacggattattggccgccgacgctgggggaaccggcctcttcgcctcctccggcgcggggacggggagcctgaaggcccaccagcccgacggatggccacggtggcggatatggctgcgacccttgcgccggacggtggcgtccaggcaggagacggcgacgggcaggggcagcgccgccgccgggagcgagagcacgtagccgggggggccctcccactcctctcctcggccaccgccatccatgtcgccggtcgccctggtcgccgcagatcggcggtttcttgggtctaatccaggcggctgcgcctgcgcagcttgacaacaaatgctatctttagcaggctcccgagccgtattacacagggtgcgaactgaccttcccaaccacccaaagtaaagagagagattaatagatccgcacctctcctttgccgccttcatccaccatcgccatgaacagcggccgcgcgagcaagcaggataggcggcaaacgacggaccggcggcgcgttagcagagcaagggaaagaaagaggaggtgggaaagatgcgcgtcatgtccctcactccctctcccctcgccctcggtttttttttcctccgtactattgttttgggttgcatagaaagagggtcacgaaaaccgcaaaatctttcacgagttc

SEQ ID NO: 115539 - DNA, 790 bp, Zea Mays
caggatagaaacccaccttttgatatcggttcatatggggagcaaatacttgacacactttcatcaagaactaacaatacaggaactgcatctttttagtgagattgttagcggcagaccaaagtttgagattgccagaacgttctctgcccttctccagctggtgaacagcagaagtgttgatctggataaaggaaaagccacgaatgagttggtgtgttacacagcagagaatccatttcatgtaaggcttattggtcccaaccggaggccagaaatggaggcacgctttgctcggaagagagtcaagtccccactgcaaaatgcaggcaaagtccgtgagtcctccctggcacaacatgagtgtcccaacaagcctttgtgtaaaaatggcaagattacagtcacgacagcaaccaagctgacgcaagatgggaaacgaaggcgaaggtcatcggctcacctaatgcagccgatcaatctggaatccagcggatgaacgccagtgcacactgattcttctaattattgtaacttcagtggcggcttcatgggcaggatgatcctgtaagttatgacataggcgtagctagcgggtgtatatgtacagttcaactgtaatgctgacatggcaagatttattcgacggaattgcccttttatagcatttgctattgttagattcatttctaatccaataaactaacacgatgccaagtctgttgtaaactggtgcctagctgtatcgatgccttccgcaatttgagatttatatattacgcaaaaaaaa

SEQ ID NO: 115540 - DNA, 753 bp, Zea Mays
gcttgctttgcagggagcggggtcatagtctgaagaactgtcctgacaaaagcgagggaaatttgaagaaattttgctagaactgtggtgaatctggacactgtctttccaagtgccccaagcccattgagaatgggttacaaattttgcaacctgctttatctgcaatcagcaaggacatttgagcaagaactgtcctgaaaacaaacatggcatctatccaaagaggcaaccctttccagtagggtcacgcccgtctggtaagagggtcgttgttaagttgcctgattaatcccttgtctttcactgtgtctgcatgttgcagtagatgccagcagatcatgaagcgcccaaatggtgctgagctacagtactatcagaagctgaatagattgctgctggaattagagcaaaggagtggaggagtttctgaagagagttatgtaacctctgatctcctgtattcttttggctctcccatcatctggcctctcctttactgttcaggtctcttgtctcgtctatataaactctattacgtcatctgctgtcggcttgcttcttggccactgtttagatgtagccaagcactatgttctagcttctgcacgcaaagttctgggagagcagacctgcaaaataaccgtcgtcatgtcagtgacatggccgctcaacttcttcctcttactgcattgtatctgaactgcatcgacctaccaactacatcactgcacccaacctggtgctgtcaac

SEQ ID NO: 115541 - DNA, 3352 bp, Zea Mays
atggccgccaccgtcgcctccgagcactccatcgatcgcaagctctccgcgctcgtggagcaagctcggccgagcgcggcggccatgctcgccgccgccgaggccgttgacgccgtcgcggagctcatcaagagggtgccacagcagcaagcgacgccggaggccgcgcggggttttttgagggacctgggactggaaaccgagaagctttccttcaccttccgtccgccggaggtggtgcgtctcgccgggagccacgcggccggcgcggtcgcgaggcccgaagtcgctgccgacctcctcgtacgcttgccaaaggaatgcttccacgagaaggatttcctaaatcaccggtaccatgcaaagaggtgtctttacctctgtgtcgtcgagaaaaacttgaggtgctctaaattaatccgcaaagtttcatggtctaccctccaagatgaggctcgaaagcccgtgcttcatgtatatccagcgaccgaaattgtagaccttcctggattccatgtaagaataatcccaactgcggattctttgttcaacgtttcaaagttgaatgtatcaacaagaaataatgtccgtgcatatacaaaagatggtgtaaacctacccacaccaaagtataattgtagcatattggaggatatgtttttggaggaaaatgcaaactttattagtagcacctttgctaactggaaagctttgcaagaggccttggtgttggtaaagttgaagcatatctgaattcctgtagcaacttccaaggcgtgggcaaagggattggtgattcaatcaatgaagaagcgtacggtcaccaaagaggacattgccacttgcctgaagacatttgatgttgccgtatttgatatatctggccacattaatttggcgtttcgtatgacaaggtctgcttttttagagcttcaagatgaggcagtttgcgcacttagttgccttgataaatgcagagatggtggacttgaagagctttttatgaccaaagtcgacttttgtgcaaagtttgacacatgtttgaggataaacttgaaagggaactctaaggttactggattaagctattgtgtggatgacgagtcttggagaattcttgagaaagatgttcagtctttgctgcaacaaggacttacagatagaacaaagatgatccgagccctatggagaagcacaccttctgaatggaaaatagtggaaggtttctcagaatttggcagcagtccgcttctggttggtatgatggttagctcattggaaaagagttttcgccttgttgatattggtccaaaccctgagaaccgtgttgaggctgttaaatttaggaaattttggggagagaaagctgagcttagaagattcaaggatggaaatattgccgaaagcacagtttgggaatgccaatcctgggagaagcatacaattattaaaaggattgctgattatgtgcttatgaaacatttgtcgctgcagaaggatgatttgattcatgttgttgatcagctggacttttgcctcttagttgatggccaagatccggtctcgtcttctggagctttgcttgaagcttttgatactattgctaagcagttacgtctcttagatgatattcctcttaaaatatctaccgtgcaacccctagactcagcttttaggcacacttctgtgtttcctcctgaacctcatccactggcatacggaaggaattctcagaggctaccgaaattcgcaacaacttgcataagatctttagaagttatgattcagctagagggatctggtaactggcctttggatcccgtggccatggagaagacaaagactgcatttcttttaaaaattggtgaaagcttggaggatcgaggaatgtttgtttcagccagtgaaaatgaggtgaatgtccttacatctggatattcattcttactcaaaatatttcatgaaagaggtttagtgatgcaaaagccagttggagatgacaagacacaaagtgttctatcagaagataagatgctttttcagcggagccagcactctagtatgatcaatggtttgcatggtcgttaccaggtgtatggaccagtagttaggctagcaaaaagatggatttctgcacatctattttcttcatttatctcagaggaggcagttgagctggtagttgcacatatatttttgaagccattcccattccatgccccatcttctcgggttgctgggtttctcaggtttttgcggttgttatccagttttgactggatcttttcacccatggttattgacataaataatgacttcaacctgatggatgagaaggagatcaatgataactttatgctgagcagaaaatcttatgagcgaaacccccatgatatagagcctgcaatgtttcttgctacgtcatatgataaaacatctgaagcatggacaaaacagtcaccaagcaagtcggttctcaaacgggtagctgcttatgctaaaagcagtgcggagcttttaacaaatcttatgcttcatggtccatcaggggaatatacatgggagtgcctgtttcgaacacctatgagcaactatgatgctgttattctcctccatcaagagaagctttgttgcccccaccacgtactttttcctgctgagaaccctgacggtaagctggtggtctggggcaaaccaagtaaagatttctgcccctatatgccactgaacaaaggggcagtgaaaggtttgcatgatgcaagagagaaactcttggtaaactttgacccgactacatacttcttgcgagacttgaagtgcgcattctccaagaccttcaagctgtggtatggttcagttggaggagacgctgtgggtcttacatgggagaacccaaagaagcgtggcagagaggaggctgatgaggctgctcccgagccgacatctatccttaaggaggttggagatgttggtaaaggtttagtgaggggtgtgtaccttgtcaaggcaccaaagtttcagtaaactgacagggcgtgtgcaactgaagatctgaccaacaaaccgatgcacaagaaggaagacttccaagtgttggtagtcttccttccatccagggcagtgtttggaggctagcaatgggggatggggagcacacgcggtagtcatggtcatggagttgtaaacgagtcaagatgtgctgtgtttagaccactattactagtacacagctgccaaaagagaaatgaaggttgtagaacctcttattgaaattttgactgtgtagtatatatgagatgtgattctgcaaacatttgctgcgatgaaaatgccaatcaaggtttgacgtgca

SEQ ID NO: 115542 - DNA, 3234 bp, Zea Mays
atggccgccaccgtcgcctccgagcactccatcgatcgcaagctctccgcgctcgtggagcaagctcggccgagcgcggcggccatgctcgccgccgccgaggccgttgacgccgtcgcggagctcatcaagagggtgccacagcagcaagcgacgccggaggccgcgcggggttttttgagggacctgggactggaaaccgagaagctttccttcaccttccgtccgccggaggtggtgcgtctcgccgggagccacgcggccggcgcggtcgcgaggcccgaagtcgctgccgacctcctcgtacgcttgccaaaggaatgcttccacgagaaggatttcctaaatcaccggtaccatgcaaagaggtgtctttacctctgtgtcgtcgagaaaaacttgaggtgctctaaattaatccgcaaagtttcatggtctaccctccaagatgaggctcgaaagcccgtgcttcatgtatatccagcgaccgaaattgtagaccttcctggattccatgtaagaataatcccaactgcggattctttgttcaacgtttcaaagttgaatgtatcaacaagaaataatgtccgtgcatatacaaaagatggtgtaaacctacccacaccaaagtataattgtagcatattggaggatatgtttttggaggaaaatgcaaactttattagtagcacctttgctaactggaaagctttgcaagaggccttggtgttggtaaaggtttgggcacgtcaaagaacttcaatatacacacatgattgtctcaatggatacttaatttctgccatccttgtgtttcttactgtggactctggaggaagcatgattactagatcaatgaccacaagacaaattttccgtgtattgatgaattttttggggatatttgaccatgtttactcagttgaagcatatctgaattcctgtagcaacttccaaggcgtgggcaaagggattggtgattcaatcaatgaagaagcgtacggtcaccaaagagttctgatcagaagtgaaatgtttcaggacattgccacttgcctgaagacatttgatgttgccgtatttgatatatctggccacattaatttggcgtttcgtatgacaaggtctgcttttttagagcttcaagatgaggcagtttgcgcacttagttgccttgataaatgcagagatggtggacttgaagagctttttatgaccaaagtcgacttttgtgcaaagtttgacacatgtttgaggataaacttgaaagggaactctaaggttactggattaagctattgtgtggatgacgagtcttggagaattcttgagaaagatgttcagtctttgctgcaacaaggacttacagatagaacaaagatgatccgagccctatggagaagcacaccttctgaatggaaaatagtggaaggtttctcagaatttggcagcagtccgcttctggttggtatgatggttagctcattggaaaagagttttcgccttgttgatattggtccaaaccctgagaaccgtgttgaggctgttaaatttaggaaattttggggagagaaagctgagcttagaagattcaaggatggaaatattgccgaaagcacagtttgggaatgccaatcctgggagaagcatacaattattaaaaggattgctgattatgtgcttatgaaacatttgtcgctgcagaaggatgatttgattcatgttgttgatcagctggacttttgcctcttagttgatggccaagatccggtctcgtcttctggagctttgcttgaagcttttgatactattgctaagcagttacgtctcttagatgatattcctcttaaaatatctaccgtgcaacccctagactcagcttttaggcacacttctgtgtttcctcctgaacctcatccactggcatacggaaggaattctcagaggctaccgaaattcgcaacaacttgcataagatctttagaagttatgattcagctagagggatctggtaactggcctttggatcccgtggccatggagaagacaaagactgcatttcttttaaaaattggtgaaagcttggaggatcgaggaatgtttgtttcagccagtgaaaatgaggtgaatgtccttacatctggatattcattcttactcaaaatatttcatgaaagaggtttagtgatgcaaaagccagttggagatgacaagacacaaagtgttctatcagaagataagatgctttttcagcggagccagcactctagtatgatcaatggtttgcatggtcgttaccaggtgtatggaccagtagttaggctagcaaaaagatggatttctgcacatctattttcttcatttatctcagaggaggcagttgagctggtagttgcacatatatttttgaagccattcccattccatgccccatcttctcgggttgctgggtttctcaggtttttgcggttgttatccagttttgactggatcttttcacccatggttattgacataaataatgacttcaacctgatggatgagaaggagatcaatgataactttatgctgagcagaaaatcttatgagcgaaacccccatgatatagagcctgcaatgtttcttgctacgtcatatgataaaacatctgaagcatggacaaaacagtcaccaagcaagtcggttctcaaacgggtagctgcttatgctaaaagcagtgcggagcttttaacaaatcttatgcttcatggtccatcaggggaatatacatgggagtgcctgtttcgaacacctatgagcaactatgatgctgttattctcctccatcaagagaagctttgttgcccccaccacgtactttttcctgctgagaaccctgacggtaagctggtggtctggggcaaaccaagtaaagatttctgcccctatatgccactgaacaaaggggcagtgaaaggtttgcatgatgcaagagagaaactcttggtaaactttgacccgactacatacttcttgcgagacttgaagtgcgcattctccaagaccttcaagctgtggtatggttcagttggaggagacgctgtgggtcttacatgggagaacccaaagaagcgtggcagagaggaggctgatgaggctgctcccgagccgacatctatccttaaggaggttggagatgttggtaaaggtttagtgaggggtgtgtaccttgtcaaggcaccaaagtttcagtaa

SEQ ID NO: 115543 - DNA, 780 bp, Zea Mays
catgcgggtaggagacaaatcactgggtggttcatgctttgattccttcacagtaacaaaagatgcaaggaacatagttatgtgttagtcataactatgtgcatgtaagtggcagctagtgcatgcttgtctccaaggattacattacaggctccaaatgccatggaaaatgctccttagcctgctcccgccaagcctcttcacgatccgtttggcgtccgggacatcggcctccgcaagcttctccagattcctgacgtgctccgaggacaggatcttcctccagccggagctgctgtccgcgagacgcatcaccgtggacagtacgaaccgctttgccggcgtgagcttctcctcattgccggagcccagcagctgcagcacccgcgccacgtcgccgcggtcctcctggacgaaccgcttccggttgcggtgtacggacaccaaggcgcagagcgactcggccgccatctcccgcgcctcgggggacttggacgacgcgccgaggacgctcacaagctcccgcatgaatccggcgtcgcccatcgccttcctgatctcctccaacaccaggcacaggcggtgccccgccttcagggcgcagtgctgcaacgtggtgtctccggtgcgaaggagggagaggacgctgtcgaggaacccggtggcgatgagacggtcggtggaggtgggcggcgagaggcagagcccgtcgatggcacggagggccacctcccgcaccttcgaggaggaggaggaggcgtcgagcgcgcgaacgagtgt

SEQ ID NO: 115544 - DNA, 488 bp, Zea Mays
gaacgagcgtcgcccactgttcatcttcccgaacttcttcgttcgccaagcgcgcccccacgcccgcactattccaccttcttcccccatctctcccttgtttctccctcgccggttccattgggggaccttgcgagaccggcgcagtgaccggtggccatggcgcgacggccggcggtgcagcccggccagccgcccctgctccacccccggcgcggccagcctgcgcgagcgcgcgcgagctcggcgctcccagccaacgcggccagcggcccgtggcgcgcagccaacggctctcagccagcgtggcacggcggccagacccagccagccctagccgcagcagccccgtgcgcggcgcggctccctgcccaacgcagcggcgtcgcggtcggcccttgtcgacccgtccggagctcgcgtcgcgtcgatcgccgaagctccatgtgtcgtcgtccgtgctcccactggtgttcatcgttggaggt

SEQ ID NO: 115545 - DNA, 971 bp, Zea Mays
atggatagtgtgttagtcttctatccaatcgaagaggttctgatggcggatttcttcatggctgaccagctaaccagccagatcccactgctaagacacctcgagttcacggggtgctacttcatggctaaaactttcagaactcacgcgtatggaagttgtaccagcggctcccaattcaagaacctggcatacgtgctctctttcctgccatactactggtgtactacatttgggctggaaattccttctttaattgtctggacccttggaggaaagaatgtatatgttgaaggatcatgggataactggaaatcaagaaaagccatgcaaaaatctgggaaagatcactctcttttgctggtactcccgtcaggagtttaccgatacagatgtgttgtagatggagaaaggagatgccttcctgaccttccctgtgaaactgatgcaatgggcaatgcggttaaccttcttgatgttaatgattttgtcccagaaagtgttgagagcgtggtagaatttgagccaccgctttctctagactctagctacagtttccaggcacctgaggacaaggacttcgccaaggagccacctgctcttccagctcaactccatctcggcgtcctcaactcacagaactcggaagaaagctgcgcgcggccgcagcacatagtcctcaatcacctcttcatagagaagattccaaatttcaaattcaactttgtggatagtttatcttcagattaagtgtacactttaaacatactcttatggggagaatttataataaatttatttctattgggtagcatttcctcttccccttttcaaggttatcttcaacttttctaaattgaaattttgggttaaattctaatttggacattagcacatctttattaatcttgcaatgcataaacatgagacctccacgtgatgcatggttttatggatgtgccttatttaat

SEQ ID NO: 115546 - DNA, 106 bp, Zea Mays
atgcgaacaagtgttgcacatatcaccattgtttcttcatattgtgaaggctcaacaagtttcagattgtcagttgttcctttaggtgattagaggaacaagtttc

SEQ ID NO: 115547 - DNA, 324 bp, Zea Mays
atggagagtgatctcaagaagatgaagtataggcagaggattgggtggaggagtggccgcaatgcaatgactcgaggggcacgcagactgggccgtgctgcagcaggaccccatcgagctactgtgcaagctggacgagctgagggaccagatcgcgcgctccgtgcaacatcgtcgggcagccgcggagcaccgacactaccgccagtaccctgggagacagtgggagaatggtgggatggggcctgggagcttccatcccacatgcatacaaggttggagacaaaactgagtggaattactacaagatcagtaaatatatag

SEQ ID NO: 115548 - DNA, 584 bp, Zea Mays
cgctcgcccgctgatcgagattctgacttcatttgggcaatgtggcgaccctagctttcaggtacactatgtgcaatgtcagatcaacaagcacagagtggaacgcatcaaagtgaacaggacagtatgagtgtagacccagaagtgctctgtgtgggatcctaaattcgtgcacagctgctgaagatgtggcactagaagcatgaagctcagacctagaactcagaaaagcaaaaacatcatcggtattgcgaaatgaaatttatacataaacgtgcactgaagtatgcagaaagccttcgaagtgacagcacaagtggtaaaatgtctactcacccattgtctagtgttggggcatatatcagctcaaacttcatcatcacatctgaagctgctggacccttaaacaaatataacagactgtaataaggttacagtaatgtcaactcaattacaaaggtggtatgtcaaaatgccaacctcctcttcactgttgaatatgttgaaagacaccataaccgacagatagatatcttgtctggcatacttgatccggaacggctgtgtgtggaagctattatcaa

SEQ ID NO: 115549 - DNA, 1734 bp, Zea Mays
aaaagcggtccgctaccaatccccatccgcccatcgccaacgccacgccaatagcgggcgcgcacccgacagccttgaagcccgctcgctcgctcgaccaggcgagagagacgagatccgctccggaccggcggcgagaaggatcgccggaggccgggcgatgccggtgacggaccaccagagctcatctccctcgcccttctccttcggacgctcgctgctctcgctgcgcagggaccccaccgccatgccgtcgggcgaggaggccgacctcgaggcgttccagcgccacgtggcgtcgacgctcgcggagcttctgcccgcggcggaggccggggtcggtggtagcgacgccaccgccggggcgggcgaggagttcctctccgccgcgtggatccgccgcctgctcgaggccttcgtgctgtgccaggaggagttccgcgtcttcgtcgcccaggcgcgccgccgtgctggggcgctgcccgcggcggccgagaagacggtcgccgagttccacgagcgcgccgtcaaggcgctcgacgtctgcaacgccgcgcgcgacggtgttgaccaggtgcgccgctgggagcggctcgccgacatcgccgcctccgcgctgcgggcgccgggggaggtccacgagggccagctccgccgcgcgcgcaaggcgctcaccgacgtcgccgcgctcctcgtcgacgacaccgccgcgtccggcgccggcggcgtcgcctccttcctgtcctcccaccgcaaccgctccttcggccgcgcgcgcgcctccccgtcgcgcagcgccggcgccagcgccagcgcctcagcctcagcctcccacttccgctccctctcctggagcgtgtcccgcacctggtccgccgcgcgccagctgcaggccattggggccggcctggccgcgccgcgcgcgcacgagccgggcctcgccgcccccgtctactccatgggctgcgtgctgcacctcaccgcgtgggcgctcgtcgtcgccgtcccgtgcccggaccgcggcaacgcgctacaggcccatcacctgccgggcgcgccgccgcgcgccacgttcccgtgggcgccgcccctcctcaccctgcaagaacgcctcaccgaggagggcaagcgcaaggacaggcgccattcctgtggcctgctcaaggagatccattcgctcgagaggtccacgcagaggctcgccgaggcgatcgacgcagccccgatcccgctcttcggcgacagggaggccgacgtgcgggaggctgccgcggagctcgctgccgtgtgtgaagccatgagggacggcctggagccgctggaaaggctgctgcgcgaggtgttccaccgcattgtgcgcagccgtgtcgatggcctcgattcatccatgcacaacgccgactgattcgccccgctcgcccgctgatcgagattctgacttcatttgggcaatgtggcgaccctaggtagcttttcttgcttcttggtttgctcaaattttttttctggtcatatatattatgtgtatcttcttgtaaagaagtgatttgaatgcagccatccttgctgtaaagatggctgcttagttcccatgtttttttatgctgcatttggtatatatatatttttatcaaatttttgttagccgtgcatccatggtggccaattaatgatttaacttgttatgttctagagttatataagatcgtccagaaatgtgatcttggatctagt

SEQ ID NO: 115550 - DNA, 231 bp, Zea Mays
tggtgggacaccctcgtcagctctatcccctctaccggtcttcgtcgtgcatgccgcaccgccgttcctagggttccagagaccagcaagacagacctcgcgtggcacctgcgtgccgtcctgcagcaacgcgccagcagaagcttgctccatcggctcgcgtcggtgacttctccctcttcgctgcgttcgtcgagcgcgaggacacgtgtcatctgaaaagcaagttgg

SEQ ID NO: 115551 - DNA, 3881 bp, Zea Mays
ggcgaggatcggcgccgccatgtcccagatcctccgccaccgcctgtcggctcactaccacggagtctgcggccactgctgccgccgcctcagctccgccgtctacggcggcggcgggagtcgccgcgccgtcgccgcgccgccgcaggacggcgagggcagccgagcggtgagggtgtctgtgtggtgggacttcgagaactgccacatccccaacggcgtcaacgtccaccgcgttgccccgcgcgtttccgccgccctccgcgccgccggcatccgcgggccgctctccatcaccgccttcggggacgtgctgcagctcgcgcgctcctcccaggaggcgctcgccgccacgggcgtctccatctcccacgtcccaagcagtgggaagaatagttctgaccgctcttttatggctgatcttgtctactggattgctcagaatccgccaccagttcattttttccttatatctggcgatagagattttgcaaacatcttgcatcggttgagaatgagcaactacaatgtactgcttgcttgtcctagtagtgctaccagtgtactgtgcagtgcagcaacaatcatgtggccttgggaaggcttagttagaggagaggatttgtcaccaaaacgttttaacaacccgccggatggtttacatggatcttggtatggtcactaccgaggagcccttgacgacccccccctggagaaggaatcagaggaacccatcaaggtagcatctgttccgaagcagttttcagtaccatctaataccaagcactgcccagttcccaaacatgtaaaaaatgcaattctggaggtactacgttcatatcctgaaggggtgaacatctcactcctccgaaatcagcttgtaaagaacaaaattgatctgggtacaaatttctttggccacaagaaattctcttcctttcttgaatcaatgccacatgttgttaaattattaggttctcgattaggtgaaaacgaactatatgcaattgctgccaacaaaaaatttctgcagcctggtgatggggctcttgatgaccccttcctggagaagggagcagaggaacccatcaaggtatcatctgattcccagcattgttcagtaccatctgataccaagtctagttcaatccctaaatatgtaacagatgcaattctggaggcgctatgttcatatcctgaagggatcaacctttcactactccaggaagagcttgcgaagaaaaaaatttgtcttggtccagatttttttggccacaaggatttctcttgccttatacaatcaataccagatattgttgaattagtatgtcctcaaactggtggacaactatatgcaattgctgtcaacagaagatcactgcagcctggtgacggaagtactaagacccttagctcagctcaaggtaatgccagggagaataacccaactggaacagctcacagtaataagaagaatacactaagttctcttcgaagcatttacaagagcagaagcttcacagagacactaagtgaacatccacctacattttctgtcttaccttccccgtcaaatgggctatctgaggaccaaactgagtgcccagtggtggatgtgaatgggtcgacagagtcaccagcaaagcacagggaagttggtgaaatgactacccctggaactccctcttcctcaggggtggaaaatgctgctaatgaatatggcttctttaaaaggatctggacaatgtggaatggtcccaagaatgttaagtctgaggtttctcaaaattgtgaaagcacttctgctgaagtgattgatgatttgatacatgaaacctcttccaaaaatgatcgctcagatggtactgagggcatgttagcagtaagtgataatttatcgatttcattaggtgatgatcattctgaaaaaataaagagagatccatcaattcctgaaaacccagaaccatgcagaaaacctgctgctgtttccatgattaaatctggaaaaaaggatgatatttctgaaatgaataggggcatgtttaactgggcttcaaggtggtggccatttgggaaatcagatgcagatagtagtacaaccaacataaatgccactgatgaaccgaggactgactctattgaagaatttgaatcttcaaacgctccaactaatggaagtgcacaacaggtggttcatgaaatatttacaaagcctgacttgtggtctgttttggagcaacagttatcagaacctcttgggtctgaggttgttttgaaagcaaagacaaggcaggaattggcacacagattgcagaagttaaattgctggcctttgaaaggcctccttgataaagacctgcatcacctggtacatctgttaatttctgaaaagaaatggattgaagaaacttcttccagaattttccctttccgtcttaccctccctcgcaagagaagatgtgtcccatcaagttccagcaaatccaacggcctcagttacattttttcaagtgggaagccacaaaagggcagatacgttgacaataacagtaggaaaagcaggtccctcactagagaggagatactatcagattgtcacaagctggtgaaggagcttctttctgagcatgaatatggattcaacatcggaattttcaaacgccgtttttcccaggagtatggatacgagctcgaacaccggaagctcgggtatctggaccttgaaacgctgctgcatattatgcctgatgtaagggtgaaattcccaagggtcatgcgctcagaacacgggaacgggcaggctggcagcaagggagacggaaaccgaagcagcggcgatgacttgatctgggaggagcttggtcctgtatctgccacaactgaaaccgccgccgccgccgctgatgcaggggccgacaaggaaacatgctatcgtcctcccactccttcagacgacgagttctcggacagcgacagcataaaagaccggcagcctagaaggaacgccgagcagcagagctcgcttctccagatcattggagcttggaacagcagcaagggtggcgacgtctctagcaacaagcctcaggacatcgacgggttggtggactgttcgagaagcagcccgggcagtgctggcaccagcgcagcttcaggaaaggtgcagacgtcgtctccgaagctaccgcacaagcagtactccttcgtgtcggactccggagaggagagcgatccggataagctggtggagagcgtcttggacagcctgcagaaagcacggggcggctcgaagctgcacaactgagcgtctgctgccatcgaattattgtttttgcaacctaacgagtcgtgcttatggtggtggccatggctgactgtcaaggacagcggcgcctgcaagcatcagccggagagactggtgaataaagctcgtcttttacttggactaggccgtagtacaatcggaacagtccttggtaattggtatgttaacattggctagagaccgcctcccatttctgtttcttgtttctttcttttcatgcaggatggttgtccgcccaatctacacgctcattttcttaacaaattggttaacacggcggggcttagacggtcgttcgtcaccagtgttggtattccaagcccaatcttttttttgcttgtagtatagtaaacataaaatgacatggcacatgctggtgtctagagtattgctgtttctggagtcccaagcattcatgtgatggcacattggaatgccagttgtactgcaatagtgccaatgaatcctatctaacactagacctggtcacgttggtcaactgttgatggttgtgcttttctgtctgttgagtgccatctagtctagatataac

SEQ ID NO: 115552 - DNA, 3412 bp, Zea Mays
ggcgaggatcggcgccgccatgtcccagatcctccgccaccgcctgtcggctcactaccacggagtctgcggccactgctgccgccgcctcagctccgccgtctacggcggcggcgggagtcgccgcgccgtcgccgcgccgccgcaggacggcgagggcagccgagcggtgagggtgtctgtgtggtgggacttcgagaactgccacatccccaacggcgtcaacgtccaccgcgttgccccgcgcgtttccgccgccctccgcgccgccggcatccgcgggccgctctccatcaccgccttcggggacgtgctgcagctcgcgcgctcctcccaggaggcgctcgccgccacgggcgtctccatctcccacgtcccaagcagtgggaagaatagttctgaccgctcttttatggctgatcttgtctactggattgctcagaatccgccaccagttcattttttccttatatctggcgatagagattttgcaaacatcttgcatcggttgagaatgagcaactacaatgtactgcttgcttgtcctagtagtgctaccagtgtactgtgcagtgcagcaacaatcatgtggccttgggaaggcttagttagaggagaggatttgtcaccaaaacgttttaacaacccgccggatggtttacatggatcttggtatggtcactaccgaggagcccttgacgacccccccctggagaaggaatcagaggaacccatcaaggtagcatctgttccgaagcagttttcagtaccatctaataccaagcactgcccagttcccaaacatgtaaaaaatgcaattctggaggtactacgttcatatcctgaaggggtgaacatctcactcctccgaaatcagcttgtaaagaacaaaattgatctgggtacaaatttctttggccacaagaaattctcttcctttcttgaatcaatgccacatgttgttaaattattaggttctcgattaggtgaaaacgaactatatgcaattgctgccaacaaaaaatttctgcagcctggtgatggggctcttgatgaccccttcctggagaagggagcagaggaacccatcaaggtatcatctgattcccagcattgttcagtaccatctgataccaagtctagttcaatccctaaatatgtaacagatgcaattctggaggcgctatgttcatatcctgaagggatcaacctttcactactccaggaagagcttgcgaagaaaaaaatttgtcttggtccagatttttttggccacaaggatttctcttgccttatacaatcaataccagatattgttgaattagtatgtcctcaaactggtggacaactatatgcaattgctgtcaacagaagatcactgcagcctggtgacggaagtactaagacccttagctcagctcaaggtaatgccagggagaataacccaactggaacagctcacagtaataagaagaatacactaagttctcttcgaagcatttacaagagcagaagcttcacagagacactaagtgaacatccacctacattttctgtcttaccttccccgtcaaatgggctatctgaggaccaaactgagtgcccagtggtggatgtgaatgggtcgacagagtcaccagcaaagcacagggaagttggtgaaatgactacccctggaactccctcttcctcaggggtggaaaatgctgctaatgaatatggcttctttaaaaggatctggacaatgtggaatggtcccaagaatgttaagtctgaggtttctcaaaattgtgaaagcacttctgctgaagtgattgatgatttgcaggtttctcagaattgtgaaagcacttttgctaaagtgattgatgatttgcgaactcctttggaagagtataatggtgatcaccgtataaagcttttgaggaggatacatgaaacctcttccaaaaatgatcgctcagatggtactgagggcatgttagcagtaagtgataatttatcgatttcattaggtgatgatcattctgaaaaaataaagagagatccatcaattcctgaaaacccagaaccatgcagaaaacctgctgctgtttccatgattaaatctggaaaaaaggatgatatttctgaaatgaataggggcatgtttaactgggcttcaaggtggtggccatttgggaaatcagatgcagatagtagtacaaccaacataaatgccactgatgaaccgaggactgactctattgaagaatttgaatcttcaaacgctccaactaatggaagtgcacaacaggtggttcatgaaatatttacaaagcctgacttgtggtctgttttggagcaacagttatcagaacctcttgggtctgaggttgttttgaaagcaaagacaaggcaggaattggcacacagattgcagaagttaaattgctggcctttgaaaggcctccttgataaagacctgcatcacctggtacatctgttaatttctgaaaagaaatggattgaagaaacttcttccagaattttccctttccgtcttaccctccctcgcaagagaagatgtgtcccatcaagttccagcaaatccaacggcctcagttacattttttcaagtgggaagccacaaaagggcagatacgttgacaataacagtaggaaaagcaggtccctcactagagaggagatactatcagattgtcacaagctggtgaaggagcttctttctgagcatgaatatggattcaacatcggaattttcaaacgccgtttttcccaggagtatggatacgagctcgaacaccggaagctcgggtatctggaccttgaaacgctgctgcatattatgcctgatgtaagggtgaaattcccaagggtcatgcgctcagaacacgggaacgggcaggctggcagcaagggagacggaaaccgaagcagcggcgatgacttgatctgggaggagcttggtcctgtatctgccacaactgaaaccgccgccgccgccgctgatgcaggggccgacaaggaaacatgctatcgtcctcccactccttcagacgacgagttctcggacagcgacagcataaaagaccggcagcctagaaggaacgccgagcagcagagctcgcttctccagatcattggagcttggaacagcagcaagggtggcgacgtctctagcaacaagcctcaggacatcgacgggttggtggactgttcgagaagcagcccgggcagtgctggcaccagcgcagcttcaggaaaggtgcagacgtcgtctccgaagctaccgcacaagcagtactccttcgtgtcggactccggagaggagagcgatccggataagctggtggagagcgtcttggacagcctgcagaaagcacggggcggctcgaagctgcacaactga

SEQ ID NO: 115553 - DNA, 1881 bp, Zea Mays
atggccgatacccatcctaatttgcgatgcctctcttgcgggccaaaaaatgcaacctctttagattgcccggtctttgagacagctgatggccatcgcattttccatgctgaagccgaaatagactcgtctaaccttccggggacctctaaccagccaatacctgcgctacaagaatcacctggtacagccatgtttgcccattcgttccttcagcaaaaacaatatggtgttagtgatgcttatgtcgacacaggtagtagatctataatgtcattcccttcagcgcttgccgcatacaataggcgacgccggcgtagtagagtacgtcacatggtagctgacgagccattgtcaatcacgcttcctttggacaggtcatacatagatgctctaaaagctgcttatatgcgagacgtgttgatcccggagctccaacgtgggaacacttctgtgaccatatgcgctcgcgtttctcgtttatgggacttctgtgatcctcaggatgaagcaaagttgctccattgtgatatggtgctgcttgacgaagagggaaacggtatccatgctgcaatattcccaccagtcatacaaaagttcaaacctctgataaaagaaggagtcatctacaacatcacatacttccgggtcagagcctcgaacaatttgtacaagcctgttttcaatgagaacatgattacctttacaaactggacaaaattggaggaggttgttgaggttccgccagcatttcctgtgcttacctactcgctcacaccaatagaccagctccatttatgtgtcgaccacagggagtactacacagatgccattggaattgtcacttccatctcggccgtggcgccgcaccgatccagagggcaacatacaaccagctctaagaggactatttccttgtgcagtgtcagttgggacctaatgccctttgttttagatggactgtgcttgtctggcggctcaccctgtaagtggtacattaatcctgatgttcctgaagcatgtgccctcatggctagtgcgaggaaagcgcatagtcccattaagtggaacgaggttctatcttcgaatcagcctatgccccatgttcccgaggaacaaaaaatcgcttgtattagagatctgcacccatttgagaataaggatagggaattcttggtgacagtcactgtaaaaaagattggtgataggtggtggtacaatgcatgcaaaaaatgcacccgcacagctgtggctcatggggattcctacaagtgcagcgatcaagtttgcgctaccattggcacgcccaaccaaagatctgctcgagaagacgtcaacgcagtcgtggcagagataggtactgcaaaggactccatccaatcatcttcatcggggccaaaacagtcacaaactgtgctattgcaaggtgtacccagtggcattgaagacactcctgacaaagcctcgaacttggtcatgctttcgaccccgctcacaccacaaagttctccaaccagtgtgcaagataagactattggtattggcagcagcactgcggttccaagtggtactcccgccataacaaaggaactgacatccacgcctaggaagaggacaaggtcttcgcctgcaaagacagttacaaagaggttgttcaccgacatagatggaggaaccactggcttcaaggatgccgcagataacactgctgctcctaggatgtatgatacatgttcatgtccacgtgctcgatacaaattggcccaaagcagacttaacaaggttactactagatcgtggttcgccatcgatgctatgcacaggccatactggatttctatgcttgttgacatgaatgtgcttcgctcccttcatgtttaa

SEQ ID NO: 115554 - DNA, 1972 bp, Zea Mays
cttcgtcttctgtcactgtcccacactcctatcattctcgccttcgacttcccaggagcgcccagcgccgcggagcttctagaacacgcgactggggcgagctagacgaagctaaggaggcgcgaggggtgacgatgcggggcaggtgacggtgcggcgtggtggaggcgggacagaggccgggggatggtggcggcggagggtgggcccgtcgaggagggcgtcggggagagctcgtccccgccgcgcgtagacgcagccccagcgccctctggctccgttgggagcgggggcagaggaggcgccagcgacatctgcgccgaggtgctcgagcgcctcgtcgccgacggccacgcggaggcgtccgaccccgagttccgcgacaggctcgccgcacatttcgggcggctcccgcacagctatcagctggatatcaatgttgacaaagcaaccgatgtcttggtccaccagaatgtcttagcggaagcaaaggaccctgataggcgccctgcattctatgttcgtttcttgaggattgaagatattgatcctgcaaacgactccgatgcatctgaagaaggggatggtgatggtgatgatctctctgtaaggcaggacacaccatatactcacattcatgaggtagtattctccacaatcgacaagccaaagctccttagtcagctatctgcattgctatctgacattggattgaacatcagagaagcacatgttttctctactcatgatggctattctcttgatgttttcgttgttgatggctggcccattaaggatactgatggtttgcacaaagcactggaagcatccattttaagaaatgagggttcatggtctggttcatctcattcgtcagcagctgaaagaacactgcccttccaagttaaaggtggtgaatgggaaatcgataaacgacttctgaagatgggagggttgattgtttctggttcttgtggggacttgtatcacgggacttacctcggtgaggatgtagctgttaaagttctaagagctgagcatttgaataagaatgtttggaacgaatttactcaagaagtatatatactaagagaagttcaacatacaaatgttgtgcgattcattggtgcttgcacaaaaccaccacaattttgcataattacagaatacatgtctggaggaagcttatatgactttgtgcacaagcagcataacgttctaaacctcacgactctattgaagtttgcagttgatgtatgccgagggatgtgctacttgcatgaaaggggtatcatccatagagacttaaagactgccaaccttctaatggacaacgatcatgctgtgaaagtggctgattttggcgtagctcggttccaggatcaaggaggtatcatgacagctgaaactggaacatacagatggatggcgcctgaggttataaaccaccaaccctatgatagcaaagcagatgtgttcagctttgccattgttctctgggagctgataacgtccaagatcccatatgataccatgacccctctccaagcggctgtaggtgtgagacaggggttgcgcccaggacttccgaagaagacgcacccaaagctgttggacttgatgcagagatgttgggaagcagatccatccgaccggcctgctttctcggacattttagccgaactggaggatcttttggcacaagctcagggaacatcgggaaagacggtccaagatccatcaaactcgaacgcgaaagattaacccccatacctgacattttttctcaatccagtgatttgccacatctaggattcgagttgccaattatgaggaaatttgttttgcttgtgtacattcgaacaatcttcttggggccaattttttatgggcacctcattattcttatacaaaagaaattgggctcgacgcttgggataccacacagattcaggggaaaaaaacaaagacg

SEQ ID NO: 115555 - DNA, 2024 bp, Zea Mays
cttcgtcttctgtcactgtcccacactcctatcattctcgccttcgacttcccaggagcgcccagcgccgcggagcttctagaacacgcgactggggcgagctagacgaagctaaggaggcgcgaggggtgacgatgcggggcaggtgacggtgcggcgtggtggaggcgggacagaggccgggggatggtggcggcggagggtgggcccgtcgaggagggcgtcggggagagctcgtccccgccgcgcgtagacgcagccccagcgccctctggctccgttgggagcgggggcagaggaggcgccagcgacatctgcgccgaggtgctcgagcgcctcgtcgccgacggccacgcggaggcgtccgaccccgagttccgcgacaggctcgccgcacatttcgggcggctcccgcacagctatcagctggatatcaatgttgacaaagcaaccgatgtcttggtccaccagaatgtcttagcggaagcaaaggaccctgataggcgccctgcattctatgttcgtttcttgaggtatcgccaatagaaattggagttgtcaaattgactcaaacctttgatcgaagattgaagatattgatcctgcaaacgactccgatgcatctgaagaaggggatggtgatggtgatgatctctctgtaaggcaggacacaccatatactcacattcatgaggtagtattctccacaatcgacaagccaaagctccttagtcagctatctgcattgctatctgacattggattgaacatcagagaagcacatgttttctctactcatgatggctattctcttgatgttttcgttgttgatggctggcccattaaggatactgatggtttgcacaaagcactggaagcatccattttaagaaatgagggttcatggtctggttcatctcattcgtcagcagctgaaagaacactgcccttccaagttaaaggtggtgaatgggaaatcgataaacgacttctgaagatgggagggttgattgtttctggttcttgtggggacttgtatcacgggacttacctcggtgaggatgtagctgttaaagttctaagagctgagcatttgaataagaatgtttggaacgaatttactcaagaagtatatatactaagagaagttcaacatacaaatgttgtgcgattcattggtgcttgcacaaaaccaccacaattttgcataattacagaatacatgtctggaggaagcttatatgactttgtgcacaagcagcataacgttctaaacctcacgactctattgaagtttgcagttgatgtatgccgagggatgtgctacttgcatgaaaggggtatcatccatagagacttaaagactgccaaccttctaatggacaacgatcatgctgtgaaagtggctgattttggcgtagctcggttccaggatcaaggaggtatcatgacagctgaaactggaacatacagatggatggcgcctgaggttataaaccaccaaccctatgatagcaaagcagatgtgttcagctttgccattgttctctgggagctgataacgtccaagatcccatatgataccatgacccctctccaagcggctgtaggtgtgagacaggggttgcgcccaggacttccgaagaagacgcacccaaagctgttggacttgatgcagagatgttgggaagcagatccatccgaccggcctgctttctcggacattttagccgaactggaggatcttttggcacaagctcagggaacatcgggaaagacggtccaagatccatcaaactcgaacgcgaaagattaacccccatacctgacattttttctcaatccagtgatttgccacatctaggattcgagttgccaattatgaggaaatttgttttgcttgtgtacattcgaacaatcttcttggggccaattttttatgggcacctcattattcttatacaaaagaaattgggctcgacgcttgggataccacacagattcaggggaaaaaaacaaagacg

SEQ ID NO: 115556 - DNA, 1778 bp, Zea Mays
cttcgtcttctgtcactgtcccacactcctatcattctcgccttcgacttcccaggagcgcccagcgccgcggagcttctagaacacgcgactggggcgagctagacgaagctaaggaggcgcgaggggtgacgatgcggggcaggtgacggtgcggcgtggtggaggcgggacagaggccgggggatggtggcggcggagggtgggcccgtcgaggagggcgtcggggagagctcgtccccgccgcgcgtagacgcagccccagcgccctctggctccgttgggagcgggggcagaggaggcgccagcgacatctgcgccgaggtgctcgagcgcctcgtcgccgacggccacgcggaggcgtccgaccccgagttccgcgacaggctcgccgcacatttcgggcggctcccgcacagctatcagctggatatcaatgttgacaaagcaaccgatgtcttggtccaccagaatgtcttagcggaagcaaaggaccctgataggcgccctgcattctatgttcgtttcttgaggattgaagatattgatcctgcaaacgactccgatgcatctgaagaaggggatggtgatggtgatgatctctctgtaaggcaggacacaccatatactcacattcatgaggtagtattctccacaatcgacaagccaaagctccttagtcagctatctgcattgctatctgacattggattgaacatcagagaagcacatgttttctctactcatgatggctattctcttgatgttttcgttgttgatggctggcccattaaggatactgatggtttgcacaaagcactggaagcatccattttaagaaatgagggttcatggtctggttcatctcattcgtcagcagctgaaagaacactgcccttccaagttaaaggtggtgaatgggaaatcgataaacgacttctgaagatgggagggttgattgtttctggttcttgtggggacttgtatcacgggacttacctcggtgaggatgtagctgttaaagttctaagagctgagcatttgaataagaatgtttggaacgaatttactcaagaagtatatatactaagagaagttcaacatacaaatgttgtgcgattcattggtgcttgcacaaaaccaccacaattttgcataattacagaatacatgtctggaggaagcttatatgactttgtgcacaagcagcataacgttctaaacctcacgactctattgaagtttgcagttgatgtatgccgagggatgtgctacttgcatgaaaggggtatcatccatagagacttaaagactgccaaccttctaatggacaacgatcatgctgtgaaagtggctgattttggcgtagctcggttccaggatcaaggaggtatcatgacagctgaaactggaacatacagatggatggcgcctgaggttataaaccaccaaccctatgatagcaaagcagatgtgttcagctttgccattgttctctgggagctgataacgtccaagatcccatatgataccatgacccctctccaagcggctgtaggtgtgagacaggtgggtaaagaaagagatctcatatgctctctgaaacgtgctaaatgtactgtcattcataacaggggttgcgcccaggacttccgaagaagacgcacccaaagctgttggacttgatgcagagatgttgggaagcagatccatccgaccggcctgctttctcggacattttagccgaactggaggatcttttggcacaagctcaggta

SEQ ID NO: 115557 - DNA, 1983 bp, Zea Mays
accgcgctccttgcaccctccccaccacccgaggccggtcccgccgtccgtctgcctcgggatacgtgtcccggctgaaccgcctccgtgaaccgagaccacgcggaggctaccggcgaggcgccctccccggctcccagcttcctccctctttctactcctcaagtcctgactcctggagtcctcacacgtatgagacgccccccacctgcacgaagccaccatcccgacattcgccgctctttctccacgcgccggtcgccgcagacgcaagcccgcccgccgcagctgacgccgcgatctgcgagggtgcaagctagctctggccccgctgccggtgccgactgagatggacccgcgcttcacgctgccggccgccattggcggcggcgccggtcgggtgcaccaccggcgggcccactcggagtcgttcctatgcttctccgacgcggacctgctcctcgacccggacggagacctctccttctccgacctcgacttcccctccctctccgacgactccccggccgcctccgacccaaccccgcccccgccgctgccgcagccggccccggccccccgcccggccggcggggcccacacgcggagcctctccctcgacgccgccttcttcgagggcctcgcgtttcagggacccagcgggagcgccgggggtgggcccgggcacaagaggagcggctccatggatggggccacctcaccgtttgagggcgagtcggcgctctccagcggcctgccggactacgccaagaaggccatgcccgcagagaggatcgccgagctcgcgctcatcgaccccaagcgcgcaaagaggattctggcgaacaggcagtctgcagcgaggtcaaaggagaggaaggtcaagtacaccagtgaactggagaagaaggtccagactctgcagacggaggccactacgctgtcagcacagctcaccctgctccagagggatacaactggtctaactgctgaaaatagggagctcaagcttcggctgcagtccatggaagagcaggctaaactgcgcgacggtatgatctgctctttcctctgaaacattttggttcacctggctgccatcatcgattgctcttaaagcacaaaatttcactgccaaggtctctcgttttacagacgaatttatttatctgttactaaatgaaatagaaagttctaatgagctcacgggaacatttcatttgctacctcacctcacacagctttgaacgaaaccctgcgggaagaagtgcagcgacttaagatagctgcaggacaagtcgggaacatgaacgggaaccccttcaatggtggactccagcagcagattccatcctacttcgtgcagcagcagcagatgtcgtactttggtggccaccaggctcaggctcagcatcacagtcaaaaccatcatcaccggagtccatcaaacgggagacagtcgcccagtgatcagtccctaaacgactccatggatttcgtttgaggacaatataccggggcaagtattacatcgtataccaactgcagttcagcaccgtaaagatagctagtgtacaatgcatgcatatgcctcattggtagtgtagtttagttctttgtatcgttaatctggaagtggctccagtatgtcaaaatggtgttttattttcttctttcctgggttgtggagtaatgtgttagacagaactagccacctttagcaatttatgtaaatcttgttagcctttcttttctccatggtggaaggttcttgttatctgtcattgttttgtgcccctttcactgtctcgggtttctaagttactattagacctgagcatggccgctcgatccggtctaacggatggccggatgggtatgagcactgttataatttatgactcgtaataattcacatagcaatgattttttacctaaaacctgttccaacctgaaaaatatctaacctaaagtaaaaaaaaa

SEQ ID NO: 115558 - DNA, 1794 bp, Zea Mays
accgcgctccttgcaccctccccaccacccgaggccggtcccgccgtccgtctgcctcgggatacgtgtcccggctgaaccgcctccgtgaaccgagaccacgcggaggctaccggcgaggcgccctccccggctcccagcttcctccctctttctactcctcaagtcctgactcctggagtcctcacacgtatgagacgccccccacctgcacgaagccaccatcccgacattcgccgctctttctccacgcgccggtcgccgcagacgcaagcccgcccgccgcagctgacgccgcgatctgcgagggtgcaagctagctctggccccgctgccggtgccgactgagatggacccgcgcttcacgctgccggccgccattggcggcggcgccggtcgggtgcaccaccggcgggcccactcggagtcgttcctatgcttctccgacgcggacctgctcctcgacccggacggagacctctccttctccgacctcgacttcccctccctctccgacgactccccggccgcctccgacccaaccccgcccccgccgctgccgcagccggccccggccccccgcccggccggcggggcccacacgcggagcctctccctcgacgccgccttcttcgagggcctcgcgtttcagggacccagcgggagcgccgggggtgggcccgggcacaagaggagcggctccatggatggggccacctcaccgtttgagggcgagtcggcgctctccagcggcctgccggactacgccaagaaggccatgcccgcagagaggatcgccgagctcgcgctcatcgaccccaagcgcgcaaagaggattctggcgaacaggcagtctgcagcgaggtcaaaggagaggaaggtcaagtacaccagtgaactggagaagaaggtccagactctgcagacggaggccactacgctgtcagcacagctcaccctgctccagagggatacaactggtctaactgctgaaaatagggagctcaagcttcggctgcagtccatggaagagcaggctaaactgcgcgacgctttgaacgaaaccctgcgggaagaagtgcagcgacttaagatagctgcaggacaagtcgggaacatgaacgggaaccccttcaatggtggactccagcagcagattccatcctacttcgtgcagcagcagcagatgtcgtactttggtggccaccaggctcaggctcagcatcacagtcaaaaccatcatcaccggagtccatcaaacgggagacagtcgcccagtgatcagtccctaaacgactccatggatttcgtttgaggacaatataccggggcaagtattacatcgtataccaactgcagttcagcaccgtaaagatagctagtgtacaatgcatgcatatgcctcattggtagtgtagtttagttctttgtatcgttaatctggaagtggctccagtatgtcaaaatggtgttttattttcttctttcctgggttgtggagtaatgtgttagacagaactagccacctttagcaatttatgtaaatcttgttagcctttcttttctccatggtggaaggttcttgttatctgtcattgttttgtgcccctttcactgtctcgggtttctaagttactattagacctgagcatggccgctcgatccggtctaacggatggccggatgggtatgagcactgttataatttatgactcgtaataattcacatagcaatgattttttacctaaaacctgttccaacctgaaaaatatctaacctaaagtaaaaaaaaa

SEQ ID NO: 115559 - DNA, 516 bp, Zea Mays
aacacaagctcatcatcgtctatatattctgaaatacatatcaatggctgtgctggagcggcgttcccgcctcccggcggtggcgcagcttgccgtggcgttctggctggcggccaccagcgcctgcctgtgccgtagcgtcatccctgacccggacctggaaccgggccgcccgtgtgtcggtcgtctgttctgtcgttggccaccgctgccgctaccgtcgccgccgccacctccagtcgtcacacctcctccagctccggagacgacgactccgccaccgcgacaccaccatacccctccgttttgtccttcccctctgtgtcgtcatcgcctgccgccccacctgccgaggccgatctacccaccaccgacaccgttgtccccggagtccccgccgctgcctccaccgccgccggtcgtcacccctcctcctccgacgccgcgacatccataccctacccctcgtccatgtatttatccgttctgtcctcttcggccgccggtctgcttatg

SEQ ID NO: 115560 - DNA, 107 bp, Zea Mays
ttttttttcccttccttttcttaaaccgcatggtgagtcatgatcttttcctccatgttggattggatgagccacagccacttattcgacctgcgagcactccaaag

SEQ ID NO: 115561 - DNA, 3377 bp, Zea Mays
ttcgcggagaacagcgcgtcagcgcctacggcttctgcttgtctctcccgttccactccaaaccctaggggcgaatctccggctaatcggcggcgggcgcagccacgctgtctgtgcagggcttgtgcggccttaggacgcaggggcgttgcttggggctcccggtgggtggctacgaagggctgtggcggcccgcggccaggggcaagtcggcagcggcaagcaaccggggtgctgggcgtgggtgggctgctgggacgcctgcggcagcggtaaaaagtcgagcctcgaccgtcctgaggcaggagcagagcagctgagctggtttggtactctgttgattctccattggagacactaggtgtgccaattttgatggaaggtactaccatttctattgagattgatggggaggccatctgtcttgacagtgtcggagataatgaacaagaagctgcggagaatggagaaatgcaccaaacaatttacactgatgaaaatggggaacaagtagcctttgacaaccaagaacaggggagggaggaagatctggcaggaaatggagaagaggatagggaccataattctatcattccaagccgtgaggagttgactgaagaattaagaaataaagtcgcatatagtgaggaagaagcttacaggttgtactgtgactatgggcaccgcatgggctttagtgttcgaaaaggaaagcagtactactttactggaaccaaaaccatccgtactaaagattattactgctcaaaagaaggcttgaaggatgatgaacagcttactgaagcaaactttaataagccggagaccagaactaattgcaaagcgatggtccgttttagggttgattctgaaggtcaatggcgagttattcaaataattcctgaacacaatcatgagctagttcgaccggaagaaatacacttactgagatcagtgaggactctttctgttccgaaatctggggtgctgaatgcaatggtgaatgctgaaattcaagcaatgcatgataatttgcatataaatgaagatggtacagaatgccacagccaacttagcatccgtagttacacactgcttgaaccaaaggaatgtgaggcccttgttggatatttcaagcgcagaacaaatgaacaatgtatgttctattgggatgtagaagtagatcaagaaggccgaatgactaattttttctggagggatgggaaaagccgcgttgactatgacagtttcagagatgttgtgatatttgatacatcatatctcaccaacaagtataatatgatatgtgctccatttattggtttgaacaaccaccgacaaaatgtcatgttcggctgtgcatttttgttagatgaatccttaacatcctatgaatggttatttaagtcattcttggagtcagtgggtggtcgtccccctgaaacaatctttactgatcagaatgaatttatctccaaggcaatcgaagttgttcttcctgggacacgccattgtctttgtcaacagctcattgaaaaaaaacttatgtcccatttaggcagtatcaatgattctggaacacttcatagcttgttttcaaagtgcatgagagaatgtgagtcagaagcagaattagatgaaacatgggcgatgatgcatcatgagtataacatgcaggaacacccgtggctcactgatctgtaccagcaaaggcataaatggtgctcggctcttcataaggatgcatttgatggtgggattgaatcaatggataggaatgagagtttgaacaatgttttgagcaacattgacgatgaatcagcttcgctttccacttttgtccttgagttggataaacttgcagggagttggcgtaaaactgagtctttagaggacattcagtgcaaccaagctgctccggagtgtacagttaagcataacagaattttgcaacatgccgctgaagtttacacacataaggtctataagtctattgaaacagattttctagatggatgtagtgctacttcatatcaggcagctcagtgtaatgaaacattgcataagtttgagttccttctggaaaatagtccaaatgtttcggtagttttccttaacacctctaccatggagttgagctgtacttgcaaaaaatttgagaccatgcgtatactttgttcacatgctctaaatgcacttgttctcaagaatgtagataggattcctgaaaggtatattttaaaccgttggacaaaatatgccagaaaaggaacatatccatttccagttgatgaatttgcagaacaagatcgcacagaagttgcatttgtgtaccgtaatagggctatgtggtttgtttatgatctgctgactaagagcaaaagtcatcataatacaagaaaactaattctggatgcacttgaaaatggagaaaaatcactggaaagtatgtgtgacctcaaaagattgcatatgaataccttggggaaagagaaagatggaagcagggttgaaaagagaaagaaaaaatcaactaagcaagagaaacattcaagaaatgttaaacaagcggttttgccccagacagctgacccggtttttgttgatccaccaaatcaagatcaatattttgctgcagaagatattgcatcaaaccaatctgttggtagacctttcttctaccagggatatcccatgactgttgtttcaacaagccagattcaggggcatactaatatgcattctgagcctcagtgtgcatctcaggaatattctgcttatggcacagttcagccaccatcacaatttggtggtggaagaaatttctgaaaggtgtagtgtcattgacatgtgaatatctgaagctcatatcagttctactgattgttgtatgtgaatgacttgttcatttaggcagtagacacccaacctagcaacagaagaaacaggttgctctcttccattttgtgaatgtactgattgtaaatctgttgtccacttaactgtatggaatatggaagcatcatgttgtaggaaactaaataagaatttgtttttgaagtctgtaccatttatatgctagctaaacaaaccagtgagcactataatagacttcaccacgtgacactgattgccaaattcaaccataaagttctttaccttggaaggttattcactgaagcatggtcttaagggactcccaacatttttggtacagtcagctcttgttcagtaaattatgtaactgtttatgggtggcatacttatttaagagtttgagttgagaagcaaaactgggtcatgaaaaaaaatgttctgtacatacttcagttttaggagcatataaatccattggaatagctgttgaagcaattggc

SEQ ID NO: 115562 - DNA, 2441 bp, Zea Mays
gtccggcctccagacatcaggcagctctcccgagcatgacgctgtctctgttcacaactcttccgagcacgccgccgtcagtcctttgtcatcatcatcagctcagatctagcagcttcgccttctcagtgatggaaggtactaccatttctattgagattgatggggaggccatctgtcttgacagtgtcggagataatgaacaagaagctgcggagaatggagaaatgcaccaaacaatttacactgatgaaaatggggaacaagtagcctttgacaaccaagaacaggggagggaggaagatctggcaggaaatggagaagaggatagggaccataattctatcattccaagccgtgaggagttgactgaagaattaagaaataaagtcgcatatagtgaggaagaagcttacaggttgtactgtgactatgggcaccgcatgggctttagtgttcgaaaaggaaagcagtactactttactggaaccaaaaccatccgtactaaagattattactgctcaaaagaaggcttgaaggatgatgaacagcttactgaagcaaactttaataagccggagaccagaactaattgcaaagcgatggtccgttttagggttgattctgaaggtcaatggcgagttattcaaataattcctgaacacaatcatgagctagttcgaccggaagaaatacacttactgagatcagtgaggactctttctgttccgaaatctggggtgctgaatgcaatggtgaatgctgaaattcaagcaatgcatgataatttgcatataaatgaagatggtacagaatgccacagccaacttagcatccgtagttacacactgcttgaaccaaaggaatgtgaggcccttgttggatatttcaagcgcagaacaaatgaacaatgtatgttctattgggatgtagaagtagatcaagaaggccgaatgactaattttttctggagggatgggaaaagccgcgttgactatgacagtttcagagatgttgtgatatttgatacatcatatctcaccaacaagtataatatgatatgtgctccatttattggtttgaacaaccaccgacaaaatgtcatgttcggctgtgcatttttgttagatgaatccttaacatcctatgaatggttatttaagtcattcttggagtcagtgggtggtcgtccccctgaaacaatctttactgatcagaatgaatttatctccaaggcaatcgaagttgttcttcctgggacacgccattgtctttgtcaacagctcattgaaaaaaaacttatgtcccatttaggcagtatcaatgattctggaacacttcatagcttgttttcaaagtgcatgagagaatgtgagtcagaagcagaattagatgaaacatgggcgatgatgcatcatgagtataacatgcaggaacacccgtggctcactgatctgtaccagcaaaggcataaatggtgctcggctcttcataaggatgcatttgatggtgggattgaatcaatggataggaatgagagtttgaacaatgttttgagcaacattgacgatgaatcagcttcgctttccacttttgtccttgagttggataaacttgcagggagttggcgtaaaactgagtctttagaggacattcagtgcaaccaagctgctccggagtgtacagttaagcataacagaattttgcaacatgccgctgaagtttacacacataaggtctataagtctattgaaacagattttctagatggatgtagtgctacttcatatcaggcagctcagtgtaatgaaacattgcataagtttgagttccttctggaaaatagtccaaatgtttcggtagttttccttaacacctctaccatggagttgagctgtacttgcaaaaaatttgagaccatgcgtatactttgttcacatgctctaaatgcacttgttctcaagaatgtagataggattcctgaaaggtatattttaaaccgttggacaaaatatgccagaaaaggaacatatccatttccagttgatgaatttgcagaacaagatcgcacagaagttgcatttgtgtaccgtaatagggctatgtggtttgtttatgatctgctgactaagagcaaaagtcatcataatacaagaaaactaattctggatgcacttgaaaatggagaaaaatcactggaaagtatgtgtgacctcaaaagattgcatatgaataccttggggaaagagaaagatggaagcagggttgaaaagagaaagaaaaaatcaactaagcaagagaaacattcaagtatctcctttcacttgcattcgtcttgctttagcaatgattaagtttgattgaatagaatcattgtttttataggaaatgttaaacaagcggttttgccccagacagctgacccggtttttgttgatcca

SEQ ID NO: 115563 - DNA, 1073 bp, Zea Mays
accagcttctgccagaatgaagatggtttccccaagttgctgagagcatgcacagttcgcctcggaatcaggagccagccagagtatgagatggtcgtgagttcgtcgagcatggcacagagaagtgtgtcgtgactgtatacattggatccagtccacaccatgtggaatggagtgtcactgctgctgggcacagattcaaagacacctgccaagtcgtcgctcgcaaggcattgaggaccctatgtcagatctatgaagaagaagtggctgacaccccgctcagattctttccgccctttcagagagaccgtccggtttggatggccaggatgcgtgcattggaaggtcagcagctgcttgaggacgacccctcagtcgtgtacctcactgcatacctgctcaccctagatgcacagtatgatttcttggctcggcaccaccatcagatgattgctcgagcagaagatgcagagaagctcaaccgtaagctccatgtggatctcaccacatctcaagcccttgcaactgcattggaaagtcgtgaagtcactgctgttcaagccatgaagcaagccaaggatgagcacgtccagaagttgatggaggcctacttggtaacccataaccaacgtagagccctgcggatccaagagcccgctccatccaacccagttcaacccaggagagctgaagatccccagattcttgaaggtcacccggtctctatcagaggagagaagaaggcttgggaactcccggaaggaaccatagtcttggaaggaattccagtctcccctaaggctatggataaacaagagcaccctgaatcctcccaagatcccccgccagagttgtttgagcccctcaccatgaagaagatgctagcaccatcccttgaagtcaaggaagaagctgcaagcaccccgccagcaccgccgccctctgaggagctacaagagtcagtcccacttgaagaaaagttcgacctcgtcctgccatctcagtcgccgccggaagaagtcatcaacatcagctccctgttgacccatccaggagatatctcagattga

SEQ ID NO: 115564 - DNA, 1169 bp, Zea Mays
ttcaccattactattcaccattactattcaccattactattcaccattactattcatcgttactattcacatacactattcattattgtcactatttatcattactattcatcatcgttactattcatcgatgatatctgtaatttctttcccatcgccactattcatcgttactaatcatcgttactattcatcggtcatctagtcatcccaaatttcaactactcatccatcatgatgtccagtccacctaagaccagccagacccatgttccaatcatacgaactccggtgactgtgattttccttccagtagggaacttcccatctggtcacccatcccaggtttctccgagttgagcacgcttaactttgagattccttcgaaccaggctcccaaactcagattccaataattctcgtttctaaatttttatcaaactattccctatccagccatgtcatcccttaaacatggttcatatttcagaagactcccaaaatactcttgtcccatattctacctataactctcatgttcatactaagtcagacgattcattcgtcactattctcaccaacagtgaacttcactgtgctacaccacatacacccagctataaatacacctagctaccctctccctctccacacacactcaacaccctcagccaaggcaaacaccccacccactcagttactctgctctgccagctacacgcatagtgtcgcttcgcctccagtccaccctcctgttatcggagcgttcgtgccgtctcgtggaggccagatctacaagtctacaccaggcggtggagccagaagccagtttcgcgagctccccttcccccttcgccgaataagcacgaaaaaggagatcgggtaagagttacgactgttcccaaccttgcctgtggctgttggaccgctgatttgcttcgctgcgtatatcgggctgcttcagccccactctgatgatatgtctcgagttgtggaccaactcttaaagttgttcgccacctttataggtttgtcgtttaagcagatctgtaatcatctgatgtgtaaatgtgtttactagcctcctgggactagtaattgtatcacatttgagtcccagaggattgggacgcttcaggtggtatcggagctgttaggttggccgcagg

SEQ ID NO: 115565 - DNA, 949 bp, Zea Mays
ggctaggtggtggcagctttcgcattataaatacggcagccggcaccatcagcagtccaccaactgaggcatccatcatcagccatccagcactcgctcgctcactacgaactccatccaactcgtacacagcccccctctctctctctctcgtccttcgacagctagcgcagcagcagcactagttttcagcagttcatcaaccggcccggcacggcggcagagatgaggcggcgcagctgcagcatgcccttgccgctcgcggctgctgccctgctcctcctcctcgtctgtttcttccactactcagcagcggctcgcctcctgccgccttctcctgtcccagctcagttggttcaccgagaaactggcgtcacggctgccgctgccgctgcatacggcggcctggcgctgcaggaaggtggcgtgggcaacggcgacgagctgtccatctccggagatgagatgatggcggcggaggtggaggagggtgcagtggcgtgcgaggcggacgacgacgaggacgacggttgcatgcagagacggctgctccagaacgcgcacctcgactacatctacacacagcacaagggcaagccatgaggaggaggtagctgcagctcgctccggccaagacgtacgagccctcgtcatcttggttggcgttgggagctgggagcctgggactgcttggttgggactagtgggacaaaacacatgctgcagattaagttgacaaacgggaatctctctcatctactactagttagtaagtagtaccttgtgcatgctagcttgtaatttctgtcactgcttagtacgtatcgtccgagatccatcatcatccatgactctagtcgtgtatgcgtttgtcagtcacctcgtctgtacattttatctagtatgtctggtacatgtatgtttcttccaagtttttggcttgatatcc

SEQ ID NO: 115566 - DNA, 159 bp, Zea Mays
caacaacaacaacaacaaagccttttgtcccaagcacgttggggtaggctagagatgaaaccccgtatgaaaacctcagagctcaacccccaaagaaaacaggggaaacaaaggcaaaggagaaccgaaaacgacgaaacaggggaacacataaaagag

SEQ ID NO: 115567 - DNA, 115 bp, Zea Mays
tttttttttattttcgcaatcaaactttttgtggtatgttccttgtaacacccctagtgttactgccactaaaacatgagcataacatcatgagcattagcatatcatatgattg

SEQ ID NO: 115568 - DNA, 439 bp, Zea Mays
cgcaaccatcaccttgtgctgcccagaggaggatgtctgcttctccctcaactgcgatgaccaccaccaccatgcatcttccgcaccaacgccgtcgtcgtcgccatcagcccgcgtcgcgctagacgctcatgtactcgccgaagctgctccacaccgaagctatcgcacgccaggagctcgagtcgttgtcagtctattcaccagatcatcatcgtgctcttcaccggctaggagcacccagatgatgttggcgaacccgaggcatcctacgagcagcagcgcccactcaggtggcgcgccaccgtggaggtggtcgctgtcctcgtcgacgacaccccagcctcaccgtcgtggtgccccgcgcccgcgccgccgcgtctttggttagagagccggctgtccacgctgtgcaccaggtacagcacgcggctccagc

SEQ ID NO: 115569 - DNA, 705 bp, Zea Mays
ggtcgtgccttctccctcttacttccccagcacaacgcctgggcgttttgctctcagcgctcgacctccctctgtctttctcctctagttcgatgtggaactcgcccagcactccctgctcgacgtatttgccgtcgcttccctggccggagtggcagcagcactcaggatcttctcccacgcgcgctccttccttgctcctctctcatggccgccatgaaatttgcccatgttgtacctcctctcgccggagctcgccgaacgttgctccttggacgggcttcccagcaagctccatcgcgttgtcgccttggtccgagctcgcccatcccctgctcttccatggccacgccctcagctcgcgcagcttgcttgtggcccggtcactctccctcagcctcagccttgatctatcacggtccggctcgccgtcaacccgctcggactctgccctggccaagcctttctgctcgtgccgttgtgccgttgtcgtcattcgtctccatgtggtggatacaacaacgtcgtcgtttactccatggggttcatcgtcgactttgtcatccgaagagtgatcctagagttggataaaaatatgagaaaagtccgtgcagcaattgccagaagctcgaccggatatccaaactgaaaaccgtcgttgtcctcgcggttatcaaatcgattcgatcgtggtacgttaattaa

SEQ ID NO: 115570 - DNA, 705 bp, Zea Mays
ggtcgtgccttctccctcttacttccccagcacaacgcctgggcgttttgctctcagcgctcgacctccctctgtctttctcctctagttcgatgtggaactcgcccagcactccctgctcgacgtatttgccgtcgcttccctggccggagtggcagcagcactcaagatcttctcccacgcgcgctccttccttgctcctctctcatggccgccatgaaatttgcccatgctgtacctcctctcgccggagctcgccgaacgttgctccttggacgggcttcccagcaagctccatcgcgttgtcgccttggtccgagctcgcccatcccctgctcttccatggccacgccctcagctcgcgcagcttgcttgtggcccggtcactctccctcagcctcagccttgaactatcacggtccggctcgccgtcaacccgctcggactctgccctggccaagcctttttgctcgtgccgttgtgccgttgtcgtcattcgtctccatatggtggatacaacaacgtcgttgtttactccatggggttcatcgtcgactttgtcatccgaagagtgatcctagagttggataaaaatatgagaaaagtccgtgcagcaattgccagaagctcgaccggatatccaaactgagaaccgtcgttgtcctcgcggttatcaaatcgattcgatcgtggtacgttaattaa

SEQ ID NO: 115571 - DNA, 1179 bp, Zea Mays
tttgctgcatgcgtcgttgatcggagtcggagatagatcatggtgggctgctttgcatgcttcaagccagcgggtgaccaagaggcggacgaagaggcgccactgccgtcgacgtcgaggaggcgcggtcggagcctgcgattgccgtcgtgttcgtcgtccaacaagggtaaccagcaagccgataacccaatagcggcggcgtcgagcagcaacgtcgacagcagagcccgcgcgttcacctacgacgagctcgcggcggcaacggaaaacttccgtgcggagtgcttgctgggggagggcggtttcgggcgcgtgtaccggggccgtctggagagcgggcaggtggtggcggtgaagcagctggaccgcgagggcgtgcagggcaaccgcgaattcgtggtggaggtgctgatgctgagcctcctgcaccaccccaacctggtgaaccttgtgggctactgcgccgacggcgagcagcggctgctggtgtacgagtacatggcgctggggtcgctggctgaccacctgctgctggacaccagcagcagggacaagggcaacgccgctcccgagcaggagcagcgcgcgctgagctgggagacgcgcatgcgcgtcgcgctgggcgccgcccgggggctggagtacctgcacgagacggccaacccgcccgtgatctaccgcgacctcaagtcctccaacgtcctcctcgacgacgccctctgccccaagctctccgacttcgggctcgccaagctgggccccatcggcgaccggtccccgcgcgtgatgggcacctacggctactgcgcccccgagtacgtgcgcgccggcaccatcaccgtcaaggccgacgtgtacagcttcggcgtgctgctgctggagctcatcaccgggcggcgcgccgtggactccaccaggcccaccgcggagcagctgttggtggcctgggctatgcccatgctccgggacagcaagaggtaccgcgagctggccgatccgctcctgcgagggggcttcccggagagggacctcaaacaggccgtggccgtggccgccatgtgcctgcaggaagaggcatccgctcgcccgctcatgagtgacgcggccatgacgctggcatacctcgcagaagcggcggcgtcggcagcggcaagcagcagtactagctaatatact

SEQ ID NO: 115572 - DNA, 845 bp, Zea Mays
gcttcccagagggagccgggagattactgtgacctagctgcccctttcctcgcgcctctcttctctcacgcgcggtgaacacggcgccccgccgctgtgcatcgcgcctcaaaccccgaccaccaatcacccaccactacaacctgcgatcaatccgggaatccgccccaattcctatcaacctggtatcagcaatttcaggttcgatcaccatgtctagccccaaccctccaccttctccccaccacccgcagtcgccaccatctccggggctgtcccagccgccaggtgcccagctgcaggcaccggcatcccaggggacgaacgcccccatgctcgacgatcacacggcggccgcgctggtgcccactgcgccgccagccgacgtcctggcgggctcttcccgcctccactctgctccgtagcgccgccatccgtggtggcaatccaccgaacaccgtgcgtgcgttgccgcaatggcctcgcaccacctcaccagccccacgcacctcctccacacccgccatgccaccagggagagcctggcgtcctacgcagcgcacccgacgcacgtggccgccgtgcaggggcacgtcctccccaacgcgctcgacatcaccgctgtcaactgggtcaacgccgtgccgctcacatcccctacgacccttggcagcttcgtgcgcctcacgctggccaaggcgaaggaaggggtggaggtcggccagctagtggagaagttggctgtggcgacccagaccgtcggggatgccgaggtgagctcggggagaaagatgagaacttttcccccgcgagcaaggagtaccagttcggtgctccggtgaggg

SEQ ID NO: 115573 - DNA, 363 bp, Zea Mays
gctcttaccactagatgcagaattaggcttgcctgtctctgccatgagttcagaaagtttcttcttcttcctaccatgctctgagatgggcactcgtttgcttattgagttttcgttatgtcccaatcttctcttgccaggaaaaatgggatccttggcattgctatctccaagtctatgatacccatcctctgtgattctacccttcttgtgtgcagagcctgccccatgcccctgatttttttctttaagaatgggggcgtctttgcttttccctgttaattcctgaattccatcctttgccagccttttcaaaccctctaaagcatcttccttcttactcgtggatctcagtgtgcgtcc

SEQ ID NO: 115574 - DNA, 91 bp, Zea Mays
gcacccgcatcaaaatccagtacttggattattaagaaacggagcttaaaaaacatgcttttatacaatgttcaagaaagcgcgattaggt

SEQ ID NO: 115575 - DNA, 2888 bp, Zea Mays
atggtaattgttatgccaagaaaagattaatgccgctagattggatcttggacaaggtgaaggaggaggaggaagagacaggaaaggatgctgcagcgggcagcgagcaatgcatattcatggtggtgggcaagccacatccgcaccaaacagtcaaaatggctcgacaaccacctccaagatatggaacacagggtcaagtgcatgctcttgctccttggggaggaggccgattccttctcaaagagggcagagatgtactacaagaggcgacctgaggtgatcactcaggtggaagaggtataccgggcatacaaggctctggctgaccggtatgacatcatgtcaggggagctacacaaagcaaatcacaccattgccacagcctttcctgaccaggtccagtatgcaatgctggaagaggaggatgataacatcccaaaggcgttcaccccagtcgacccacgcaaaatccacaagtcaactgttgatggattgatgatgaagaagaagaagaaaggagagcatcctgggtccatggttggaggagcaacctcagctccagtcaacaaggagaatgcacgggaagagatcagcaggctacagaaagctatattggccatgcagactgagaaagagtttatcaaaagctcctatgagagcggcattgcaaagtactgggatctcgagaaggaaatccatgacatgcaggagcaagtttgtcacttccaagataagtttgatgaaagcgcggtgattgaagatgatgaagccagagccttgatgacagcgactgccctcaagtcctgcgaagacaccattgtcaaactgcaagaacagcggaaggcatctgcggagcaggcagtgggagaatcggaaagagtcaaggttttcagagagaagctcaaggctataatgaacaaacacggcaaatctctaccggtctctctggacctttcagagaagaacaccactcggaagagccatggcgcaggaatggagaatgtgtgctatgtcaaacaatgtgcaatagacgcggagtctatcattgacaagatcaaggaacacttcgagtctgactgcaacatctccatggcagaagttacagagaggatcgatgaaattgtcaacatggtcgttgacttggacctcatggtttcagcacaaacctcccagatcgatcgacttcgccaggaaaacaatgagctggaggattccctgcaaggcctggaggacgagaatactaccgagctgcccagcactggatcaaatgaattgatcgagaagcttaggcaagcagaagaggagcttgtcagggctcaggctctcgaaagctccttccacaaagatgaaagcacaatccgttccaacttcttagaagcaataagcagactccatgagatatcagagctgttgctatcgccggtctgtgattccgcatctgccgcacgcacgtcccaagaaattgagtctttagggccgtcgtcatcaaatgagtgctgtgacatggagaaggtggtggatgatcctaacgatgcacttgtggcagacagcgatgagtcgtcgtcaggtagcactaagcttattagtgagcaacagttagacgtcggccagcaggacagaatttcacgtgagaggggttcattggtacggcttcgtcacatttcttcaggtaaccttggtggaggttgcgatggacaggaaggcctgtcgtcttctgccgtgactgacatgatgaagctgcaggagaggctcacagatagtctagacgataaggagaaggtcctcttaggtgagtacacttcactccttgaggactacaaggacgccaagaggaagcttgtagagatggagaaaaagaaccaggactgcctgaatgagatccggacactgcgtgaaggaatcatcaaaagcagctctgcagcagcaggggaaggaggcagcgagggttcgtgcaagaggagcttctctcgccggggtcacaggaggaccccaagctactcgtctatccatcagaggagaccaagcgtttcttccatttcaaggctgataaggatgggctcggccatccaagaaggtgcagcagggagcggcaagcaaagtgacctactggacgacctgaggctgccggctatcgcggaggcagagaatgcctcgcctctggaagagaagttcagaagggacatcgacacgctcttggatgagaatctcgagttctggatgaagttcagctcgtcgctgcagcgggtgcaggagttccagaacaagcacgacggcctgcagcggaagctgcagctgataaacgaccaagacggcaagcaggacgggtccacggagaagcagctgagggcgttcaagacggagctgcaggtgtggtcggagcagaacgcgatgctgcgaggggagctgcagtgcaggttcacgtcgctgtgcgacatacaggatgagatcacggcggcgctcgacacggaggccgaggaggaggctcacttcacgtcgtaccaggccgccaagttccagggagaggtcctcaacatgcagcaggagaacatcagggtgtcagacgagctgcaggcggggctggaccacatcaagggtctccatgcggaggtggagaaggcgctggccaagctgcacaagagcgtcaacctgccgccgcagcaagcaggagccgacaaggaggaggaggaggaggacgacagctcgtctggccatggcggcggcggcggcagcaagtccaaggtgccgttgcagtcgttcctcttcccggccaaacctaagaagacgtctctgctggcccgtgtcacgccagtgctcccgaagcagtcggtggacatgaagtttcttgccaagttgccaaggtagcaagcatgctctgttagatacca

SEQ ID NO: 115576 - DNA, 2033 bp, Zea Mays
attgttttgggtccggaaaataaaatccaattttctcagtctcgagcgcccgcgtccctcgccccgtcgcgacttcgcgagtcgccccgtcccaggctcccagcgaccccgccctccggcagtccggcgcgggggctcctctccgatccggtgagccgaacgaggaccccaactccccgaagaaagcggccacagccagagccagggtggctcggctctcctctcacagactgcgccgcagcgcctagcgctcggctggcagccgccccggccggtcggccccgcccctgctgcctacatccgcctgcagccagaagatctgcctccagcgaccgccctgcctgcccttgtggcttctgtggttctgcacaccagcacacgcacttgtccccaaacaacggcggcggcgatgagtatctcagaagagcttcccggcgaaggatctgacggtgaggaggaggtcttcatcaacgaggaggacatcatccacgagataaccatcgacgaagaagatctccccgaccgcgacgacgaagatgacgacgtcgtcaacgggatggttgattccgaagacatcgatgattctacatacgcatttcaaggccaccaagatgaagtcttcattgtcgcctgcagtcctacagattcatcacttgtggcttctggaggcaaagatgataggggattcctgtggaggattggatcagaagagggtgccctggagctgactggacataaggatactgtcggcacagtggctttcagttcagatggaaatttgttggcttgtggaagttttgatgggcaaataaatgtgtggaatacagctacacgaactctcaagggaacccttgagggttccgggtcaggttttgagtggcttaaatggcattctcggggacatttgataatcgcaggatcagaggattgtaatgtatggatgtggaatgccgaccataatgccattctgaatacctttgctggacatagtaacacagtgacatgtggtgattttactccagatggtaaacttatatgcactggatcggatgatgcgtctttgaggatatgggacccaagaagtgcacaaagcagacatgttgttcgaggccatggctaccattctgatggattgacatgcttatcgatgacttcggattcacaaacggttgttagcggctccaaggacagttctgtgcacattgtgaatttaaactcgggccaggtcgttggctcattagcaggccacaccaattctattgagtgccttggtatctcgtcaagctatggctgggtagctacagggagcatggatcaaaagctgatcatctgggacctcacgcaccaatccagccgatgcatttgcgaacatgatgagggcgtgacatcgctgacatggctaggttcgtcaaggtacgttgcgtcaggatgcattgacggcaaggtgcgcatctgggacagcctctctggagcctgcgccagggagttcagtgggcatgcagatgtagtacagtcgctggccatcactgctgacggcaacaccatggtctccgcctcatcagatggctccgcccgtgtgtttgacatctccatgttcaagtgaaggaaaccgggacggagtacatgtttatgctatggcttgattgtgatgcacgattgatcatggcatgccatggtaatatgcgattgtactactctgctcatggaaaaatcgtgcatttgtattgcatatgactccacttgtagtatctattacagcagaacaaaggatgtatttatatatattccgtttttcccctttggagagaaggaatcaattgtgatagcagtgatagaattcggacgggaattctgtctcaaaattatattaatatgagctagtttgggaaccccattttcctaagggcctgtttatttgattggaattgggttgaattgaaatttaattcttggctgatttgtttggcaagttatagaattggaaattaactttccatctatttcttgggctggaattagaagccaaaaaaaca

SEQ ID NO: 115577 - DNA, 913 bp, Zea Mays
attgttttgggtccggaaaataaaatccaattttctcagtctcgagcgcccgcgtccctcgccccgtcgcgacttcgcgagtcgccccgtcccaggctcccagcgaccccgccctccggcagtccggcgcgggggctcctctccgatccggtgagccgaacgaggaccccaactccccgaagaaagcggccacagccagagccagggtggctcggctctcctctcacagactgcgccgcagcgcctagcgctcggctggcagccgccccggccggtcggccccgcccctgctgcctacatccgcctgcagccagaagatctgcctccagcgaccgccctgcctgcccttgtggcttctgtggttctgcacaccagcacacgcacttgtccccaaacaacggcggcggcgatgagtatctcagaagagcttcccggcgaaggatctgacggtgaggaggaggtcttcatcaacgaggaggacatcatccacgagataaccatcgacgaagaagatctccccgaccgcgacgacgaagatgacgacgtcgtcaacgggatgggtaggggtggattttgcttggagctgcagctttcagtctatgcgagtgtttctttatctgttttttccatttattcgccagttagcctcccagatagttcttgaggagattgatatattttttgttctgacatagtgtggaatgatttgtatattctagtgttatctaatgttcttgtatcacttattcgtttgacacgtgcctcctagcttggctgttctagacttccaatgatgcagtggcgaagctggaacaaaattgacgaggatgcatttggctttgtgggtacataagatttttttctaggagtgcatatatgttgaaatcttaactaaatctataggatttgtgaa

SEQ ID NO: 115578 - DNA, 638 bp, Zea Mays
tcaaatgtgtccatagatgagaaacactttgatctgcttaactattggaaggtgaatagtcatagatttcctgtggtatcttctatggcaaagaggttcttggttgttccagctagtagtgtgtcatcagaatccacttttagcactgggggtaggatccttgatgattataggagttcattgaagccagcaacagttcaggctttggtgtgtgcttctagttggatacgagggtctcgaagttcacctattcttgtaattggagaaggtgatgatggtggcatcgagtccgtggaatttccaaagtgtgtggtggcaagtaattaggcacatggtcacatactcacatggaggagatggaggagagggagagataggacccgggagaggagacatgagaggcacatggtcattatattttgttggttgtaactataagcatgtaattgttggttgcaactgttgctaacctggcatattttgttggctccctacaactttgtcctgaactcctgaacctgaagtcctgatctataattgttggctgcatcactacatgtattttggttctagaactaaaactctgtaagtatggaattatggattatggaatggaatggaactattatgaactataa

SEQ ID NO: 115579 - DNA, 350 bp, Zea Mays
ctccgatagtagcagcatcttttactctagctctttttctttttaatagagatgagcaggtgatgattgatgagcatccagcggctggatcttaaaaatccgcattcgccattgaagttttgttgagatctcgaagctgtaaaaactcggacgaactcaagcgagacaaagatttctcttggtgacacggactgttataagatgttttctgtgaggaaaaagttagtctatcatatttttacttgccactatttttatttggtttgtaaaataaaatgagttgatccactcatagttagttaatactaaggttatcttcagtaacatcctctaaattttattccctaaaa

SEQ ID NO: 115580 - DNA, 949 bp, Zea Mays
aaatcctttttacgcagcgacaacgagccaggcacctccacctcatccgctgacagacaagagcgcaatcacccgcgggccttgggcttgggccttggaatagggtaccaccaaccaatcaatcgaagaagaggcccgccggccgccgcggtttgctcgctatcgctcccttgctggctgcggtgcgggtgcgccgccgtcgacgagggagtccctggctccctccctccgggttcgaattcgggttgcttccttagggttcagtggcagtacatagcatggccctaaagctcggctggaggagaggaggaggaggctggcttgcgcttccattggggaatcggaccaccgcgtcttcctccgcatgcagcagctccaacttgttcgtcggcggtctttcctacgacactaacgagacagctctcaaggatgttttctctcaatgtggtgatgttattgcggcgaaggttatatgccatcccacaagcggcaagtcgaaaggatttggttttgtcaagttttcttcgcaaaaccaagctgacgcagcattgcaaaagatgaacggtcaggtgcttgatggaaggaaaattcgggtgcactatgcaaacgggactggatgacttgtgatttagaaacagatagaaaatgagatgagcaggtgatgattgatgagcatccagcggctggatcttaaaaatccgcattcgccattgaagttttgttgagatctcgaagctgtaaaaactcggacgaactcaagcgagacaaagatttctcttggtgacacggactgttataagatgttttctgtgaggaaaaagttagtctatcatatttttacttgccactatttttatttggtttgtaaaataaaatgagttgatccactcatagttagttaatactaaggttatcttcagtaacatcctctaaattttattccctaaaa

SEQ ID NO: 115581 - DNA, 944 bp, Zea Mays
aaatcctttttacgcagcgacaacgagccaggcacctccacctcatccgctgacagacaagagcgcaatcacccgcgggccttgggcttgggccttggaatagggtaccaccaaccaatcaatcgaagaagaggcccgccggccgccgcggtttgctcgctatcgctcccttgctggctgcggtgcgggtgcgccgccgtcgacgagggagtccctggctccctccctccgggttcgaattcgggttgcttccttagggttcagtggcagtacatagcatggccctaaagctcggctggaggagaggaggaggaggctggcttgcgcttccattggggaatcggaccaccgcgtcttcctccgcatgcagcagctccaacttgttcgtcggcggtctttcctacgacactaacgagacagctctcaaggatgttttctctcaatgtggtgatgttattgcggcgaaggttatatgccatcccacaagcggcaagtcgaaaggatttggttttgtcaagttttcttcgcaaaaccaagctgacgcagcattgcaaaagatgaacggtgcttgatggaaggaaaattcgggtgcactatgcaaacgggactggatgacttgtgatttagaaacagatagaaaatgagatgagcaggtgatgattgatgagcatccagcggctggatcttaaaaatccgcattcgccattgaagttttgttgagatctcgaagctgtaaaaactcggacgaactcaagcgagacaaagatttctcttggtgacacggactgttataagatgttttctgtgaggaaaaagttagtctatcatatttttacttgccactatttttatttggtttgtaaaataaaatgagttgatccactcatagttagttaatactaaggttatcttcagtaacatcctctaaattttattccctaaaa

SEQ ID NO: 115582 - DNA, 1112 bp, Zea Mays
aaatcctttttacgcagcgacaacgagccaggcacctccacctcatccgctgacagacaagagcgcaatcacccgcgggccttgggcttgggccttggaatagggtaccaccaaccaatcaatcgaagaagaggcccgccggccgccgcggtttgctcgctatcgctcccttgctggctgcggtgcgggtgcgccgccgtcgacgagggagtccctggctccctccctccgggttcgaattcgggttgcttccttagggttcagtggcagtacatagcatggccctaaagctcggctggaggagaggaggaggaggctggcttgcgcttccattggggaatcggaccaccgcgtcttcctccgcatgcagcagctccaacttgttcgtcggcggtatggtaacagctttcaattacagtagaagaagaattggcaacggatgatgcagccttcctttttattttctctgcaggtctttcctacgacactaacgagacagctctcaaggatgttttctctcaatgtggtgatgttattgcggcgaaggttatatgccatcccacaagcggcaagtcgaaaggatttggttttgtcaagttttcttcgcaaaaccaagctgacgcagcattgcaaaagatgaacggtcaggcaagactatcttctttcatatatatcatcatataggacaagaacacctgcctgcctctcaccgacacaaattaagcttcgcaggtgcttgatggaaggaaaattcgggtgcactatgcaaacgggactggatgacttgtgatttagaaacagatagaaaatgagatgagcaggtgatgattgatgagcatccagcggctggatcttaaaaatccgcattcgccattgaagttttgttgagatctcgaagctgtaaaaactcggacgaactcaagcgagacaaagatttctcttggtgacacggactgttataagatgttttctgtgaggaaaaagttagtctatcatatttttacttgccactatttttatttggtttgtaaaataaaatgagttgatccactcatagttagttaatactaaggttatcttcagtaacatcctctaaattttattccctaaaa

SEQ ID NO: 115583 - DNA, 1023 bp, Zea Mays
aaatcctttttacgcagcgacaacgagccaggcacctccacctcatccgctgacagacaagagcgcaatcacccgcgggccttgggcttgggccttggaatagggtaccaccaaccaatcaatcgaagaagaggcccgccggccgccgcggtttgctcgctatcgctcccttgctggctgcggtgcgggtgcgccgccgtcgacgagggagtccctggctccctccctccgggttcgaattcgggttgcttccttagggttcagtggcagtacatagcatggccctaaagctcggctggaggagaggaggaggaggctggcttgcgcttccattggggaatcggaccaccgcgtcttcctccgcatgcagcagctccaacttgttcgtcggcggtatggtaacagctttcaattacagtagaagaagaattggcaacggatgatgcagccttcctttttattttctctgcaggtctttcctacgacactaacgagacagctctcaaggatgttttctctcaatgtggtgatgttattgcggcgaaggttatatgccatcccacaagcggcaagtcgaaaggatttggttttgtcaagttttcttcgcaaaaccaagctgacgcagcattgcaaaagatgaacggtgcttgatggaaggaaaattcgggtgcactatgcaaacgggactggatgacttgtgatttagaaacagatagaaaatgagatgagcaggtgatgattgatgagcatccagcggctggatcttaaaaatccgcattcgccattgaagttttgttgagatctcgaagctgtaaaaactcggacgaactcaagcgagacaaagatttctcttggtgacacggactgttataagatgttttctgtgaggaaaaagttagtctatcatatttttacttgccactatttttatttggtttgtaaaataaaatgagttgatccactcatagttagttaatactaaggttatcttcagtaacatcctctaaattttattccctaaaa

SEQ ID NO: 115584 - DNA, 1684 bp, Zea Mays
ttcttccccaccggaaaccaccacccacctcccctcctcgatgggccacgtcctcagctgcagccgcgacggcgctgacttgttccgcgcggtgcagcacggcgacctggacgccctcctcgccgtcgacccggagctcgcccgccgcgccaccaccatatacgaccgtctgtccctgctccacatcgccgccgccaatggccagctgcaggtgctctccatgttgttgttcgatgacggtggcgccggcgggaacgtggacgtgctgaaccggaagaagcagaccccgttgatgctggcggccatgcacggcaggacggactgcgtgctcagcctgctagacgccggagcaaatatcctcatgttcgactcggtacacgcgcggacatgcctccaccacgcggcctactacggccatgcccactgcctccaagccatcctctcggccgccaagaccacgccggtggccgactcatggggcttcgcgcgcttcgtgaacgtgagggacgagcacggcgccacgccgctgcacctggcggcaaggcaggggcggccgcagtgcgtccgccacctgctccacgccggcgccatcgtctccgccccaacagcctcctacggcttccccggcagcacggcgttgcacctggctgcacgccgcggcaacctggactgcgtccgggagctcctcgcctggggcgctgaccgcctccacagggactcggcggggaggatcgcctacgcggtggccctcaagcacagccaccgagagtgcgccgcgctgctgaacccggcggcggcggaaccaatggtgtggccgtccccgctcaagttcatcagcgagctcagcccggaggccaaggtgctcctggagggggctctcatggaagccaacagggagcgcgagaagcgcatcacggacaccacaaccaaaacaaacaacgacggcggccttgacgacgacgacgagcagctgtgcggcatctgcctggagcaggcgtgcaccatggaggtgcaggactgcgggcaccagatgtgcgccgcgtgcacgctggcgctgtgctgccacagcaagcccaacccgacgaccctggcactgcagccacccgcctgccccttctgccgcgccaccatcacccggctgctggtggccaacagcaagactactgctacctccaacagcttcaggggactcacctcggccatcaggtccttgtccttgtccaggattgctcgtggctccgggagggtagccgacagctcattaccccagtcattctttgaggaacaaggatccaaatgattaccaagcctcattacctgcaataatccactccagtcattctttgaggatcaatcaaggatccaaatgattatcaagcccaagcaagatggagtattacaacaactaattaatggtgcccgatgcaatacaagtagatgtttttttatacaagggagggaatgagcagagttagtagccactaaattttggatttgttagtcaatgatatgttgtgtattttgtgttgtagtatatataggtgtgagtctgggacatcagcattcagcgtcataaaggccggagcatgaacagattcagaatgcatgcaatatgatgcgcatggagatatatgtaaaggatgtgtttcctttttcaacaacaacaacaaaaaaatacaacaga

SEQ ID NO: 115585 - DNA, 1755 bp, Zea Mays
ttcttccccaccggaaaccaccacccacctcccctcctcgatgggccacgtcctcagctgcagccgcgacggcgctgacttgttccgcgcggtgcagcacggcgacctggacgccctcctcgccgtcgacccggagctcgcccgccgcgccaccaccatatacgaccgtctgtccctgctccacatcgccgccgccaatggccagctgcaggtgctctccatgttgttgttcgatgacggtggcgccggcgggaacgtggacgtgctgaaccggaagaagcagaccccgttgatgctggcggccatgcacggcaggacggactgcgtgctcagcctgctagacgccggagcaaatatcctcatgttcgactcggtacacgcgcggacatgcctccaccacgcggcctactacggccatgcccactgcctccaagccatcctctcggccgccaagaccacgccggtggccgactcatggggcttcgcgcgcttcgtgaacgtgagggacgagcacggcgccacgccgctgcacctggcggcaaggcaggggcggccgcagtgcgtccgccacctgctccacgccggcgccatcgtctccgccccaacagcctcctacggcttccccggcagcacggcgttgcacctggctgcacgccgcggcaacctggactgcgtccgggagctcctcgcctggggcgctgaccgcctccacagggactcggcggggaggatcgcctacgcggtggccctcaagcacagccaccgagagtgcgccgcgctgctgaacccggcggcggcggaaccaatggtgtggccgtccccgctcaagttcatcagcgagctcagcccggaggccaaggtgctcctggagggggctctcatggaagccaacagggagcgcgagaagcgcatcacggacaccacaaccaaaacaaacaacgacggcggccttgacgacgacgacgagcagctgtgcggcatctgcctggagcaggcgtgcaccatggaggtgcaggactgcgggcaccagatgtgcgccgcgtgcacgctggcgctgtgctgccacagcaagcccaacccgacgaccctggcactgcagccacccgcctgccccttctgccgcgccaccatcacccggctgctggtggccaacagcaagactactgctacctccaacagcttcaggggactcacctcggccatcaggtccttgtccttgtccaggattgctcgtggctccgggagggtagccgacagctcattaccccagtcattctttgaggaacaaggatccaaatgattaccaagcctcattacctgcaataatccactccagtcattctttgaggatcaatcaaggatccaaatgattatcaagcccaagcaagatggagtattacaacaactaattaatggtgcccgatgcaatacaagtagatgtttttttatacaagggagggaatgagcagagttagtagccactaaattttggatttgttagtcaatgatatgttgtgtattttgtgttgtagtatatataggtgtgagtctgggacatcagcattcagcgtcataaaggccggagcatgaacagattcagaatgcatgcaatatgatgcgcatggagatatatgtaaaggatgtgtttcctttttcctaggcttcacaaattgttacgagcctttaatattaattttagttaaaaaataaatatgtatagtgtctgatcttaatccgatccttaaattttatatt

SEQ ID NO: 115586 - DNA, 1919 bp, Zea Mays
atacgcatggctacacaagagatgggtgggtcttgtgtccagtcggggtgggagttgggctcgtgcagtgcagtgcagtgcactgcaggtgcagtcttgctcgcctgtcttcctcggcaccgggacagcggacctccaccgcaactgggccatctgttctccttcctcctcttcctccgccaccgcgcttctgaggaggctagggcgatgcaaccgcttccgctttgttattagcaaagggaaccgtccgagaacgggcagccaattctccgatgccgtccgctatggccaaatccctcctcctccctcaccctttcttctccgtctcaccccgcccacaccctcatccgcgcgccggattccctgttctcaagccccgccgcgccgcgctgctcgcggccacgcccgcgccggacgccaacaccagctccaacaacaaccccctcgccgcgctctggcgccgcaccctgcagcccctcggcgactacggcttcggcaagcgcagcgtctgggagggcggcgtcggcctcttcatggtctccggggccgccctcctcgccctcgccctcgcatggctcaggggattccagctccgctcccgctttcgcaagtacaacaccgtcttcgagttcacgcaggcgtgcggcatctgcgtcggcacgcccgtccggatacgaggggtcaccgtcggatccgtcgtccgcgtcgactcctcccttaggagcatcgatgcaactgtcgaggttgaagatgataaaatcatcataccacgaaattcaatggtcgaggtgaatcagtccggtcttctaatggagacactcattgatatcacaccaaaggatccactgcctgcaccttcagtaggaccacttgacccagactgcaccaaagaaggcttgattctctgtgacaaagagaggatgaaaggacagcaaggtgtaagcttagatgcattggtgggaatatttacccgtctgggtagagacatggaggagattggtgttagcaaaagctataagttagctgaaaaagttgcatctataatggaagaagcacaacctcttcttacacggattgaggctttagctgaagaaatgcaacctttgctctctgaggttaatgatagtgatctgctgaaggatgtggagactatagctaaaggcctggccgacgcgtctggtgacctaagaaggctgaagtcgtccatgcttaccccagagaacacagatcttattaagcagtctattttcacccttatatttaccctaaagaacattgagagtatcagctccgacatctctggtttcacgggcgatgagacgacaaggcggaacatcaaacttctgatcaagtctctcagcaggctattgtgattggtgtgcataatgatggattgctttgcatgggacggggaatggggaaatggttgctggtggggggtctctcggtctcggtggcacagaggttattcacccccgacagtagccctcgagcctctagagaagtcgggcgcacctttggaggtttgttttaacgatgacgcttttggcccttattgaggacgtgtgagtggactcaatgagtctagcccttcgggcctctaaagggaccatgggttcgttcggaaggtccttcgtttgggatgtggtacacgttcccgcctaaggatgttctgtgatcacgctttcgatcttgttttgcgatgtcggcttttgagccttcgctcgtgtggatcgatcatagagtcgttgtgactctttcttcgtcatttctttcgtgtctcgttcgctggagacggggggttgtaccacgcctccactttgccttgatggtatggtagttgcaaacgagttcattcgagtgatgactcttaaaggaaaatggatcttgacccatttgattaaggggttttggtgttt

SEQ ID NO: 115587 - DNA, 1937 bp, Zea Mays
atacgcatggctacacaagagatgggtgggtcttgtgtccagtcggggtgggagttgggctcgtgcagtgcagtgcagtgcactgcaggtgcagtcttgctcgcctgtcttcctcggcaccgggacagcggacctccaccgcaactgggccatctgttctccttcctcctcttcctccgccaccgcgcttctgaggaggctagggcgatgcaaccgcttccgctttgttattagcaaagggaaccgtccgagaacgggcagccaattctccgatgccgtccgctatggccaaatccctcctcctccctcaccctttcttctccgtctcaccccgcccacaccctcatccgcgcgccggattccctgttctcaagccccgccgcgccgcgctgctcgcggccacgcccgcgccggacgccaacaccagctccaacaacaaccccctcgccgcgctctggcgccgcaccctgcagcccctcggcgactacggcttcggcaagcgcagcgtctgggagggcggcgtcggcctcttcatggtctccggggccgccctcctcgccctcgccctcgcatggctcaggggattccagctccgctcccgctttcgcaagtacaacaccgtcttcgagttcacgcaggcgtgcggcatctgcgtcggcacgcccgtccggatacgaggggtcaccgtcggatccgtcgtccgcgtcgactcctcccttaggagcatcgatgcaactgtcgaggttgaagatgataaaatcatcataccacgaaattcaatggtcgaggtgaatcagtccggtcttctaatggagacactcattgatatcacaccaaaggatccactgcctgcaccttcagtaggaccacttgacccagactgcaccaaagaaggcttgattctctgtgacaaagagaggatgaaaggacagcaaggtgtaagcttagatgcattggtgggaatatttacccgtctgggtagagacatggaggagattggtgttagcaaaagctataagttagctgaaaaagttgcatctataatggaagaagcacaacctcttcttacacggattgaggctttagctgaagaaatgcaacctttgctctctgaggttaatgatagtgatctgctgaaggatgtggagactatagctaaaggcctggccgacgcgtctggtgacctaagaaggctgaagtcgtccatgcttaccccagagaacacagatcttattaagcagtctattttcacccttatatttaccctaaagaacattgagagtatcagctccgacatctctggtttcacgggcgatgagacgacaaggcggaacatcaaacttctgatcaagtctctcagcaggctattgtgattggtgtgcataatgatggattgctttgcatgggacggggaatggggaaatggttgctggtggggggtctctcggtctcggtggcacagaggtaggaagagaaggcatagctaattaacgttccacgaggttttggttattctgcttctaagtttccgaaaatttcttgaatgaacaatcttgaaacaacatcaaaagagcagtcatgaggggagagatcggtctccctccctccttgttgagctgttggtacttggtagacccatttttttacgtcaaataaaataaaatcaattgcatgctcacagacatatcaattgcacatcctacatgacttctaggctctacgacatttgggtagtcagttttttcacgtttaggcgcacgaatttcagtcattctcgaaggtctgggaacgatcggaccctacagggttccgattatatttacgccaactagagatttcgggaataacaggacgtcctatttggtttggatccaccctttcacaaatcgatatttttagtggttgataaaacaatttttagttacttttagcttgta

SEQ ID NO: 115588 - DNA, 1517 bp, Zea Mays
atcatcatgcaaatccaaatccaattccctcccaacatctcttgcgttgattttgcaggaaccgtccgagaacgggcagccaattctccgatgccgtccgctatggccaaatccctcctcctccctcaccctttcttctccgtctcaccccgcccacaccctcatccgcgcgccggattccctgttctcaagccccgccgcgccgcgctgctcgcggccacgcccgcgccggacgccaacaccagctccaacaacaaccccctcgccgcgctctggcgccgcaccctgcagcccctcggcgactacggcttcggcaagcgcagcgtctgggagggcggcgtcggcctcttcatggtctccggggccgccctcctcgccctcgccctcgcatggctcaggggattccagctccgctcccgctttcgcaagtacaacaccgtcttcgagttcacgcaggcgtgcggcatctgcgtcggcacgcccgtccggatacgaggggtcaccgtcggatccgtcgtccgcgtcgactcctcccttaggagcatcgatgcaactgtcgaggttgaagatgataaaatcatcataccacgaaattcaatggtcgaggtgaatcagtccggtcttctaatggagacactcattgatatcacaccaaaggatccactgcctgcaccttcagtaggaccacttgacccagactgcaccaaagaaggcttgattctctgtgacaaagagaggatgaaaggacagcaaggtgtaagcttagatgcattggtgggaatatttacccgtctgggtagagacatggaggagattggtgttagcaaaagctataagttagctgaaaaagttgcatctataatggaagaagcacaacctcttcttacacggattgaggctttagctgaagaaatgcaacctttgctctctgaggttaatgatagtgatctgctgaaggatgtggagactatagctaaaggcctggccgacgcgtctggtgacctaagaaggctgaagtcgtccatgcttaccccagagaacacagatcttattaagcagtctattttcacccttatatttaccctaaagaacattgagagtatcagctccgacatctctggtttcacgggcgatgagacgacaaggcggaacatcaaacttctgatcaagtctctcagcaggctattgtgattggtgtgcataatgatggattgctttgcatgggacggggaatggggaaatggttgctggtggggggtctctcggtctcggtggcacagaggtaggaagagaaggcatagctaattaacgttccacgaggttttggttattctgcttctaagtttccgaaaatttcttgaatgaacaatcttgaaacaacatcaaaagagcagtcatgaggggagagatcggtctccctccctccttgttgagctgttggtacttggtagacccatttttttacgtcaaataaaataaaatcaattgcatgctcacagacatatcaattgcacatc

SEQ ID NO: 115589 - DNA, 1861 bp, Zea Mays
ctcaccttccaactaacctgtttcaatttgtattgggagccttgccgtgccggaatattcccctccggcagcctccctggcttcctccccgcgccgccccgccaaccaaacccaacggtggcaccacctcttccttcctcctcctttccttccgcgacaggagaccccctcgcccccgaattaattgcagctgaaggaacccaaggcggcatccatcgatgatgatgctcaccaaggagttcgccctatcgccgccgccaggtgtcgtgccgcgccggaggccgtcggcgagggtcgcacccaccgccgctcgagggggttcgccggtgcccgacctatggctgcggaccgccgcccccgtccccgcttccgccgccgccggcttcgccagcagccacagccacgacggcgactgcgacctggccatgctcgtcaccgacttcctcgagaacggggccaccgccggttccggagactcccgcaatagcagcgacagtgaatccggtctccctgacctcgcccacctcgcggacacgatctcgatgttgaagcagggtggagacgagaaagaaaacgagctgctcgccatggtccactcgctactcctctctatccatgagccgcagcttcagcctttcaaaacaggccaatgtggaggcagctgcatccgccatttgcttgtcaagctcttgagatactcgggaaacgacgcagcagtttgcacatccaaatggcaggggtttgacaagatacctggaggtgactacgagtacattgatgtcataatgcacggtgatactacagctccagagcgtctaatcgttgatatcgacttcagaagccactttgaaattgccagggcagttgattcttatggcaccctgttgaattcgctcccagtggtctttgttggcacccttccgcgactgaagcagttcctgcatgtgatggtagatgctgcaaaatggtccctgaagcaaaactcaatgccccttcctccctggagatccttgccttacctccaagcgaaatggcagtccaagtatgagaggaaagattccattaccgagggaggcttccagagcacatcttctgatcacgcgctgtgcattgggcacctgaagaggctgaaaacgtccctgcagttagagcttgagaccgcaggattactgatgatgccaatcaaggccaacaagaagaggatgccaaagtcatctgagaggcggaggcggcgttcccttctcagctgttgatttatgttccttggacacataagaatactataaaggagaaggaacaacagcttgctgctggctatttttgtttcctcagaaaatggagaaatgagaggcttttttcatccgtccaatacataatggtggagactcttcttacaggtttggagtttacagattaggtaaaacagaaggtggatactaacaggccatgttagtgccagtttttttttttccttttccctttttgaaggcacataagaaaaggacgaagaaaatagttttttttgtttgttttagtttttgcttctttccggcagagatggatatgctagtggtgaatctgctgcactgcatatgccacgtacaagtgagagttagtattacaaaatcaaactttccccgctatatattgatttttttggtgacccattttggtactccagaaactgatagacacgattgattgccgcattgtaaccgtagaatgcacaagttgggtgatacgcttattgaagttgaagaatattcgttgttcgtttgtaattgtaaactggtgatagtggttgagaatgagaagttctctgttcaggcagtgttggtgctagacagctagagcctttaat

SEQ ID NO: 115590 - DNA, 1996 bp, Zea Mays
cttccgctcccctcctgcagtggagtcctcctcctttcccacttgccctgccttccctcgatcgaggcccttccttgttcgtcgaggagagatcgaaatcgagatcgggatcgggagatccaaggaggcgacgcggaggaaggattcttgaggtaaccatctccagtaatccatctcatccaccatggcggtggcggcgccggcctcggacgccaagccgcgcctcaacgtgccaccgtccatggcatccgcgctccgcctcgatcccgtggggctgggggcgggaccctctatgccgtccccctcccgccgactcgccgagcctcccaagacgccctccccatccaagaccacctacagcgaccgtttcatcccctgccgctcctcctcccgcctccagaacttcgcgctaatcgactcccctctctccccagccaaggacgacacgccctactcccgcctcctccgcgccgagctctttggccccgattcacccaaacccaccaccgccacctccgcagcctccgcctcgcccaacaccaacctcttccgcttcaagaaagaccactccgctcccacctcacccttcgctaaagctgccgccgcgcaccatgactgcaccgcgggatccggagacgcgccgtcgccgcagaagccacccaggaaggtccccaaaacgccgcataaggtaggcaacgcgccttcatttcttcccttccttccttcctacttgacaatcccacaaacacttcgtgggcagttctgttgatcaaccctgccgcgtccgtattatgcacgccaggtcctggacgcgccctccctgcaggacgacttctatctcaacctcgtcgactggtcctcgcagaacgtgctcgccgtcggcctcggcacctgcgtctacctctggtccgcgtccaatagcaaggtcaccaagctctgcgatttggggcctagggacagcgtatgcgccgtgcattggtcacgggaaggctcttatctttccattggcaccggccttggagatgtccagatttgggatagttctcgctgtaagcggattagaaatatgggaggtcaccaaacaaggactggggtattagcatggagctcatgcatcttgtcgtcgggtagcagggacaagaacatactgcagcatgacatccgtgtccccaatgactatatcagcaagttttctggtcatagatcagaggtttgtggactcgaatggtcgcatgacgaccgcgagcttgcctcaggcggaaatgacaaccagttattagtctggaaccaacgatcgcaacagccagttttgcggttgacagaacatacagctgctgttaaagcaatagcgtggtcaccacatcagcaaggactcctagcatcaggaggtggaacagctgatagatgcatcaggttttggaacacggctaacggaaatgttctgaactcaattgacacaggcagccaggtttgcaaccttgcctggtgcaaaaatgtgaatgagcttgtgagcacacatggatattcccaaaatcagatcatggtgtggaaatacccatccatgtcaaaggttgcaactctaactggacatacgatgcgtgtgctttacctcgcgtcgtcgcctgatggacagaccatagtaacaggggcaggtgacgaaactctacggttctggaacatatttccatcagttagaacacagactcctgtgcgtgatattgggctctcgtcattctcaagaagccacatccggtgaggaggcggcagggcctggagggaccagatcggaggcagacgaaatgttgtactgatactgagatgttggtttattgagtgattcttttctgtatattgtgaggcccggtaatttttcattgattctttttgttgtttgtacgtgtaaaagacaagaactaaaagtgtaagcgacatttaacttcaccagttggattggtttgttactcattaactttacctaggccattctcaatgaaat

SEQ ID NO: 115591 - DNA, 1882 bp, Zea Mays
cttccgctcccctcctgcagtggagtcctcctcctttcccacttgccctgccttccctcgatcgaggcccttccttgttcgtcgaggagagatcgaaatcgagatcgggatcgggagatccaaggaggcgacgcggaggaaggattcttgaggtaaccatctccagtaatccatctcatccaccatggcggtggcggcgccggcctcggacgccaagccgcgcctcaacgtgccaccgtccatggcatccgcgctccgcctcgatcccgtggggctgggggcgggaccctctatgccgtccccctcccgccgactcgccgagcctcccaagacgccctccccatccaagaccacctacagcgaccgtttcatcccctgccgctcctcctcccgcctccagaacttcgcgctaatcgactcccctctctccccagccaaggacgacacgccctactcccgcctcctccgcgccgagctctttggccccgattcacccaaacccaccaccgccacctccgcagcctccgcctcgcccaacaccaacctcttccgcttcaagaaagaccactccgctcccacctcacccttcgctaaagctgccgccgcgcaccatgactgcaccgcgggatccggagacgcgccgtcgccgcagaagccacccaggaaggtccccaaaacgccgcataaggtcctggacgcgccctccctgcaggacgacttctatctcaacctcgtcgactggtcctcgcagaacgtgctcgccgtcggcctcggcacctgcgtctacctctggtccgcgtccaatagcaaggtcaccaagctctgcgatttggggcctagggacagcgtatgcgccgtgcattggtcacgggaaggctcttatctttccattggcaccggccttggagatgtccagatttgggatagttctcgctgtaagcggattagaaatatgggaggtcaccaaacaaggactggggtattagcatggagctcatgcatcttgtcgtcgggtagcagggacaagaacatactgcagcatgacatccgtgtccccaatgactatatcagcaagttttctggtcatagatcagaggtttgtggactcgaatggtcgcatgacgaccgcgagcttgcctcaggcggaaatgacaaccagttattagtctggaaccaacgatcgcaacagccagttttgcggttgacagaacatacagctgctgttaaagcaatagcgtggtcaccacatcagcaaggactcctagcatcaggaggtggaacagctgatagatgcatcaggttttggaacacggctaacggaaatgttctgaactcaattgacacaggcagccaggtttgcaaccttgcctggtgcaaaaatgtgaatgagcttgtgagcacacatggatattcccaaaatcagatcatggtgtggaaatacccatccatgtcaaaggttgcaactctaactggacatacgatgcgtgtgctttacctcgcgtcgtcgcctgatggacagaccatagtaacaggggcaggtgacgaaactctacggttctggaacatatttccatcagttagaacacagactcctgtgcgtgatattgggctctcgtcattctcaagaagccacatccggtgaggaggcggcagggcctggagggaccagatcggaggcagacgaaatgttgtactgatactgagatgttggtttattgagtgattcttttctgtatattgtgaggcccggtaatttttcattgattctttttgttgtttgtacgtgtaaaagacaagaactaaaagtgtaagcgacatttaacttcaccagttggattggtttgttactcattaactttacctaggccattctcaatgaaat

SEQ ID NO: 115592 - DNA, 108 bp, Zea Mays
gggagagggagggatagagaggaggatacatcctcaccggtgagaggcggtcgacgacgcgaggagaggcggcggcgcgaagggaggcgactgcacgagtggaggcgg

SEQ ID NO: 115593 - DNA, 827 bp, Zea Mays
gacgaccacaaaatcgtagtagtcacagaagttggaagaacaacaactgtgtataatacaagtgatcaatggaaccatgtttagcttaaaaaaagaccgcagacccgcagactgtcagccgttaaaaaaaagaaaaaggaaaaaataaaaaccagacagccagccccgagccccaaacggccaaacctccttggacacgactcgccgcacccatccccatccgccgccgctgccatggccgacgagattgacacgaggccggcctccgcgggctcccgcggccgtcctgcgcacgctaccgaggacgacgaccgggaggagggcgagatcgccgccgacgccccctcgcccgccctccccgccgcgcacccgctcgagcactcgtggaccttctggttcgacaacccgcacggcaagaacaagatggccgcctgggggagctccatccgacccatccacaccttctccaccgtagaggacttctggggcctctacaataatatccatcaccctagcaagttgatcggtggagctgacttccattgcttcaagaacaagattgagccaaaatgggaagaccctatttgtgctaatggcggtaaatggaccatcagctgtggaagaggaaaatctgacacgctgtggctgcacaccctgttggctatgatcggcgaacaattcgactatggtgatgaaatttgtggagcagtagtcagcgtgcgtagcaagcaggaaagaatagctatctggacaaaaaatgctgctaatgaagctgctcaggtacggtcgtatgggtgctgcagcctgcagtcgcatctctttctaag

SEQ ID NO: 115594 - DNA, 1756 bp, Zea Mays
tactggtacaagtccagattcacaatatacgagccaaatctgccatggtttacggatcttggatctctagattaattaacgcattagtttctgactatgcctaatccatagcactctcattcagcttctaacacttgtttatacagcgggaaagatcaattctgagagcatagttactgtcttagcttcatttgcaaggcgcctatccgaagcagatattcattttcacatgttttttgctcacctagttattctagccatttagagatttatccccgaaaccacgcaaacctgttgttctgatgttgcgagctgtctctgcactttttacatgtttttgcccctgctatatcatagatattagccttctcatttgcctttttagaagcagctgtcgatcaatcttacacctctttcggtttgattcatgcacatactgtatgaaatctttattgggtaagcatggtatgtttccattctcaaacatctccagacctacctgctagtccttgttcatactcaaacacacgccttgacaagtctacagtcagtggtggatccaggaatggatcaaaagaggggctataaggcacacttgacggagacgccagcgtatgcggcggacgtcttaggggcagccagcggtgtgctgcaggcttggcgtgctgcagcagcctgcctgcagcttgtgccttgcattggtcgctgagcacctgtgcgctgctagctgctgtagctgctttaggtgtgtcggccatccacactgctagctgctgtggatgcccgcgctgccgcgctggtactagcggcgtggacggaggccggacgcaggtgctgaatggcgcggccaggaaggaggttgtgacctattttagttggactttgtgggctaaaatgatggtatagtataggtgctattgggctgcgactggggcttcaaccctagccctagattcgcccctgtctacagctacagttggtattaagtcaaagtgacacccgcctcatggatctagtttatatgagaaaattcaatctctgtcatgacgcaaaatctgtaatgtatatttttttatattcagaacccgagattcgatttgatctgatgaactgagcttcataggttattggctctcttgcttgacttcctgtcgagtttcttaacggttgtggtgcgtgatcgaaagttggaaggtctgatatttaataacccttcctctcttccttgtgataagtgctcttggtctaatcccgtgtcagacatgtgctgatctatctttggtttggtccttttgtgtccccgtccaactttggctttcgtctataaatatattccatctaatggatctgtgatttcgcagcctctacaataatatccatcaccctagcaagttgatcggtggagctgacttccattgcttcaagaacaagattgagccaaaatgggaagaccctatttgtgctaatggcggtaaatggaccatcagctgtggaagaggaaaatctgacacgctgtggctgcacaccgtaagcagttttattttatcagaaaagggagttttgttcttgacatctgtccttattatagcctccagtcctccacccttacacactgtttcttgtagctgttggctatgatcggcgaacaattcgactatggtgatgaaatttgtggagcagtagtcagcgtgcgtagcaagcaggaaagaatagctatctggacaaaaaatgctgctaatgaagctgctcaggtacg

SEQ ID NO: 115595 - DNA, 660 bp, Zea Mays
attgttgatgattacaaatcggccgtatacctctctatttatagaggaggggggctggaccctttacaaactaattttcgagcttatcccatgattttagctaacaaccgtagcacaaaactcggaaccctaatctgttctgcgcacgcgcggaccgtccggcccacaagcgcggaccgtccggaccgcggaccgtccggcctcagggccggaccgtccgcgctcaatttggtgctcaacacgacccgagcaggattagatgggcgcgcagcaaatccccctccgaccggagcacggcgggcgcgagggaccttgagggagaaggagactgcagccgagcgagctccggccggcatggcgcgacggccagggagcaggagggcgcgcgcgggaaggctgaaaattgcagggaagaacgcaggggagcagcgcgcgccaccatgggcgagctggaggaacgccggagatggggcaggagcgccgtgaggtagaagcaaaggaagtaggcgctgggacagagaagtaccgcggctgaaagaatcaaacgcgcgtgggagggataaggagaagggatcggcggcgagatcttcttccacgagcctgaggcggcgcaggagataacgacggcggctaaaaaaaatctacaggagaatgagcctg

SEQ ID NO: 115596 - DNA, 108 bp, Zea Mays
ggccaagcgatagaccttttatcactttgtgcttccttgaatccaatacttggcccttttgacatagaaaatgtatgctctctagtggaaaagtattatcctgcagat

SEQ ID NO: 115597 - DNA, 195 bp, Zea Mays
atggataattatccattggatataggtatggtggaatttgatatccgcgggtaccgttatggatataataaggtatccgtggatagttttttcgcagtgggcgggcgggtaacgggtatccactggatagcggatacccagcgggtacgggtatggatacagatccatacccacgaacgtttatgggtacggtaa

SEQ ID NO: 115598 - DNA, 892 bp, Zea Mays
tcctcatcgaacatacacataaacctcacttatatccccgccttgctctctcaagagacccagtcacttgccgccgaccgggccatggacgccgacgactcctcgtacgcatcgtcctcctcgttctctccgccgccgtcccccgccgatcatctccgcctgcccccgaagcggcgtgcgggccgcaagaagttccgggagacgcggcacccggtgtaccgcggcgtgcgcgcgcgcgccggtggcacccgctgggtgtgcgaggtgcgggagccgcaggcgcaggcgcgcatctggctcggcacctacccgaccccggagatggccgcgcgcgcgcacgacgtcgccgccatcgcgctccgcggcgccaccgccgccgacctcaacttcccggactctgcccacgcgctcccgcgcgcgcgcaccgccgcgcccgacgacatacgacgcgccgccgcgcaggccgccgagctctaccgcccgtctccttcttcctcttccgcctccggcctgctgctgcaccacggccgccggacgatcgctgccccgccaccgccgctctcactgccgccgccggaggcttcttctacctgctgctggacgaccagtacaggaacccgaggagcaggtaccacgccgacctgctgcgacggcttcctggacgaggattccatctttgacatgccagggctcatccacgacatggcctgggggatgctgctcacgccaccagccatgggccggggcctcgactggggcgcccttgacgacgacgacgaccatagccacgtcgactgcacgctctggacgctggacggatgatgtgatgacaatcatataattccacacaaattgtacggatgtttttgccacccaaataaacgtgtgcttc

SEQ ID NO: 115599 - DNA, 2005 bp, Zea Mays
atcttcatctgcctgctggtgccggactgacggttagagatggcccacccctccgccgccgccgccgccgtatcctccacggcgcccgctgcaaaccctagttctggcgcccgcgaggaaggaggcgcccgctctccgccgtcgccgtctccgtctcagagggggcgggccaaggtggtgatcgttatgggcgccacgggcgccggcaagtcgcggctggccgtcgacctcgcggcccacttcgccggcgtcgaagtggtcagcgccgactccatgcagctctaccgcggcctcgacgtcctcaccaacaaggctcccctccacgagcagaacggtgttcctcatcatctacttagcgtgattgatccctctgtcgagttcacttgccgtgatttccgcgaccgtgccgtgccgattatacaggaaatagtggaccgcggtggcctccctgtggttgtcggcggcacaaacttctacatccaggctctcgttagcccattcctcttggatgatatggcagaagaaatgcagggctgtactctgagagatcacatagatgatggtcttactgatgaagatgaaggcaatgggtttgaacgcttgaaggagatcgatcctgtggctgcgcagaggatccatccaaacgaccatagaaaaatcaaacgctacctcgagttgtatgcaaccacgggtgccctacccagcgatctgttccaaggagaggccgctaagaaatggggtcggcctagtaactccagactcgactgctgtttcctgtgggtagatgctgatcttcaagtcctggacagttatgtcaacaaaagggtcgattgcatgatggatggtggcctgctggacgaagtatgcagcatatatgatgcggatgctgtctatacccaggggctgcggcaggctattggggttcgtgagtttgacgagtttttcagagcatatttacccagaaaagaatctggtgagggttcctgtgcaagcctgttaggtatgcatgacgatcagcttaagagcttgttggacgaagctgtttcccagctgaaggcaaacactcgtagactagttcgacgtcaaagacggagattgcatcggctgagtaaagattttgggtggaacttgcatcgtgttgacgcaaccgaagcattcttctgtgccactgacgactcatggcaaaagaaagttgtcaaaccatgtgtggatgtcgtaagaaggtttttgtcggacaattccactgttttgccaagcacaagcgcaagtgacccctcttcaagagagctgtggacgcaatatgtgtgcgaggcctgcggcaaccgggtgctgcgaggtgcgcacgagtgggagcagcacaggcaagggcgaggccaccggaagcgagtgcagcgcctgaagcagaagagcctgaggccatggccatcgctgctgccccaagaccgcagctgatggtaactttttcacagcagaaccggcgagaagtgggacggggacgttgacgtggacatggtcgtctcgtcccacccaaaaaagcgtgccagcctgacagcgacatgctttcccaatcccgaattcctggcacgtcgacggggggactacctccatgccttttagcagcggaagaagcaggcaccaaagaactgcttatcaaaagtattgtaccacacgtacgacgggtctagaagccacagaaacgtagtgtggaagtggatagatacttgaacaatggtccatctttctatactgctaaagtttagcatatgctaaggaggtgtttaagattgctaaaatctctattttcaaaaccgaagtattgcaaatactgtagttattttaagctattctaaacttaggtctggaccttagtttgcaaaactgtattgaccacagtttgtaaaactgtattatttcaaactgtggtattgtaattactaaagtaaaaactgtattatttcaaactgtggtattgtaatgactaaagtatattatagtattttaaaaa

SEQ ID NO: 115600 - DNA, 158 bp, Zea Mays
gaaccctgtggatcatttagaacatctcatttccaaagttaactgggtgaatttcgagatcaatttagttttacccagtttgcttctagtttttgttgaaaaagttttaacttgcctattcacccccctctaggcaactttcactacaccaggcacgc

SEQ ID NO: 115601 - DNA, 113 bp, Zea Mays
ttatgggatactagtcggttacccgtgcattgcgacggcttacaacaatacccacgtaaactatccataaaaaaatttcaagattttttattgattgtctccgctctctgtat

SEQ ID NO: 115602 - DNA, 764 bp, Zea Mays
caacgtagaaccatactaaatgacgtgacatggctacagctgaaacaaaatttcaccatgctgttgcaaaattgcagtccatctgtgcatgtcatttccaggacttctaccggtgtaacttttctccgttgaaaaagttgaattgttgattcacttgattggttatatagtttctgagagttgggaaccgcagggtaggggcatcggaaggagcatcatagacgatgctatcagagagttaccactactgcggaagctggctttggatctttgcgatgcctgtgaagacggttacgatagcccaaacgatgcggaagggaagatgattagaagtgtaaggatgagtcgatgcaagaagatggcggggtcgtgtttggaggtccccagacaagggtcttcaacttcaaggccggtgcacaaggacactgtagtgctggaatggagcagcagaatgttcacaaccaccatagtgaaagaaagagtgtgatgagcctcttctgtagttttgtccctgatgaagaacacaagagcaggccacaatatatatgacttgtatgaatggtctccccgcttctgattttgaatgctttgtatgtggacatatcctcgtgtgtgaatgtatttgtatggtatcaaacgaagatcatcttttgcagtcgtactgtacccatgcactcttatgttgatccacgaacaaagtttggaatttttaggtgaccgtgttcatgtttgaaaattattgttgtactagtccttggtaaaat

SEQ ID NO: 115603 - DNA, 2765 bp, Zea Mays
ccaaaccaagcaccacgcgcggccatggccttccccgccgacgcgctggttctagagatcaccgacacatcatcctccgccaccgccgccgccgcccgtgctccatcctcaccttctcccccgccgctgtccatctccgacctcgcgctaatcgagagctcctcctacttccgcgcgctcctcggcggcagcttcagtgaatccggcagagagcatgtgcgtgtgggctgcaatttggaggctgctgtgcaagtgctgcgctacctttttgagccttccgagagctttaacatcacgcacaacaatttcctccccctgttggagggagctttgtttcttgctgttgagagccttctagtggagtgtcaaagatggttcggcaccatagcctctcaaacttctgccatgtcagttccattagatttcataattgaagtctggtactttgctgaagagcatggtgttacttttgttcaagacatttgccaaaaatttctagctcagaattttgtagaaaatatgaaagcctgtgaacaatcaaaccccaactcagtagatggccacctcttcattcttagcaaggtgaagatatgccttttaccattaggatttgcggcagggacaatgaggcattggtttgactttggaaacaagatcatatgcactattcttgatcttctcaaagacagtttgaaaactttattggatgctgttgatgatggtaacttggatcgatattgcattcgaataacagaatattcaaagaacatagtgctttcaggatgtccccaagtaactacagcattcttgtacatatctgttctccctaatgatctgagtgtttcattgaagagaaggatagtgagttcatacacccaggttgatcatcaaaccttcgttctttatgaggaattagagaaggctactaaaaccttatcatttaagaatgtacacatggtggatatttcaaaatgtccaaacgttcattttggcgcagcaattgactggttgaagttgggttttccagaattaagggtattcagggtttcacattgtttatcatttcaatttgatgatttactatatctgttaatgagatgtccatggattgatgaaattgatatgactattgatacaagcactgtaacacccagacattcagtaatctcgtctagttctgaagtcctaagcaaggcaaaaccaaatcagaaaagatatggcatacattgttcagcatatgacaggcaaccaaattcggttttcttaaatatatcaagattgacattggaaggcagaaatgatattgatgatatggacttgttggagatatctgtcctgaaaaattctctgtgctatataaacattagaaactgcttcctgttgacggatgatgttttatgtctgtcttccactacttagtcatgctggctaacattacatatatgtcaatgtgtaggtattgactctgttgctttgtcgcagctagtgagcattataagtatcacaaagtttttgagcttaagggaaacatcacttacagatggtgcactctgcaagtttgttggctctagtctggagtatcttgacgtttcagagactgtgatttctatggtatcattagcaccagttattcaaagaaactgtaaattgaactgtctgaaaacagctggatgctgtagtcttctgttgcaatgtgctaatgtagaacatatcaatggtaacaagtatggagattttctacaggagttaggaactacctactgtctggaggatgttgaaatgggctggggattttgccctattcgaatcgaagaccttgttccttcttttagtaaagtaaggaagatgaaaattggtctcggcacatcattagcggagaatgttctgtgtgctcttcctatgatttgcccattcctcgagtctttgattctaaggtttcaggtgatatctgacagagttgttagacgtctattggaatcagcaacaaatcttcaggtgctttgcctgcactattgtcttggaagtttaacttcatttagtttccaaacaaaggcacctgcattaagagtattgcggcttcattgggtaacttcatggcttacaaatgatgacttgacaatccttacagagaattgcaatttggctgaactttcactttctggttgcaaacttcttgactccagctctcaagacattatctcatctgggtggccaaacttggcacttttacaccttgaggaatgtggtaaagtaactgttgaaggggtttcttcttttttcaactgtaaggctttggaagacgtcctactacggcacacgggtaggggcatcggaaggagcatcatagacgatgctatcagagagttaccactactgcggaagctggctttggatctttgcgatgcctgtgaagacggttacgatagcccaaacgatgcggaagggaagatgattagaagtgtaaggatgagtcgatgcaagaagatggcggggtcgtgtttggaggtccccagacaagggtcttcaacttcaaggccggtgcacaaggacactgtagtgctggaatggagcagcagaatgttcacaaccaccatagtgaaagaaagagtgtgatgagcctcttctgtagttttgtccctgatgaagaacacaagagcaggccacaatatatatgacttgtatgaatggtctccccgcttctgattttgaatgctttgtatgtggacatatcctcgtgtgtgaatgtatttgtatggtatcaaacg

SEQ ID NO: 115604 - DNA, 2802 bp, Zea Mays
gagtaaccaaaccaagcaccacgcgcggccatggccttccccgccgacgcgctggttctagagatcaccgacacatcatcctccgccaccgccgccgccgcccgtgctccatcctcaccttctcccccgccgctgtccatctccgacctcgcgcgcttcgacccgctcccatccccaaccgttgccgttcgcgtcgaccggcacaggctaatcgagagctcctcctacttccgcgcgctcctcggcggcagcttcagtgaatccggcagagagcatgtgcgtgtgggctgcaatttggaggctgctgtgcaagtgctgcgctacctttttgagccttccgagagctttaacatcacgcacaacaatttcctccccctgttggagggagctttgtttcttgctgttgagagccttctagtggagtgtcaaagatggttcggcaccatagcctctcaaacttctgccatgtcagttccattagatttcataattgaagtctggtactttgctgaagagcatggtgttacttttgttcaagacatttgccaaaaatttctagctcagaattttgcacatgctatctcaggaaggtcatttaataaaataccttatgatttgctatgttcagcgatcaaatgtccacatctgacagtggatagtgaaaaacaattgtgtgaagcaattttgtattgggtttcagaaaatatgaaagcctgtgaacaatcaaaccccaactcagtagatggccacctcttcattcttagcaagcaggtgaagatatgccttttaccattaggatttgcggcagggacaatgaggcattggtttgactttggaaacaagatcatatgcactattcttgatcttctcaaagacagtttgaaaactttattggatgctgttgatgatggtaacttggatcgatattgcattcgaataacagaatattcaaagaacatagtgctttcaggatgtccccaagtaactacagcattcttgtacatatctgttctccctaatgatctgagtgtttcattgaagagaaggatagtgagttcatacacccaggttgatcatcaaaccttcgttctttatgaggaattagagaaggctactaaaaccttatcatttaagaatgtacacatggtggatatttcaaaatgtccaaacgttcattttggcgcagcaattgactggttgaagttgggttttccagaattaagggtattcagggtttcacattgtttatcatttcaatttgatgatttactatatctgttaatgagatgtccatggattgatgaaattgatatgactattgatacaagcactgtaacacccagacattcagtaatctcgtctagttctgaagtcctaagcaaggcaaaaccaaatcagaaaagatatggcatacattgttcagcatatgacaggcaaccaaattcggttttcttaaatatatcaagattgacattggaaggcagaaatgatattgatgatatggacttgttggagatatctgtcctgaaaaattctctgtgctatataaacattagaaactgcttcctgttgacggatgatgttttatgtctgtcttccactacttagtcatgctggctaacattacatatatgtcaatgtgtaggtattgactctgttgctttgtcgcagctagtgagcattataagtatcacaaagtttttgagcttaagggaaacatcacttacagatggtgcactctgcaagtttgttggctctagtctggagtatcttgacgtttcagagactgtgatttctatggtatcattagcaccagttattcaaagaaactgtaaattgaactgtctgaaaacagctggatgctgtagtcttctgttgcaatgtgctaatgtagaacatatcaatggtaacaagtatggagattttctacaggagttaggaactacctactgtctggaggatgttgaaatgggctggggattttgccctattcgaatcgaagaccttgttccttcttttagtaaagtaaggaagatgaaaattggtctcggcacatcattagcggagaatgttctgtgtgctcttcctatgatttgcccattcctcgagtctttgattctaaggtttcaggtgatatctgacagagttgttagacgtctattggaatcagcaacaaatcttcaggtgctttgcctgcactattgtcttggaagtttaacttcatttagtttccaaacaaaggcacctgcattaagagtattgcggcttcattgggtaacttcatggcttacaaatgatgacttgacaatccttacagagaattgcaatttggctgaactttcactttctggttgcaaacttcttgactccagctctcaagacattatctcatctgggtggccaaacttggcacttttacaccttgaggaatgtggtaaagtaactgttgaaggggtttcttcttttttcaactgtaaggctttggaagacgtcctactacggcacacgggtaggggcatcggaaggagcatcatagacgatgctatcagagagttaccactactgcggaagctggctttggatctttgcgatgcctgtgaagacggttacgatagcccaaacgatgcggaagggaagatgattagaagtgtaaggatgagtcgatgcaagaagatggcggggtcgtgtttggaggtccccagacaagggtcttcaacttcaaggccggtgcacaaggacactgtagtgctggaatggagcagcagaatgttcacaaccaccatagtgaaagaaagagtgtga

SEQ ID NO: 115605 - DNA, 2803 bp, Zea Mays
gagtaaccaaaccaagcaccacgcgcggccatggccttccccgccgacgcgctggttctagagatcaccgacacatcatcctccgccaccgccgccgccgcccgtgctccatcctcaccttctcccccgccgctgtccatctccgacctcgcgcgcttcgacccgctcccatccccaaccgttgccgttcgcgtcgaccggcacaggctaatcgagagctcctcctacttccgcgcgctcctcggcggcagcttcagtgaatccggcagagagcatgtgcgtgtgggctgcaatttggaggctgctgtgcaagtgctgcgctacctttttgagccttccgagagctttaacatcacgcacaacaatttcctccccctgttggagggagctttgtttcttgctgttgagagccttctagtggagtgtcaaagatggttcggcaccatagcctctcaaacttctgccatgtcagttccattagatttcataattgaagtctggtactttgctgaagagcatggtgttacttttgttcaagacatttgccaaaaatttctagctcagaattttgtaggcacatgctatctcaggaaggtcatttaataaaataccttatgatttgctatgttcagcgatcaaatgtccacatctgacagtggatagtgaaaaacaattgtgtgaagcaattttgtattgggtttcagaaaatatgaaagcctgtgaacaatcaaaccccaactcagtagatggccacctcttcattcttagcaaggtgaagatatgccttttaccattaggatttgcggcagggacaatgaggcattggtttgactttggaaacaagatcatatgcactattcttgatcttctcaaagacagtttgaaaactttattggatgctgttgatgatggtaacttggatcgatattgcattcgaataacagaatattcaaagaacatagtgctttcaggatgtccccaagtaactacagcattcttgtacatatctgttctccctaatgatctgagtgtttcattgaagagaaggatagtgagttcatacacccaggttgatcatcaaaccttcgttctttatgaggaattagagaaggctactaaaaccttatcatttaagaatgtacacatggtggatatttcaaaatgtccaaacgttcattttggcgcagcaattgactggttgaagttgggttttccagaattaagggtattcagggtttcacattgtttatcatttcaatttgatgatttactatatctgttaatgagatgtccatggattgatgaaattgatatgactattgatacaagcactgtaacacccagacattcagtaatctcgtctagttctgaagtcctaagcaaggcaaaaccaaatcagaaaagatatggcatacattgttcagcatatgacaggcaaccaaattcggttttcttaaatatatcaagattgacattggaaggcagaaatgatattgatgatatggacttgttggagatatctgtcctgaaaaattctctgtgctatataaacattagaaactgcttcctgttgacggatgatgttttatgtctgtcttccactacttagtcatgctggctaacattacatatatgtcaatgtgtaggtattgactctgttgctttgtcgcagctagtgagcattataagtatcacaaagtttttgagcttaagggaaacatcacttacagatggtgcactctgcaagtttgttggctctagtctggagtatcttgacgtttcagagactgtgatttctatggtatcattagcaccagttattcaaagaaactgtaaattgaactgtctgaaaacagctggatgctgtagtcttctgttgcaatgtgctaatgtagaacatatcaatggtaacaagtatggagattttctacaggagttaggaactacctactgtctggaggatgttgaaatgggctggggattttgccctattcgaatcgaagaccttgttccttcttttagtaaagtaaggaagatgaaaattggtctcggcacatcattagcggagaatgttctgtgtgctcttcctatgatttgcccattcctcgagtctttgattctaaggtttcaggtgatatctgacagagttgttagacgtctattggaatcagcaacaaatcttcaggtgctttgcctgcactattgtcttggaagtttaacttcatttagtttccaaacaaaggcacctgcattaagagtattgcggcttcattgggtaacttcatggcttacaaatgatgacttgacaatccttacagagaattgcaatttggctgaactttcactttctggttgcaaacttcttgactccagctctcaagacattatctcatctgggtggccaaacttggcacttttacaccttgaggaatgtggtaaagtaactgttgaaggggtttcttcttttttcaactgtaaggctttggaagacgtcctactacggcacacgggtaggggcatcggaaggagcatcatagacgatgctatcagagagttaccactactgcggaagctggctttggatctttgcgatgcctgtgaagacggttacgatagcccaaacgatgcggaagggaagatgattagaagtgtaaggatgagtcgatgcaagaagatggcggggtcgtgtttggaggtccccagacaagggtcttcaacttcaaggccggtgcacaaggacactgtagtgctggaatggagcagcagaatgttcacaaccaccatagtgaaagaaagagtgtga

SEQ ID NO: 115606 - DNA, 1228 bp, Zea Mays
ctgcgatcaagacaccaattaagccagagcagtctacaatggctcacagtcacagaagcagtatgagcttctgcttggtgtgcatcgtcgtcatggcggcggcggcggcgttgttgcaacccgcatcttctcagcaggcggtgccggacatcccgaacctgaaggtgggctccaacgatcgcagcacgactctcaagtgcaccaacatcaagagcaacaagaccacctgcagcgccacctgcaacgcacgctgccctcacaagtgcctcatccagtgcccaagctgcaagacattctgcttgtgcgacttctatcccggcgtgtcctgcggcgacccacgcttcacgggcgccgacggcaacaacttctacttccacggcaagaaggaccgggacttctgcatcgtctccgacgccgccctccacatcaacgcgcacttcatcggcaagcgcaacccggccatgagccgcgacttcacctggatccaggcgctgggcatccgcttcgcgcaccaccacctctacgtcgccgcccagaggacgcccaggtgggacgccgccgccgaccacctggcgctggccctcgacgacgaggacgtcgacgtcgcgtccctgctgccgcgcttcgtcggcgcgcgctggtccccgcccacggcgccggcgctgtccgtcacccgcaccgcgcgcgtcaacaccgtcgtcgtcgagctcaggggcgccttccgcatcgtcgccagcgtagtgcccatcaccgccgaggactcgcggatccacaactacggcgtcagggaggacgacggcgacaccctcgcgcacctcgacctcggcttcaagttctacgacctcaccgacgacgtgcacggcgtgctgggccagacctaccgcccggactacgtcaacagcctcaacgtcacatccaacatgcccgtcatgggaggcgcgccggactacctctcctccgacctcttctccaccgactgcgccgtcgcacgctttggcggacgccgacaccagcaaggcaccgccgctaatattgccatgctcaccgacgacgacgacatggaatgaataacaaaggacacgtcgtacgcgcgatcgacgacttcaccgtaccattccattaccatctcggaggatatcgatccatccatcgttgtgtgtcttctacactagctagtgaatgaagaagcagcaataaacccattgaaattatatattatatattcaac

SEQ ID NO: 115607 - DNA, 1402 bp, Zea Mays
atcatcggatcatcgtcatcatccagcaggtgaccgctagctctgtacctgtacgacgtgtgaaacgagtagtagttaagcatgacggagaggcgcgccggcatggcggtggcggtggcggtggcgctcctgctgctgtcgtcgttcggcgtggcgtcggcggcggggaggggacgacccaccaagaagacgctgaagccaggggagaagccctcgcccaaatccaagttcttcccgctcagccgcaccaagtttgggcacaagcgaaactacgaggcctcctgcgccgacgagggcgggccggcctgctacgtcggatgccccgctgaatgccccaactcctgcctcgtcttctgcgaatactgcctcagcttctgccaatgtgacatcttccccggcacctcctgcggcgacccgcgcttcaccggcggcgacggcaacaccttctacttccacggaagcaaggaccaggacttctgcatcgtctccgacgcgggcctccacatcaacgcccacttcatcggcaaccacaacccggccctcaaccgcgacttcacctgggtgcaggcgctgggggtcaccttcgtcgcagcaggcggcgaccaccaccaccgcctctacgtcggcgcccgcagggccgcggagtgggacgaggacgaggaccacgtccaggtcaccttcgacggcgagcccgtcgacgtggacgccgcccggaacgcgcggtgggcgtccaaggcgctcccggggctctccgtcaggcgcaccaaggacgtgaacgccgtcaccgtggagctggacggcgccttcgccatctccgcggcagccgtgcccgtcaccgacgaggacgaccgggtccaccgctacggcaagacgggccgcgacagcctcgtgcacctcgacctcggcttccagttccataacctcaccgccgacgtcgacggcgtgctgggacagacataccgccccggctacgtcaccaagctggacatcagcgccaagatgcccatcatgggcggcgcgcccaagtacctgtccgagggtctcttctccactgactgcgctgtctcccggttccaccaccgccgcgatgccgccggcgctgccgtcgtcaccacatatgcctcttaagttgcatgccgccatgcatgcatgcatgaggaacatgagaaataatcaacaaatggaggcagcccaacaattacatgtactcctaccctgcaagcaagaaataattaagtggtcattccattgaccaaacattatttatattaattataaggagctcaaccaattaattgatatgtgatactcgtatgtatgcttcagctatcctctataaaatgaagtttccatgtcttagtctttaattattacttcactagtcacaccgtgataactaact

SEQ ID NO: 115608 - DNA, 648 bp, Zea Mays
ccgccagcgatcgagagaccaagaggagcaggagcgatggcgaggagctcgttcaagctggagcaccccttcggttcgtccctccgattcctgattcccccctcctcatccgggcttcagctcatgttattggtcgtgctagggtttcggttgttgggctgcggcgagaacgacgacgctctgccagtggtggcgaagacgccaaagaggaggacgacgctggagagccagctgatcaagtttgaggacgaggacaacgagaaggcaagagcagccgcggatgcgatgagtcctgtgcaagatggattgttgataagaaaaccaccaggcatgaggtttccatcaagaagaaatgtgcctatgtctgctgacccagtgggccatctccacaatggcagcagtttcgatgcctttttcgtttgctcatccattcaagatttccgtagatctatagaagctcatgatatgtgtaatggggtcctgtggatggaatggtggttagaagatttaatttcctcggtctgggaaggctctcattggtcatgggtcacaggggctattcttgattgtttcaggataagtaagcaggcaaaagttattgtgccacggcttgagatggtgctagggtgctttccgccattatcataa

SEQ ID NO: 115609 - DNA, 1457 bp, Zea Mays
acatagtgtgtcactttgtcccctcctacgcgacttcccctccaattcaggcgctctctctctcgatccatgcatctcaactcaaaggcattcaattaattaattatactagctagctaggaggaggagtactccggccggccggccggcgcccataagaacctctcgtgttgtgtatgcatcgatcgatcgatcgatcgatctccgactccgacgacctcgctatccgccatggctagcagcagcagtcttgtcaagtgcctggcggtcacggtggcggtggcgctcctggcgctgtcgtcgtgtggcgtggttgcctcggcggcggcgtggaggggcaagcctcagaagttgaagcccggggagaagccctccggcaaatccaagttcttcgccctcacccccggaatgttcggccacaagcgcgactaccaggccgcctgctccgacgagggtggcccggcatgctacgtgggttgcccaaaggattgccctaacaaatgcctcgtcttctgcgcctactgcctcagcttctgcatgtgtgatatcttccccggcacctcctgcggcgacccgcgcttcaccggcggcgacggcaacaccttctacttccatggaaacaaggacaaggacttctgcctcgtctccgacgcgggcctccacatcaacgcccacttcatcggcaaccacaacccggccctcaaccgcgacttcacgtgggtgcaggcgctgggggtcaccttcgtcgcaccaggcggcgccggcgaccgccaccgcctctacgtcggcgcccgcagggccgcggagtgggacgaggaggacgaccacatccagctcaccttggacgccgagcccgtcgacgtcgacgccgtcaagaacgcgcgctgggcgtccaaggccctcccggggctctccgtcacgcgcatggacgccgtcaacaccgtcatggtggagctggacggcgtcttcgccatctccgccaacgccgtgcccatcaccgacagggacgaccggatccacggctacggcaagacgggcgccgacagcctcgtgcacctcgacctggccttccagttccataacctcaccgcggacgtccacggcgtcctgggccagacctaccgccctggctacgtcagcaagctcgacatcggcgccaagatgcccgtcatgggcggcgcgcccaagtacctgtccgccggtctcttctccacggactgcgccgtctcccggttccactctttcgcctccgcctaatactaagtcccaagcgcgaccgatcctattcctatccacggcgtgaaataagatttctgtatgtaggctcttatctcatctcatcgtatgaaaatgtacacgtgcgttgctgcattggaagtacgtattgttgcacgatcaactgaataacttgcgtctcgaaaattttatgcactagtacgttcgcccacatcaaataa

SEQ ID NO: 115610 - DNA, 109 bp, Zea Mays
gctatcaacctctcacattgactcggtgtttacgcttataattgagagattttatgctcaaaacttaaggttttacgctccacccgaagatgcgtccactagtgaacaa

SEQ ID NO: 115611 - DNA, 2117 bp, Zea Mays
gccataagaatggttgctatgttcgataatgaggaggtgggttcagattcaatgcaaggggctggtgcaccaaccatgttccaggctatgagacgaatcatcgattccttgatgcatcagtcgatgggggagggagctttggaacgtgcaatacattcttcattccttgtttcggcggacatggctcatgctctgcacccgaactatgccgaaaagcatgaagagtgccacagaccagaactacagaagggacttgtcatcaagcacaatgctaaccaacgttatgccacaagtgctgttacagctttcctcttcaaagaaatagcaaggattcataatcttcccgttcaggaatttgttgtgaggaatgatatgggatgtggctccactattggacccatacttgcttctggtgttggcatacggactgtagactgtggtatccctcagctttcgatgcacagtgtacgagaaatgtgtggtaaagaagatgtggacacaacatacagacacttcaaagcttttttcgagatgttttctgatatcgataggaagttaaatgtagatttttaagtccaaatccttatctttttttcaggtttgaataattagtggaaactaaaactatgattgtcaagcatagtatcaatctatcaaactcatattctgaatttttttagttgataaagaggacgacgaattaggaaatctcactcttggtcacttttgtggtgatttaatatggctgatgacggggatcatcatggagaagcataagaagagtacaaaatgaaatctttttaattgggggtggggggagtagaggtcttagtgatttgactaaatttagatttctttcggatatatccagagaacaaagctagattttattgctctcttgagaaaaaagagggttctactcaataacatctgtgggggatgagagttcatttggcactggatcgacctcatggtcgctccggtggtattttactttgaataaatttggaagttttcagcattgcaacgagtgagtcttgtatgtaaacttccatcttgggaataaagatcatggcttccaatggggtctcatagcagtttatgggcttgcacaagtagaacataaataaacctttcttacagagttggtccagatgtgtttcgaggaatcgcagccgataattgtcgctggtgattccaatattattaggaacccaaaagagaagaaaatgatatgtggccctttttattcaactagtggatggtgcgcgtcctgcgcgttataaaatttgatccaatagtacttttacgtagaggagggatatatccagacttaaattattatattttacaatcagtaatatgtatggttaggcaaggttcaaaacagtagatagtatcattacaaaatatgtgcaaaatgacatttgttgagcaagtctatagctatattatgttcataaaatttcgacatatatatacatgcagaagtggttgttggctttttttaccccaatccaatggtacagactaaagttggtttttttatatatttttaccacaatttctcaacattttttttgtaatcaacatatatatattgttctcatatgtggttgttgatttgctgataaattcatttctcaaatgaaaccagctaatcttttgtaaaagaaaaacttactgccactgacattacagtttgcatgcgtgaggcgcaaagttacataagaatcagctatcagtgaatcatgtttggaggtattaaaacacaagaacactggaacggcttgatgaacaaaatctgaacaacaatatgcttatttgtcatggtaaaaatgttcaaagttaagaagacaaaaaaggtattgtaagaaccttttcgccggtgtttctaatgtgttggaggaactttcaagaatattagatggtaaaatatctgtggcctgcgatgaggcttgattgaacaattaagtatggtggaatgtgaacttgttgtattaagttcataaagcatacctcatgtgaatatttagtatctgtttttgagtctttttgtattgatttatgcttttgtaacagaaaagtgaatgtgctattataaaagagtatctaga

SEQ ID NO: 115612 - DNA, 708 bp, Zea Mays
gccataagaatggttgctatgttcgataatgaggaggtgggttcagattcaatgcaaggggctggtgcaccaaccatgttccaggctatgagacgaatcatcgattccttgatgcatcagtcgatgggggagggagctttggaacgtgcaatacattcttcattccttgtttcggcggacatggctcatgctctgcacccgaactatgccgaaaagcatgaagagtgccacagaccagaactacagaagggacttgtcatcaagcacaatgctaaccaacgttatgccacaagtgctgttacagctttcctcttcaaagaaatagcaaggattcataatcttcccgttcaggaatttgttgtgaggaatgatatgggatgtggctccactattggacccatacttgcttctggtgttggcatacggactgtagactgtggtatccctcagctttcgatgcacagtgtacgagaaatgtgtggtaaagaagatgtggacacaacatacagacacttcaaagcttttttcgagatgttttctgatatcgataggaagttaaatgtagatttttaagtccaaatccttatctttttttcaggtttgaataattagtggaaactaaaactatgattgtcaagcatagtatcaatctatcaaactcatattctgaatttttttagttgataaagaggacgacgaattaggaaa

SEQ ID NO: 115613 - DNA, 2306 bp, Zea Mays
gcataacggcgaatagtccatccatcatcagcttgagacggagacgacaagaacgacgctacctcaccatcttaatcttattagcagcaaatagcagatgcagatcaataaacccttaccaagcccaatgcagggagcagattctctctctctctctttctcacacacacacaaccccaatgatccatacacacattttcatttttgagctgatatgttgccacaaagcgaggttctggatgcaaagtgagcagccacaggccacagcaggtcagcagccaattggaagtcactgtcttcctctgaatattctgagaccctcctctcaacactttgtcgagttaacaaagtcacctcatccaatcttgcatccccatctctgtctttgctcctccatggccatggccatggcccgaccttgtgctttccttctcttcttcctagttcttttctcctacgacggatccggtcctgggagcagcaggaggactaggaggagtggcgtcgcgcaggccacgcagagagtcttcctgtatccacaggctcccaaggtctcctccatcgtgagcagcaagtacaggaccgcgtaccacttccagcctcccaagaactggatcaacgatccaaatggaccaatgtactacaatggtatctaccaccagttctaccagtacaacccaaacggctcgctctggggcaacatagtctgggcgcactcggtctccacagatctcgtgaactggatccggctcgcgccggcgatagagcggacgactccgagcgacatcaatggctgctggacaggttcagccaccatcctaaagagcggccggcctgccatcatatacaccggcgccgacaccgagaagcgtcaggtccagaacgtggcgttccccaagaacctgtccgatccgtacctgcgggagtgggtgaagccacacgacaacccggtgatccagccggtcggacgagggctgaacccaggccagttcagagacccgacgaccggctggatcggcccggacgggctgtggaggatagccgtcggggccgaggtcgacggccacagcgcggcgcttctgtacgagagcgaggacttcgtgcgctgggacagagtggaccacccgctctactcctccaacgcctccgccatgtgggagtgcccggacttcttcgcggcgatgccgggcgagaactccgggctggacatgtcggctgcggtcccggatggcgccaagcacgtcctcaagatgagccttgacggctctgacaagtacatggtcggcgtctatgatctgaaaggtgacgcctttgtgccggataccgtgatcgaggaccggaggctgtggtcaaggattgactacggcaactactacgcttccaagtcgttcttcgactcgaagaaagggaggagggtcatatggggctggacgaatgagacggacagttcgtcagacgacgtcgccaaaggatgggctggaatccatgcaattcccaggactatatggttggataaagacagcaagcagctgctgcaatggccggtcgaagagatcgagtcgctccgaggaaaacaagtcagacaccaaggcctggagctcaggaagggggatctgtttgagattaaggaaattgacactctgcaggcagatgtggagatagatttcgagctcacatccataggcagtgccgacccttttgacccttcctggctcttggacatcgagaagcagtgccgggaagcgggcgcgtcggctcatggcccgttcgggctcgtggttcttgcttctgagagcatggaagagcacacctccgtgcacttcagagtgtactacagatcacaggagaagcacatggttcttatgtgcgccgatctgaggaaatcgtccttgagaccggagctgtacacgccagcctacggaggcttctttgagctggacctggagaaggaaaagacggtggtatctctgagaactttgatcgatcgctctgcggtggagagcttcggtggaggcggcagggtgtgcatcatggccagggtctatccggcggcgctcgtcgacgacggcggcactcgcatgtacgcgttcaacaatggcactagcaccgtcagagtgccccggctagaagcgtggagcatgaggagggcacaggttaacaagggatgaggaggaacacaaggccatttgatagctagaggagaggaacagagcatgggcacatgaattaaacacacactgctggtttaatttgctggaattaatcaatcaatcaatcaacaaacacacgaagattaaatcaaaaca

SEQ ID NO: 115614 - DNA, 952 bp, Zea Mays
gggacgaatattatctcaaaaaaaaaaagtcttgagtcccccctctccttccccttcccaacgctctcgctgcagaggaaaggcgaagatggcgatgaccgtcgaaggcttgctgcactcgcgttcatgttctccacgagtattctactgcagatactggcatgcgctttgtacagcaactggtggcccatgttagcagctctcatgtacgtccttgtaccaatgccatgcctgttttttggtggtggatccacacacttcttgaccagcagagaaggtggagggtggattaatgctgcaaaattcttgactggtgcatcggccatgggaagccttgctattccagcaattctgaggcatgctggcttaatcgagaccggggccatgttcatcgagttcacgtccttcttcatccttgtatgcacagtgctgtgcttccatagggcgactctggatgaagactggtaaatgcgcatttcaccgacaccctgaaccctagcggttcttggctgcttctgtccatgctaagaaatattcctgttggaagctaacatggatctgtacaaagaagcgtatttcgagcgtagccgtagctgatgtcttatgtagacacttgtgaagattatgtggtcatgtggcaatgcagatgttattaccttcactttgactttgtcgtcacatgttctatggtgaaggaaggaatcatccgtgtaaaccatggccagggcacgccctacttggctcctaattctatcgcaggctttggggttaacctattatgaatggaataataggatcttgatgaccgaaagaaaagggagagctaattagtcacatggctcggccgatgtatttttttttcatgtttgcattcatgaatctgtctaggatattacatattgtggtctgaatctttataaatcacttgttttgcggtctgaatctttataaa

SEQ ID NO: 115615 - DNA, 1054 bp, Zea Mays
ggacgaatattatctcaaaaaaaaaaagtcttgagtcccccctctccttccccttcccaacgctctcgctgcagaggaaaggcgaagatggcgatgaccgtcgaaggtgagtgcgcctagacccttctccccccgaacttccaacattttcctgtagtccagcttcgattcccgtcgtttgggacgccgattcgtgcatggagtcaggccgattgggttgcttgctgcactcgcgttcatgttctccacgagtattctactgcagatactggcatgcgctttgtacagcaactggtggcccatgttagcagctctcatgtacgtccttgtaccaatgccatgcctgttttttggtggtggatccacacacttcttgaccagcagagaaggtggagggtggattaatgctgcaaaattcttgactggtgcatcggccatgggaagccttgctattccagcaattctgaggcatgctggcttaatcgagaccggggccatgttcatcgagttcacgtccttcttcatccttgtatgcacagtgctgtgcttccatagggcgactctggatgaagactggtaaatgcgcatttcaccgacaccctgaaccctagcggttcttggctgcttctgtccatgctaagaaatattcctgttggaagctaacatggatctgtacaaagaagcgtatttcgagcgtagccgtagctgatgtcttatgtagacacttgtgaagattatgtggtcatgtggcaatgcagatgttattaccttcactttgactttgtcgtcacatgttctatggtgaaggaaggaatcatccgtgtaaaccatggccagggcacgccctacttggctcctaattctatcgcaggctttggggttaacctattatgaatggaataataggatcttgatgaccgaaagaaaagggagagctaattagtcacatggctcggccgatgtatttttttttcatgtttgcattcatgaatctgtctaggatattacatattgtggtctgaatctttataaatcacttgttttgcggtctgaa

SEQ ID NO: 115616 - DNA, 1904 bp, Zea Mays
ctctctttctcgcctgttacagaaaaccaatgctcctttggctcacgcttcgctgctcccgttccatcgcgccgcaggtgtgcggactgggacccgcggcggcggcgcgacggctctccgccgctgaagccttcgccgcgtgtgagggctcactcctgcgccctctacccgggctggacctcccgccgtgcctccctgacaacctgagccgcagccccacccggatcaccacgctccctaacggcctcagagtcgccaccgaggacgtcccgggtccttctgcgtgcatcggtttcttcgtcgactccggctccatctacgagtccggggagaccaccggcgtatcgcacctgctggagaggatggccttcaaggacaccaagcaccggagccacctcaacatagtgagcgagctcgagcttgccgggggcaacgtcggcgcttcagcctccagggagcagatggtctacagctatgacacgctcaagggatacatgccagaggctctcgagatcctcatcgactgcatgcgcaacccgctcttcctccaggaagaagtcgaacggcagctggttcttgctcgagaagaagtaaatgagctacaaaagaaccctgagaagtttcttcatgaacagcttaaccttgttggatattcgggtgctcttgcaaatccgctaatagctcctgaggatgcccttgctagaatcaatgacaaaattattcaaaagttctatcatgaaaattttactgctgatcgcgtggttctagcagcatcaggtgttgatcacgaacacttgctaggctatgcagatttgttgttgaaagattggcacaaggggaccccaatggaaaagccaaagtctacatatgttggtggagattccagacacagagcagattcagatatgacacatgttgcattagcttttgaagtgccagggggctggcttcaagagagagacgctacaattatgactgtcatacagactttaatgggtggtggtggttcattctcatctggcggtcctggaaaaggaatgcattcacggctttatcgacgtgtcctaaataaatatcacttggttgattctttttctgcatttaacaatgtatatgacagcagtggcctctttggtatctacttgaccacaccatcagattttgtggcaaaggctgtcgacatcgcagtaagtgaattaattgctgtcgcaactcctggagaagaggttgaactgcaacgagcaaaaaattcaacgatttcatctgtattaatgaatcttgaatctagggtagttgttgccgaagatattggaaggcagctgttatcttatggttgcaggaagcctattgactacttccttcaatgtatggaagaaattactctagatgatgttgcaacatttgccaggaagatgctagctacgcaacccacaatggctagctggggaaatgttgacaaagttcccccatatgaatttatttgcaagcggctacaatagtacccctacacaatgacctctggactctggtggtcttgaaggatcctttcgtggaaaactaaacaatcacttgtatgaagtgccctagcttagaaactgcttttctttcagacatgcagtttagtgagtttaggatttcaacagctatgttcaattgtaactgttcaagcaacacatagtaaatgagaggctgatgaatggcaaatatcaacagtttctccatggcccattagcattttattgtcatgttcagtgtttttatgtacattttctgcgattatggatagcaggagtattctgttgcccttaatttcatgtataattggcttctggagcattgaatcattgatgcattaataccatgtttggttttgtttggggaacggagtgatccgttcctcattt

SEQ ID NO: 115617 - DNA, 1956 bp, Zea Mays
ctcccacttcgtctctccccgtcccttcacgtcttcacgagtccccacgactttggcggcgaaactccaccgccgtcgcctccgatggcgatgctctgcagagccacgcgcgtcctccgcaaggtgtgcggactgggacccgcggcggcggcgcgacggctctccgccgctgaagccttcgccgcgtgtgagggctcactcctgcgccctctacccgggctggacctcccgccgtgcctccctgacaacctgagccgcagccccacccggatcaccacgctccctaacggcctcagagtcgccaccgaggacgtcccgggtccttctgcgtgcatcggtttcttcgtcgactccggctccatctacgagtccggggagaccaccggcgtatcgcacctgctggagaggatggccttcaaggacaccaagcaccggagccacctcaacatagtgagcgagctcgagcttgccgggggcaacgtcggcgcttcagcctccagggagcagatggtctacagctatgacacgctcaagggatacatgccagaggctctcgagatcctcatcgactgcatgcgcaacccgctcttcctccaggaagaagtcgaacggcagctggttcttgctcgagaagaagtaaatgagctacaaaagaaccctgagaagtttcttcatgaacagcttaaccttgttggatattcgggtgctcttgcaaatccgctaatagctcctgaggatgcccttgctagaatcaatgacaaaattattcaaaagttctatcatgaaaattttactgctgatcgcgtggttctagcagcatcaggtgttgatcacgaacacttgctaggctatgcagatttgttgttgaaagattggcacaaggggaccccaatggaaaagccaaagtctacatatgttggtggagattccagacacagagcagattcagatatgacacatgttgcattagcttttgaagtgccagggggctggcttcaagagagagacgctacaattatgactgtcatacagactttaatgggtggtggtggttcattctcatctggcggtcctggaaaaggaatgcattcacggctttatcgacgtgtcctaaataaatatcacttggttgattctttttctgcatttaacaatgtatatgacagcagtggcctctttggtatctacttgaccacaccatcagattttgtggcaaaggctgtcgacatcgcagtaagtgaattaattgctgtcgcaactcctggagaagtgacagaggttgaactgcaacgagcaaaaaattcaacgatttcatctgtattaatgaatcttgaatctagggtagttgttgccgaagatattggaaggcagctgttatcttatggttgcaggaagcctattgactacttccttcaatgtatggaagaaattactctagatgatgttgcaacatttgccaggaagatgctagctacgcaacccacaatggctagctggggaaatgttgacaaagttcccccatatgaatttatttgcaagcggctacaatagtacccctacacaatgacctctggactctggtggtcttgaaggatcctttcgtggaaaactaaacaatcacttgtatgaagtgccctagcttagaaactgcttttctttcagacatgcagtttagtgagtttaggatttcaacagctatgttcaattgtaactgttcaagcaacacatagtaaatgagaggctgatgaatggcaaatatcaacagtttctccatggcccattagcattttattgtcatgttcagtgtttttatgtacattttctgcgattatggatagcaggagtattctgttgcccttaatttcatgtataattggcttctggagcattgaatcattgatgcattaataccatgtttggttttgtttggggaacggagtgatccgttcctcattt

SEQ ID NO: 115618 - DNA, 1888 bp, Zea Mays
ttgaggctcttgtcaatcaaacttcctactttgtttctatttgcagttgtctcattgcatcaaaggttaaagccatgattgacgctaaattcatgacattgctcaaccactcgaaggttctattgagaaagaagtggctttatggtatttttgatgattttgtgacgaaacagcttcctcataacgtgacatgggggctgagtatgttatatgctttggagcacaagggagaccgagctttgacttcaactcaaggagagttggcacatgctctgaggttcttggcatctgtggtgtcacaaagcttcatagcgtttggtgatattcttgagttacacaagaagttccttgaactctctggtggtattaacaggatatttgagcttgaggagcttctacaggcatcacaaagcaatcctgtcatgccttctgatgccacaaatgccggttccgaagaaataatttccttccgtggcgtgaacattgtgacaccatcgcaaaagctattggctagccaactgtcttgtgatgtatctcaagggaaaagccttcttgtgactggtccaaatggtagcggaaagagttccatctttagggtgcttcgaggcttgtggcccattgcttctggtagtcttagcaagccatctgaaggaatttttaatgttcctcaacgtccatatacttgtcttggaaccttgagggatcagatcatataccctctctctcacgaggaggcaaagttgaagatgctctcaggcgaaacaagtgacaagtctacagcttccgagctgttggatgatcacctgaggacgattctagagaatgttcgcttgctgtatcttctggagagagaaggttgggatgctaccactaactgggaagatactctatccttgggagagcagcagaggctggggatggctcgtctgttctttcactgtcccaagtatggcatcctcgacgagtgcaccaatgccacaagcgtggacgttgaggagcatctgtacaggctagcaaccaacatgggcataacagtcatcacatcctcacaaaggcctgctctgattcccttccattcgttggaactgaaactcattgacggcgaaggaaagtgggagctatgttccatccaccaataaccgattgccatcaaccagtttatttatgttcaccggagtagggtatttacaagttgcaacgcacagaggaaaaaaaactcgtccactcgggtgtagagtgtgtgacggagtcttttttttttttggtttcccttttcttttctttttctctcccctttgatggaaatcttgcgatacggaaagggagggaggaaggaaatatacggcaggaaaggaaagtattaggagaggttatagatgcaggcttcgtcatttgggatagcatagtacatgttcctggcatgatatgccagcctgattgatttttatacgagatacagaataagttaaaataaaaatggatatggcacaaagtgtgcccttgtaaattaaatgggaaactaatctataggaaattcatcctctctgtgtcgcccttgcatcgaacgtatcccaatccatatgtaatggcctaatgggaagataccgtatgcaatcactcatatttgcgagaaaaggaatcggcaattaaaatactacacattctgtgaggttgtggtgtttggaattctagtttatgctattttagtggtaattatctacaatgttctagaagcaagtcacttttatgatgcgcccgctaacaaggcaagggtattttatagttagaatctaattgacggataccgtacgacaccctaactaaatttaatactcataaaaaataaatttaatatcaaagtactcataaaaataaatttaatatcaaa

SEQ ID NO: 115619 - DNA, 296 bp, Zea Mays
ttgaggctcttgtcaatcaaacttcctactttgtttctatttgcagttgtctcattgcatcaaaggttaaagccatgattgacgctaaattcatgacattgctcaaccactcgaaggttctattgagaaagaagtggctttatggtatttttgatgattttgtgacgaaacagcttcctcataacgtgacatgggggctgagtatgttatatgctttggagcacaagggagaccgagctttgacttcaactcaaggttggcattaatcttgaaagttccattattaaaaaaaaaca

SEQ ID NO: 115620 - DNA, 3258 bp, Zea Mays
atatttgcagattctagttgtccattgtgctgcactgcagcagtagacaatcgtgtttttcggtgttttgtctgtctctccttgatcattcagatgcctgtacagctcaactgctatagctagctgtatatatctggttgaagaggactaatctagcaacaatgtcatcgcttcagttattgcaactaacagaacgggggcgcaaccttttgtcttcaagaaggagaacacttgcaattgtttctggtgcagtacttgctggtggagctttagcatatgcgcagtcaggtcgatggaaaaaacaccaggaagcaaattcttgcagtgatgcaaactcacatagcagtaataacggaagaactagtcagaacggcattgatggtaaattggttaaaacaaggaaaaagaaaagtggactgaagtccttgcattttttggctgctattttacttaagaagattggcccgaatggaacgaattaccttattggcttgatactaacagcagtcttgcgtacagctgttggccacagattggcaaaagtacaaggatatttattcagatctgcattccttcggcgtattccgacctttacacgtctcattattgaaaatcttcttctatgctttctccaatccacgttatatcagacatcaaagtacttaacagggtctttaggcctgcgcttcaagaaaatcttgacagatcttgtccatgctgattattttgagaacatggtgtactacaagatctcacatgttgatcatcggatcacaaacccagagcaaaggattgcaagtgacataccaaagttctgctcagaattaagtgaccttgtacaggatgatctggctgcaattgtagaagggttaatatacatctggcgcctctgctcttacgcgagtccaaaatatgtgttatggattctggcatatgttataggtgctggtggtacaattagaaaattttctcctgcttttggcaagctgaagtctacagaacaacagctagagggggaatatcgtcaactccattcacgattgagaacccatgctgagagtgtggcgttttatggtggtgagaacagagaagcatcacatattaagcagcggttccgggcacttgttaaacacttgaatgttgttcttcatgaaaactggtggtttggcatgattcaagattttcttctgaagtatcttggcgccactgtgggagttatcctaattattgaacctttctttgcggggaatcttaaacccgaatcatccaccttaggacgggcagagatgttgagcaatctccgataccacaccagcgtgataatatcactatttcaatctcttggaaccatttctattagttcaaggcgcttaaatattctcagtggctatgctaatcgtattcatgaattactggatgtctcgcgtgagctatctggtggccgtgatagattgattactcaaaattcttctgatggaaattatattagcgaggcaaattatatagagttttcagatgttaaggtggtgacaccttctgggaatgtcttggttgataatttgaaccttcatttggagtcgggctctaatctgttgatcactggtcccaatggtagtggaaaaagctcccttttccgtgttcttggtggtctgtggccaatggtatctggtcatattgtcaaacctggtgttggttccaatctcaacaaggaaatattttatgtgccccagagaccatatacagctgttggaacgcttcgcgaccagttaatctatccactcacagcagaccaagagactgaaccacttagctatggtggcatggtggatcttctaaagaatgttgatctggaatacttgctagaacgctatcctcttgataaggaagttaactggggtgacgaattgtctcttggtgagcagcaaagattaggaatggctagactgttctatcataagccaaagtttgctatcctggatgaatgcactagtgctgttacaactgatatggaagagcgcttctgcaaaagggttcgagcaatgggcacatcttgcataacaatatctcaccgtccagcattagttgcgtttcatgaaattgttttatccttagatggtgaaggagggtgggatattcaggacaacagaaatggttccttctctcccgaagttgagtttgatgtgctgaaggcatcagaaagtgatcgcaagtctgatgcacttaccgttcaaagggcttttatcaccagcacaaagggaaatgcgtcaatgaagcccaagaaacattcttattcaacagaggtcatagcatcttcccccagtatggagatagaacatacagtacaatcatctattgtcacacaattgcaatgctctccaagacctttgcctgtcagagttgctgcaatgtctcaaatactggttccaaagctatttgataagcaaggagggcagctgcttgcagtggtacttcttgtattctcccgcacttggatttcagaccgtatagcttcattgaatggaacaagtgtcaagtatgtcttggagcaggacaaagctgccttcattcgtttggctggcactagtgtgctgcaaagtgcagcaaattccatcgtgtcaccctcactgaggaaccttacttcaagaatcgcccttggatggcggattcgcatgaccaatcatttgcttcaatattatttgaaaagaaatgctttttacaaggtattcaacatttcaggtatgagtatggatgcagatcaaagaatgacacatgatgtagagaagttgaccaatgaccttgctggcttgcttactggtatggtgaagccattagttgatattatttggtttacatggagaatgaagcttttgtctgggcgaagaggggttgctatactgtatgcttacatgttcctaggtcttggttttctaagagctgtgtcccctgactttggggatcttgcaaaccaagaacaagaacttgaaggcacgttcaggttcatgcactcaagattgcggacacatgctgagtcaatagctttctttggtggtggatcaagggagaaagcttcttaaggttcattcaaaattccaaaaatcatcacaacaacaaagccttttagtcccaagcaagttggtgtagattagagttgaaacccaatagaaaccacaagtcaaggttcagatacatagatagttgtttccatgcactccttttatgactaaatctttgggtatattctatcctttcaagtctcat

SEQ ID NO: 115621 - DNA, 114 bp, Zea Mays
tgttttttttgggtggggggacggacaacggacggggattttttttatctcagtcctgcctgcatgcttggtctgctacggcgccattgctgacggctgaccccaagttttagc

SEQ ID NO: 115622 - DNA, 1779 bp, Zea Mays
atgattgctttgcttacaaagaagacggaagaaaaggaccataaagcaaaagaaaaggaaagagagagagatgaaattaacttagacatctcagaagctgaaagttgtgagcaagaggatattgatcttgggaatgaagtccttgtggtgaagcaaaagccaacaaaaggttctagtagccttagttgtagaacagtggtacatggtggcactattgaaaaattttataaacctcctactattgaagaatttgtttagatgatgcataaaggaattaaccttagcaacaaggttcaaacaacaaacacagtcacccttcctagctttgcacttatgcttgagtccattgggcaatttggtaaaggtttgagagggcctagtccttatgagatgagtggaccattattgcataaaaggaaacaaaaggtattggatggtttcaagaaccacaaggaatcatgggagcacataggatgtacaatcatgatagatgcatggacagataggaagggtaggggagtgagagaaaagatggtaagtacatttgaccttgtggacagatgcatagaggagattggggaggcaaatgttgtccaagtgatgactgataatgctagtgtcaatacagcagcagcaagcctattgacagcaaagaggccctcaatattttggaatggatgtgctgctcattgcctagatctcatgctagaggatcttgggaagcttgagccagtggagcaaactatcacaagtgcaaggcaggtcactaatgtcttgtatgctcacacaagggtgttagagttgggttacttgaaaaaggacaagagaaagaaagccaataaagttgtgagatctgcaaccttttggaaaaatgttgatatagctgtaaatttttttgaaccattggcaaatgtgttgaggagactggacagtgatgtaccagcaatgggattctttcatggattaatgcttgaggcaaagaaagaaatttctgagaggtttgacaatgatgagagccgctacaaagttgcttgggatattattgataagcggtgggatagcaagctcaaaactccacttcacttagttgggtactacttgaatccttacttttattatccaaagatgtctaaaattgagcatgatggatcctttagagctggagtgattaattgcattacaaagatgattggtgatgaagaaacacaagacaaaataattgaagaactctacatgtaccaagatcaacaagggacatttggacatgaaattgccataaggcaaaggagaaacaagaactttaatccagttcctcagcttgtgagagaaattggtccgtatttgaataggtccatacaaaaaaggagaaacaagctacttgatgataggatgagaggccttgtgtttgttaaatttaactccaagctaaggggaaagaaggagagaacagacagagatcctttacagagggaagtagatgatgttgttggtgatgatgaaaatgaattcattactggtattgtacctcttccgaatgatgttgttgaaccagcgcaagatggaagatcacatgaagaacaaacatcacaagcacaagttcaagtacaagcaaaaagaaagaggtctatgaagcctaggaagaagttaagaagcctgcagtctctgatgcgtgatgttcaagttcaagtgcagcagtcctcatcggattcagaagatggtgacattgcaatggaatcctctgaatctgataagtctccacatgcctttgattctgattga

SEQ ID NO: 115623 - DNA, 1555 bp, Zea Mays
atatttttacattataaataacactatttatagagtagagtttaaaataagagatacaaagataagaggtgaaagctgctcgaaatagtgctgcccagctgcaactcacatttcgggcccatttaacccgagtccttatcctttaaaatggagaaaaaatatctcccctccttcctgatcatcctctcagtccttgcttgtcctcccatcccggagatcgacggctgcttgccgcactcgctccagcggccagccggccacaggcaactatggccgcctctgccgccgccgcggggcctgctacctttctcccgcgcctcccctcgccacggtctccgtctcctatgctccctcctctcggacggagagcccatcccgtcgccgctccgctctgtctctccgccaagcgccgcgcctgcgccgccatgggctccagctcctcctccaactcaggaaatcaaacgtcactgatgctgccgttcagctttacattcgatgaagattcttctagttccagaaggctatatagatggaaaagggtattgctcaaagtaagtggggaagctcttgccgggaatcacacagaaaacatcgacccaaagattacaatggctattgcaagagaagttgcttctgtcaccaaactaggtgtagaggttgctattgttgttggcggtggcaatatcttccgtggggcctcttgggctggatgtagtgggcttgaccgctcatctgcggattacatcggcatgctggccactgtgatgaatgctatatttcttcaagcgacgatggagagcatcggaataccgacccgtgtccagactgccttccgtatgtcagaagttgcagaaccatacatacgccgaagagctgtcagacatttagagaaaggaagagttgtcatatttgctgctggaacagggaacccattcttcacgactgatacagctgctgctctccgttgtgccgaaatcaatgcagaggtagtgctgaaagcaacaaatgttgatggtggtgtatgatgcggaccccaggcagaatccaaatgcccgccttctggagactgtgagctatcatgaagttacgacaagagatctctcagtaatggatatgactgctattacactatgccaagaaaacaacattcccattgtcgtgtttaacttgcaagagcctggaaacattgcaaaggctattgtcggtgagaaggttggtaccttcatcggatgcacaagagatcaggagctaaatggaaacacactggttcaagaaagaagattggttaatgaggcgtgatctccagagatgcaagagttgggggggctccctcttctcttattcagtttttatatatacatatgaggtttagggttgggggctggtgctggaattagattagattagctatcaaaatcctgataatagttgtaaccgtgaaataagacacttggacgaaattaaaattttcctgcaaagtgctattgttctgtgtacctaaagatcaattttgctggctcccggacagtgaacaacgatgtgcacgtgcttgata

SEQ ID NO: 115624 - DNA, 146 bp, Zea Mays
ttttctttttttcgcctatgccaactgagctaactaacttgctgttttttacttgtttggtatctagaaatgccaattcagtgaaacataccagaatatcatactagatagagactgggctcgtcctgtatcaagtactatctccc

SEQ ID NO: 115625 - DNA, 145 bp, Zea Mays
ttttctttctatttctttttttcatcccctttcacaagcctttacaactcttatataaatgcagtaatgggcagttacacactaaccaaacttactcactcaaacttacggcccaatgggcgactccgacacggcctcccttccc

SEQ ID NO: 115626 - DNA, 1645 bp, Zea Mays
ttccccctccctctgccaatctggccagctagccagcccagtccccacgcccatcccatcccatctaaaaactgcatcgaatcctcgccgccgcaccgctaggactcagccgacggcatgccgccgcccaactccgctccccgcctcgcgcttcccgcaatggcccgatcccagacccagacccagtcccagggagacctcgacttcccgtccctcatctccgacctcacctccctgctcctccactcccccgccagcgccggcgccggtggctccggacccgtcttctcctcctcctccctttccatccccactcccaaacccaagccgaaccccagtcccacatcagcagcgccgccgaccccgctggcgcgcgcggccatcggggcctgcgcgggcgcggccgcgggggccttcacttacgcggcgctgctccccatcgacgccgtgaagacgcggctccaggtgcaggcggccgccgcgccgtctgtgacctcgtggcaggtgttcctggacatcctccggaccgacggccccctcggcctctaccgtggcctctccgccgtcatcctcggctccgcctcctcctccgccgtctacttcggcacctgcgagctcgccaagtcgctgctccggccgcacctcccgccgttcctcgtgcccccactcgcgggggccagcggcaacgtctcgtcctccgccatcatggtgcccaaggagctgatcacgcagcgcctccagtccggcgccgccacgggccggtcctggcaggtgctcctgggcatcctccgcgccgacggcttcctcggcctctacgcgggctacgccgccacgctgctccgcaacctccccgccggcgtgctcagctactcctccttcgagtacctcaaggcgttcgcgctgaggcgccgcggcggagagagcctgacgcccggggagagcgtcctctgcggcgccctcgcgggggccatctccgccgcggtcaccaccccgctcgacgtcgtcaagacgcgcctcatgaccagggtcggcggcgccgagggtagccgcaccgtgctcgggaccatgagggaggtcgtcgcggaggaggggctcgtcggcctgtcccgtggcatcgggcccagggtgctgcacagcgcgtgctttgcggcgctaggctactgtgcctttgagaccgcgaagcttgccatcctgcagtgctaccttgaacgctgccagagcaaggagcctggagcagcagcgcagccagagacggagcctggagctgccgctgctacttgagagtttgctgcctgcctgctttcctttttgcgcctttttccccagggagggaaggtaactgttgctgcttggtactactctagtctaggtgtatgctacgttggcagatgatgcaccattatagagtaaatttcagaaacagcatggcagttacacaagtctcaacaacattaaactattaagttactagacatcaaatctggtggaaattggatacattcttcataattggttcgatttgtgcgtatttctgctgttccactggtggtgaaactacaactgttccttatctgtctagcaccgttgttattctgggctatccagccccttctgttactgttgttaatgtgatccctcttaattt

SEQ ID NO: 115627 - DNA, 1538 bp, Zea Mays
cgcagccgcagccagccacccgcatggtcgtctcgtcttcttccctgatcaggcagcaggactagatccattccccctccctctgccaatctggccagctagccagcccagtccccacgcccatcccatcccatctaaaaactgcatcgaatcctcgccgccgcaccgctaggactcagccgacggcatgccgccgcccaactccgctcccaaacccaagccgaaccccagtcccacatcagcagcgccgccgaccccgctggcgcgcgcggccatcggggcctgcgcgggcgcggccgcgggggccttcacttacgcggcgctgctccccatcgacgccgtgaagacgcggctccaggtgcaggcggccgccgcgccgtctgtgacctcgtggcaggtgttcctggacatcctccggaccgacggccccctcggcctctaccgtggcctctccgccgtcatcctcggctccgcctcctcctccgccgtctacttcggcacctgcgagctcgccaagtcgctgctccggccgcacctcccgccgttcctcgtgcccccactcgcgggggccagcggcaacgtctcgtcctccgccatcatggtgcccaaggagctgatcacgcagcgcctccagtccggcgccgccacgggccggtcctggcaggtgctcctgggcatcctccgcgccgacggcttcctcggcctctacgcgggctacgccgccacgctgctccgcaacctccccgccggcgtgctcagctactcctccttcgagtacctcaaggcgttcgcgctgaggcgccgcggcggagagagcctgacgcccggggagagcgtcctctgcggcgccctcgcgggggccatctccgccgcggtcaccaccccgctcgacgtcgtcaagacgcgcctcatgaccagggtcggcggcgccgagggtagccgcaccgtgctcgggaccatgagggaggtcgtcgcggaggaggggctcgtcggcctgtcccgtggcatcgggcccagggtgctgcacagcgcgtgctttgcggcgctaggctactgtgcctttgagaccgcgaagcttgccatcctgcagtgctaccttgaacgctgccagagcaaggagcctggagcagcagcgcagccagagacggagcctggagctgccgctgctacttgagagtttgctgcctgcctgctttcctttttgcgcctttttccccagggagggaaggtaactgttgctgcttggtactactctagtctaggtgtatgctacgttggcagatgatgcaccattatagagtaaatttcagaaacagcatggcagttacacaagtctcaacaacattaaactattaagttactagacatcaaatctggtggaaattggatacattcttcataattggttcgatttgtgcgtatttctgctgttccactggtggtgaaactacaactgttccttatctgtctagcaccgttgttattctgggctatccagccccttctgttactgttgttaatgtgatccctcttaattt

SEQ ID NO: 115628 - DNA, 202 bp, Zea Mays
ctggccagctagccagcccagtccccacgcccatcccatcccatctaaaaactgcatcgaatcctcgccgccgcaccgctaggactcagccgacggcatgccgccgcccaactccgctcccaaacccaagccgaaccccagtcccacatcagcagcgccgccgaccccgctggcgcgcgcggccatcggggcctgcgcgggc

SEQ ID NO: 115629 - DNA, 830 bp, Zea Mays
tggccatcacaggaacaccgagcgcatatcccctccatggattcctgcttccctctccttccctaggccagctcctagctttcttccctagctagggcattacggccgtttctatccaggaggagtcgagagagaaagagagagagattgacgatggcgttagcctatgcagcagccaggctagtccacccatgcattagcatgggcatggtgtccaagcagcacccaagaacaccgccgccgtcctcctgctgcctacacctccaccacatcttctaccttaggcccgtcgccagcagccaccacttggcgcgccactccgtcgacgtcaccaaggacgacaagccgcttgagccgccggcgccggcgccggctgcagagacagagagggagagcacgcatcagcaggaggacgaggacggcgggccaaagctggacccgaggcggttcgaggagaagttcgcggtgctgaacacgggggtccacgagtgccggtcctgcgggtaccgctacgaccagacggcgggggacccgtcgtacccggtgccgccgggcctccccttcatgcagctgcccgacgactggcggtgccccacctgcggcgtcgcgcggtccttcttcgagagcaagagcgtggagatcgccgggttcgcgcagaaccagcagttcgggctgggcggtaactccctcacctccggccagaagggcctgctcatctacgacagcctcctcatcggcttcctcttcttcatctccggctacttcctgcaatgaggacgccaacaacgactctttctgatctgatctgctttccgtttgtgtgaatagaa

SEQ ID NO: 115630 - DNA, 857 bp, Zea Mays
ttctcgatagatctctaatctatactacttattaagactgcaagggtagcctgcctctggctgttctgccacccaccgtggctgtccctctcacgcggcaaaaatatgaggcatgtagggatcgaaccgtgactaattctctacaggcgctagcacttaaccactccaactaagtctgctttatgttacgtcaccacataaggttatactgatattccgtaaatcgtgaatgcatacatcaataggtattgttgcttgataacttcatgtgtgtgagatctaccatttctctagctcatttatgtatttttcaatagcaaacctctctgtttattgatttcagaacgacatttcgacggtattcaaatgattaacatttgtaaaaggtcctacatcacacatcaaggtaatatatagtgaaaattttgaatactatttcaatatttgttagtgtttaacgcattgctgacaagtaaataatatgagtatatgacaagaatgtgcttgttgatagtggtaaataatatgagtatatgagaatattaaatttatgtgacagcaaagaattactgaagtatgtacctagagctttttggttctttattgcttagggttgttaccttttttgttacagatatactcctctatttgatttttttcattgaacttcaagagagtgcctttagagtgattgcagataactatgtcacggatgatggtcgaaaacgggtgttgccattgtgctcctgcttttggcgaagacgatcattgtgtttgccttgctgttgggatatttgaggttggatttattcttctttaattcatttacatctcactaactgatgtgccgctaatgc

SEQ ID NO: 115631 - DNA, 98 bp, Zea Mays
ttttttttgggcgccatgactgggagcagagggtcaagctgctgctgctatggagtccttgctgctggaatttctgggcgtccatgggaggtggagcg

SEQ ID NO: 115632 - DNA, 959 bp, Zea Mays
atggtgttgttgtcgctggaggcgttgaggaagaggaacgtggccggtccgctgctgctgttcaacctcgccctctacgtctccatgttggggttcgcgagctgggcgctcaacgccttcgtcgaccacataggcgaccaccaatactacgacccacctgcagcgcggccaaggccgcggcgttccacgcgcgcgccttgtggtggacgcagggcctcgcggccgtcgctgcgctgggcaccgtcgcgtggggcggacaccgcgctcgcgctcggcctcgcgtgcaaggagatgcgggccgccgccgccgcggcgcgcgggtggcagatgcgcacgctggaggcggtcaccgcggtgctggccgtcacgcagctggcgtacgtgctgatgctgcaccgcgccgccgccgccgcgtacgctgatgatgaagccgatgctaccgcctacgccgacgctggtggcgaccagtgcgagcctggctgttccatcggcaccgaggacgacgccgacgccgactgccagcgcgcgcagcagcagcagcatggccgccaccaccaccaacccaggcagggcggcgggccctcgtgcagtgtcatgtgaactagcatacccatgcatgcatgtttggtggtgtcgctctcttgtcttgccattttccgtgctcgtgtttcgtctcgtggaaaataagcaatttaaacttagtttaatttcctgtatgtcatgtgttcgttttagtgtgtatgcctcctatatattatggtcgtatgtgtgtgtcgacatgcttgtgtctctcagtatgtgcgtgtgtctgtttgtatgtgtcagcatcagtgtatgtaagggtcggtttggtaagttctatcttattctgattcttcgtgagaattagttctatgacataagtgattctatgactaaaagtgattgtttttattctttaatataaactctgaaaaaca

SEQ ID NO: 115633 - DNA, 2370 bp, Zea Mays
tcacaaggatgccggcggcggcggggggaacggcacctccacgagcccttcgagcatcaggatgacgctcctcatgtcgggcctcgcctggggctccgcctgcgcgcaccacactgccaccttaaccgcccgctccacctccgtgacgtccacggcatcgtcgccgccaaccacccgccacacctcgccgcgcaccaaccactcgtgcgcgcactccatgagcgtccgctcctcgcctgcctcctccagctccatgctccgccggcacgtcacgatttccagcagcaccacgccgtagctgtacacgtccgccttcaccgtcacgggcccggcgccgcggtaccactcgggggccaggtacccgcgcgtgccgcgcacccccgtgaacgtccgcgtctgctccggctgcagcagcttggccagcccgaagtcggcgatcttggccgtccccgacgcgtccatcaggatgttctgcggcttcacgtcgcagtggatcacccggctgtccagctcgtcatggaggtagcgcagcccgcgtgcgacgtccagcgcgatgcccatccgctcgtcccaccccggcgggcccccgccgccgctgttcttgaacagacgctccgccagcgacccgttgctcatgtactcgtacaccagcagccggttggcgccctcgtgacagaaccccagcagccggaccaggttccggtggctcgtccgcccgatggcgcgcacctcccgctggaactccaactccccctcctccaccattttctccagccgcttcaccgcgatcgccttctcgccgccgctgtaaagcagcgtgcctcggaacaccgtgccgaacgcgccgcggcccagcggctcgcggaagctccacgtcgcgtgatccagctcctggtagctgtacgacctcaggggcgcctcctcgtccagcgcctccgccgcgtccggctccgcagtcgtcctccggttcgccaggaccagccgcaccgccgccacgagcgcggctagagacacgaacgtcaggatcccgatgcagaccagagcgacggtggtcgagcgcccgacgcggcggtccctgccgccgtcgagcgctgggccccccaccgcgttcttgacgaacagagtgaacccgccgcccgcgtggccgtaccggagcgggagctgctgcttggtgcaggtgccgtcgctgctgtcgagcagcacggcggcgcagaggcagtcggccacgcacgcggcctggcagtcggcggcgctcgtgcccgcgcccagcacggcgtacggcgtgtccgcccacgacatgttctgcatcgcggccatggccggcgccgcactagaaccagccgccgcgcagccgccggcgctcgaggtctcggtgcacccgagcgtggcgtcggcggcgtcgatgaagccgaaccccggcgggcaccggcagtcgggctgcgcgtcgcggctgaggacgcagtagctgttgaggccgcacgcgcccttgacgtggcaccggtcgttcggccctacccactggacgcctgtcgtccacgcgccgccgcgcgtgacggcgtggcggtacaggcgaaggacgccgtcagggtcgagcgtgacgcggtagaaaacgtccgcctcaccgggcgacggcgcggcccagggaagcgtcaggttcttggtgtagttgccgccgtttccggtgacgtagagcactccggtggtgtcgatgcgcagggtgagcgggaagccgatctggaacgtgccggtggcccagtacgcggcgttcgcggtgttctccgtctggaccggatacaggacgaggttgccgtcgttgatctggttcgtgaggcggtacctccccgtggcgctgttggtgggcgagacgctggagaagagctgcgcgccgggaacgaggtcttggcccgggagcagggtgtcggtgggcgcggcggcgaaggtggaccagaccatggcgccgtcggcgccgtagagcacgaagctgccgtcgtcgcgcatggcggcggcggtggcaggccgcggcggcaccgcgaggggcctgtcctgaccatcggcggggcccgtccagaccaggcggccgtcgtaggtaacccagagcgcgccgcccgtggatggcgtgacgttgcggttggccgtccaggtgacggtgacattgggggtggtggcgagccagacgcccacggcgaggcccccgtccgtgacgtagaagccgaacgcgaagcggcccgacggggacggccaggcggcgccggcggccgcctgcagggagttccccgcggtgatgttggtgaccggttgcgcggcagcacctggcacggagagaagcgtggcgagcgcgagccacgaaagcaggcggatgggtagagccat

SEQ ID NO: 115634 - DNA, 579 bp, Zea Mays
acgacattgccaaggctccccaaagatagcatagcagcagcactcacaatagcaaaaaccaccatccgtcgtcgccaaccgtagcaagaacatcaccaccgcccagcaataatggcgcagagcatgaggattgtggcgctggccctggtggccctgctggtggtggcggcggcggcgcccgtggccaccgcgtacggctgctacgacgactgctacgagcgctgcgccaacggcaagaaagaccccgcctgcaccaagatgtgcaaccaggcgtgcggctccacggatcagggcgccggtgccgccggcgccgcgccggcttgatcgcccagcgcattcatcgcttcagctcgatataatcgctgctccgtcagcaacccacatatgattcgatcaattttcctcctctaatttctcgaccccgtcgaatttttttcctttctattcttctactatactactactatctgtttgtcgcgttgatttcttctcatacatcgatcgaggatcgactcatcgttttgtaattcctgcaatttgtaagtgtaatgacctatatgatttagtcttccttttaaa

SEQ ID NO: 115635 - DNA, 1389 bp, Zea Mays
accctggtggcagtgtcaccgagacgaaacaaggaaggaaccagtggaagtgggatctggatctctcctctctcgtctgcaccgcgagtccgcgactccgcaccaagcaaatcccctgcccccaaaatattgctagggattcgaggggaggaaaatccaggcgcccaggcctggcaatccgttcgtcggagaggccatgagctcggcgcaggatccgttctacatcgtccgggaggagatccaggagtcgattgataaattgcaaagtaacttccaccgctgggagcaaactgcttcaaacacaggagaatatgttcatctgacaaaggagcttctgaccagctgtgaaagcatcgagtggcaggtagatgagctggaaaagacaatctcagttgcatcaagggatccatcatactatggacttgatgaagttgaactttccagacgaagaaactggactggttctgctcataagcaggttggtacagttaagagagctattgaaaagggcaagagcaatgtagcaacttcaaaataccaggatacaagcaggaccaaccactattctgcccaagataatgatgactttatctcttcagaatcagataggcagcttctactcatgaggcagcaggatgaagaacttgacgagctcagtgaaagtgttcaaaggattggtggcgtaggactaaccatacacgaagagctgtctggacaggaaaggatcctaaacgacttaagcttggagatggagactacttccaacagacttgatttcgtgcagaaaagagtggccatggtgatgaagaaggccggcatcaagggtcagatcatgctgatcgtgttcctggttgttctgttcatcattctttttgttttggtgttcttgacatagccaagtgcaccagggtcctcgattttctccctcccatttgttgtgcctccctccctagtacgaacataagtatacgtgctggagctatcctttataaatcccgattttaatgcattttgttctgcgtgagatcaccgtcattggaacggtgttatggtatgtatgccctagtcgctcttgttcgaagaactctgaagatcaattctacgactaagacgacttcattttgaggtactgttcatcatccaaaatggaggcagccgattcgattcctctttctccacgtaaagcaaaatgaggatgggagcggtattgttggagtgatgaacagtgcttggtttatagcgtgtaaaatggggacggggagtgactgttggaggagaggagatgagatggatgcgtgctaaaaggcaaccgatactaaatgaatgttcaccaaccaaatgaatgttggaacttttgtttcttaatttataatgccaagtgttcgtctc

SEQ ID NO: 115636 - DNA, 1119 bp, Zea Mays
atgtcgtcttcgccggacttcgctgacggccaggacccgccccagccgccgcccacactgcagccgcagggcgctccttcggctccctcagatgtgtgcgagggcctggtagcccaggtcgatcagttcctacgagaggccctcgagaagccaagggagaggctttctgtgctaagaatggagcaagaaattttgaagttcattcatgaccctagtcgtacagagtatgaattcaatggccttccaacttcgtatctgcgtcttgctgcacatcgcctggcgcaacattacttcctgcagtccattgccataccagacaacagtttgcctgatggaactggttcacgtatcatccttcctagcagcaggtcaaatagaatcaagattgataaggagcatgcagtcaatagaaacaagcagaacaataggtttgcaattttcagagatcgtgagccagagcgcaaggatcctgattatgacagaagctatgacagcgtattagtcatctgcacagtgaccaaggagcgccgatatgcttttactcgcagtcttcttagccgtgcactttcgaataaatctgcaattttggatcgtatcagagatgcagtgtttgagaaagtttatgttatcgattttggacttgcaaagaagtacagagatacatcaacacaccagcacattccatacagagagaacaagaacttgactggaacaacaagatatgcaagtgtaaatacccaccttggaattgaacaaagccagagggatgacatggaatctcttggatatgtactgatgtacttcttgcgaggaagccttccatggcagggcttgaaagctgggaacaaaaaacaaaagtatgaaaagattagcgaaaggaaaattgcatttaatacacccaatattcgggaaggttttcagtttgattatgtttttaactggaccattctaaagtaccaacaggcacagatgaccactgctccacctcgtgcaattgctccagcagtaggacaaagctctaggatggctcctgtggctcaaggacgagaagctgctcgtgtacgattactacagccggggaagcgtgtccaacatgctccatggtatgatccacgctga

SEQ ID NO: 115637 - DNA, 2120 bp, Zea Mays
cttcttttcttctggtcccaaaagcatttggcgacgctgcatctggttcagacaactttacgtacgtggtcgaccaaattaacagcccactgacatcgtttggttcgtacaaattaagggaagaagaacgtggtcacatgctggcgagcttagctatttcctcgatgcatcgtcgtcgtcgtcgtcgtggagtctgaccagaacagccgccacaagcccttctcaactcaagtctcatctcatcatctcccacctacctaaactaacagcccacggccaacttgcaggacgcatgggcgcatggcatgtggcggcatataaatggaggcagccgagcgcgcaaggtctccacacgcctctcttgctcaccattctcttctaaccagccaagccaaggcgcatctagcgagctgagcagcaatggcggctgctacttcttctaggcgccctgcagctgctctgctggtcctggcagcagccgtcgtggccctggcggccgagggggccaggtacccgccgctggcgccgggcctgtcgttcgacttctacaagaagagctgccccaaggcggagtccatcgtgcgggagttcctggcgtcggcggtccggcagaacgtggggctcgccgcggcgctgatccggctccacttccacgactgcttcgtgcagggctgcgacgcctccatcctgctggacgccacgcccacccagccccagcgagcagcagtcgccgcccaacctcacgctcccgccccgccgcgttcaaggccgtcaacgacatccgcgccccgcctcgaccaggcctgcggccgcgtcgtctcctgcgccgacatcgtcgcgctcgccgcacgtgaatccgtcgccctgggtggcggcccggcgtacaagttgccactgggcaggcgcgacgggctggcgccggcatcgaacgccgccgtcctagcggcgctcccaccgccgacgtccaaggtgccgacgctgctgtccttcctggcgaagatcaacctggacgtgacggacctggtggcgctgtcgggcgggcacacggtgggcatcgcgcactgcggctccttcgacaaccggctgttcccgacgcaggacccgacgctgaacaagttcttcgcggggcagctgtaccggacctgcccgaccaacgcgacggtgaacacgacggccaacgacgtccgcacgcccaacgccttcgacaacaagtactacgtggacctgctcaaccgggagggcctcttcacgtcggaccaggacctgctgaccaacgctaccacgcgccccatcgtcacgcgcttcgccgtcgaccaggacgccttcttccaccagttcgtctactcctacgtcaagatggggcaggtcaacgtgctcacgggctcccagggacaggtccgcgccaactgctccgcgcgcaacggcgccgctgctggtgacagtgacctgccgtggtcgtccgtcgtcatcgagaccgtcgcggacgccgccggtagcctcgtgctctagataataagcaaataagcagtttgaagcttgcttcgcatgcatgttgcaacaaataagcagctagtagcgatcgatcgattggaaataaagcagctagtagcgatcgttattacagaaacgacgacgacgtcgatggcaatggcagcatgctctgcagggagagcgcgggcacgggcatcgatggcaatggcaccagtagatgatccctgtccgcgcgggctcagccgaccaatcgatgtcaaccgcggcagcagtagcatagctaaggcatccgccgccgcacgccgactcggccacgtgatcgctgtcggactggaacacgatccagcctcgctcgctccatcgtctaataagagggtggcggcggcgaatatgggaattggaccttcggggggagaaaatatatcttggatgcccgtcaagacatctttcaatggtttccacagaaataatttaaaggtggctgactaatgtcagccgcgagtctcccgggtctgaacctagctaggtttgaaccccttgccgcaaggaatcctctaaattgtatactctaaaagaatatttgtatgttctctaaaattatatcctctataacataataactatataaa

SEQ ID NO: 115638 - DNA, 88 bp, Zea Mays
cccgagacaccctcggctcagtctgaggcaccctcggctcggcccgaggcaccctcgactcggcccgaggtaccctcggcccccgagg

SEQ ID NO: 115639 - DNA, 330 bp, Zea Mays
atgactacagctccaactctatcgcgagggatgagacgcagctccgaaccatgtttcagaaacacgttgcctgcactttgctgggggttgatgccaattccatctttggtgatgatggcgctggtctggggcgggaccttgaactcctccgcggcgtacttgagcaccgcggtaaagggcgccgcctcgggcacgctgaacactttgaaagggagcttggggtcggaggtgaggatgatcttgaaggataccttccctcctgcgccgccgccagccgccgccatgggggtgttcgcctccgactctgatcgaggccgcggcgtcgcttga

SEQ ID NO: 115640 - DNA, 2616 bp, Zea Mays
actcttgctactagctaggtgaggagtaggatcgtggatcgtacgagtagctcaagaaggaaacaaaacggcaggcttgcagttccaatccatcccgctggcatcgtctgttcttcgtccttccatgctctagactagctagcgttgcagtgcagagcatgacacaggcaggcatggagtagtgacatatagatggagctggcctggagctgctgctgcttcttgctcgccgcctgcgcgcgctctctccgtcgtctgctccagctccccgcgctcctctgctgcgaggccatggcgtgggcggtcaccttccttgccttcccgctccgcatgctcaccgccgtcgagagggagcgcaagttggggtggctggttgcggagatgcaggcgcagatggacgacctggcgttggagaacgcggcgctggaggacaggctgcgggcggcgctccgggagcgggaagccgtggaggcggtccttgacgacgtggaggacgagcacgaggacgccctcgccaggatccatgtcctcgacgcccagctcaaggcgctgaggcaggagaacgtgcggctgaacgagcacaagggcaagtccaggtgggacgacaagcccgcggcgcaggcgcaggcggcgtcccaccagtccgacgacaagctgaagccggcggccaagagggatcggggagaggaagacgcggcggtggcgacgacagcccagtcagccaatcatgccgccggcggcccggcgtcggagccaccgccggtggacagctacgatgccctgcaggcgacggccgtggcgcggtgccgcagcctgttcagcctcggcatatcgctggcggtgggcgcggtggcgtggtcggccgacgcgccgtgcctgccgctgctggcggggctgttcgccgtcgtggccgtgtccatgcgcagcgtgtcgcggctgcgccggcgggccggggacgacggcgccgtcgcgctgctcggcctcaactggttcctcctcggcctgctcacctcgcccatgctgccggccgccctcggccccgcgctcacgtggctcgccgcaaccgcgcccctgtgacgtcccggccccggcccgctatttccgtttccgttcgatacacgtgtctgttgtaacttcttcacacgtactgtgctactgctgcctgcagtgtactactactgcatctctctttttcaagattccactggacattagcagcggttgaaccgcacccggccgccggttcaactgaactggcccctttttctcagccccgtgggacggattataaaccttgctctccctcactctcattctatgaacctccagctttctctctctccttccctcctctccagttccacagaaggctccgtgcctagatcccgtggagaatgtgttggggatcaaggagtggttgattggatccatcccctcacgtgcttccctcatcaagtttcaaatccccatctgcgcgaggaactcctctctcaaggtatctttcctcgatctacctttctagcgagtttgggttgaatccctttggagtaaataaacgaaaggttcatactgccttattctctaatggattcattatttggtttgaatttgataatttgggggaggggaaatcgctcgtaactgtgcaaacacttgttgctcgacccccctcaatcaatcgagccgtggtgtttgttgtctctctctctttaagatggttgcacggaggaatccatccattattgaagaaggtagtggatctgaagaaatccaggtggagcgtcctcgccgctcccagaccggtcatggtagaggccaagctcggggagatgttggtgggagtagttctcaacaacctgaaatcgtccatgccgctcgagaagaacctgtccctcagccacctctccatccatcttcatcacgggctgctgcagctgccgcctctcgccccatgagccgtggtaagagaagcaagaagagaggtgttcgtgcgctcatcaggggtttaaatggaatctatgctatctgtcgtgagagttatgttcaaatcgccgagctaaaaaggaaaaatgtcgagtacaatgagaactttaggagatttatgttagagtcggacaactttaggcgttatgttggtcgtgtacctctgcgtcctgctccaccatacaatcctccgccgcctatgcccgacactctggatcagtgggttcagcagacatatggtgttcctttcgacgaagatatctctgatgatgaggaagaaatctctgatgatgaagatgagtccttctggtgaacatggtcattatggtggcttcttcttcttcttggttcttgttgctaaaagggagagaagttcgtgacgtttgatctagtcttttgttgctggcagttgtgagagtgagaacctaaactatgtgggatgtaataactttatgattatgttgtctcaaaacacctggcctgtaatagataattaggtgaacttgttcttattatgctactactcgtttcattatgccgtgaatcctctttatgctaagctttatgtatattgttactgtatcatttgggatatactattcttccgcggtattttacatgacactttgttgc

SEQ ID NO: 115641 - DNA, 2477 bp, Zea Mays
actcttgctactagctaggtgaggagtaggatcgtggatcgtacgagtagctcaagaaggaaacaaaacggcaggcttgcagttccaatccatcccgctggcatcgtctgttcttcgtccttccatgctctagactagctagcgttgcagtgcagagcatgacacaggcaggcatggagtagtgacatatagatggagctggcctggagctgctgctgcttcttgctcgccgcctgcgcgcgctctctccgtcgtctgctccagctccccgcgctcctctgctgcgaggccatggcgtgggcggtcaccttccttgccttcccgctccgcatgctcaccgccgtcgagagggagcgcaagttggggtggctggttgcggagatgcaggcgcagatggacgacctggcgttggagaacgcggcgctggaggacaggctgcgggcggcgctccgggagcgggaagccgtggaggcggtccttgacgacgtggaggacgagcacgaggacgccctcgccaggatccatgtcctcgacgcccagctcaaggcgctgaggcaggagaacgtgcggctgaacgagcacaagggcaagtccaggtgggacgacaagcccgcggcgcaggcgcaggcggcgtcccaccagtccgacgacaagctgaagccggcggccaagagggatcggggagaggaagacgcggcggtggcgacgacagcccagtcagccaatcatgccgccggcggcccggcgtcggagccaccgccggtggacagctacgatgccctgcaggcgacggccgtggcgcggtgccgcagcctgttcagcctcggcatatcgctggcggtgggcgcggtggcgtggtcggccgacgcgccgtgcctgccgctgctggcggggctgttcgccgtcgtggccgtgtccatgcgcagcgtgtcgcggctgcgccggcgggccggggacgacggcgccgtcgcgctgctcggcctcaactggttcctcctcggcctgctcacctcgcccatgctgccggccgccctcggccccgcgctcacgtggctcgccgcaaccgcgcccctgtgacgtcccggccccggcccgctatttccgtttccgttcgatacacgtgtctgttgtaacttcttcacacgtactgtgctactgctgcctgcagtgtactactactgcatctctctttttcaagattccactggacattagcagcggttgaaccgcacccggccgccggttcaactgaactggcccctttttctcagccccgtgggacggattataaaccttgctctccctcactctcattctatgaacctccagctttctctctctccttccctcctctccagttccacagaaggctccgtgcctagatcccgtggagaatgtgttggggatcaaggagtggttgattggatccatcccctcacgtgcttccctcatcaagtttcaaatccccatctgcgcgaggaactcctctctcaaggggaaatcgctcgtaactgtgcaaacacttgttgctcgacccccctcaatcaatcgagccgtggtgtttgttgtctctctctctttaagatggttgcacggaggaatccatccattattgaagaaggtagtggatctgaagaaatccaggtggagcgtcctcgccgctcccagaccggtcatggtagaggccaagctcggggagatgttggtgggagtagttctcaacaacctgaaatcgtccatgccgctcgagaagaacctgtccctcagccacctctccatccatcttcatcacgggctgctgcagctgccgcctctcgccccatgagccgtggtaagagaagcaagaagagaggtgttcgtgcgctcatcaggggtttaaatggaatctatgctatctgtcgtgagagttatgttcaaatcgccgagctaaaaaggaaaaatgtcgagtacaatgagaactttaggagatttatgttagagtcggacaactttaggcgttatgttggtcgtgtacctctgcgtcctgctccaccatacaatcctccgccgcctatgcccgacactctggatcagtgggttcagcagacatatggtgttcctttcgacgaagatatctctgatgatgaggaagaaatctctgatgatgaagatgagtccttctggtgaacatggtcattatggtggcttcttcttcttcttggttcttgttgctaaaagggagagaagttcgtgacgtttgatctagtcttttgttgctggcagttgtgagagtgagaacctaaactatgtgggatgtaataactttatgattatgttgtctcaaaacacctggcctgtaatagataattaggtgaacttgttcttattatgctactactcgtttcattatgccgtgaatcctctttatgctaagctttatgtatattgttactgtatcatttgggatatactattcttccgcggtattttacatgaca

SEQ ID NO: 115642 - DNA, 2388 bp, Zea Mays
actcttgctactagctaggtgaggagtaggatcgtggatcgtacgagtagctcaagaaggaaacaaaacggcaggcttgcagttccaatccatcccgctggcatcgtctgttcttcgtccttccatgctctagactagctagcgttgcagtgcagagcatgacacaggcaggcatggagtagtgacatatagatggagctggcctggagctgctgctgcttcttgctcgccgcctgcgcgcgctctctccgtcgtctgctccagctccccgcgctcctctgctgcgaggccatggcgtgggcggtcaccttccttgccttcccgctccgcatgctcaccgccgtcgagagggagcgcaagttggggtggctggttgcggagatgcaggcgcagatggacgacctggcgttggagaacgcggcgctggaggacaggctgcgggcggcgctccgggagcgggaagccgtggaggcggtccttgacgacgtggaggacgagcacgaggacgccctcgccaggatccatgtcctcgacgcccagctcaaggcgctgaggcaggagaacgtgcggctgaacgagcacaagggcaagtccaggtgggacgacaagcccgcggcgcaggcgcaggcggcgtcccaccagtccgacgacaagctgaagccggcggccaagagggatcggggagaggaagacgcggcggtggcgacgacagcccagtcagccaatcatgccgccggcggcccggcgtcggagccaccgccggtggacagctacgatgccctgcaggcgacggccgtggcgcggtgccgcagcctgttcagcctcggcatatcgctggcggtgggcgcggtggcgtggtcggccgacgcgccgtgcctgccgctgctggcggggctgttcgccgtcgtggccgtgtccatgcgcagcgtgtcgcggctgcgccggcgggccggggacgacggcgccgtcgcgctgctcggcctcaactggttcctcctcggcctgctcacctcgcccatgctgccggccgccctcggccccgcgctcacgtggctcgccgcaaccgcgcccctgtgacgtcccggccccggcccgctatttccgtttccgttcgatacacgtgtctgttgtaacttcttcacacgtactgtgctactgctgcctgcagtgtactactactgcatctctctttttcaagattccactggacattagcagcggttgaaccgcacccggccgccggttcaactgaactggcccctttttctcagccccgtgggacggattataaaccttgctctccctcactctcattctatgaacctccagctttctctctctccttccctcctctccagttccacagaaggctccgtgcctagatcccgtggagaatgtgttggggatcaaggagtggttgattggatccatcccctcacgtgcttccctcatcaagtttcaaatccccatctgcgcgaggaactcctctctcaagatggttgcacggaggaatccatccattattgaagaaggtagtggatctgaagaaatccaggtggagcgtcctcgccgctcccagaccggtcatggtagaggccaagctcggggagatgttggtgggagtagttctcaacaacctgaaatcgtccatgccgctcgagaagaacctgtccctcagccacctctccatccatcttcatcacgggctgctgcagctgccgcctctcgccccatgagccgtggtaagagaagcaagaagagaggtgttcgtgcgctcatcaggggtttaaatggaatctatgctatctgtcgtgagagttatgttcaaatcgccgagctaaaaaggaaaaatgtcgagtacaatgagaactttaggagatttatgttagagtcggacaactttaggcgttatgttggtcgtgtacctctgcgtcctgctccaccatacaatcctccgccgcctatgcccgacactctggatcagtgggttcagcagacatatggtgttcctttcgacgaagatatctctgatgatgaggaagaaatctctgatgatgaagatgagtccttctggtgaacatggtcattatggtggcttcttcttcttcttggttcttgttgctaaaagggagagaagttcgtgacgtttgatctagtcttttgttgctggcagttgtgagagtgagaacctaaactatgtgggatgtaataactttatgattatgttgtctcaaaacacctggcctgtaatagataattaggtgaacttgttcttattatgctactactcgtttcattatgccgtgaatcctctttatgctaagctttatgtatattgttactgtatcatttgggatatactattcttccgcggtattttacatgaca

SEQ ID NO: 115643 - DNA, 2462 bp, Zea Mays
atgttttccagtgaaattgagctagttatattgagaagtcagtaagagaaggctgttgtgcagctatatgttagaatgagctgagactccactcaaaagtaaagatgctatgatcatacgggcacacatgtccactgaagcagaattagctgatagaaatagcacactgaagcagctatccattctcttgaaaccaaccttagcagtgttattcaagagaaggaaggtcttgaggagcttatgaaaggacatgacgaagcgtcaaatcaagttagtaacaagtctcgtgatatagcagtcaataacagtgatagagtattgaaggatcaagatgagattttacagcttagggtcttgcaggcagatcttgaagagcaagttgataatttgaaatctgcaaaagatgagactgaaattttaaacatgattcttaggtcaaaattggaggagcaacacactgtgatgtcattattgctccagaatcagaggcatgagttgataaattcaatagaagagaacaaggatctcactcaaaaacttgctgaacaaagtctgaaggcagaagagttcaaaaacttgtctatccatttgagagagctaaaagaaaaggctgaagctggaagaaaggagaaggaagggtcgctacataccatgcaagattctcttagaattgcatttattaaggagcagtatgaatcgaaggtccaagagctgaaaggtcaagtttttgtcagtaaaaaatatgccgaagagatgctgctgaaactgcaaagtgctttggatgatgttgaaactgggaagaaaaatgagattgctcttgccaagagaattgaggagttgtcgatgaaagtttctgaaatggaggtggagatgctggatttatcagctgataaaagagaactgtcaaatgcatatgacagcatgatgacagaactagaatgcacaaaattaaacttagattgctgcaatgaagaaaaacagaagattgaagtctctctggaagagtgcagtgaggaacgcaacagaataagggtggaacttgacctgattaagaagttattggagaatatggcattaactgacaataacacatcacatgatagttctgaatcatgcacccctggaaccacgtcgattaggcatgttcttggagatggtaaggcggagcctgcatcaaaggctacaccaaatacaacaaaaatagattcagggttacaggaacatgaaattcagagtagaagttcctcttcaaatttgtctcaaggagcagaggatgttgtgaagtttgacaataatgaagagagcaagaacttggagaattgcgatgaggaaatggaatcgccaacaaagaacaatttgaatagcaacaatagcatcaaagatatttctcaagagcacaagaaattagcaaatggattcaaccttttccagaaggagctggaaagactgaaagatgagaatctgtctcctcttcttcccctagacgtcaatctaactgacccatcactcagtggtttggaaaggacattgtcacaactcgatatggcaaatgagcatttgcaaagtatttttccatcatttaaagagcttcctggttctggcaatgctttggaaagattactcgccttggaactcgagcttgcagaggctctccaagcaaagaagaaaacaaacatccttttccagagttcattcttgaagcagcacaatgatgaagcagcgatcttccaaagcttcagggacatcaatgaagtgatacaagatacgatcgagctgaagaggaggcagatggcggtagaaaacgagctaaaggagatgcagggcaggtattcagagctcagcgtgcagttcgccgaggtggagggcgagcgacagaagctcgaaatgaatctgaagaaccgaacaccatggagatcatagggaaccaccaatcaaagcgaagaaaactaacgagagaagaaaaaaaaagtgtcagccagctgcaggctttgtatacaatcttgtgcgacggcagtgggatacattttgtagtgtatatatatcagctgtatcgattgtagagttgtagtgagcgagtgatatgcataaaatgtaacacagcaccttgtacaagaaacaagccttgttatctgattgttccttgccaacaaaccaaccatcagtctttgaagcagtgggtgtatccacgttgctgattgtattttgcagttatttgtatagatcgttgatcaactaaccgctccccttattctgtttttactagagaccaggttgtagtagatggctttatcaaaattcttttagtgtgtgagttataaaagcttaaatatgatcttaacataagaagctgtattaaaacatgtgtctagacaattgtttttcctagtaagatagatttcttaacaggtttaatcataatttattttataagaatgtgttgatttagaaattatatattatat

SEQ ID NO: 115644 - DNA, 2417 bp, Zea Mays
atgttttccagtgaaattgagctagttatattgagaagtcagtaagagaaggctgttgtgcagctatatgttagaatgagctgagactccactcaaaagtaaagatgctatgatcatacgggcacacatgtccactgaagcagaattagctgatagaaatagcacactgaagcagctatccattctcttgaaaccaaccttagcagtgttattcaagagaaggaaggtcttgaggagcttatgaaaggacatgacgaagcgtcaaatcaagttagtaacaagtctcgtgatatagcagtcaataacagtgatagagtattgaaggatcaagatgagattttacagcttagggtcttgcaggcagatcttgaagagcaagttgataatttgaaatctgcaaaagatgagactgaaattttaaacatgattcttaggtcaaaattggaggagcaacacactgtgatgtcattattgctccagaatcagaggcatgagttgataaattcaatagaagagaacaaggatctcactcaaaaacttgctgaacaaagtctgaaggcagaagagttcaaaaacttgtctatccatttgagagagctaaaagaaaaggctgaagctggaagaaaggagaaggaagggtcgctacataccatgcaagattctcttagaattgcatttattaaggagcagtatgaatcgaaggtccaagagctgaaaggtcaagtttttgtcagtaaaaaatatgccgaagagatgctgctgaaactgcaaagtgctttggatgatgttgaaactgggaagaaaaatgagattgctcttgccaagagaattgaggagttgtcgatgaaagtttctgaaatggaggtggagatgctggatttatcagctgataaaagagaactgtcaaatgcatatgacagcatgatgacagaactagaatgcacaaaattaaacttagattgctgcaatgaagaaaaacagaagattgaagtctctctggaagagtgcagtgaggaacgcaacagaataagggtggaacttgacctgattaagaagttattggagaatatggcattaactgacaataacacatcacatgatagttctgaatcatgcacccctggaaccacgtcgattaggcatgttcttggagatggtaaggcggagcctgcatcaaaggctacaccaaatacaacaaaaatagattcagggttacaggaacatgaaattcagagtagaagttcctcttcaaatttgtctcaaggagcagaggatgttgtgaagtttgacaataatgaagagagcaagaacttggagaattgcgatgaggaaatggaatcgccaacaaagaacaatttgaatagcaacaatagcatcaaagatatttctcaagagcacaagaaattagcaaatggattcaaccttttccagaaggagctggaaagactgaaagatgagaatctgtctcctcttcttcccctagacgtcaatctaactgacccatcactcagtggtttggaaaggacattgtcacaactcgatatggcaaatgagcatttgcaaagtatttttccatcatttaaagagcttcctggttctggcaatgctttggaaagattactcgccttggaactcgagcttgcagaggctctccaagcaaagaagaaaacaaacatccttttccagagcttcagggacatcaatgaagtgatacaagatacgatcgagctgaagaggaggcagatggcggtagaaaacgagctaaaggagatgcagggcaggtattcagagctcagcgtgcagttcgccgaggtggagggcgagcgacagaagctcgaaatgaatctgaagaaccgaacaccatggagatcatagggaaccaccaatcaaagcgaagaaaactaacgagagaagaaaaaaaaagtgtcagccagctgcaggctttgtatacaatcttgtgcgacggcagtgggatacattttgtagtgtatatatatcagctgtatcgattgtagagttgtagtgagcgagtgatatgcataaaatgtaacacagcaccttgtacaagaaacaagccttgttatctgattgttccttgccaacaaaccaaccatcagtctttgaagcagtgggtgtatccacgttgctgattgtattttgcagttatttgtatagatcgttgatcaactaaccgctccccttattctgtttttactagagaccaggttgtagtagatggctttatcaaaattcttttagtgtgtgagttataaaagcttaaatatgatcttaacataagaagctgtattaaaacatgtgtctagacaattgtttttcctagtaagatagatttcttaacaggtttaatcataatttattttataagaatgtgttgatttagaaattatatattatat

SEQ ID NO: 115645 - DNA, 3580 bp, Zea Mays
tatggtgtgtgtttgattgtttctggtttgctgtgtgaattttacccttttttgtgtgtaaagggaaatgaattacattcattgatgtgaagaagtttgtgttgcctttgctttcagtcaaaaaaagaatgctactcctaaccttgagagacgtttgaactgcaaaccttttctgggagctatcattatactatcgcaatgtcaagggtaccaaaatggaagatcgaaaagactaaagttaaggttgtattccggctgcaattccatgccacaaatattccatcaacaggatgggacaaattatttttgtccttcatctctgctgatacgggaaaggtgagtgcaaaaacaaataaggcaaatgtcaggaacggaagttgcaaatggccggatcccatctatgaagcaacacggcttcttcaggatcctcggactaagacatacgatgacaagctatataagcttgttgtggccatggggacgtcacggtctagtattcttggtgaggttgatgtcaatcttgctgaattcgcagaagcactgaagccgacttcaatagcacttcctcttcgtggttctgacttcgggacactgttacatatcacagcacaacttctcactacaaaaactggtttcagagaatttgagcagcaaagagaaactggcactagaagctctcagcagttattgaaccaaagaagtcatgatcctgttgaagttgctgcggcctcatcagacattggcactgataaggttaattcgaggattaagctaaaagaaaattctttggggttccccttggctgaagattctgcagggtcaacagacgactatgaaaattcttcacatacttcagatggtatttttactgaaaagaatgatccacacggtgctcatgaaatcaatagctttaggagctcaaatgacttacccctttgttctaccagtcaaagtcctacaccagaaaaaggtgcccattgggttaaacatcttttatcacaagggagcaatgattgggctcatagctcaagtcctgggtattgtgctgataaagatttagctgcggctcatgatgagaataaccggctcaggacaagattggaggtggctgagtcagcattttctcagcttaagacagaagcaacatctctggagcatgttactgacaagttaggcactgagacacagggccttgctcaacagcttgctgttgaacttatgtcacgtaatcaactcactactgaagtgtccttgctaagaacagaatgttctaatctgaaacaagagttggaagaaataaaatcttctaaacacttacagaacaagtttgacgtagaaggtaaaactatgactaagtatggtaaggatattcttgctacagagtccattcatcatctccaaactgaatggctgcaaggtttgctacttcttgaaagtaaactgcagcagaccagaaacaatgccctccatggactacaagcaagtgatcttgattttcttcttgctgatctgggggcacttcaacgtgtcattgagaacctcaagcaaggtgttcagccaggtcaaatgaaagaaaatcacaatgcagaacatttggttccaattgctggttatctatcaaactcaggacatgatgataccatcaagaaaagttccggtggtagtacaggcacaatggaggagaaaatgtgtgagctcctgcagaagctggaggactcaaaaactgagaaggagaatctcctggagaagatgagtcagatggagcgctactatgaatcttttatccataagcttgaggagagccagaagcagacaacaattgaattagaaaatctcaagaaagagcataactcttgcttttatacagtttctgtcctacaagctcagaagcaaaaaatgcacgaggaaatgaatgatcaattaatgagatttgtggaggaccgaacagctttagaagctcaaaataaggagtttgagaggagggctgttgctacagaaactgcactcaagagggttcgattcaattattctgcagctgtggaacgtctacagaaagaccttgagttactgtcgtttcaggttctctctatgtacgagtcaaatgaaactcttgccaagcaatcattactagaagattttgatagtttgcctgaggaacactctgccgtggaagatttatgtggcaataatgaacatgagcaatacaggcctggtgtcaaacaaatcagacctgaaggtctatatgcagagaaagaaactgatggccagaaaaatcttattcgggcactcaagattgaagacctccgtgcgaggtcagagtttcaagcacatactgattcacgggggaaccactcaaacttggaagggccaagaagggcctatagtgctatggagtctgagcatttagagatgtttatttctaatatcgagtggcagatattctctgatgtattacgtgagtctcactatgctacattggatatcattaaatgcatgcagggaaggttggacgtgttagaaatgcagcttcatgactctaatgatgctaggcaatctctagtgctcaagttgaactctgcactggcccaagccaaaagtgtcaaagagagcgaagcaggatatgttttgaagtgtgatgatctgactgtgaagaaccaaatattagaagcaaagcttcatgatattacagttgaaaatgctttgcttatggaaaagctcacggagtctgaaagacttgttcaggaacataaaacttgtgaaagcaagtacaaggtctgtactgaggaagttacgagattggacaaccttttaatcaaagaaactctactaaccaaccagcttaaggatgagctcacttcactaagagaaagttttgaggccatgaaagatgcgttaaataagcaatcatccataaacaatgatatacaaatgatttctacatcccttcaagatcaactgggtgacctatgctctaaaattatatcttttaacaaggaagcaaacatttcaggcttagaagaggcatctttgctgcatgaacttgagagtaagaattacgctgctgtgatgaaaagattggaatccttccatcagcaaacatgtgacaaggtacttcatcttcttgaggagaaggaagtaatggaaaaaatgtgtgatgctcttcagagaaggtcagagaaggctgagacaaaattgcatggtatggagcagcagtttatatgtgatatggatgccacaaaacagaagctaaacttgtctgaggaaattgtagagaagcttcagcaagaactccaggacatggctcacaaacttaggatttgctccgattctcaagaaaaatattctgttaccaatggtgatttaacatcaaaattgtcacaaatggaaattgagctacatcatgcaactagtgagaacaaggctcttgttgaaaaattgaaagagtttagtgttactgtagaggaactcgagaggacaaaatggtgtcttgtacaacatgaggaggatacccgtacctttggaccagtcattacagtctaaacatgaaattgttatgcattatggagagcgtaatctaatg

SEQ ID NO: 115646 - DNA, 101 bp, Zea Mays
cttggtttgtcaatttcttctggttggatctgagccagccaagtcactgatgcttagtttttttgggtctatgcacatcaacttcccagtgtaagaatgct

SEQ ID NO: 115647 - DNA, 753 bp, Zea Mays
ttgaggaggttgggtcgatcctcagggaggtctttgctcgtctggagatggcaaatttagagcttttgagagagcgcaatgcggccagaggttaacttttcttatgtccttgcgcttcatttatttggtactttaagttatttgagttcccttctttagcatggctccaaaagatgttcccccgagcccaagacgccaagaagacggtgggagaggcaaagaccatggcagaggacgaggcccagaagctcttgtttgcccgagacatcattgttatcgcgagagttcaagcggaggcttcactctcagagcagagcacagagctccaggctctcagggcggccgtgagcacggtgtgcgcccacctttctccccctccgccggtcaaagttgccctgcccgattggctgcggacgctacctgaccacgtggaatacgtggtccttgagggtgtagtctatgggagcagtatagccttgaggtagatggctctcattttgacgagaccaacacgatcgtgatcatgaagggctttgccgccggacagagcgacgaggagctatatcgtattgaagaacaaattcaccttcacgcccggttgattgcaagttgggtcgacgcgaagttcctcctgatgagcccttggagtatggagccgtccaccggcatctaaacgacgttacatcgttgtcttgtaataaactttgtttgaatgatggggctaaacatatgttcgtgccttttggtgtgata

SEQ ID NO: 115648 - DNA, 441 bp, Zea Mays
atggcaaatttagagcttttgagagagcgcaatgcggccagagcatggctccaaaagatgttcccccgagcccaagacgccaagaagacggtgggagaggcaaagaccatggcagaggacgaggcccagaagctcttgtttgcccgagacatcattgttatcgcgagagttcaagcggaggcttcactctcagagcagagcacagagctccaggctctcagggcggccgtgagcacgtatagccttgaggtagatggctctcattttgacgagaccaacacgatcgtgatcatgaagggctttgccgccggacagagcgacgaggagctatatcgtattgaagaacaaattcaccttcacgcccggttgattgcaagttgggtcgacgcgaagttcctcctgatgagcccttggagtatggagccgtccaccggcatctaa

SEQ ID NO: 115649 - DNA, 704 bp, Zea Mays
agcaacaagctagctacactatgacaaattaaaaacaagagccacctgctgtctgctgcccgctgcgctgagcgtgagagctagctactaccttattacctctctccgcagctgtaggcggcggcggcggcggccatggacttcgtgctccaggtcctgctgcgggtggtgatgagaagaagcatccgcaggctgcaagaggtcgttgacatcgccgtggacatcggcacggctgtcttcgtggccgtgcgggtctccggcctcgtcttccgccgccggctgcccacgccgactacgacatcgtcgtcgtcgacgacgtactactactccccggggacgtcctcctcgatcggcatgcatgtccaggaggattaattattgacaggcactagatgagctagctagctagctagggccagaagatgtatacttctcgcgggggcatgtaagtactaaggtcatatatctgtgcgttcttttttgtggaatcaaactaatttcgctagctaccctaatatatatgttgtgctactgctctacctatatacatgtgtaatttgaggaattgaggccgcaaatcaaaacaaaaacttttgagccgattcgagttgcagttgagaaagaaacagtgattaattcagaaattaagaaacagccttgacatgaccatgtagcttatttgcaaataataaaaagcagaaaat

SEQ ID NO: 115650 - DNA, 532 bp, Zea Mays
gatcttacagggtactgctactggtatcgtgatttcatgtaccatatatacctcgctgtaggcggcggcggcggcggccatggacttcgtgctccaggtcctgctgcgggtggtgatgagaagaagcatccgcaggctgcaagaggtcgttgacatcgccgtggacatcggcacggctgtcttcgtggccgtgcgggtctccggcctcgtcttccgccgccggctgcccacgccgactacgacatcgtcgtcgtcgacgacgtactactactccccggggacgtcctcctcgatcggcatgcatgtccaggaggattaattattgacaggcactagatgagctagctagctagctagggccagaagatgtatacttctcgcgggggcatgtaagtactaaggtcatatatctgtgcgttcttttttgtggaatcaaactaatttcgctagctaccctaatatatatgttgtgctactgctctacctatatacatgtgtaatttgaggaattgaggccgcaaatcaaaacaaa

SEQ ID NO: 115651 - DNA, 95 bp, Zea Mays
tgtttttcttgatagttggtttctatatctggtatataatatcatgtgctctcaaatcttgtctggtgattgcattctgatttgctttctaaaat

SEQ ID NO: 115652 - DNA, 678 bp, Zea Mays
atggaggagggatgcgatgtgacgagtgattggataatttccccaaactggctaaaagaaagcgtcagagaagggcaatttgtagaagaagcacaatatgttctggaagatgaagaatataggatgcaatataagtctgaacttagagatgcagttatgagagctaaagaaaggcataactccttatttgctggttataagcacatccaaccctcttttgatgttctcttagccattattaaatctaccggaggcaatttcattcaagctgagaagggcatagctgttgccaaggttccccgttcaacgcttgcagccatatccctctgccagcctggcggtggtggggagggagattgggatggagcatgtgccgatgtggctgcgtgcgttcccggatctgcacacctatgtcagcatatggtgatcagcgagatcgactcgtcaatcgctacctcgctgcaggccgtgaagctgctcgctctgtacctcactggagacaaggaaggtgctatctccagtctcaaggaatggttgagtgattcagcaactggaagcaatcttgttctgcgattgattgccggaattatatttatgcgtgagcaggactacaatgaggctctcaagcacacacactctggaggaactctggatttgtatgtttaccttttcccttga

SEQ ID NO: 115653 - DNA, 2853 bp, Zea Mays
atgatcctgtggcggtggaccaaatgtactgctgaatgcttcaggcgcaggaagccttttcactgtgaagttgcttgcccctactctaagatcgccgcttctgttcagtgtgatgactcaagtggtgatgaaaagctgaactttgctcctgataatgagcctatccagaaatggcaccggtctttgagctctgacagtgttgtgcagacactccgctgtttaaggaggaaacctgcagttgcattcacctactttaaagatacacatagccttggttttcaccatgacttctcaacctactcagagatcatacaaattttgtcccattcattccaggggaagatgctggtatccttgtttcgtgagattctcttgggaactggtagtggtggccctgaaatcttaccgctcattgatcacttgagaaaaacatgtgccacttctcacgtactctcgtatgcagtcaattgcttaatcaaggcatacaccacctgccacgatgcacaagaaacagtagagatgttttgttgcctttgcaggcttggatttgttccaacactttgggctcgcaactttctgctcaaatttgtatctcagagcagtggtgattcacatatggttgtcgcagcttatgatcgaatgaagtgctttcagttgacactggatgctcaatcattgaacatagtcactagatcactttttcaagcaaacaaggcagacgaagcattccaaatgtaggtcgggatgattgaaatgggagtgaaattagatgtacatggattctcatcatttataattggcctttgtgattgtggaaagtttgatctagcttataacatggtaagaagatatgctgttctacaagagatatcccaagagagggttccaattgaagccatggcttataatatggtaatcgatggactatgcaaagaaatgaaactgaaggaggctgaaaaggtcttggagatcaagaccagacatggatctgcccctgatctatatagctatagctatctcattcatagtcattgcaaaatgggtaacctagagaaggcatggtatcatgttgaagacatggtatcccatggcattgagataaattgttacattgttgcttaccttctacagtgcctcaggaagttaggcatggtatctgaagtaattgtgcacttccagaaatttagagatttaggggtccatcttgatggcgtgctttataacattgctatggatgcttattgcaagcttgggaacatgaatgaggcagttaagctactgaatgaaatgatggctggaagtttggtaccagacaaaatccactatacatgcctgatcaatggttattgtctgaaaggagaaacagaaaatgcctggcaagtatttgaggagatgctgaaggcaaatataaaaccagatgtagttacatataacatattggccagtggatatagcaggaatggccttgttatgaaggtatttgacattctagagcacatgatggatcaagggctcgaacctaattcactcacctatggtatagctattgctggtttttgtagaggaggcaacttgagcgaagcagaggtgctgtttaatatagtagaagaaagagggatagataatatcaatgtgctgtacggttctatggtttgtggttatttgcactcaggctggactgaccatgcttacatgctttttcttagagttgctaaacaaggaaatatggtggatcgtttgtcatgttcaaaattgataaacggactctgtagggatgaaaaggttggagaggcttcaactgtatgtaaaatgatgcttgaaaagaatgttgtccctgatgtaatttcatatagcaaacttatatcagcttattgtcagacaagagatatgcacaatgctcgcttatggttccatgatatggttgaacgaggactttctgatgttattgtatacactgtactgatgaatggttattgcaaggttggtcggttgcaagaagcatgtgaattatttgtccaaatgataaatttaggaatcaagcctgatgtagttgcatacacagtgctattggatggccacctaaaggagaccctacaacaagggtggcagggcatcgctaaggaaaggaggaccttttttcttaggacaaagcataaggtgttgctgaactctatgaaagatatggaaatcgaacctgatgtaacctgttacacagtattgattgatggacggtgcaaagcagaatatctagaggaagcacgaggattgtttgatgagatgttagcaaaaggacttatccctgatgttcacacatacacagctcttataaatggatactgtagccagggagaaatagctaaggctgaagatcttttccaagaaatgatagctaagggaatgaagccagatgtactgagcttttcagtattacataagagaaccttgagacatgaaaaggctcattaatatttatgtgtactaatggttatgttgatgaatgtcagtttgactgaaggtgaaggggcgtcctgccaacaaaagggaaggcgaacacctggattgaaagactgctctctcagttcagcattgggtcgtcaaggagaacaaaatgatggtaccttcagcgtgaggatcgatgactgtcaatggagctgtgcaaacacaatcgtggcaaagctggctgtggcactggcgcctatgccatttatgagggttttgcttgaccgttttgtggctgcaactagtggtgtgttcccagacaaccaagagctacaagacagaggtaagctctcgggttccgtcctggggcaatggggagctgttgatgatcctgagtccatgctgcaccacatc

SEQ ID NO: 115654 - DNA, 367 bp, Zea Mays
tggagtcgggcaaaggtcctgtggtcgcggacgattaagcgatttgctcgctgcagccaggcgtgcaagggtcgttgctcgcaaagccgccttcgttgctagtgcgacggctttggagatgattgttcaagctgagaaggcgaacaccgaggctgccaagaaagctcctagacctctgcgtcgtgatgtatgatatgcatttttcgtcgatcctaaaattactttgtcatttgaaataggatcttgatgccagttctttattgttttaagtggtgaacaaactatgtttgttagcaattttatttggttgaattgtattgtttctgttgttttcaaatcaatggcagttcgtcatcactttcactga

SEQ ID NO: 115655 - DNA, 2718 bp, Zea Mays
cccgcctctcccctggcgataccccgccgcctctcgcttgtccccgttcttgagcaatcatctgcctccctttgttcccgcacaatccctagttgggaggggggccatggggcggctgcggccagatggccagtaacgtgcaaagatgagcagtagattactatcggtctgctccatcgccggcgtccatggaggccttctacctccaccttctccgctcctgcgcggcgctaccgcacgtcgcggcagtgcacgcccaccttgcgcgcgcgcacccaaacgcctctctcttcctccgcaactgcctcctggcctcctactgccgcctcggggttggggccccactccacgccgcccgcctgctcgacgaaatgccccgccgcaacgccgtctcctacaacctcgtcatcgtcgcctattcccgcgcgggactcccggccctctccctggcgacgttcgcgcgcgcgcgggcgtgggccagggtggtcgaccggttcacgtacgccgcggcgctcgccgcgtgctctcgggcgctcgacgtgaggacggggaaggccgtgcacgccatggtcgtcctgggaggtctcggcaacgggttgttcctgtccaactcggtcgccagcatgtacgccaggtgcggcgagatgggcgaggccaggcgcgtgtttgatgcagccgaggagcgtgacgacgtctcgtggaacgcgctgctctccgggtacgtccgtgccggtgcacgtgaggagacgctggaggtgttctctctgatgtgccggcatggtctggggtggaactcgttcgcgcttgggagcatcatcaagtgctgtgcctcctcctcttcttatgctgctgctggtgatgtcggaggagggcgcatcgctgaggcggttcatgggtgcgtggtgaaggctggactggacgccgacctgttcctcgcgagcgcaatgatcgacatgattctgtcgtgaggaagcagccgacgtcgctagagaagctttgggcctgtattcagagctgcagagccgagggatgcagccttctgagttctcattctcaagtatcctgcgtgcatgtaacctggccggtgaatttggattcgggaaacagatacatggccaagtgctcaagcacagcttccaaggcgatgtctatatcgggagcgcactcattgacttgtactctggctctggttgcatggaggacggatacaggtgtttcagatccctgcctaagcaggacgtcgtcatctggacgtcagtgatttcagggtgcgttcagaacgagctttttgaggaggcactgaggctgttccaagaatcagtacgctgtggactgagacctgatgttttcgcgatgtcgagcgtgatgaacgcatgtgccagtttagctgttgcaaggaccggtgagcagatccagtgccttgctgtaaagtctggctttaaccgcttcaccgccatggggaattccttcatacacatgtgtgctaggtcaggggatgttgatgctgccacccggaggtttcaggagatggaatcgcgtgatgttgtctcttggtccgcggtgatatcaagccacgcgcaccatggctgtgcaagggatgctttatgcgttttcaatgaaatgctggatgcgaaggtggcaccgcctaacgagatcacttttctcagcatccttactgcatgtagtcatggaggattggttgatgagggactcaggtattatggaattatgaatgatgaatatggattgagcccaaccataaagcattgcacctgtgttgttgatcttcttggacgagccgggaggttagccgatgctgaggctttcataagggattcagcattccatgacgatgctgtggtctggcggtctttgctggcctcgtgtcgtatccacggagacatggagagaggccaacttgtggcggacaagataatggatctggagcccacttcctcagcatcctacgtaattctctacaacatgtatctggatgctggcgagctgtcctcggcttcaaagactcgagatctgatgaaagagcgaggcgtgaagaaagagcctggtcttagttggatcgagctgagctctggagttcactcttttgttgccggtgacaagtcccatccagagagcaaagcaatatacagaaaagtggcagagatggtttccaaggtggcgggcatctctagcagggagcaggatttggcgggttgccacagcgaaaaactagctgtggcatttggaatgatccatttgccgcaatcagctccgatccgagtgatgaagaacctgagagtttgccgtgactgccactcgaccatggagctgatatccaagagtgagaggagagagataatcttgcgagacgcgattcgcttccatcgcttcagagacggttcctgttcctgtggcggttactggtgatgatgaccaacccaaggctcaaaagcgcgacatagcccacctattgcttgacgcgagcacctgacatggcttccgttgggggcaagctaggtcactgccggtgcacatgacgctgcatgcatggcttaattaagttactcaacccccactgtagctggataccacaggctgatacacggtgttgtatatatagtctgtgtcgtcaagtgaaacgaccaggaacaaaccctacaacgtgtgatgccaagtgtctatggggacaatggtcttttcttttggacctaaatacaa

SEQ ID NO: 115656 - DNA, 2810 bp, Zea Mays
cccgcctctcccctggcgataccccgccgcctctcgcttgtccccgttcttgagcaatcatctgcctccctttgttcccgcacaatccctagttgggaggggggccatggggcggctgcggccagatggccagtaacgtgcaaagatgagcagtagattactatcggtctgctccatcgccggcgtccatggaggccttctacctccaccttctccgctcctgcgcggcgctaccgcacgtcgcggcagtgcacgcccaccttgcgcgcgcgcacccaaacgcctctctcttcctccgcaactgcctcctggcctcctactgccgcctcggggttggggccccactccacgccgcccgcctgctcgacgaaatgccccgccgcaacgccgtctcctacaacctcgtcatcgtcgcctattcccgcgcgggactcccggccctctccctggcgacgttcgcgcgcgcgcgggcgtgggccagggtggtcgaccggttcacgtacgccgcggcgctcgccgcgtgctctcgggcgctcgacgtgaggacggggaaggccgtgcacgccatggtcgtcctgggaggtctcggcaacgggttgttcctgtccaactcggtcgccagcatgtacgccaggtgcggcgagatgggcgaggccaggcgcgtgtttgatgcagccgaggagcgtgacgacgtctcgtggaacgcgctgctctccgggtacgtccgtgccggtgcacgtgaggagacgctggaggtgttctctctgatgtgccggcatggtctggggtggaactcgttcgcgcttgggagcatcatcaagtgctgtgcctcctcctcttcttatgctgctgctggtgatgtcggaggagggcgcatcgctgaggcggttcatgggtgcgtggtgaaggctggactggacgccgacctgttcctcgcgagcgcaatgatcgacatgtacgctaagagaggcgccttgaccaacgcggttgctcttttcaagtcagtgccagacccgaatgtgattgttttaaatgcgatgattgcaggattctgtcgtgaggaagcagccgacgtcgctagagaagctttgggcctgtattcagagctgcagagccgagggatgcagccttctgagttctcattctcaagtatcctgcgtgcatgtaacctggccggtgaatttggattcgggaaacagatacatggccaagtgctcaagcacagcttccaaggcgatgtctatatcgggagcgcactcattgacttgtactctggctctggttgcatggaggacggatacaggtgtttcagatccctgcctaagcaggacgtcgtcatctggacgtcagtgatttcagggtgcgttcagaacgagctttttgaggaggcactgaggctgttccaagaatcagtacgctgtggactgagacctgatgttttcgcgatgtcgagcgtgatgaacgcatgtgccagtttagctgttgcaaggaccggtgagcagatccagtgccttgctgtaaagtctggctttaaccgcttcaccgccatggggaattccttcatacacatgtgtgctaggtcaggggatgttgatgctgccacccggaggtttcaggagatggaatcgcgtgatgttgtctcttggtccgcggtgatatcaagccacgcgcaccatggctgtgcaagggatgctttatgcgttttcaatgaaatgctggatgcgaaggtggcaccgcctaacgagatcacttttctcagcatccttactgcatgtagtcatggaggattggttgatgagggactcaggtattatggaattatgaatgatgaatatggattgagcccaaccataaagcattgcacctgtgttgttgatcttcttggacgagccgggaggttagccgatgctgaggctttcataagggattcagcattccatgacgatgctgtggtctggcggtctttgctggcctcgtgtcgtatccacggagacatggagagaggccaacttgtggcggacaagataatggatctggagcccacttcctcagcatcctacgtaattctctacaacatgtatctggatgctggcgagctgtcctcggcttcaaagactcgagatctgatgaaagagcgaggcgtgaagaaagagcctggtcttagttggatcgagctgagctctggagttcactcttttgttgccggtgacaagtcccatccagagagcaaagcaatatacagaaaagtggcagagatggtttccaaggtggcgggcatctctagcagggagcaggatttggcgggttgccacagcgaaaaactagctgtggcatttggaatgatccatttgccgcaatcagctccgatccgagtgatgaagaacctgagagtttgccgtgactgccactcgaccatggagctgatatccaagagtgagaggagagagataatcttgcgagacgcgattcgcttccatcgcttcagagacggttcctgttcctgtggcggttactggtgatgatgaccaacccaaggctcaaaagcgcgacatagcccacctattgcttgacgcgagcacctgacatggcttccgttgggggcaagctaggtcactgccggtgcacatgacgctgcatgcatggcttaattaagttactcaacccccactgtagctggataccacaggctgatacacggtgttgtatatatagtctgtgtcgtcaagtgaaacgaccaggaacaaaccctacaacgtgtgatgccaagtgtctatggggacaatggtcttttcttttggacctaaatacaa

SEQ ID NO: 115657 - DNA, 1778 bp, Zea Mays
aaccatacactctatctcttccttctcccaaccccgctcaaaaccctagctcaacgccacaggctcgccgactttcgcccggccgccgccggggacgatggcgaagcctcggcgcggccgctccgcgtctcgctcctcctcgggatcttcttcccgctcgctgtcccactccgtctcctccggctctgtctcgtcccgctcccggtcgcgctcccgctccttctcgtcgtcgtcctcccagtcccggagccgctcccctcctcaggctaagcgcagttcgcctggagcacggaaagggcgatcaccttcaccgccccctaaaaagggttcaccttcaaagaaagtccgttcgccatcaccaccacttaaaaaggcttcaccccctaggaaagtgtcgcctcctgctgaatcagctgttctctgcattgatcatttatcaaggaatgttaatgaggctcacttgaaagagatatttggaaactttggcgaagtggtgaatgtggagctatcaatggaccgaatggttaaccttcctcgtggctatggatatattgaattcaagaagagagctgatgctgagaaggctcttcttcacatggatggtggtcaaattgatggaaatattgttaagttgagattcactcttcaaccacgccaaagggctgcatcacctgtaaaagctccgccccctcctccaaaaagagatgctcttcagattgaaaaaggtgttagcagtgctgaaaaggatgcccagcagcgtcctaaggaatcatctccacgaaggaaaccagcttcacctctacggaaacgatctccaaatcgaagggctgaatcacccaggcgtccacctgacccatcacctaggcgccgtcctgattctccacctatacgtcgccgaccagatccttctcctgtcagacgtggtgacacacctcgcaggagaccaccatctccagttcgaaggcgttctccttctccaccacctaggaggcataggtcaccgatgcgtctttcacctaggagggggcgtggtagcccatcaccacgcaggcgctcccctgggcctcttaggcggcgctcaccacctccaaggcggttgaggagcccaccaagaaggccaccacctccacgtcgcttcagtcgctctcctcctcgccgaccccttcgctcccgctccagatcaatttctccaagaaggggacgagggcctccattgaggcgtggtaggtcagactcatcatattctcgatcacctactccaccaccaagaaaggggccaaggagggtatcaaggagccgcagccctagaaagcctcctagagcaggaagaagcgtctccagtgacagccgcagcagcagttcaccttcccctagacgcggcaggtagaaagaacccgtggcattgtgtatgcggcaggtaaagccttttatcccttgactctatctgtatcgtttgcctgtgcttgtgacttgctgtgagttcaagtattggttcgaggagaagatgagagaacgctacagcaatgctccaaacggatctgctcaacatgcctggtcgaccgccctagtttgtgtggtctaccctagacagaattatctgctgtgttggcttgtgtactttgattgtaccccaagtattttgaagttctgaacttatttctgctaattggtgtctgaagtggatatgttgaatgtattttgttttgttggatagagttcctcagcattgccaccgtatgaaagatgaatctattgatcaaccaatttgtgcatgcgtc

SEQ ID NO: 115658 - DNA, 1789 bp, Zea Mays
aaccatacactctatctcttccttctcccaaccccgctcaaaaccctagctcaacgccacaggctcgccgactttcgcccggccgccgccggggacgatggcgaagcctcggcgcggccgctccgcgtctcgctcctcctcgggatcttcttcccgctcgctgtcccactccgtctcctccggctctgtctcgtcccgctcccggtcgcgctcccgctccttctcgtcgtcgtcctcccagtcccggagccgctcccctcctcaggctaagcgcagttcgcctggagcacggaaagggcgatcaccttcaccgccccctaaaaagggttcaccttcaaagaaagtccgttcgccatcaccaccacttaaaaaggcttcaccccctaggaaagtgtcgcctcctgctgaatcagctgttctctgcattgatcatttatcaaggaatgttaatgaggctcacttgaaagagatatttggaaactttggcgaagtggtgaatgtggagctatcaatggaccgaatggttaaccttcctcgtggctatggatatattgaattcaagaagagagctgatgctgagaaggctcttcttcacatggatggtggtcaaattgatggaaatattgttaagttgagattcactcttcaaccacgccaaagggctgcatcacctgtaaaagctccgccccctcctccaaaaagagatgctcttcagattgaaaaaggtgttagcagtgctgaaaaggatgcccagcagcgtcctaaggaatcatctccacgaaggaaaccagcttcacctctacggaaacgatctccaaatcgaagggctgaatcacccaggcgtccacctgacccatcacctaggcgccgtcctgattctccacctatacgtcgccgaccagatccttctcctgtcagacgtggtgacacacctcgcaggagaccaccatctccagttcgaaggcgttctccttctccaccacctaggaggcataggtcaccgatgcgtctttcacctaggagggggcgtggtagcccatcaccacgcaggcgctcccctgggcctcttaggcggcgctcaccacctccaaggcggttgaggagcccaccaagaaggccaccacctccacgtcgcttcagtcgctctcctcctcgccgaccccttcgctcccgctccagatcaatttctccaagaaggggacgagggcctccattgaggcgtggtaggtcagactcatcatattctcgatcacctactccaccaccaagaaaggggccaaggagggtatcaaggagccgcagccctagaaagtaacatatatgcctcctagagcaggaagaagcgtctccagtgacagccgcagcagcagttcaccttcccctagacgcggcaggtagaaagaacccgtggcattgtgtatgcggcaggtaaagccttttatcccttgactctatctgtatcgtttgcctgtgcttgtgacttgctgtgagttcaagtattggttcgaggagaagatgagagaacgctacagcaatgctccaaacggatctgctcaacatgcctggtcgaccgccctagtttgtgtggtctaccctagacagaattatctgctgtgttggcttgtgtactttgattgtaccccaagtattttgaagttctgaacttatttctgctaattggtgtctgaagtggatatgttgaatgtattttgttttgttggatagagttcctcagcattgccaccgtatgaaagatgaatctattgatcaaccaatttgtgcatgcgtc

SEQ ID NO: 115659 - DNA, 255 bp, Zea Mays
atgaagccaatggacgacgcgagtgagaagaatatagaaaatcttgtgaaggtcggccaaaagctgctgcagatgccagtggctgagacggacatcgcctcggggtactaccattaccgcaggaagctcccagtcagaggtactaggcaaaagctccccacaaatgggcaagagctgcaccgcttcgccaagatgctttccaaggagcgcaagctgcgccttaagaatcaaagagaggggagaacaagctcttaa

SEQ ID NO: 115660 - DNA, 1254 bp, Zea Mays
tctgggcaggaggcgggcatgggcggcggcggcagcaaggcaccattcagcaacaccaacacagatgccgcgtcgccggaaaagctcccgccgctggaaaggctgccgccagcgaggtacgggaagcacatcacgatgctgagcatcgacggtggcgggatacgcggcctgatcccgttggtcattctcgaatccctcgagaaaaagctccaagacttggatgggaagcaagcccggatagcggactacttcgatgtgatcgcgggcaccagcacgggcgggctcatcgccgccatgttggcggcgccggacgaggagaggaagcggccaaggttcagggtccaggagatcaccagtttctataaagatcacgggcataacatcttcaagagggacgggctgctgggtctactgtaccgagctatacccttgatgcccgttctgatggggcccaagtacgacggcgtgtacctgcgcgacaggatcgaggagaaaatgaagggcctcaccatgggcgacacccgcaccaacatcgtggtgccggcgttcaacgtcagatcgatgatgcctgtcgtcttctcctcgttcggtcccaggcgaggaccatggtccagactggcggacatctgcatcgccacgtcggccgcgccgacctacttcccagcgcacaacttcccgatacgttcttccaccaccaacggcagccagtaccaccacgacctcgtcgacggcggcctggccgccaacaaccccaccatgattgccatggcgatggtcgcgcaacagataaatcactacaggaatcgctacttcccgccccggctggactacgacaagctcatcgtcgtctccctcgggaccacgtatgccaaggagatagatagctacaccgcgggggatgttgcccagtggggcgccctccggtgggtcagagacgggccccgccgcaccccgctcttcgacatgttgtcctgcgccaatgactacctggtcaacgtcaacatcgccttccttttccatagtaaaaaattccagaacaactacctccgcatccaggatgtcactctggccaagcgtaaggacaatgtgttatccttcgccgacaaatacatccgcatcaagtctgttgtgcctctggtaagtagattactattactgcgtaaggacaatggtacactttattgcgtgattactattacacaagcactgtttgtaatccccacgatactcagtttccgaagattactactatag

SEQ ID NO: 115661 - DNA, 1556 bp, Zea Mays
ctcgcctctcttcttcggatcgagcagcagtactgcactgcatgccgccgatacaaatcccatcctctccctcctctactgcacctgcaccacagtagctagctagctatctttgctacggcggctctgtaatctggtccactagcgctccattcgaccccacccacagccatggctgccgtgaccgcggcggccgtctctctgccctcctcctcctcctcccctgccgccgccaaggccaaggcgtccgcgtccgcgtccccgtcgtctccatgcggccacctccagttcccgcggcggcacggcggcccgcgcgcggtgcggctgcgcgtgcaggtgtccaccaccgagaccgcggaggcggagccggtcaagaagctggagaaggtgtccaagaagcaggaggaggggctcgtcaccaacaagtacaagcccaaggagccgtacgtcgggaggtgcctgctcaacaccaggatcaccggcgaccaagcgcccggggagacgtggcacatggtcttcagcacagaaggcgaggtcccctacagagagggccagtccatcggcgtcatcgcggatggcgaggacaagaacggcaagccgcacaagctcaggctctactccatcgccagcagcgccctcggagatttcggcgactccaagacggtgtcgctgtgcgtgaagaggctggtctacaccaacgatcagggggaggtcgtcaaaggagtctgctcgaacttcctctgtgacttgaagccaggcgctgaggtgaagatcacagggccagtgggcaaggagatgctcatgcccaaagaccccaacgcaacaatcatcatgctcgcaacgggtaccggcatcgctccgttccgctccttcttgtggaagatgttcttcgaggagcacgaggactacaagtacaccgggctggcgtggctgttcctgggcgtcccgaccagcgacaccctgctgtacaaggaggagctggagaagatgaaggagatggcgccggacaacttccggctggacttcgcggtgagccgggagcagacgaacgcggccggggagaagatgtacatccagacgcgcatggcggagtacaaggaggagctgtgggagctgctcaagaaggacaacacctacgtctacatgtgcgggctcaagggcatggagaagggcatcgacgacatcatgctcgacctcgcagccaaggacgggatcaactggttggactacaagaagcagctcaagaagagcgagcaatggaacgtcgaagtctactgatgatgatccttcattgtattgttcagctcaagaaatctggtggtgatgagtttgcattgcattgtacgtagtattgcggagatcaatcgaatcgtttggctcgtcgtcgttctatcgatgtacatacattatatatgatgaaagacatatataatcgtttctttcaggaagttgttgtctctctgcacgtgaatttgttgccagaaagaaaggacacacattagccttttcttttattagggcaattatgaattatacccttctctgattctgatttt

SEQ ID NO: 115662 - DNA, 1545 bp, Zea Mays
gtgggcagcagccactcgctctccccacctcgtctctcttccactcatcccctccctcgccccttcgcctcgcctctcttcttcggatcgagcagcagtactgcactgcatgccgccgatacaaatcccatcctctccctcctctactgcacctgcaccacagtagctagctagctatctttgctacggcggctctgtaatctggtccactagcgctccattcgaccccacccacagccatggctgccgtgaccgcggcggccgtctctctgccctcctcctcctcctcccctgccgccgccaaggccaaggcgtccgcgtccgcgtccccgtcgtctccatgcggccacctccagttcccgcggcggcacggcggcccgcgcgcggtgcggctgcgcgtgcaggtgtccaccaccgagaccgcggaggcggagccggtcaagaagctggagaaggtgtccaagaagcaggaggaggggctcgtcaccaacaagtacaagcccaaggagccgtacgtcgggaggtgcctgctcaacaccaggatcaccggcgaccaagcgcccggggagacgtggcacatggtcttcagcacagaaggcgaggtcccctacagagagggccagtccatcggcgtcatcgcggatggcgaggacaagaacggcaagccgcacaagctcaggctctactccatcgccagcagcgccctcggagatttcggcgactccaagacggtgtcgctgtgcgtgaagaggctggtctacaccaacgatcagggggaggtcgtcaaaggagtctgctcgaacttcctctgtgacttgaagccaggcgctgaggtgaagatcacagggccagtgggcaaggagatgctcatgcccaaagaccccaacgcaacaatcatcatgtacaccgggctggcgtggctgttcctgggcgtcccgaccagcgacaccctgctgtacaaggaggagctggagaagatgaaggagatggcgccggacaacttccggctggacttcgcggtgagccgggagcagacgaacgcggccggggagaagatgtacatccagacgcgcatggcggagtacaaggaggagctgtgggagctgctcaagaaggacaacacctacgtctacatgtgcgggctcaagggcatggagaagggcatcgacgacatcatgctcgacctcgcagccaaggacgggatcaactggttggactacaagaagcagctcaagaagagcgagcaatggaacgtcgaagtctactgatgatgatccttcattgtattgttcagctcaagcaatctggtggtgatgagtttgcattgcattgtacgtagtattgcggagatcaatcgaatcgtttggctcgtcgtcattctatcgatgtacatacattatatatgatgaaagacatatataatcgtttctttcaggaatttgttgtctctctgcacgtgaatttgttgcgagaaagaaaggacacacattagccttttctttattagggcaattatgaattatacccttctctgattctgatttt

SEQ ID NO: 115663 - DNA, 1514 bp, Zea Mays
cctccctcgccccttcgcctcgcctctcttcttcggatcgagcagcagtactgcactgcatgccgccgatacaaatcccatcctctccctcctctactgcacctgcaccacagtagctagctagctatctttgctacggcggctctgtaatctggtccactagcgctccattcgaccccacccacagccatggctgccgtgaccgcggcggccgtctctctgccctcctcctcctcctcccctgccgccgccaaggccaaggcgtccgcgtccgcgtccccgtcgtctccatgcggccacctccagttcccgcggcggcacggcggcccgcgcgcggtgcggctgcgcgtgcaggtgtccaccaccgagaccgcggaggcggagccggtcaagaagctggagaaggtgtccaagaagcaggaggaggggctcgtcaccaacaagtacaagcccaaggagccgtacgtcgggaggtgcctgctcaacaccaggatcaccggcgaccaagcgcccggggagacgtggcacatggtcttcagcacagaaggcgaggtcccctacagagagggccagtccatcggcgtcatcgcggatggcgaggacaagaacggcaagccgcacaagctcaggctctactccatcgccagcagcgccctcggagatttcggcgactccaagacggtgtcgctgtgcgtgaagaggctggtctacaccaacgatcagggggaggtcgtcaaaggagtctgctcgaacttcctctgtgacttgaagccaggcgctgaggtgaagatcacagggccagtgggcaaggagatgctcatgcccaaagaccccaacgcaacaatcatcatgctcgcaacgggtaccggcatcgctccgttccgctccttcttgtggaagatgttcttcgaggagcacgaggactacaagtacaccgggctggcgtggctgttcctgggcgtcccgaccagcgacaccctgctgtacaaggaggagctggagaagatgaaggagatggcgccggacaacttccggctggacttcgcggtgagccgggagcagacgaacgcggccggggagaagatgtacatccagacgcgcatggcggagtacaaggaggagctgtgggagctgctcaagaaggacaacacctacgtctacatgtgcgggctcaagggcatggagaagggcatcgacgacatcatgctcgacctcgcagccaaggacggtaagctgtctgtcatcgctcttgtccttcgtttttgtgctcgatatgaacaagtagctagctaactaacgtaacctttcttgctgcattggtttggttatcatcatcatcatcatcatccgtcagggatcaactggttggactacaagaagcagctcaagaagagcgagcaatggaacgtcgaagtctactgatgatgatccttcattgtattgttcagctcaagcaatctggtggtgatgagtttgcattgcattgtacgtagtattgcggagatcaatcgaat

SEQ ID NO: 115664 - DNA, 2123 bp, Zea Mays
cgcgcgtcgggtgacgaaaacggaaccctggctggtggagcgcggcgcggggcatgcgtgcaagtgcaaccaatcgcctcgtcgtgtgcgctcgcctttgcttccctcgttaacgtgagtaacctcgttggctgatcaaggctttgacggcggcaccaacgttcttccctcgccgcctcgttgcgtccgcccgcccagcgccaactcctcgtcctcgtacataaccccccaccccaccgcgtacagcgttccctctcgcgccccgcggtgagctacccccgctcgccttagctagctacccaccatggccctcccgccgtcctcctcgccgtcgtcgctctccgccgcgtcagcgcagcccacgcccctgcacctgcacctcccgaccaaggcgcccggccgcctcccgctgctccccttctcgcgcgccgccctcccgccgccgctgcgcctccgcattgcgcgcaccagcctctccccgggcacgcccctcccgcgcgcgctcctgccaccaccctccgcctccgccgacgccgcagcctccgacgtcggcggcggcggcgccggcttcggcggccatgacgacgacggccacaaccaccacggcggcgagggtggcggcgacgacggcggccatggcgacgacgccggccacggcgatgacgcgcccggcggcggcgacgcccgcggggaggcgctgttcgtgctggcgcagctgggccgcaagctcgacagcctgccgtccgatctcgccgccgccgtcgacagcggccgcatcggggccgacatcgtgcgccgcttcaccgaactcgaggccaacggcttcttccgatggctcctccagttccagggcttcagggagaggctcctcgccgacgagctcttcctcaccaagctcggcatagagtgcggcatcggtctcgtcgccaagaccgtggctgagttccagaagagaggggacaatttcttcaaagagattgaagttgtcatatctgatgtggtcatggcgattgttgcggacgtcatgcttgtctatcttcctgctccaactattggtttacagccgccactggcaagaaacgctggagctattgccaactttttctataactgccctgataatactttccaaattgctatggctggaaggtcattctcacttctgcagaggattggagcttttgtgaggaatggtataaagcttttggcagtgggaactactgcttctttgattggcactagtgtcacgaatgcagcgctcaaagcaaagagggctgttgataaggaccttgaggacgaagtcatggaaattccagtcgtctcaactagtgttgcctatggtgtatacatgtccatttctagtaacctcaggtatcagcttctggctggtgtgatcgagcagaggatgctggagccgttgctgcataaccagaagctactgctgagtgcaatgtgcttcatcgttcgtacgggcaacacattccttggctctttgctgtgggttgactatgccagatggataggcgtccagaagtctcacgaagaggcctaaagttctagcagcttgcctgcatgttccgctgtcactgcctcactaggcacgttcacaataccatcgatggcttgcctgcctctatagaatgctgatctactcttcactggaggcccccttatatataggacaaaaatcccaattttgtttggaaaaccacaagtagggatatatctgtcgaattctcgtatgcaacggcaacgccgttctacccctcaacttttttttttcctttttctactttgcaacatgcaacaagggctgtcattgatcgaaattcaaatatatgttacattgggaattccatgcgactgcctaaactctaggaagtttcacttgtcctgtttcatatgtatgtatgcattgtagccttgttgtatttcctcaatgtcttggttgctttcatcggttagagttcttgacgactgttgcagagattctgtcggagtatattcagggtcgcctattaccagacatgctgcccggacaacatgttgattcgttcattggcagcgcaacatgcaattagaaattaacagctactctagaacaagcaaataacagctgtcgc

SEQ ID NO: 115665 - DNA, 3699 bp, Zea Mays
ccggctgcccttccccgcggctccgatggactacactcccaaaacacagctcggcaccggtaccacttctcctcccccgtgccactagatctcatccacttccattcaccgtcatcgccagttcgccaccatatctatcccatcccggaaacattctgcacccgcagctgcagccttcagaaatggccgccactactgccgccaactctcctgctctcctcctcttcctcctgctgctgctcattgggggcgcgccaccagcgacgaaggccgacatgccgatggcggtgaacgaggaggtgctggggctggtagtgttcaagtcggcgctgtccgacccgacaggtgcgctggcgacgtggacggagtcggacgcgacgccgtgcgggtgggcgcgcgtggagtgcgacccggccacctcccgcgtgctccgcctcgccctcgacgggctggcgctgtccggccgcatgccacggggcctcgaccgcctgggcgcgctccaggacctctccctcgcccgcaacaacctctccggcccgctcccgccgggcctctccctcctcggctccctccgctccctcgacctctcctacaacgccttctccggcccgctccccgacgacgtcgcgcgcctcgcctccctccgctacctcgacctcacgggcaacgccttctcgggaccgctcccgcccgccttcccgcgcacgctccgcttcctcgtgctgtccggcaaccagttctccgggcccgtgccggaggggctggcgtccgggagcccgctcctgctccacctcaacgtgtccggcaaccagctctccggctcgccggacttcgcgggcgcgctctggccgctcgagcgcctgcgcacgctcgacctgtcccacaacctcttctccggccccgtcactgacggcattgccaggctccataacctcaagaccctcagcctcagtggcaaccgcttcttcggcgctgtcccggcggacatcggccggtgcccgcacctcagcaccatcgacctcagctccaacgcgttcgacggccacctccccgactccatcggccagctcgcctcgctggtctacctctccgcgtccggaaaccgtctctccggcgacgtccccgcgtggctcggcaagctggccgcggtgcagcacctggacttatccgacaacgctctcaccggaagcttgccggactcgctcggcgacctcaaggcgctcaagtacctgagcctgtccaggaaccagctctccggcgccgtcccggcctcgatgtccgggtgcaccaagctcgccgagctgcatcttagggacaacaacctcagcggcagcatcccggacgctctgttcgacgtcgggctcgagacgctcgacgtgtcgtcgaacgcgctctcgggcgtcctgccctcgggctccaccaggctggcggagacgctgcagtcgctcgacctctccggcaaccagctcaccggcggcatccccaccgagatgtcgctcttcttcaagctccggtacctcaacctgtcccgcaacgacctccgcgcgccgctgccgccggagctcggcctgctccgcaacctgacggtgctcgacctgcgtagcacgggactgtacggcgccatgcctgccgacctctgcgagtccggtagcctcgccgtgctccagctcgacggcaactctctctctggccccatccccgacagcatcggaaactgttcttctctgtacctcctgagcttagggcacaacggcttgacggggccgatcccggcgggcatctcggagctgaagaagctggagatcctgcggctggagtacaacaacctgagcggcgagattccccagcagctgggcgggctggagaacctcctggccgtgaacatctcgcacaaccgcctcgtcgggcggctgccggcgtcgggcgtgttccagagcctggacgcgagcgcgctggagggcaacctgggcatctgcagcccgctggtggcggaacggtgcatgatgaacgtgccgaagccgctggtgctggaccccaacgagtacacgcacggcggcgggggcgacaacaacaacatggggacgaacggcggtggcgtgggcgcgccgaggaagcggcggttcctgagcgtgtccgccatggtggccatctgcgcggcggtcgcgatcgtcctcggcgtcatcgtgatcacgctgctcaacgtgtcggcccggcgccgggccgaggcggcgggtggtgtcggccctgggcacgggcagaagaaggaggtggacgagagcgtggtgaccagcagcagctcgacgaccaagtcgtcgccggcgccggcaccggggggcaagggcaagggcaagctcgccgccggcaagatggtgacgttcggccccgggagcagcctccggtcggaggacctggtggccggcgcggacgcgctgctgggcaaggcgacggagatcgggcgcggcgcgttcggcacggtgtaccgcgctcccgtgggcgacgggcgcgtggtggctgtgaagaagctggcggcggcgagcatggtgcggtcgcgcgaggagttcgagcgggaggtgcgcgtgctggggaaggcgcggcacccgaacctgctgccgctgaagggctactactggacgccgcagctgcagctgctgatcacggactacgcggcgcgcggcagcctggaggcgcggctgcacggcggcggcggcggagaggcgatgacgtgggaggagcggttccgcgtgttgtccgggacggcccgggcgctggcgcacctgcaccatgcgttccggccgccgctggtgcactacaacgtgaagccgagcaacatcttccttgcggacgcggagtgcaacccggcggtgggcgagttcgggctggcgcggctgctggcggacggcggcgggaggcagcaggtggcgatgggcggcgggcggttccagcagggcggggccgggtacgtggcgccggagctggcgtgccagagcctgcgcgtgaacgagaagtgcgacatctacgggctgggcgtgctgatcctggagctggtgacggggcgtcgggcggtggagtacggggacgacgacgtggtggtgctggtggaccaggtgcgcgccctgctggagcacggcaacgcgctggagtgcgtggacccgggcatgggcgggcgcgtcccggaggaggaggtgctgccggtgctgaagctgggcatggtgtgcacgtcgcagatcccgtcgaaccggccgtccatggcggaggtggtccagatcctgcaggtcatcaaggcgcccgtgggcagaatggaaggctccttctgatctgtagtatgtatcctgactgaccgtcagtggcgaccgaccaaccaaccaacgtcgtccggcccgggcctttgggcgttggcatctcatccctgtcaggctgtcttgctgctgcctggtggtggttcggtcggtcggcggcagcctgcaagtactatgtgcattaattcgtgctagtgtagcatagcaactgtactcacagtaggatggatctctttttccttttccatgcacgctcaacttgctcaagctctactgtagtactgtccgtgccaatttctgcatggatgtcagtctgctcaactcagaccaccgcccactactgtactgcgcacggtgtgccactgcaagagaacttgagcagccatcgttgctgctgtggttc

SEQ ID NO: 115666 - DNA, 2166 bp, Zea Mays
gctcctcacaccggcctcggcgcctcgcaccacaaccacctcctaccccttctcttcttcttctccccccttgcgaatcggagaccaagtgcaattgcccacccaagccccggaaccgggggccaagagcagtacagggggttggtttctgcgacggcgaggacgcgaagcggattcggatcgcgccgccatgccgctcgacgagctcgccgacaaagggccgtcgtcctccgaggaagttcagctcgcgccgtcggattccaagttccggagcctcagtccttcgccgattccgctcccaactcttccgagcatcagatcattggtccactcggtttctgacgagagtgtaaatgtagatgtcgcggcctcacatcaaagtgaaaatggatctatctctactgttagttcactagaatcagagagggcagcatatgaatttcttgctcaaactcctgtcaggtcaactgatgcacatcttgttgagttttcggaggctatgagaactgttgcaaaagccttacgacgagtggctgaagggaaggctgctgctcaagcagaggcagcggagtggaaacgtaagtatgaattagagacagcgcacaagcatcggagtaaaatcaaaggctacagcagttgtatcaataatgacttagacaaactggtcagccaactaaccctggagacacctacatctgatcaattaggatgttgcggaaagcatggtatatgtgcacatgagattctccaggacgaagttcctgggcctatcccaagatctaatcacaaggtggtggggagaaaggcatcatttaaactttcatggggatgtaatggggataaaaatggacaacataagcatgattttgtgtcctttgaaaaaggtgatataacaaccgcagaacgaagcaataagcagatcttactgaaatgggaatcgccaccacaaacagtgcttttcataaccaaaccgaattccaactctgttcgtgttctttgtgctgaaatgatcagatggcttagggagcataaaaatataaacatctttgttgagccacgtgttagcaaggaacttctaacagaggattcttactacaacttcgtccaaacatgggataatgatgaggagataaagatgctgcgcacaaaggttgatttaattataactcttggtggtgatggaactgttctgtgggctgcatcattgttcaaaggacctgttcctccggttgttgcatttgccctgggatcactgggcttcatgacgcctttcccaagcgagcaataccgtgagttgttggacaatgtgctgaatgggccatttagcatcacgctgagaaaccgcatacagtgtcatgtaatacgtgacgaggcaaaggatgaaatcgtgtctgaggagccattcttagtgttgaacgaagttacaatcgaccgaggaatatcatcctaccttaccaacctggaagtctactgtgacagctcttttgttacttgcgtacaaggggatggactaatcatatcaactacatctggaagtacagcatattcattagcagctggagggtccatggttcatcctcaggtcccagggatccttttcaccccaatctgcccgcactctctgtcattcagacctttgattctgcctgaatacgtgaccctccgcgttcaagtgccgttcaacagcaggggcaatgcctgggcatccttcgacggcaaagaccgacagcagctgtcgcccggtgacgccctgatctgcagcatttctccctggcccgtgcccacagcctgcctggtggactcgacgaccgatttcctccgcagcatccatgagggtctccactggaacttgaggaaatcccagtcatttgacggcccgcgtgattgatgcaacagctgttcagttatatttcagcccggtgccagaattcaagctgggaattctcaacaggaataactgtagctactccagggtgctctcacctttaccgttccatacttgcctatatacaaaggttgcgtgcgttagatgtgaggtatagatagatgtatagaatatggatggatgataacgactggacatgttgaataatacaacgccaacgtatgcacgtatacatgtgatgtgcccccgtgatctgaaagaaataatccgcgagccataca

SEQ ID NO: 115667 - DNA, 300 bp, Zea Mays
ttttttctttttctgcataataatatagttataaaatcataacttttacatatgaaatcggatgaagataaagtttatatgaaaattgtagagcttgaagagatctataactttgtagtacaacacatttttatttaaagatatctttaagccaaaatcattgaaacaatgtctaaatttatatcaaaataatagactttatcattttcatgtggggacttaagattatcttcatgtgggaacttaggattatctttttataaactatttattaatattggtaacttatttgcaatttcc

SEQ ID NO: 115668 - DNA, 2233 bp, Zea Mays
caacaagcagcagagggccagaggcgaagcagaacagcaccacccgccttcgcctccactcccgcccgggaatcttcttcgtccctccctcactcacgccatttcattccttccacagttccgccgccaccggccaccaccagcgcatatataaaagacccagcagcgactgcgccactccgccgcgcaggcaggcggtcccgtcccaccacccaccccgcgaccgcgaggccgcgaccccgctgatgatggcgccgtcccccgtcacgtgcagcccctccgcggcgcggcaccgcccgctgcagctccgctcccccgcgccgcgcgctgctgtcgtggcggcgctgccgctgcggaggagggaggcgctgccgcacgcgctgtggatcgcggcggacccgtgggcgtcggcgcgcgcgtggacgagtctgggcctgggcacgggcaggagggacgcggcgaggtgcgcggcggcggggcaggtcgcggggactagcagcgcgggcgtagggaggagcgccgggatggaggtggtcgtcgccgcggctgcggtcgtcgccatgggcacggggaaccgtgtcctctacaagctcgcgctcgtgccgctccggaagtacccgttcttcctggcgcagttcgccacgtttggatatgtagttgtctatttctcgatcctgtatcttcgatatcgagcgggcattgtcaccgatgagatgctgtctctaccacagaaaccttttctagctgtaggactcttagaggcctttggagcagcagcagggatggcagctggagctgttctttctggagcttcaataccaatactgtcacagacctatcttgtctggcagcttcttctatctgctatattcttgaagaggcgttatagaattaatgagatagcaggatgttttctagtggcaattggtgtcataataactgtagcaagtggatctggtactagcgcttcatttaaaagtagtggaattttatggccgctgctaatgataatatcgttctttttccaagctgccgatacaatattgaaggaaataatatttatagatgcttctaagaaattgaagtgtggctcggttgatctttttgttgtcaattcatatggctctgcttatcaagccctttttatgtgtatcttgctgcctttcctgtcaaagttatggggagttccattccatgtgttaccaacctacataaaagatggtgcagcctgctttttaaatatgggatcaatatctggttgtgaaggggcaccacttctaccactactatttgtgttggttaacatgggattcaatatatcattactaaacctactaaagatctcctcagcagtcatatcttccttggcttctacattctcagttccgctgtccatctacgctttcactctgccactgccgtatatcggtgcggcgtcatctctgccacctggctttgttgcgggtgcagcggtactcaccaccggcttactactatacagcctaccacaggcacaacattatgggaattctttccacaacaagaatgatgactagtcagcattcatttcttcattggtttataatcacccttcactccaagatggtgcgccatctgggttcgaaaggttggagcagaagttctcctgagggccaccagactgttgtatgttgtatgaaacatatcatatatatatacccaccaataaaggtgaggaaatatcatatggatatactgggaataaagagcgagaggatgtataaccgaacaagtacctggccgtcatacattgttgtttactgagtgaaggtcggagaagagcatggacagtggttagacgggaagaaaaccagggagaagagcaggagcatcatcaccacagggacgaagagaagaaacagcggtggtggcggaaggggtggcagcaccaacggcaggcacaggaggatcactgtcgccgccagcaacatcatcagtactctcttgctcatcgccgccgccctgcgctcgctgtgatggaacttgcttgtgccaacccccaatggctgcccggctccagtctttttctaggctttcatgtgaggaagttgtactatgtgtgagagaaagaaaatgttagttgcccccgatgaaggaactggcaaggtatatgtacatggccagcttgaatcagcaggccagatggggtgttttggcatgtgtgactgctggactgggcatgttcgatcctttt

SEQ ID NO: 115669 - DNA, 2156 bp, Zea Mays
gcatcttgcttgcgtttcccacactagcaggcagctagctgactacagtacacccaacagtggctgaacgtggcggcccacagcaccgcatcaaccgaccctcccgctcccggaccccacccgtcctggcccctacgttcttggtttcccacccccaccgcgccgcttctccttggcttgcttgctccagagtccagagtccagaccgagctattagctatatatggattccgtgatgcaaatgcatcggcaccgcgtccatcccatcccatcccatcccatcccatccgcaaccggacaaccgtcacttccccacatcgcaccgcacccaataaaacgccacaccacgccaccggggtccagggtccatccatcactcacgagcaggatcgagtcgaggcctcagctccctcctcggcgtcctcgcaacgaaggaaaggaacaatgtcagcggctcgtcgtcggtccccaatccccgttctcctcttcttcctcctcctccactccgcgtcgccgagccccatcaagacggtggtggtgctggtgatggagaaccgctccttcgaccacatgctggggtggatgaagcggctgaacccggagatcgacggcgtgacggggcgggagtggaacccggccaacgcgtcggacccggcggcggggcgcgtctacttccgcgacggcgccgcgtacgtggacccggacccgggccactcgttccaggagatccggcagcaggtcttcggctccgacgacgacgccgcggacaacccgccccgcatggacggcttcgcgcagcaggcgcgctccatcggcggcggcgccatgtccgacgccgtcatgcgcggcttcaaccccgccgacgtcgccgtctaccgcgagctcgtctcgcagttcgccgtctgcgaccgatggttcgcgtccgtgccgtcgtccacgcagcccaaccgcctgttcgtccactccggaacgtccggcggcgccaccagcaacaacccgacgctgctggcggagggctacccgcagcggaccatcttcgacaacctccacgacgccggcctctccttcggcgtctacttccaggacgtgccggcggtgctcttctaccggaacctccgcaagctcaagtaccttctggacttccacccgctgcgcccctccttcgccgaccacgcccgccgcgggacgctccccaactacgccgtcatcgagcagcactacctggactccaagctggacccggccaacgacgaccacccgtcgcacgacgtgtaccagggccagatgctcgtcaagtacgtctacgagacgctgcgcgccagcccgcagtggaaccagacgctgctcgtcatcacctacgacgagcacggcggcttcttcgaccacgtgcccacgcccgtcgccggcgtgcccagccccgacggcatcgtcggcccgccgccctacaacttcaccttcgaccgcctcggcgtccgcgtcccggccatcctcgtgtccccctggatcgacaggggcaccgtcgtccacgggccccacggccccacgcccacgtcgcagtacgagcactcgtccatcccggccaccgtcaagaagatcttcggcctgccgcaggacttcctcacgaggcgggacgcgtgggcggggaccttcgagggcgtggtgcaggggaggaccgagccacgcaccgactgccccgagcagctgcccacgccgacgaggatcaggcagacggaggcggacgaggaggccaagcttagcgagttccagcaggagatcatccagctcgcctccgtgctcaacggcgactaccacctcgccaccctgcaggaccggatcaagaacgacatgaacgtcagggaaggcatcgactacatgaaggccgccgtcaaacgctactttcaggctggcgcgttcgccagaaggatgggcgtcgacggcgaccagatcgtcaagatgagaccctccctcaccaccaggatccaacgcccatagacagactgtctaatcaaagcggaatcggttatgttcacaaacaggattggactatatatatatatatatatatatatatatatatatatatatatatatatatatatatatatatatatatatattctaaaaatacagatcacagtcagtgctatagatataga

SEQ ID NO: 115670 - DNA, 885 bp, Zea Mays
atggccggcgagaagacggcgtcgtccggcgccaccgatctggtggatcccgcgacggcgacggctacggcgcagaagaagccgcgggggcggccgctggggtccaagaacaagccgaagccgccggtggtggtgacgcgggagagcgaggcggcgatgcggcccgtggtgctggagctggcggcggggtgcgacgtggtgggcgcggtggcggcgttcgcgcgccgccgccgcgtgggcgtgtccgtgctctgcgggcgcggcgccgtcgccgccgtcacgctgcgcctggccgcgtcctccgccgcggtcacgctgcacgggcggttcgaggtgctggcgctgtccgggaccgtggtgccgtcgtcgtcgtcggcgtcggcgtccgcgccggcgttctcggtgtcgctggccggggagggcgggcaggtgatcggcgggaccctggcgggggagatgactgccgcggatggggtggtcgtggtggccgccgtgttcgggagcgcccaggtgcaccggctgcccgccgctggcgcggaggacgaggacagcggcggtggaagggaggagggaatgcgcgcgcaggtggccgtgggactgggtggcactggcaccggcggcggcctcgtggtcgtggggcggcagcacgcgcagcagctgccagaggtggaaatacaaattctcattcttccagtacacgacaccagtggcttccacgacacgactggcttataccggaagccacgaccgtctggcttccttcacacacatagggcacctataaataaggttttcggatgcatcgtccgttgttcctacgtatccttcgtgccgttcagcgagaagacgaatacttcactattcgttgtgatgcaacaggtttag

SEQ ID NO: 115671 - DNA, 115 bp, Zea Mays
gaaaggtcaaaaaatagaccaagtacaactacaaatacaaatacacaggaaaggcaccctatggtggccgcaacttagagtacatgaaagcatccatgagaaaacacctaataag

SEQ ID NO: 115672 - DNA, 121 bp, Zea Mays
gtttgaggagcgtgcgaataaaaaaactagggcccagtcctaaccaataccttttctctctctctcattttaactttcttgcggaatagtagtaatacctattgatgaatttttatccata

SEQ ID NO: 115673 - DNA, 486 bp, Zea Mays
aagagaaaatactatacatatattgcttgcagtcttccacagttgtcacatatatattctttgtgtcaacagaacacacatgctactctcttcattcttttttatttgtcgcgttttagttcagaaatgaactgacagacgacaaatattcgaaaatagaggtagaacaccatcaatcacagttacagattaaactagaataccggccttatattagctagccagctgcatgcttatgggataacacgtatgatccgcaggagtgcagaatgcatgcggccagaactgtgtgctggtggacactaggctggctggctagctgctggctgctgcagctagctacgcgccccctgctttcttcctgacgatcttctccagctcgtcgcagaatgccgggcactcctcgttcatcgttctttgacttctctgtcagtgcaaaaaattggtaggatggatatgatgctgcaggttatatatctgggagta

SEQ ID NO: 115674 - DNA, 978 bp, Zea Mays
atgggcaacggcccctctctctcgccgtgcctgaacccgcacctgccggagtcgtccgcgacggtgcgcctggtgtactggggcgggcgggcgaggcagctggcgctcacgggcggcggcgacgacgccattgtcacggccggtgacgtcgcggcggagctcccaccgccggccacgggctacgccgtgtgccccgccgacgccttcttcatcggcctcccgatcccggccatgtccccgggcgaggagctcctgccgggccgcacctactttgtgctccccgccgcgcgcctcccctgcctcaaggcgctcacgcccgccacgctcgccgcgctgtcgcaatcgcacggcagaaagaagcagcagcctatcttcgcggtcgcggggtgcccgttcgagcacgtcaagggcgcccacggcggcgccccgctcatcagggtcctcccggagttcatcgagaagctcatcaccgcctgcgacgccggcgcgaacgcgagcgccaacaaggacacggcggccaagcaggccgcggagctgtgcagcacgcccgagctgaagcggcattacgcgcagctcgtcggggccggcaggagccgcccgtggtcgcccaggctggagaccatcgccgagcgcggaagaatgacgaaggacgaacagcaaaatgctgcaaagcgcggccatggccgccgccgcgtgcgggagaccaggaaatggtcgcacacgcgtggtagggaggaactcggcgcgtcgagcgcagtctcatcgtcttctccggttgaccggaccgcgtccgcgtcccgccgtctgacgtctcttggtgtagtggggttggggtggtcggcgtcggggaaggaaactgcgcggaaagagagcatcggacaggtgggctgggccatcttatgcgggcgaatggtctggtccacgggccgtgaacgaacgctggcgctcgcgcacggctccggcaggccgcagctttga

SEQ ID NO: 115675 - DNA, 875 bp, Zea Mays
atctcatccgtcattccattctacacacagtcagacatgggcaacggcccctctctctcgccgtgcctgaacccgcacctgccggagtcgtccgcgacggtgcgcctggtgtactggggcgggcgggcgaggcagctggcgctcacgggcggcggcgacgacgccattgtcacggccggtgacgtcgcggcggagctcccaccgccggccacgggctacgccgtgtgccccgccgacgccttcttcatcggcctcccgatcccggccatgtccccgggcgaggagctcctgccgggccgcacctactttgtgctccccgccgcgcgcctcccctgcctcaaggcgctcacgcccgccacgctcgccgcgctgtcgcaatcgcacggcagaaagaagcagcagcctatcttcgcggtcgcggggtgcccgttcgagcacgtcaagggcgcccacggcggcgccccgctcatcagggtcctcccggagttcatcgagaagctcatcaccgcctgcgacgccggcgcgaacgcgagcgccaacaaggacacggcggccaagcaggccgcggagctgtgcagcacgcccgagctgaagcggcattacgcgcagctcgtcggggccggcaggagccgcccgtggtcgcccaggctggagaccatcgccgagcgcggtaggtcacggtggatgaggttggcggcgaggaccatgctgtcctcgcgttagccgtgcacatccgcgcgcgtagcgtaggtcggtgttattaattgttagcttgcggagatttccgtttatttaggaagaatgacgaaggacgaacagcaaaatgtacagatggctacgcatttttttccttgcaatttgcaaaccagaacgaa

SEQ ID NO: 115676 - DNA, 1979 bp, Zea Mays
atgccattgccatcggccgcccagagcgctctcgtcgtggcggccgtcgccatagccaccgccaccgtcctcctccccttcccacggacgccgccgcgggaccgcttcgccgacatggtgctggccaacggcaccatctacaccgcggaccccgcccgacccttcgccgacgccatgtccgtccgcggcggccgcgtgctccgcgtcgggacctacgagtccgtcaaggagctcaagggccctcgcactcgtgagctgaatctcagtgggaacgtggtgctgccggggttcatcgactcccatgttcacttcatagacggtggattgcagctagcgagggtgccacttcgtggggtcagaagcaaagatgacttggttgccagggtcaaggaagctgtcagagataagcaacctgggcagtggatcttgggcggaggttggaatgatgattttgggggagatggtctcccggctgctgtttggctggatgatatctcacctgataatccagtctggctctctcgcatggatggtcatatgggagtagccaactcattagctatgaagattgctgggattgacaaaaacacaaacgatccaattggtggaactatcatacgaacaactgaaggagagcctactggtcttctagttaatactgctatgaaacccatatttgatgtcattcaaaatgtttctaaccatgaaagaagagaggctcttcttagagcaagtagacatgccctaatgaggggagtgactactgttgttgatgttggaagttacttccctggggcctcagctgagaaaacgtggcaagattttgcagaattagaaggattcacttgtcttgtttttatctatgaccttatttgtactcctggcatactgacacaagatcttattagtgaacatggtcgatcgctaagtcagtggatccatctaggtggtgttaaagctttccttgatgggtctctgggttcttcaagcgcgttgttccatgagccttatgagggtgatccggataattatggtctccaaatgacagatttagacagcctacttaatagaacactagaatctgacaaatctggactccaggttgccatacatgcaattggggataaagctaatgacatactactggatatggttgacaagattgttgatttaaatggagcgaaggaccgtagattccggatcgaacatgcccaacatctggctccaggtgcagcaaaccgctttggcaagcatggtaccattgcatccgtgcagccagatcatctactagatgatgccgaccatgcttggagcaagattggggtggaaaggtctgagcgaagctcctacacatttcgatcactgttagatggcggtgcgcagctagcttttggttctgactggcctatttcagacatcaaccccttgcaagctatccgatccgcagtgttccgcaagcctcctggatgggaggtcccctggatccctgcggagcgcttgaccctggatgaatcactgaaagcgcacacgatgtctgctgcctacgcctgcttcctggaccacgccgtgggcagcctttctgaagggaaatacgccgattttgtggtggtaccttctacatcgtgggacgaattctccagcgatttgccggggcatgtcctggcgacgtacgtgagcggcaggcaagcttatccatgacagatagcagttgtgtaagtgttggagaccaaaaagagcagcgcggacagtccggccctgaggccggaaggccggacgatccgcggtccggacagtccgcggtgatggcgcggacggtctgcgcgtgcgcagagtcagttaggatttctagtttctcgcgggatttgttacctaaaaccgcgggattaactcggaaatctgttggaagcggatccagacctcccctttatatcgatgaagggctacggccgattgaactccccaacaatcgaacaaatcaa

SEQ ID NO: 115677 - DNA, 120 bp, Zea Mays
gtttttttaatttaattttagctaggcgtgggatgcacgtgggaatgggaataagctttgtgggagggggaatgagaaagacacgtgatagccgggaatggaaatgtgaatgggctttgc

SEQ ID NO: 115678 - DNA, 851 bp, Zea Mays
taaaataacagtcatcattagatctatatcggatgcaccagatcgcttgattgcatgcttgcaccaggataagtgattgcataggatattttccccacaaataagcagcttttcaatggattgaacaattcaaagaaatctgctaggtcgaatggcactggatttgctccacgtcagtgttcgaccttcccagcgttttggttatagcaaggacaacttcaattgggtggacgatatggacatttcagacagtgagcagttggatgagttagagggtatgcgtgatggatctgattcagactcggtacagtcgaccaggaaaggcagaaacacaccagtcaagagcgtgtagccattcaaatcctaacctggatcgtcaaaatacacacagacgatgcaaagccagagaagccctcagacgaaaaagtgcagtttgcccgaaactattccatcggacggctgttcctgctcaaaagcctcatcatgcaagaccaagaagtgccagtgcagaggctcaggttaaaaagtggcgcaattcagcagttcaacccgtccttggatctttacttccctccgagccagagacaccgaagctgcccctcggaacagcgccgacattcccctaaagctaccgagggccatggcaactcctgcggagagcaaccctaccctcacggaccgcaatgctgccaagcccgacaaatccgtcagcaccggcatcaaggatagcaccggagctgccgccacgaggccaccgtctcagctgcgtctgttgcgataatctgattgtgacattcagtatccgtgtcgcggaagtcttttgctgtacaatgggggaggctgcctcctgc

SEQ ID NO: 115679 - DNA, 2550 bp, Zea Mays
gtggtcatggcacacaagcaaatgctcgtcaatggatgtcctgttgtgctaagaggtgtcaacagacatgagcaccatccacgccttggaaagacaaatttagaagcatgcatgatcaaggacctgattttgatgaggcaaaacaatatcaatgctgttagaaatagccattacccacagcacccaaggtggtatgagttatgtgacatttttggtctttatgtcatagatgaagccaacattgagacacatggttttgatgaatctaacactttcaaacatcctacacttgaacctatttgggcaaatgcaatgcttgatcgtgttgttagcatggtggagagagataagaatcatgcatgcattattgtttggtctctaggaaatgaatcttcatatggacctaatcatgcttccatgtctggttggattcgtgaaagggatccaacaagactcctccattatgagggaggtggttccagaacatcatccacagatattgtgtgccccatgtatatgcgtgtctgggatgttgttaagatagcaaaagatccatctgaaacaaggcctctaattctttgcgaatattcacatgctatgggaaacagtaatgggaatattgatgcgtattggatggccatagacaacacttttggactccaaggaggttttatatgggactgggctgatcagggtttactgaaggaggactcagatgggtctaaattttgggcatatggcggcgactttggagatactccaaatgactccaatttttgcctcaatggcattgtgtggcctgatcggacgattcacccagctcttcatggtaacccggaaatactagggggaaatgtttgtcttggttatcaatgtgttaaactaatatctttgtctctaaagtcattggatgccaacttggttgaccaaattgattctggttgcagaagtaaaataccttcaccagcctatcaaaatatcatcagcagataatatgcttaagattgaaaatggacacttttttgagacaacagaagctttggacttcagttgggttcttcatggagatggttgtgtcttgggctctggtccattgaatattccaactttggcaccacaaactagtcagctcatcaacatggaatcatcaccttggtttgccctttggagtgcctgtgcagcaaaagaagtatttttgtctgtgaatgtgaaacaaaggcatgaaacacgatgggctaaagctggtcatctcttggcttcagcacaactgtgtttgcctcagaaaaatggctttgtccccagcgtgatagcattgtccagtagccctttggtctgtgaacgcattggtgataatgtaaccatctgcaagaataatgcctggaaaattaaagtaaacagtcagttgggaacaatcgacagctggaaggtcaacgacgttgagcttatgagcaaggggatactcccatgcttttggcgcgcaccaactgacaacgacaaaggaggtttcttcaccaagccatatgactcgcgatggagagaagccttcctcgacaatgtctcgttccacagcagccagttctctgtcaaggagttgccggacaacaccgtggagttctccaccctctactacggtgttcccgggcacctacccaagcctgacgacgaagcctccgagtccattctcttccgggtgaagatggtatgccggatccacgggtcaggcgacgtggttctcgactacgaggtaaaccccaggagcgacctccctccccttccccgggtgggcgtcgtgttcagcgccgggaggtccctgagccacgtcacgtggtacgggcgcgggcccttcgagtgctacccggaccgcaaggcggcggcgcacgtcggcgtgtacgagagcagcgtggaggagctgcacgtgccgtacattgcccccgtggagtgcggcgggcgggcggacgtcaggtgggtggcactccgcgacgccggcgggctcggcctgtacgcgtcggcgcacggcggctccccgccgatgcagatgagcgcgagctactacggcgccgcggagctggacagggcaacgcacgtccacaggctggtgaagggggacgacatcgaggtgcatcttgaccacaggcacatggggctgggcggcgacgacagctggtcgccgtgcgtgcacgagcagtacctgctgccgccgacgcggtacgccttctccctgcggctctgccccctgctgccgtcgtcgtcgtgccatgacatctacaggtctcagctccccagctgatggtgccgtgtgccggagacccgtcgacgtcgagccttgggaaacaacaatgaacgcaatggcctggccagtgaatgaaagtatataatattgtaataaagcagagacgtattagctcctgcaacggcctcgcgatcgcctggatatgtctatgctgagggggtgtttagttaactaataacctaactacatatggcgccaagttactaaaacttaataaataactattactaactaataaatagtaactgaattcctaactt

SEQ ID NO: 115680 - DNA, 976 bp, Zea Mays
ctcttccgacgcgacggcagatttgggaggtgtcgcggccagagagtgcacaggcacaactgacggtgctcgctcctctgctctgtgactcatcgctcgacgacgaaaacactcgttggatgttgcgctgtgttccaatccaatccgctccgctccgctccgctccgcaacccaattcccatctccgccggtgagggattcgccacaccacacgccaggccgcccctcggtcgcggaacccacttcctgctggcgcgcgccgtcttccgttggtccggacatgtgtctttgacagatcgttacaggaggaaagaggtgcccctgtttgtccacaatggctttagctcatgccagcgccatgtttcctccctcgagcccctcacataaaacttgggaggacccgtcattcttcaagtggagaaagcgtgaggcgcatgtaccactgcgctcacaggacacgctggaagcggctctgaagtattggcatgaacggaggaatgtgaactatcacaatgctgacactgctgtctggaacgatgacgctgttcgcggtgctctggaaagtgctgccttttggtccaagggcttaccgtacgccaaatctctaagcggatactggaaattccttctgtcgccttcagcggaaagtattccggagagattctattatgctcattttgatgattcaaactggtcgggtttgccagttccctcaaattggcaaatgcatgggtttgaccgtccaatctacacaaatgtcacatatcctttcccattgaacccaccatttgtgccggctgataatcccacaggttgttacaggacagtctttcacatcccaaaagagtggaaaggtcggaggatcttgctgcactttgaagctgttgattctgcattctttgcttgggtaaatggagtactagttgggtatagccaggatagcagacttcctgctgagtttgaaattactgattgc

SEQ ID NO: 115681 - DNA, 1534 bp, Zea Mays
ccatcgcatccaagaattgaccgactcccagtgacgccctgtgtgctggcttggctctgcctctgtgtgttggcctgttgggtagagagagactggtgaccgaagaagcaaggaaggcagctgtgctgtgcagtgagaggtccgtgcaggcaaagcctagctgcagttgcttgcttgccatccacaccacacacccacagcaaagccacgaaccaactcatcgggcgcggagaccaccgcggggggaaaagcgagggaggggggagaggactgaagagaaatcatggagccgatttgctgtggagattcgggcgcgtgatccggtcggatcttgctttcccggggggcgatcgaggccacgccgctgctgccgcggtgccctccctctgcctctgggctctgcgtgtgacgtgccgtgccatggcgctcgccctcgcctatatccccagcctccctcgccccgccgctggccgccgcattcagtaaaaagccacctaccctaccctcctgcgctggtactacttactacctagccaggccaaggagcccaacgagggggaacgctgcggtaggcgcgcgctgctcgtcccaccccacgccgccatgacggtgccagatgccgagtcgcgcttccatgtcctcgcggtggacgacagcctcgtcgacaggaaactcatcgagatgctgctcaagacctcgtcctaccaagtgaccacggtggattccgggagcaaggcgctggagctgctggggctgagggacgcgtcgtcgccgtctccgtcctcgcctgaccaccaggagatcgacgtgaatctcatcatcactgactactgcatgccaggcatgacaggatacgatctgctcaagagagtgaaggggtcctcctcgctcaaggacattcctgtggtgatcatgtcgtctgagaatgtgcctgcccggatcagcaggtcagctcccgaccgcattcaattttaaacctcatcctcaccacgctctcatttactgcgcatccactacactagtactccaaacctcagatccatctgaacatgattggagcactgctgttcttgcctgcctgcctgcctgcctgcttcttctgaacacaagtgattaaaacatcgtagtacacgcatggtacagatcatggcggtcaaagggttgttgttgggagggggggctgtctagggagagatgctagattgcccagttttgcatgaatggattcagaatggattgggagaatgggaggtgaatgtgtgagggattatttaatctctcttactttttgccaaaaagtcgcctagggattatttagtttgttaactagtaatgtttgcgggcacaacaaagactttctttcttcaggcgttgggatcggtttcttaatttggttggagcactgaaagatttgctgcttttttgtctctaaaaaattcgtgccttgcagtaagtagggggcattagtgaaagcctgtctagttagtaggtctaaagctcgcacataaataaagcatccctgcatttcaaaact

SEQ ID NO: 115682 - DNA, 2462 bp, Zea Mays
tggcacaaggtagcctagagatttgccggctgctggcccctgcctgctgtgcgcccgtgcgccgcgcctccctgcctgttctaagcaactgcaagcagcaatctgcttaacgcacgtcggcgcctcgccggcgcgacgggcacaacagcccgcctggcatttggcccgtgaccgtgagccacccaccctacgcctttggcaccgcgacatgccttgccggcacaccccatcgaggcgtcgaccatccccgccgccgatcacccaaacttcgcacggcaccccgcccaccttcgccgatggagccccacctgcccgctcacctcacgcgcctcctcaagacccaaccgctgcacgccctcctgtccgacgcgtccacctaccgcgccgcacgccacctgttcgacgcggtgccccgcccgacagccgccctgtgctgcgctttcgtctccgttctctcaaagctctcgctgcaccaggagctcatcgaggccgtctcctcgctacaccgcaggggtggcgccattccgtcgggctgcatcccgcttgtcctaaagtcctgtgcgctgtcggcagcgtcctgccagggcacccagacgcattgtcatgcccttgtgcgtgggatgctaggagatgtgttcgtgcagactgctctggtcgatttctacgccaagaatggcaacatggactcagctgtgatggccttcgaggaaatgccgatcaaggatccgataccgatgaactgcttgatcactgggtattccagatcaggggatgtggaggaggcaaggaggcttttcgacagtatgccgagaaagacgtctgcttcatggaattcgatgattgcttgctatgcacatggcggagagttccaggaagcattgacattgtttgatcagatgttgcgcgagggtgcaagtccgaatgctatcactatcacgacggtgttctccatctgcgccaaaaccggtgatcttgagactggaaggcgggcaaaggcgtgggttagcgaggaagacttgcagaacgtgatagtccacaccgctctgatggagatgtacgtcaagtgccgtgctatcgacgaggcacgtcgcgagttcgatcggatgccacgaagggatgttgtagcatggagcaccatgattgctggttattcacacaatgggagaccacatgaatctcttgagctgttcgagaggatgaaggcgaccaattgcaagccaaatgaggttactctcgttggtgtgttgtctgcatgtgcacagctgggttctgatgaacttggggaacagatcgggagctacatcgagagtcagacactgccacttaccagctaccttggatctgctctgattgatatgtacaccaagtgcgggcatgttgccagagctcgcgatgtcttccaccggatggaacagaaggtggttattgcttggaactccatgatcagaggccttgcactgaacggctttgcagaagatgcaatcgccttgtacggggaaatggtaggagatggggttcagcccaacgagatcacctttctcgcgctgttgacagcgtgtacccatgctggcttggtagacaaaggcatggcattcttccaagagatgaagaagaacaagcagcatgcctctcctcaagttgagcactgcgcttgcatagtggacctcctctgcaagtctggcaggctgtgggaagcctacaagttcatctgcgacatggaagtcgagccaaacgcggtgatctggaccacgctgctcagcgcctgcagagcccacgcggacgtcgagcttgccaagctcgccgcgggcaagcttgtagtactggagcccaatagctcgtcgatctacgttctcctctccaacatctacgctgacgcagggctctggggcgatgtgagggagatcagagacctgatgaggagcaagaacttgcagaagctgtccgcctacagctggatcgagctagacggtgaggtgcacaggttcctggtacaggatacgtatcacccgaggtcagctgagatttacaacgtcgtcgatggcctgggcttgcagctggagaggactagtcctgatcatgagttaatttcagaggtttgctgattaaaattactgtcatgtcagttacaatactttctcgccaaatgtcatgcaatttgtgctctgtaggagtacagttgtagaagcataaaaggtgaaatgcgtcggatattcatgtttttttttctttcctagctattttatgtttcgtgtagtcgtgtatgattttatatttttattattccagtgcagtaaccacatgcattgaaactctagtatagtagtattcacctaaattctcatgcattcaatgcatgtagatttggcctaagagctttgcttaggcgtcgttcgattgttacggattggtgggtcggaacgattcctaacctgattgcttctctaatttatataactttgatt

SEQ ID NO: 115683 - DNA, 3260 bp, Zea Mays
atggcgtttctgaatatggtgagtcatttaactgacctcaacctactttccgttatgaagaggcacctaatccgaagatccctgagtcgaatgcagaacatcccgtttcgcagcagttcacaagcattgcatgccgttggtgctggattatgcgagcaaccaatcactgccaaaagtgtcgatgtttcgcaacccattcccaggattgaggatggcagtgacaactaccgactccgtactccatatgggagccctccaaagaatggattggagaaggcattttctgatgtcatgttgtatgcagttcctcccaggggtttctttccatcagattctaatgctggatcagtccattctatgtcttctggacaatcggataacacaaacgggcactcaagaggcgtcccaatggatgctttccgagttagttattcaagtgccgttagttcatctagtcatggttctggtcatgatgatggtgatgctttaggcgatgttttcatatggggagaaggaactggggaaggaattcttggcggtggtggttcaagagtcggaagctcctcaggtgcaaaaatggactgccttgtaccaaaaccattagaatttgccgtgcgacttgatgtgcagaacatatcttgtggaggaaggcatgctgcacttgttactaaacaagccaaacttattgatgctctttctcatatgaacattgagcttgtagcatgtggagaataccacacttgtgctgttacactatctggagatctttacacatggggggatggcacatttaaatttgggcttttgggtcatggaaatgatgtcagtcactgggtacccaagcatgtgaatggaccattagagggtatacatgtttcgtcaatttcatgtggaccttggcatacagccctagtaacttccgctggacagcttttcacatttggtgatggatcttttggggtcctgggccatggagatcgtgagagtatctcggtccccagggaagttgaatctctcaaagggttacgtacggtgcgggcagcttgtggtgtttggcacactgctgcagttgtagaagtaatgtctgtgaattcaaattctagcaattgttcttctggtaagatatttacatggggtgatggtgataaaggtcgcttaggtcatggtgacaaggaaccaaaacttgtcccaacttgtgtggctgctttggtggagcccaatttttgtcaggttgcttgtgggcattgcttgacagtagccctaacaacttctgggcatgtgtatacaatgggcagtgctgtctatggtcaacttgggaatgcacaagctgatggcatgcttcctgtgcgtgttgaaggcaagctatacaaaaactttgtggaggagatttcatgtggtgcttatcatgtggctgtattgacttctaggactgaggtgtacacatggggaaaaggtgcaaatggccggttaggtcatggcgatactgaggataagaatactcctacattggttgaagcactgaaagataaacaagtcagaaatgttgtttgtggaattaatttcactgcagcaatatgcattcacaaatgggtatctggagttgatcaatcaatgtgctcaggttgccgtcagccattcaacttgaggagaaaacgccataattgctacaactgtgctctagtattttgtcattcctgcagcagtaaaaaatctctgaaggcttcattagcgcctaatggaaacaagccttaccgtgtctgcgatacctgctacagcaaactgacaaagggacttgagacagatatgcatttttcagcgaaacgggctgctaccgtaccaggattcagtgatacaattgaggaggatctggaaacaaggtcaaatgctcaactatcaaggttgtcgtcaatggaatcttttaagcatttggatagcagatattccaagaaaaacaagaagtttgaatttaatagcacccgtgtttcccctgtgcccaatgggagttcacattggagtggactaaacatttcaagatctttcaatcctgtatttggatcttcaaagaagtttttctcagcatcagttcctggatcaagaattgtttctagggcaacatcacctatttcaagaagaacaagccctccacgatctacaacaccaacacctactctgggtggcctaacgtctcccagagttcccactgacggcaagccaacaaatgatgcattaagccaagaggttctgaatttgagatctcaggtggagagtcttaccaggaagtctcaactcctggagttggagctggaaagaactaccaaacaattgaaggaagctatttccattgccggcgaggaaactgcaaagtgcaaggcggcaaaggaagtaatcaagtcactcactgcacagttgaaggggatggcagagagattacctggaggagcagccaagaacactaagttgccacctcttcctggaatttccattccaagtgacatctcgtctttggctatggagagtgtgggcagcccaagcagctccggagaacaaatcataaatggtcataatggattgcttgcgtctaatggaccaagttctgttaggaataagacaagccatccagaagtgggtaagaatggaagtaggccgcctgatgctgaatcttgccatgatgctgaatgggtagagcaagatgaaccaggtgtttacattactctcaccgcgttgcctggaggcgccagagatctcaagcgggttcggttcagccggaagagattcagcgagacacaagcagaacagtggtggcaggagaaccgggcgagggtataccagcagtacaatgtccgcgtggttgacaaatcaacggccagtgccgacaatgacattgcagctaactgacactagactgacctggagaaacatacctgattacaagtggagctgaggccatgtaccctacctacgtgaaggctctctagtcagtcaagctgggttgctaacgtggctaccattttacctaggtggttttcgctcccaggaaaacaggaggtttttttaatccggttttacataattctttctcttactcccttctcttttctccttgtgtggaaagtagagtgcttgagcagaggtaatgtaaatgcttagtagaagcaggctaatctaccttgtaaatgcataagcaagcatcgattttagaatgtcttggaaattttctgatatggttgcaaatggcaaatctgggctaagtggtgatggtc

SEQ ID NO: 115684 - DNA, 927 bp, Zea Mays
cccccccccccccccttcacagcatcttctctctctcctcttcctctctcctgactccgccgcgtcgcgatctccccacctctcctgccgctcccacctccccgcactgccaaacccctcgccccccccccctcctccgctgcgctccgatccagtctgccgcgtccccggcggcgcgccctgagctcgtcgccccgcgcgcacgcgagttgccctgcccaccctgacccgcgcaggcgagcgagcccccattgaagcgcgccgcctcccctgcgcgcggcggcagggctcggtgaacgaggccagcggtccgcgcgcgcctggccgtgatggggcggtgccggcgccggggctgatgcggaggccgctgccatgtcggacgtctcgtcggatctcggcggcatccgggcggggcccgtggagcgtgacatcgagcaggctatcactgctctcaagaaaggagcatacttactgaagtatgggcgtagaggaaagccaaagttttgtccctttaggttatccaatgatgaatctgtactgatatggttctcagggaaagaagagaaacatctaaggttgagccatgtatccaggataattcctgggcaaaggactgcaatttttcagaggtatccacggcctgagaaggaatgccagtctttttctctaatttcacatgataggtcattggatataatatgcaaagataaagatgaagctgaagtatggttcgctgggctgaaaacactgatttcacgttgtcaccaaagaaaatggagaactgaatctagaagtgatatcctttcctctggtgcaactagtccgaggacttacacacgacggagttctcctttgagttcacctttcagcagcaatgacagcatccacaaggttttactagctccattgtattacaatcctaactag

SEQ ID NO: 115685 - DNA, 640 bp, Zea Mays
caagcattagtttatgtgttgataccgtcatacgccgttgtttcataacaacgcccatcagacagatagagagtgacgacgacactagctcacatatgaagtgcaaaggttttcttccttcttgcatgttggtgtaaagagcaggtaaacctgcttgcgcgatggtacaagcagcagcaacagagcttttttcaaaactcttcgaagaggccgccactaaatggctccatgaataaatgggtgtgaagtcttggattcttggtttgctcacagggattgtattctcctactagccacatgatcaggctgtggagtacggagctcacaatatctaggagatgaacaaccttggggtaaccctctcactgtctcatgccagcagccgcacccacgccctgttcgactcgcacgctctcgccaacttgtggttgtccatctgcgcccaagcacccggccccagcagtcgcactattgcttctgtgaaaattatacggaacaagcagactgggcactcagaaggctatggttttattgagttttcctctcgagctgctgcagaacatactcgatgaacttcaatgggcagatgatgccgaatgttgagatgacttttaagctgaactgagcttctgctagcact

SEQ ID NO: 115686 - DNA, 821 bp, Zea Mays
aagtaaactctctttggcaaatatctgaaacatattttatggtttatccggatgttgctgcaattctatgcaaacatattttatggtttatctggatgttgctgcaattctatgcagagaagtgcacttacgaagtttcaagaggacccaacgtgtatggctttagtcatggatgggactgctgcactggggcttgatttgagttttgtgactcgtgtttttctcatggaaccaatatgggataggagtatggaggaacaggttattagtcgggcacatcgaatgggggctacgcgtccaatacatgtagaaactttggctatgcgtggtaccattgaagagcaaatgcttaagcttttgcaggattctaacgcctgcagaaaaatagtggataaaagaacaggcagcactgacaatgaaggagggcggtcccatcggagcctccatgattttgctgaaagcagctatctggcgcaactcagctctgtgtagacaggatctaaagcaacaattcacattggttgttggtagcactaactggattcgtgatttcggttccttccttctgatcattcctttgcaatagtgatagtatttgcttcgaagccagttgttgttctcgattccaaaccagtgttgatcggggttcttttgtgtaaataactgcgttccttttgttaaacgcggtattcccagttgaagaagccttatactgggcaatatcaggattctaccgtagatttgtgcttttactaataaccttatgaactttgaacagtttaagttgaagctaacgtttatactccctctgttataaatta

SEQ ID NO: 115687 - DNA, 3138 bp, Zea Mays
agacctaaatcacctaatatatttcaatccggagagccaggcaatgtgacagctgttcattatgtcagtaatatttcctgtgttgttgtcaaccttcctcagaggttaagcctttttttgaatggcatgtgcaactgggatgctaggaaagcgttgcttgattttgattgggcttctcatgacaatacacactgtgatgaccaatccgtttggagatgcactgattgtcacgtgcttgattgcgaggaccataagatagcatcgatatcaaataaagaaaagtcatttgacctgcacgaaatcttcaagacactccctggtgttaggatggagaagaacatgcaggtagcaagaataacaccagacgaaagagcactggaactgggtatttggtccgtccctgatgatgtattgcataaagtactaattctactcaaacccagagatttggtaagagtggcagcaacttgtcatcatctaaggactcttgctgccactgttatgccttgcatgaagcttaagctcttcccccatcaagaggctgctgttgaatggatgttgaagcgagagcagaacgtgcatgtcctagcacatcctttgtacaaggatttctgcactgaggatggtttcccattctacataaatgttatctctgctgaaatatctaccggtgatgctccaacaataaatgatttctgtggaggtctgttttgtgatgaacctggcctagggaagacagtaaccacactatctctgattctgaaaacccacggaacaatggcgtaccctccacaaggggtagatgtgagttggtgcatgcataagcctgataaaaaatgcggttactatgaattaagtcccagcttttcttctaatagaaacagctcgtctgtgtcaaaaaagcttttgggagaggatgtgatagcagattgtccaagtccagatgattctgtctgcagtaccagatcttcaagaaagagaggtaggttactgagccctgatccaaccaaggtaatgttgcatgctgcgattgagaattccccatcatcatcaaacagcaaagtgcaaccaatgccagctatgcatatactgaagttcactaaaaactcgagacaagttaggaaaaaccccatggatgcatacagcgacgtttcagttggcaataaaaggaagattgacaccacctctgaggtaagtgagacctgggttcagtgtgatgcttgtagaaagtggcgaagggtatctgatggaacagttcttgattctaccacagtgtggttttgcactatgaaccctgatcctacacgacagaaatgcactgccccagaggaatcctgggattttaagagaaagataacctatttgccaggattttacaagaaaaattctttgcctggaaatgaggaaaacgtatcatttttcacaaacatattgaaagattatgttactatgatcaattcagaaaccaagaaggctttgttatggttagcaaaactttctcctacaaaacttcttgagatggagtttgttggtttgactcgcccagttctagatacacgtgcaactacaggcaagggtgcccatccatattacaagatattccaagcatttggccttgtgagaaagattgagaaaggtatgactcgctggtactatccctctatgcttgatgatttagcttttgattcagctgcacttggagctgctcttgaaaacccactggattcaactagattttatttatctacagccaccttgatagtggtgcctgctaacctaattgatcactggacaacacagatacaacgccatgtgtcctcggatacccttaatgtctttgtgtggggagaccacaagaagccatctgctcacaaccttgcttgggactatgacattgtcataaccacattcagcaggctaagtgcagaatggggtccacagaagagaagtccactaaagcagatccattggttcagggttatactggatgaagggcatacactaggttccagccttgccctgacaaacaagttacagatggctgtcgctttggttgcatcaaataggtggatattaactggtacacctacaccaaacacaccaactagtcaggttgctcatcttcacctcatgcttaagtttcttcatgatgaaacttatggtcagaattaccagtcatgggactctgggatccataggccttttgaggcgcaaatggaagaggggcgtgttcgtcttgtgcagctgcttcagagaacaatgatcagtgcaagaaaagcggatctgaaaactattcctccttgcataaagaagataaccttcctagacttcaatgaggggcatgcaaaaagttacaatgaactggtggttactatacgccgaaatatactgatggcggattggaatgacccttctcatgtagaatcccttcttaaccccaagcagtggaaatttcgtgctgctactttgaagaatgtccgtttgtcttgctgtgttgccgggcatatcaaagtagctgaggcaggtcaggatatacaggaaacaatggatgaattggtgcaacagggccttgatccttcttcagatgaatatcagttgataagatattctcttttaaacggtgccagttgtttcaggtgtagcgtttggtgtcgcttgcctgtgatcacaccctgtcgacatcttttgtgccttgactgtgtagctcttgatagtgaaaaatgcacattaccaggttgtggatatcattatgagatgcagtctcctgagactcgtgcaaggccagaaaatccaaacccaaagtggccagtgcctaaggatctaattgaattgcaaccttcatataagcaggatgattgggatcccgattggcaatcaacatctagcagcaaagttgcttacatgattgagaagctaagaagtctgcgagaagcacacatgaatcatgggaataacataaccaacagtgttggtcattctaatacactatcttatcaaccacaggcaatgctggacaaagttataattttttctcagtttctagagcatattcacgtgattgaacagcagctgactattgctggaataatatattcgggaatgtatagtccaatgcctctagctagtaagtatttgtag

SEQ ID NO: 115688 - DNA, 826 bp, Zea Mays
agtcggccagtcgccaccgcccgagaagccgagcccgcagccaccggatcccagcgggcatcgccacccaccccgctctccatggtggcacgcgagagcgagacctaaccctaccttaaccttactacctcacaatggccgccgcgggggagcgccgcaagctttgtggctacctacgcgccgtggtgtccatccccggcggggacgtcgcggcggcggcgtctatccttccgctgtccccgtgcacgctctccgcgtgcggggccgtggcccttgcgccgctccccgacgacgtgcgggcccagccgcggtggcccaggtcgcgcgcccccggcgtcgtgcgcctgctcaggacgctcgtggcgaaccgctgcgtggaggtggagggtacgcttctccgggtcgtgaccaggaggaggcctggggaaggggaaggggaaggggacggcgccgcggtggaggccagggccgtcgtgctgctcgacgtctacatacccgtcgccgcgtggtccggttggcagttcccgcgctcgcgctctgctgccgccgccgtcttcaagcatgttaggtgcgtctcttccgtctttgtgtatctgtacaggtgcaattttgtcgatcccattgccatttcggaggaataaggaactcccgcacaacgcaaggcaactggaataaaatggaggaataaggaactcccgcacaacgcaaggcaactggaataaggaagccaacgtatttctctctgacagaagttcctgattccctcggcagtggcgtggttgcctatgtttgctgtctgttttgatctactcgttttttcgctgtc

SEQ ID NO: 115689 - DNA, 1122 bp, Zea Mays
tgccatgtaccggtcatgtgtttattaagcaactggtagcttaggtatgggagccaccacaccactataaatacctctgcttgcttgcacaggcacatccaacagctcgctggctcacaacagcgctgctagctagcttgtcagcaacaaagtacatactttttatccacgcgtggaccaacgaactatggccaacaagctggctactacgtccctcctcgccgccgtcctcctagcgctcgccgccccctcactcgccggcgacccggacatgctccaggacatctgcgtcgccgactacaaatccctccagggaccactgcggctgaacggattcccctgcaagaggccggagaacgtgacggcggacgacttcttctccaacgcgctagcgagcccgggcagcacgtgcaacgcgctggggtcggcggtgacgccggcggacgtgcggacgctgccggggctcaacacgctgggcgtgtcggtgtcgcgcatcgactacgcgccgtggggcgtgaacccgccgcacgtgcacccgcgcgccaccgaggtcatcttcgtcctccagggctcgctcgacgtcggcttcgtcgccgccaccgccaccggcggcagccgccgcccgcctgtacgcgcgcgccgtcggcgccggcgaggtcttcgtcttcccccggggcctcgtccactaccagaggaacagcggtggcagccccgccgccgtcctctccgccttcgacagccagctgcccggcacgcagcccgtcgccgaggccctcttcggcgcctcgccgccggtgcccaccgacgtgctcgccaggagcttccaggtcgacggaggactcgtggaggccatcaggtccaacttcccgcccaagtagctctgccactgccgtgctcatgcatgcaagcgccggccccgcgcgtacgtacttgtacttacgtgcgatcgatgtgtgtaacgagcgtgatggtttagttcgttggcctggcctcttcttggtgcgaggtcaggaagatggcaccgacagttcactgttgctgtgtttcagttaatttctgcatgagccacttgtatgtgtaaggtggtgtgtatctgtcaacgaaaatacctggcaaatgagt

SEQ ID NO: 115690 - DNA, 3851 bp, Zea Mays
tacccttgtacaggggaagcatctgctatcattttgttttcctcaaagtaatccaaggaaagttgtttccagatgtcaactgcaaaagtgttagatcctgcttttcaaggggctggccagaaagttgggacagaaatatggcggattgaagattttaagccagttgcactgccaaaatctgattatggtaaattctactgtggagattcatacatagttctgcagacgacctgtactaaaggtggtgcctatctatacgatatccacttctggattgggaaagattcgagtcaagatgaagctgggactgcagccatcaagacagttgaacttgatgccatccttgggggtcgtgcaattcaacatagggaactccaaggttacgaatctgacaaattcttgtcatacttcaagccttgcattatacctttggagggtggttttgcctctgggttcaaaaagcctgaagaggaaaagtttgaaacacggttgtatatatgcagagggaagagagctattcgggttaaagaggttcccttcgcccggtcgtcattaaaccatgatgatgtgtttgtcttagatactgaaaataagatataccagtttaatggtgctaactccaatatccaagaaagggccaaagcgttggaagtaatacaacatttaaaggagaaataccatgggggtgtttgcgatgttgccatcgttgatgatgggaaactacaagcagagtcagactctggtgaattctgggtcctttttggaggttttgcaccaattgggaaaaaaactgtgagtgatgatgatgttgtacttgaaactacagcaccaaaactgtacagtatcaatgatggccaattgaagctggaagaaacagctcttacaaaagctgtgcttgaaaataccaaatgtttcttacttgactgtggggctgaaatatatgtatgggttggacgggtaacacaaatggaggatagaaaatctgccactaaagcagttgatgaattcctcattaatcaaaagcgtccaaagacaacgagggtaactcaagtgattcaaggttatgagagtcatgctttcaagtccaagtttgaatcgtggccagtgggtaatgctgctgggaaccctggcacagaggaagggcggggaaaagttgccgctttattgaagcaacaacgcgttgatcccaagggagctgcaaaaagcaccactccagtaaatgaggaagttcctcctttgcttgatggcggtgggaagcttgaggtatggtgcgttgatgggaacactaagactgccctgccaaaagaggacattggaaagttttacagtggagactgttatatcattctctatacacatcattcgggcgacaagaaagaagagtactatctcagctactggattgggaaggatagcttggtggacgatcaagtgtcggcatctcaaataatcaatacaatgtggaattcattgaaaggacggccagttctgggccgtatataccaagggaaggagccaccacaatttgttgctcttttccagcccatggttatcttgaagggtggaatcggatctggatacaagaagctcatagaagaaaaaggtgctatgggtgagacttatactactgaaggcatagctctaattcgagtatctgagacatctatctacaacaacaagactcttcaagtagatgcggtagcaacgtctttaagctcaacggagtctttcgtactgcaatctggaaatgctatgtttacatggtttggcaattctagcacatatgagcaacagcagtgggcagcaaaagttgctgaatttttgaagcctggcgttgcagtgaagcactgcaaggaggggacagagagttctgctttctggtttgctcttggagggaaacagagttatacaaataaaaacactcctcaggatattattactagagagcctcacttgtatgcattctcattcaagaacggtcagttgctgttactgagatcttcaacttttctcaagatgatttgttaactgaagacatgatggtacttgacacacatggtgaagttttcatttggattggtcagtatgtggaatcaaaagagaaacagaaggcatttgacattggccagaaatacgtggagcatgcaaattctattgaagatctttctccacatgtaccactatataaagtcatggaagggaatgagccatgcttcttcaagacgtacttttcttgggataacacaaaatctttggttcatggaaattccttccagaagaaactctcgctgctttttggattgcgttctgagggtgcacctaggagctctggtaatggtgggccaactcagagggcatctgcattagcagctctatcatccgcattcaatccatcatctcaacaaaggctgtctaatgagaggcctaaaagcacaggcgatggacccacgcaacgtgcctcagcactggctgccttatctaatgcattcaacccatccttaaaacccaaaacatcacctccatctcgctcaggtcgaggttctcaaagagcagctgctgtagctgctctatcctctgtgctgactgctgagcaatctggatcttcagaatttctacgatccaaagctagcaacacagcatataagactgatgtcgaccggattgtcataactccagctggcccatcaggcccatcttctcctcagtctgaagctggggagtccaatgtgtttcaccaggaaaaagatgctgcagcagatggggcaccgcctgacactgatggagcagtggctgaggccggagaggaagaaacaacggaaaatgttggtgaagcgacatttagctatgaccgcttgatatccaaatccaccgatccagttcgtgggatagattacaaacgcagagaggcatacttatcagatagtgaattccaaactgtttttggcatgaccaaggatgcattctaccgacagccaaattggaagcaagaactacagaagcgaaaagcagatcttttctaaagagaacaagccttgttaccagtggtctgctacagtatgcaatcctcttgtcgtgaatggtcggtcccatgagagttggtgtattaatatattgttggtcgtttctgaggacggtctactggtggctttgcacggttgtttcttttttggcaaccaattttataggtcaattcttttatttgtatatggcctgggttgtgctgcttgcgaggtcctaagatgcttctttgttcttctttgtgaatgtccatatgtgtatatcattttctactcgccagtttgttacgtacgggcatttcctggcaggttcgtcattgcattgtcatctatatgtcttgcacacgaaatatttgtgctgtccgttttgctgttaatggttggcagttgtttgggatttgaacacttggctgaattccatcattttcgtgtggctgttggcgcatgcttgtcatttctaaatagaaaattagatttgtctagtgtctggatcagcagttgtagaaagtggaattagaccagattatgctcattgttatctcatgttttttatcacaaacaaacacgatcattctactggtaagcggttatttcatgtaccgcctggagccctggacacggcattcctgcccaccggcagtccggcatcagctcgagcacgtgcaagtgcgaggagacggccgggccaaaggccggggcggcggcgcgggaaccaggcggaggcggcagtactcatagcagaaccatacgaaaaagaagaaaaatccttcggattgtaatagaattttggattggggtttaaagtcgggtctataatacactatagtttagttt

SEQ ID NO: 115691 - DNA, 1211 bp, Zea Mays
ggttattttcttgttataatctgcatcctgcatactttgcacaggttcatggaaattccttccagaagaaactctcgctgctttttggattgcgttctgagggtgcacctaggagctctggtaatggtgggccaactcagagggcatctgcattagcagctctatcatccgcattcaatccatcatctcaacaaaggctgtctaatgagaggcctaaaagcacaggcgatggacccacgcaacgtgcctcagcactggctgccttatctaatgcattcaacccatccttaaaacccaaaacatcacctccatctcgctcaggtcgaggttctcaaagagcagctgctgtagctgctctatcctctgtgctgactgctgagcaatctggatcttcagaatttctacgatccaaagctagcaacacagcatataagactgatgtcgaccggattgtcataactccagctggcccatcaggcccatcttctcctcagtctgaagctggggagtccaatgtgtttcaccaggaaaaagatgctgcagcagatggggcaccgcctgacactgatggagcagtggctgaggccggagaggaagaaacaacggaaaatgttggtgaagcgacatttagctatgaccgcttgatatccaaatccaccgatccagttcgtgggatagattacaaacgcagagaggcatacttatcagatagtgaattccaaactgtttttggcatgaccaaggatgcattctaccgacagccaaattggaagcaagaactacagaagcgaaaagcagatcttttctaaagagaacaagccttgttaccagtggtctgctacagtatgcaatcctcttgtcgtgaatggtcggtcccatgagagttggtgtattaatatattgttggtcgtttctgaggacggtctactggtggctttgcacggttgtttcttttttggcaaccaattttataggtcaattcttttatttgtatatggcctgggttgtgctgcttgcgaggtcctaagatgcttctttgttcttctttgtgaatgtccatatgtgtatatcattttctactcgccagtttgttacgtacgggcatttcctggcaggttcgtcattgcattgtcatctatatgtcttgcacacgaaatatttgtgctgtccgttttgctgttaatggttggcagttgtttgggatttgaaca

SEQ ID NO: 115692 - DNA, 3725 bp, Zea Mays
cctcctccctctctcccccgtgtccgtccgccctccgcctgtggcctcgcctccccgcattccgctcgcccctccctgatacggtgataccgcgatcagcggggcgccccgcgcccgcctcttctctctctctcgcgcgcgcgagagtagcagatccggcgattcgcattccgctcgcccctccctgatacggtgataccgcgatcggcggggcgcccgcgcccgcctcttctctctctcgcgcgcgagagcagcagatccggcgatccgcaggccctccgccggcgccccgcctgcccgacgatctagatccaggggaagcatctgctatcattttgttttcctcaaagtaatccaaggaaagttgtttccagatgtcaactgcaaaagtgttagatcctgcttttcaaggggctggccagaaagttgggacagaaatatggcggattgaagattttaagccagttgcactgccaaaatctgattatggtaaattctactgtggagattcatacatagttctgcagacgacctgtactaaaggtggtgcctatctatacgatatccacttctggattgggaaagattcgagtcaagatgaagctgggactgcagccatcaagacagttgaacttgatgccatccttgggggtcgtgcaattcaacatagggaactccaaggttacgaatctgacaaattcttgtcatacttcaagccttgcattatacctttggagggtggttttgcctctgggttcaaaaagcctgaagaggaaaagtttgaaacacggttgtatatatgcagagggaagagagctattcgggttaaagaggttcccttcgcccggtcgtcattaaaccatgatgatgtgtttgtcttagatactgaaaataagatataccagtttaatggtgctaactccaatatccaagaaagggccaaagcgttggaagtaatacaacatttaaaggagaaataccatgggggtgtttgcgatgttgccatcgttgatgatgggaaactacaagcagagtcagactctggtgaattctgggtcctttttggaggttttgcaccaattgggaaaaaaactgtgagtgatgatgatgttgtacttgaaactacagcaccaaaactgtacagtatcaatgatggccaattgaagctggaagaaacagctcttacaaaagctgtgcttgaaaataccaaatgtttcttacttgactgtggggctgaaatatatgtatgggttggacgggtaacacaaatggaggatagaaaatctgccactaaagcagttgatgaattcctcattaatcaaaagcgtccaaagacaacgagggtaactcaagtgattcaaggttatgagagtcatgctttcaagtccaagtttgaatcgtggccagtgggtaatgctgctgggaaccctggcacagaggaagggcggggaaaagttgccgctttattgaagcaacaacgcgttgatcccaagggagctgcaaaaagcaccactccagtaaatgaggaagttcctcctttgcttgatggcggtgggaagcttgaggtatggtgcgttgatgggaacactaagactgccctgccaaaagaggacattggaaagttttacagtggagactgttatatcattctctatacacatcattcgggcgacaagaaagaagagtactatctcagctactggattgggaaggatagcttggtggacgatcaagtgtcggcatctcaaataatcaatacaatgtggaattcattgaaaggacggccagttctgggccgtatataccaagggaaggagccaccacaatttgttgctcttttccagcccatggttatcttgaagggtggaatcggatctggatacaagaagctcatagaagaaaaaggtgctatgggtgagacttatactactgaaggcatagctctaattcgagtatctgagacatctatctacaacaacaagactcttcaagtagatgcggtagcaacgtctttaagctcaacggagtctttcgtactgcaatctggaaatgctatgtttacatggtttggcaattctagcacatatgagcaacagcagtgggcagcaaaagttgctgaatttttgaagcctggcgttgcagtgaagcactgcaaggaggggacagagagttctgctttctggtttgctcttggagggaaacagagttatacaaataaaaacactcctcaggatattattactagagagcctcacttgtatgcattctcattcaagaacgggagactggaggttactgagatcttcaacttttctcaagatgatttgttaactgaagacatgatggtacttgacacacatggtgaagttttcatttggattggtcagtatgtggaatcaaaagagaaacagaaggcatttgacattggccagaaatacgtggagcatgcaaattctattgaagatctttctccacatgtaccactatataaagtcatggaagggaatgagccatgcttcttcaagacgtacttttcttgggataacacaaaatctttggttcatggaaattccttccagaagaaactctcgctgctttttggattgcgttctgagggtgcacctaggagctctggtaatggtgggccaactcagagggcatctgcattagcagctctatcatccgcattcaatccatcatctcaacaaaggctgtctaatgagaggcctaaaagcacaggcgatggacccacgcaacgtgcctcagcactggctgccttatctaatgcattcaacccatccttaaaacccaaaacatcacctccatctcgctcaggtcgaggttctcaaagagcagctgctgtagctgctctatcctctgtgctgactgctgagcaatctggatcttcagaatttctacgatccaaagctagcaacacagcatataagactgatgtcgaccggattgtcataactccagctggcccatcaggcccatcttctcctcagtctgaagctggggagtccaatgtgtttcaccaggaaaaagatgctgcagcagatggggcaccgcctgacactgatggagcagtggctgaggccggagaggaagaaacaacggaaaatgttggtgaagcgacatttagctatgaccgcttgatatccaaatccaccgatccagttcgtgggatagattacaaacgcagagaggcatacttatcagatagtgaattccaaactgtttttggcatgaccaaggatgcattctaccgacagccaaattggaagcaagaactacagaagcgaaaagcagatcttttctaaagagaacaagccttgttaccagtggtctgctacagtatgcaatcctcttgtcgtgaatggtcggtcccatgagagttggtgtattaatatattgttggtcgtttctgaggacggtctactggtggctttgcacggttgtttcttttttggcaaccaattttataggtcaattcttttatttgtatatggcctgggttgtgctgcttgcgaggtcctaagatgcttctttgttcttctttgtgaatgtccatatgtgtatatcattttctactcgccagtttgttacgtacgggcatttcctggcaggttcgtcattgcattgtcatctatatgtcttgcacacgaaatatttgtgctgtccgttttgctgttaatggttggcagttgtttgggatttgaaca

SEQ ID NO: 115693 - DNA, 763 bp, Zea Mays
cctcctccctctctcccccgtgtccgtccgccctccgcctgtggcctcgcctccccgcattccgctcgcccctccctgatacggtgataccgcgatcagcggggcgccccgcgcccgcctcttctctctctctcgcgcgcgcgagagtagcagatccggcgattcgcattccgctcgcccctccctgatacggtgataccgcgatcggcggggcgcccgcgcccgcctcttctctctctcgcgcgcgagagcagcagatccggcgatccgcaggccctccgccggcgccccgcctgcccgacgatctagatccaggtatttggtatgttctctctccctccttctcatctcaattgcgcagctcccgcaggtgtcctcgcggtgatagatccgtccgtccgcccgctccgcggtctggctgtgtttctcctttcgctggttagttcgttggcatagctcccgcggacgaattgcttctccagacgactcgtttgtttcctgtgagcgccggaatgaaatccaatccaatccgttctggattcacccattttgctgccgatttgtttaccgcccggtggaatgctgcgaccgctttggcactctccatttttgttctggagtctcttaatctcaagctcaacacaaccataagctgtccgtcgtgtcttcgttgctggaagacaattctcatgattgggctgccgcgagcacccagtttgcgtgttaagcatcaacatctgactgtggcaattaccgtgagcaa

SEQ ID NO: 115694 - DNA, 113 bp, Zea Mays
ccgcgaccgtacccgcggatagaaatttatatccatgcccgtgcccatcgaatttcggtcgggtttcggatatccgtcggatatgacagacacaatcatttattcaacagttc

SEQ ID NO: 115695 - DNA, 2734 bp, Zea Mays
atgacttgggttgagataccgagagctgaaaagaaaccactgcccactgatgactgtatacagatcggctggttcccgaaggactgtatgcagatcggacagcggctggggtaccggcgtgcacgaaggactgtatgcagatcggacagcggctggggtaccggcgtgcagatcggctggttcaagaaggtgctcgagaaacagagtcgagaaagcagggctcccagctgccgcgccggaactgatggccgcccggggaggaagaagcgagggcgaagagcagggagaggagtggatgacggatgggtagactccgtgacgctatccaaacgattttgtaggctcggatacaggttcggatcactctggatccatgccgtgctgcaaaccaaacacgctattgctgagaagcacaactttttgatcttcgaagaccgcaagtttgctgacattgggaatacagtaaccatgcaatatgaaggtggaatattccgcatattggactgggctgatattgttaatgcgcatatagttcctggacctggaatcgtagatggcttgaagttgaagctaatgaatcatggtactcacaccaactgtcgtgttctggccttgaagggttcgcctaaaggaagagggctacttctgctcgctgagatgagctctgccggcaatcttgctcatggagattacactgctgctgctgtaaagatcgctgagcaacattctgactttgtgatgggatttatatcagttaatcccgcatcttggtcagtaacaccatcaagcccggcgtttatccatgccacacctggagttcagatggccgctggaggagatgatcttgggcaacaatacaacaatcctgagtctgtgataaattacaggggcagtgacataatcatagttgggcgcgggattataaaggcgagcgatcctttgaagacggcatgtgagtaccggagaaaaatgtcgagtcaagaacttttctcccccgttcgcgcagcacagtcggccactacacacacgccgcccaccaacaccatggacgccgccgcgaaggaggcgctgatcctggacctgcacgcggtggaggccgtgaagctgggcaccttcgtgctcaagtccgggatcacctccccgatctacctggacctgcgcgtgctcgtctcccacccgcgcctgctcgcctccgtcgcgtccctcctcggcgcgctcccggccacgcgcccctacgaccttctctgcggcgtgccctacacagcgctgcccttcgcggccgcgctctccgtcgccgcctccgtgcccatgctgctcagccgctacgacaccaagcgcgtcgagggcgccttccgcgccgcccagaccgtgctcatcgtcgaggacctcgttaccagcggcgcctccgtgctcgagaccgtcgccccgctccgcgccgaggggctcgtggtcgccgacgccgtcgtcgtcatcgaccgcgagcaaggtgggcgcgagaacctcgccgctagcggggtcgcgctgcactcgctcatgaccctcacggagatgctcgccgtgctggcgaggcacgggaaggtcggcgaggagaagatcgcggaggtcaggcggttcctccaagccaacaggaaggtggcggtgcccggggtgcctgctgggccacccaagccgtcggctactgctcggaggaagtcgtttgcggagagggcggggttggccacgaaccccatggggaggaggttgttcgaggtgatggaggcgaagcagagcaacttgtgtgtcgcggctgatgttgggacagccaaggagctacttgagcttgctgacaaggttggtccagagatttgtatgctgaaaacacatgttgatatcttgtctgattttacaccagattttggggccaaccttcgcacaattgctgggaagcacaactttctgatctttgaagaccgcaagtttgctgacattgggaacacagtaactatgcaatctgaaggaggtatattccgcatcttagactgggcggatattattaatgcgcatatagttcctggacctgggattgtagatggcttgaagctcaagggtttgcctaaaggaaggggcctacttttgcttgctgaaatgagctcagctggcaaccttgcttatggagactacactgctgcggctgtaaagattgccgagcaacatcctgactttgtaataggatttatatcagtgaatcctgcatcttggtcaccagcaccgtcaagcccagcatttatccatgccactcctggggttcagatagctgctggaggagatgcccttgggcaacaatataacactcccttttctgtcatcaacgacagaggtagtgatataattatagtcggacgagggattataaaggccagtaaccctgtagagaccgcgagacagtatcgcatggaggggtggcaggcgtatcaatccggcttttcttgaggatgtttaagcaactcgccaaacgtagccggaggacattcgggcgagtgttgatgtgataagagtgcgccccatctatgatctatgtatgcaactgcgttctttcacttttacctgcccatcattgccacgcagtgattttcagtaatggttctgactgtacccccggatgctataatttgcaataaggtaacgccaaatcttagctgaactttcagtatgtatgtctctcattggcaagcagtgatagtattacctgttttga

SEQ ID NO: 115696 - DNA, 2651 bp, Zea Mays
atgacttgggttgagataccgagagctgaaaagaaaccactgcccactgatgactgtatacagatcggctggttcccgaaggactgtatgcagatcggacagcggctggggtaccggcgtgcacgaaggactgtatgcagatcggacagcggctggggtaccggcgtgcagatcggctggttcaagaaggtgctcgagaaacagagtcgagaaagcagggctcccagctgccgcgccggaactgatggccgcccggggaggaagaagcgagggcgaagagcagggagaggagtggatgacggatgggtagactccgtgacgctatccaaacgattttgtaggctcggatacaggttcggatcactctggatccatgccgtgctgcaaaccaaacacgctattgctgagaagcacaactttttgatcttcgaagaccgcaagtttgctgacattgggaatacagtaaccatgcaatatgaaggtggaatattccgcatattggactgggctgatattgttaatgcgcatatagttcctggacctggaatcgtagatggcttgaagttgaagctaatgaatcatggtactcacaccaactgtcgtgttctggccttgaagggttcgcctaaaggaagagggctacttctgctcgctgagatgagctctgccggcaatcttgctcatggagattacactgctgctgctgtaaagatcgctgagcaacattctgactttgtgatgggatttatatcagttaatcccgcatcttggtcagtaacaccatcaagcccggcgtttatccatgccacacctggagttcagatggccgctggaggagatgatcttgggcaacaatacaacaatcctgagtctgtgataaattacaggggcagtgacataatcatagttgggcgcgggattataaaggcgagcgatcctttgaagacggcatgtgagtaccggagaaaaatgtcgagtcaagaacttttctcccccgttcgcgcagcacagtcggccactacacacacgccgcccaccaacaccatggacgccgccgcgaaggaggcgctgatcctggacctgcacgcggtggaggccgtgaagctgggcaccttcgtgctcaagtccgggatcacctccccgatctacctggacctgcgcgtgctcgtctcccacccgcgcctgctcgcctccgtcgcgtccctcctcggcgcgctcccggccacgcgcccctacgaccttctctgcggcgtgccctacacagcgctgcccttcgcggccgcgctctccgtcgccgcctccgtgcccatgctgctcagccgctacgacaccaagcgcgtcgagggcgccttccgcgccgcccagaccgtgctcatcgtcgaggacctcgttaccagcggcgcctccgtgctcgagaccgtcgccccgctccgcgccgaggggctcgtggtcgccgacgccgtcgtcgtcatcgaccgcgagcaaggtgggcgcgagaacctcgccgctagcggggtcgcgctgcactcgctcatgaccctcacggagatgctcgccgtgctggcgaggcacgggaaggtcggcgaggagaagatcgcggaggtcaggcggttcctccaagccaacaggaaggtggcggtgcccggggtgcctgctgggccacccaagccgtcggctactgctcggaggaagtcgtttgcggagagggcggggttggccacgaaccccatggggaggaggttgttcgaggtgatggaggcgaagcagagcaacttgtgtgtcgcggctgatgttgggacagccaaggagctacttgagcttgctgacaaggttggtccagagatttgtatgctgaaaacacatgttgatatcttgtctgattttacaccagattttggggccaaccttcgcacaattgctgggaagcacaactttctgatctttgaagaccgcaagtttgctgacattgggaacacagtaactatgcaatctgaaggaggtatattccgcatcttagactgggcggatattattaatgcgcatatagttcctggacctgggattgtagatggcttgaagctcaagggtttgcctaaaggaaggggcctacttttgcttgctgaaatgagctcagctggcaaccttgcttatggagactacactgctgcggctgtaaagattgccgagcaacatcctgactttgtaataggatttatatcagtgaatcctgcatcttggtcaccagcaccgtcaagcccagcatttatccatgccactcctggggttcagatagctgctggaggagatgcccttgggcaacaatataacactcccttttctgtgagtgtgcttttgccatttgattctcgcgtgactgctcactgctgtggtgtttatttttaatccttcaaagttgctatgtatcttggaagttggtaggttaggttacttataccttatacactggtgccagttctcgaaaacttggtattagtttgatagcatgaaagtacatttagataattgttggctataagcattataatatcaagttttcaagactaagttgtgtttagtggttggttttgaagactaagttgtgtggtgtcgtttactgtgacatgatagatgttgttatgtcttttctttta

SEQ ID NO: 115697 - DNA, 804 bp, Zea Mays
atggccatggacgccgcagcgctggagtcgctcatcctggacctccacgccatcgaggcagtgaagctgggctccttcgtgctcaagtccggcatcacctctcccatctatctggacctccgcgcgcttgtctcccacccgcgcctgctctccgccgcctacacggcgctccccatcgccgccgtcctctccgtcgaccgctccgtccccatgctcatgcgccgcaaggaggccaaggcccacggcaccgccaagtccatcgagggctccttccgccccggggacaccgtcctcatcatcgaggacctcgtcaccagcggcgcctccgtgctcgaaactgccgccccgctccgcgcagagggcctccttgtcgccgacgccgtcgtagtcgtcgaccgcgagcagggcgggagggagaacctcgccgctaacgggatcactctgcactcgctcatgaccctcaccgaggtgcttgccgtgctgctcaagcatgggaaggtgaccgaggagaaggcacatgaggtgaggcagttcctcgacgccaacaggaaggtggccgtgccgggggcggcgcctgttaaacccagggtgctcaggaagccattttcggagagggcgaaacttgccaacaaccctatggggaagaagctcttcgagctgatggaggccaagcagaccaacctgtgtgtcgctgctgatgtcgggaccgcaaaggaactccttgagctggctgacaaggtaggagcgtatgactttattactagctttggacttctgatgttggttggtagagggcttatgtaa

SEQ ID NO: 115698 - DNA, 372 bp, Zea Mays
ctagcctccacccgcatgccaaaatcagcctgctctagcctccacgcacgtttgcttgactgctccggtggctcttcagtgcttgacgccttgacctttctctcccaatctctcctgtagtcccgtagtaccatggcagggaggcctgaggcctgacacaactccagtggtgcttgtctgctccgcacaataaggtattaagagttaggaacagatcaataaccatggtttcaagaaacacaaggtcgtcaagaaataaccagaactcaacgccatctgagacaaatggtagcgccaatatgattgaaagtgagactattgctgctggtgctgagactaacacagattctccaaatggaagaacttcagcca

SEQ ID NO: 115699 - DNA, 1628 bp, Zea Mays
agatcagatgagctcgtgcacagggtcctcggccgcagaagatacggcgaacgcattcaaaatccatctccttccaaaagcgtcgagtcgagccgatccaccttcccgaacaacgccgcccgccgcccttcgaatccgaaggaagccgcaacaacgaccccatccgaatctctcgcaacgatcaccaccgccaacttatcttcctcgttcgggtcgcccccaccctcgcccgccgtccagcagcgaaaccttcacccttcctcgtcccgccaccccccgcacgccatggtgcagaggaagcccgcgcgcaagcgcaaggagcccaaatgccccgacgccgtgccggcctggggcggcggccgtggcccgggaagcagggctggcgatggcggcatagccccggcgcaactccccaactacatgagggcgacgagctgctccggcgccaaggccggcgccgcacaagcccactccgcgccgcagccggggagggcgagcgtggcgcgggcggctgccgcggcgccgcgggcgggcagggccacgtgctcctccgccatgaaggggcccggggcgcgcgcgtgcccgtacgcgttctgctccgtcaagggccacgcccacgcgccgcccctgcgcagcttcgtggcggcgcggaggcgggggcagcagagcatgaagctcaagggcgcctcgccgttccgcaagcccacggtgggttgggacgcgagccgcggcgacgtctccgcggagggcctgggcgcggcttccgtgggcggttcgtgcgcgtccagcggcgtggtctcggttgagcggtcgacgacgaccaggcatcgcgggcgtgaagagaagaaggccttggtggtggaggtggcggatcatgaatgcgacgacgacttgggcgccggcgagtctgacatctccgaggagctgggtgcgaaccatggaggaaacagtactgaaggtggcatatcgtcggtcgacagcatttccagctcgctcagtgggataagctaccaagacgttagctctgcctgtgcctacggagcatcctctcatcatcaccatcagaggaggaggacatccgaagaaaagggtgcccagcaactgcgtccttccaaacccggtccaaaggcggagaaggtcggtctcagacatgaggcggtggacggtcggagggccgctgaggagtggatggtcgactacgctctccggaaggaagtcaagaggctggctcgtgctcagaagaggaaagttgagatgcttgtccaggccttcgaatctgttctgcccacggtagcaatagcaagcgagaagaagcccgggcaacacgatggccttcgaaagcatgcatgtagctgacagatagatagatagaatcatagatagccgacactcatcttgagtcaggtagtagtaggacgtgacaatttgagtcaggtagatgaaacgtttcaattcagtcaaacactagtcacaacggatacaaggtttgatgctccaccaaccactgatccgttgtgaacttgtagtagaagcaggccaccgctggcaatgtggcatgccatgccatcaacctaacatggaccattctgaatgtcggctcaaaacgtggcaaaatactatacttccac

SEQ ID NO: 115700 - DNA, 110 bp, Zea Mays
ctgtgtttgttttaaaaaaagaattttatgtttgccatagctctaggggtgtagtggaaattgcagtcaatgttacagagtcatcctgacatttgttatctgtgttattg

SEQ ID NO: 115701 - DNA, 1287 bp, Zea Mays
ctatgctgaggtcattgcttatggcacgcatcgatggttgccgatgacttctcctatagtattatattatcttcctgatctgatcatgtggccataaatagcaagggccttagattgttcggccagggatagcataacaccgccgaggaagcagcaagcagcaaggtcgacatgtcgtctccgccgccggtgaagctgatcggcttcttcggcagcccgtacgcgttccgcgcggaggcggcgctgtgcctgaaaggcgtgccgtacgagctgatcctggaggacctgttcggcagcaagagcgagctcctgctccaccacaaccccgtgcacaagaaggtgcccgtgctcctccacggcgacggccgggccatctccgagtccctcgtcatcgccgagtacgtcgacgaggccttcgacgggccgccgctgctccccgccgacccctacgcgcgcgccgcggcccgcttctgggccgacttcatcgagaccaggctcaccaagcccttcttcatggcgatctgggtggaggagcgcgaagcgcgcctgcggttcgaggaggaggccaaggagctcgtggcgctgctggaggcgcagctcgagggaaagaggttcttcgccggcgacaggccggggtacctcgacgtggccgcgtccgcgctcgggccctggcgcagcgtcatcgaggagctcaacggtgtggcgctgctcagcgaggatgaccaccccaacctgtgccggtggaccagggactactgcgccttcgaggctctcaagccgtgcatgccggatcgggagaagctcctcgcctacttcactaagaacttcgacaggtacaaggcggccgtcaatgcgacgctatcgcagtcgcagcagtaataactgcccaactgggtacgcctctgcccggccgtatggcgggcgtttctttttttctttcttcagaataacgtagctgtgcccagtactcatgttttcaattctgcaaagtgcaaaccaacaagtcgctgtgtggtttactctttttacatatactcctacgagactagcggacaggtcaaagactttatctatttgtgtaatcgggactaaaatttgatagtgattgacttagaacaaatctaaaatgactaagccacgtggaacgaagaagtacgtgaggattccaatcgaaccgaacacatatcaaataaaacattcacaccactactagagaaaaacgatctttataagcatcggcctatttcttttacacgtgccacttataaagataaaaatcaaactcct

SEQ ID NO: 115702 - DNA, 467 bp, Zea Mays
acttaaaaatgcttgattttttctatttaggtttttagggagaatatggagatagaagtctcgcatgcattgttaactaattggtctcgcatgcattattaacgaattagagatatttacttttaccagcatttgtgttgtgatagctatttttagcctaatgtttcaggtcaaagggccatacttcatagctatttccccctcaatgtttcaagttaaatggcctaagagtattggagcgctctatgttacctgctaggcgccaactattcaaaatttactctagggtagtagataatttttcttgtcgagttttattttggtatatgtaactttgtaattgggcctaagcgtattggagcactctaagttaacaggtgcttgaagttgatgatgaaattatacagcttggatgaataaacttttgttgtagtgacataaggagttccgaaactgcaaggaatttt

SEQ ID NO: 115703 - DNA, 234 bp, Zea Mays
catttctttatatacttatttaagctctttgcattatgtagatgggactctggcagcacagttggtgaatttgatgggcactcaaagagggttctaagctgtgacttcaagccaacacgtccatttaccattgtgataggtggtgaagatattctagctaacttttatgaaggaccaccatctaaattcaagcattcgataagatcagtagtcattgctggttttctgacctag

SEQ ID NO: 115704 - DNA, 267 bp, Zea Mays
ctaaagagatatattcgatgcttcttgaacgcacaacacagcagcgttgggtctgataaaggttccttgctatcattgacattgacaaatactgaaggaatttttctaaccttcttgttgcctttctctccttggtatagtgcaattctcacaaaccactcattgttctctaccttccccaggatacgggaaaccttatttgtgtgcaaattcacaatctacacatgtatgacaaagctaataagtcttacagaaaagattcaataa

SEQ ID NO: 115705 - DNA, 847 bp, Zea Mays
tcctataaatgggaatggttcagcaagcttctccaagaaaagcagcaagcagcagcagcagcaacactgcaacagcaagcaggcagagcccagaaccaggcagctagcagaaacatgtctccgcctgttaagatcatcggccatttcaccagcccattctcgcaccgcgtcgaggccgctctgcggctcaagggcgtgccgtacgagctggtccaggaagacctgagcaacaagagcgagctgctgctcgccaaaaaccctgtccacaagaaggtgcccgtgctcctccatggcgatcgcgccatctgcgagtccctcgccatcgtccagtacgtcgacgaggccttcgacgggccgcctctcctccccgccgaccctcatgaccgtgccgtggcccgtttctgggcagacttcatggacaagctcgtcgtgccgttctggatggcacactgggccgagggcgaggcgcagaaggctctggtggaggaggccaagcagaagctggcgcttctggaggtacagctccaagggaagaggttctttggcggcgacaccctcggctacgtcgacatcgccgccggtgtgttgggtccttggctcagcatggtggaggaggtgaccggagtggctgtgcttgacgaagacgagtaccctgctctgcgtcgttggtccgaggagtacaattcctacgaagctctgaggcagtgcgtcccggacagagaccagctcgtcgccttctatactgaaaacaaggacaagtacaaaatgttcgctaaagcatggttgaagcagtaattaactgtgggtgctacaaattgctagaacatgtctttgtgtgtgggataat

SEQ ID NO: 115706 - DNA, 1071 bp, Zea Mays
ccacgactgtaggttgtaggtttgcattcaacgattctgtgggttgaagcagctaagcaacttcttctgctgaatccaccacacagtcgtcgaaagaaaggagcagaaacgagaaaacgctgaccatagtttcttgcagaggaagcagtgcgcctgccttcaatctaactacatatcctatagacgatataaataataatggtctaggcgtctagcaagcaggaagccacaaccaaacagcagaagaaacatgtcttcttcacctgttaagatcatcggccattcggtaagcccattctcgcaccgcgtcgaggccgctctgcggctcaagggcgtgccgtatgagctgatccaggaagacctgagcaacaagagcgagctgctgctcgccaaaaaccctgtccacaagaaggtgcccgtgctcctccatgccgatcgtgccatctgtgagtccctcgtcatcgtcgagtacgtcgacgagaccttcgacgggccgtccctcctcccggccgacccccacgaccgtgccacggcccgtttctgggcagacttcatggacaggaagctcctgaagccgttctggctggcgcactggacagagggcgacgcgcagaaggctcaggtggaagaggccaagcagaagctggcgctcatggaggcgcagctcgacgggaggaggttcttcgggggcgacaccgtcggctacgtcgacatcgcagcctgcgtgctagctccttggctcagcgtcgtagaggaggtgactggagtggccgtggttgacgaaggtgagttccctgctctgcgccgttggtccagagagtacagctcctgcgaagctctcaagcagtgcgtcccggacagggaccagctcgtcgccttctatactgaaaggaaggaggcgtacaaagtgttcgctaatgcatggttgcagcagtagtttggttttgtgtgtggaataataatgtatggatcacagattgtctgtgctgaaataacagtaatgagcctagctagataagtaaataaccatatgcatgtctcagaaaagtttagatgagttgaccatcgaaa

SEQ ID NO: 115707 - DNA, 95 bp, Zea Mays
gaataattcagtggttgtgcacgatataactttctcgcttatttacataatgtacctttcctatctccatcgatttgttgaatactttctttctt

SEQ ID NO: 115708 - DNA, 474 bp, Zea Mays
gctgtggctggcgctgtggacggagggggaggcgcaggaggcggccatgaagctggcgagggagaacctggcgctcctggaggagcagctgcagctcaatgggaagaagaagaacaacaggttcttgggaggcgattccatcggtctcgcggacatcgccggcgcaggcgtgctggcacactggctcggcgtgctggaggaggtcgccggagtgagcgtcgttggcggtgatggggagtaccctgctgtccgccgctgggggagggagtacctcgccgacgaagccgtcagggcgtgccagccgtcagggaccagctcctggcccacttctacgccatgaggaacaagtgcatctgggtagcaaagtccatgttgccgaattgatcgagttggtcagctgactacatcgttttgtaatgcagtatttgttgaccgtactgtgttgtttgtcgtatgagaaataaatcagtgttt

SEQ ID NO: 115709 - DNA, 1004 bp, Zea Mays
acatctctctgatcgatcttgggctctcctataaatatataggaacgtacgtaaagtttctccaagcagatagcagcaagctaagcaagtgccaaccaacgagtagcaggaaacatgtctccgcccgtcaagatcctcggccactacgcgagcccgtactcgcaccgcgtcgaggccgctctgcggctcaagggcgtgccgtacgagctggtccaggaagacctgggcaacaagagcgagctgctgctcgccaagaaccctgtccacaagaaggtgcccgtgctcctccatggcgacagggccgtctgcgagtccctcctcatcgtcgagtacgtcgacgaggccttcgacgggccgtccatcctgccggccgacccccacgaccgtgccgtcgcccgtttctgggcgaacttcttggacaccaagttctcccagccgttctggctggcgtactgggcggagggcgaggcgcagaaggccgtggtgaaggaggccaaggagaacctggcgctcctggaggcgcagctcggcgggaagagcttcttcggcggcgacacgcccgggtacctcgacatagccgcgtgcgcgttgggtccttggatcggcgtgctcgaggaggtgactggagtggccttgctggacgccgacgagttccccgctctatgccagtgggccagggactacagctccagtgaagcgctcaggccatgcctgccggacagggaccgactcgttgcctacttcaccgagaacaaggagaagtacaagacatttgccaaggcaacgttgcatcagtagctgctagttgggtgcaaaccgcttgtttatctctgtgtggaataatgtatacgtacgtgctccctcgatatcaaataaatcagctaccggagttgactgtagtcaaattgctataagtatagacttataggtttacaagaaaagcattgatatttatggcaccagaataatatcatgagcttagatacattatataatacttcccc

SEQ ID NO: 115710 - DNA, 955 bp, Zea Mays
aatatataggaacgtacgtaaagtttctccaagcagatagcagcaagctaagcaagtgccaaccaacgagtagcaggaaacatgtctccgcccgtcaagatcctcggccactacgcgagcccgtactcgcaccgcgtcgaggccgctctgcggctcaagggcgtgccgtacgagctggtccaggaagacctgggcaacaagagcgagctgctgctcgccaagaaccctgtccacaagaaggtgcccgtgctcctccatggcgacagggccgtctgcgagtccctcctcatcgtcgagtacgtcgacgaggccttcgacgggccgtccatcctgccggccgacccccacgaccgtgccgtcgcccgtttctgggcgaacttcttggacaccaagccgttctggctggcgtactgggcggagggcgaggcgcagaaggccgtggtgaaggaggccaaggagaacctggcgctcctggaggcgcagctcggcgggaagagcttcttcggcggcgacacgcccgggtacctcgacatagccgcgtgcgcgttgggtccttggatcggcgtgctcgaggaggtgactggagtggccttgctggacgccgacgagttccccgctctatgccagtgggccagggactacagctccagtgaagcgctcaggccatgcctgccggacagggaccgactcgttgcctacttcaccgagaacaaggagaagtacaagacatttgccaaggcaacgttgcatcagtagctgctagttgggtgcaaaccgcttgtttatctctgtgtggaataatgtatacgtacgtgctccctcgatatcaaataaatcagctaccggagttgactgtagtcaaattgctataagtatagacttataggtttacaagaaaagcattgatatttatggcaccagaataatatcatgagcttagatacattatataata

SEQ ID NO: 115711 - DNA, 931 bp, Zea Mays
acatctctctgatcgatcttgggctctcctataaatatataggaacgtacgtaaagtttctccaagcagatagcagcaagctaagcaagtgccaaccaacgagtagcaggaaacatgtctccgcccgtcaagatcctcggccactacgcgagcccgtactcgcaccgcgtcgaggccgctctgcggctcaagggcgtgccgtacgagctggtccaggaagacctgggcaacaagagcgagctgctgctcgccaagaaccctgtccacaagaaggtgcccgtgctcctccatggcgacagggccgtctgcgagtccctcctcatcgtcgagtacgtcgacgaggccttcgacgggccgtccatcctgccggccgacccccacgaccgtgccgtcgcccgtttctgggcgaacttcttggacaccaaggtacgtacgctgctgctgctggccacaggcccctcacccgttcttgtgatttcctgaacgttcttacaacctgcacgcagttctcccagccgttctggctggcgtactgggcggagggcgaggcgcagaaggccgtggtgaaggaggccaaggagaacctggcgctcctggaggcgcagctcggcgggaagagcttcttcggcggcgacacgcccgggtacctcgacatagccgcgtgcgcgttgggtccttggatcggcgtgctcgaggaggtgactggagtggccttgctggacgccgacgagttccccgctctatgccagtgggccagggactacagctccagtgaagcgctcaggccatgcctgccggacagggaccgactcgttgcctacttcaccgagaacaaggagaagtacaagacatttgccaaggcaacgttgcatcagtagctgctagttgggtgcaaaccgcttgtttatctctgtgtggaataatgtatacg

SEQ ID NO: 115712 - DNA, 1400 bp, Zea Mays
caactcgacgaacgcagaggtggccgaacaggcaccacaggccgcgcaacagcctcctccactccacaggcaatccgctggccggcggccactcgagcggggcaaggaaacggtccccgcgaaacgaaaaggtacagtcgcttggctaggacggagacggacggagaagtatataggccagccagggccaggcgggcagggagacgaagccgaaaaatcgcctgcacgacatcgaccacgaagcttccacgaagctgcccgtccccgcccgcaccgcacgcctttttatcacccacctcccgcctccccgtcctctccatccctcctcctgtcctccacccaagccaaagcccctcggatcggatccggtctcctccgtgtcccattcgccacgcagcggcgccacaggagacggagacggagatgaagctgtccatccagtcgctcgccaggaagctgtccctgccgtccccgaagcggggcggcggcggcatcgtcgaggacgggaagaagaagaagaagcgctcgctgtcgcgcggcgaggcgccgtcgttcgcgtcctcttcttcctcctcctcctcctcctccgccaccacgacgccgcggtccgtgctggcggcggcgccggcgccggcgctggagatcccgcggcgggagctggaggccgtgctgcggcgcctgggccacgcggagccgtccgacgccgagctcgacgccgtggccgcgctcgccgcgcagcccccgccgtgcgacgccgacgccgacgccgacggcgacctcatggaggcgttccgcgtgttcgacgcggacggcgacggccgcatcaccgccgaggagctccgcgccgtcctggacgccgtcctcggcggcgggtgcagcctcgacgactgccgccgcatgatcggcggcgtcgacgctgacggcgacggcttcgtcggcttccaggacttcgcgcgcatgatgatggccagcgccggcacggccgacgcacgggccttctagtttagtgatccgccaagcatcgccgccatagccctgatgcgcgccggggaagggatcatttaaaatctactgcggccgcgagagcaagacgaggccagccttttgtgtcccaaaaaaacagtgtcttttcggcgcgcaggatgataggctacccacctgcttgctagtaggactacttgctccaaattgttataaaaaaatgtttgcttgctgctaatccatgcacgattagtagtagaacgccccgccccgtgcatgcagcttgcaaaattcgttcgagagagtaatgtgcagtgaccggccggcatgcatgcatgcaaaattcgttctttcaatctgccgtatgggatgaattggatgtacgaatacgaatgattggagattcgagttcgtttgtg

SEQ ID NO: 115713 - DNA, 279 bp, Zea Mays
atatccaggaataaactgctcgtctcatcgaccgatggtggtgcccggcgtagtcatgggagagaagagcctcggaccgtggaggattagcaccgttgccgtctcggtcgctctagagaaaagcagcggacgtgtgcctccatattcatagccgccgtgcatggattacgagtgacgcgatggtctcacaactgggcaatttcttaccggaatttgagcgtggacgcattgccgctgcactgcatggcgagcgatttagcaacttcaaactctggtaag

SEQ ID NO: 115714 - DNA, 282 bp, Zea Mays
taatctatgacatggacgccggatggcactggcagagggatggtgtacggtgttgtccgaattgcctgtctggacagccagttatgttatgctgtttgaatgaaaaattagcttctttttcttcatctaaatgcgtgcagcctatgctccatctgtaatgtaataagaggcaactgacttgatccaaaagctaccagcttctgattatgaatgatacttcaagtttgatctggttctctgacctgggcatcgatccacttatatgcatgcaacaaatgctta

SEQ ID NO: 115715 - DNA, 579 bp, Zea Mays
gattgttcatcgtcttaatctgtcagtaagacgatctctgttctgaaatagtccggtgtaatatatgctgctgcctggtgggtttgcaaggtttgtaatcagatgaacagcgtccaagataaagttagcagctcgttcttgatgtgcaggaatcaaaattgctgtcactgtcccatgtggctgtgctgttgaaccggtgggcggcagcacgtcatctcgccttgcagctgatcccggtctagctaagcaagaatggaatgtgtttgatcttgagttcttgacgtcagtaactggggcatgtgagtaaacacatcacatagataactggagggttgcagctcccatatgcattgtatagcagttaggctaactaagccatgtagcaattagcaacatatgttcaaagaaggagaaggcacgcggacggaggcacgcaacattgcagcaagggcagggaatgtgtgcatggatagaggcaactgcaacgacagcttgcatcccttgattccacaagctgacctctcagtcactcagttctcactcactcattccattcacaggctccggggcagcgcttgg

SEQ ID NO: 115716 - DNA, 171 bp, Zea Mays
atgaagacgttcgatccgtaaaaagaacttcttccgccgggaatgaaagcgcatttttccttcctcacggggttcgccatcaccggcttcatcatcactaagatgacggccaacttcaccgaggaggacatcaagaactccaagttcgtccaggagcacaagaagcgctga

SEQ ID NO: 115717 - DNA, 195 bp, Zea Mays
atgcagaagatccctcgcaacccctcatacgcaacaccaatggagcaaagtctgactgcaacgagtgctcatcgcctcaaggacaaaggccgtatagaggatcaccatgaccgtgtcggcgtcgactccccttcgtgcaagtcaagccgatgggaacctgcgaagacctcggacctcgaggccgactatggctaa

SEQ ID NO: 115718 - DNA, 825 bp, Zea Mays
gcgtaccaaggagtatgcatatatagaaggtagtacaaatcaccagcgccaccttcaagtcaccactcaatacaaaacggtacaacacgcacacgtagtagtgagtgtaatgctagagctgcagaagacagagcagcccatgcatcgtcatcacagctactactaataacaaatcaaaaagtaccgagatggacacaacacaacagctcaacaagtacgtgcagccacaactgcagctatgggtggagcagatctctccgttcctgtcaaaggctcaaagcctggcggcggagggaagggggggctgcctagtcgcagcacatctcgcagatccagcagcagcagagcgccgcgatgctgaaaaaccaaaaacacgccacacagtagcagttcttaattcctgaggttatttttttgtagcagaagaggacagagaaacgggtggaccgacggacgactgaaggatcattaagtttgtgattggtagtttaccatccttcgatgaagcccttctccccgcgcgaggtcgtcttcccccggcgtccctgcttcctgccgctgcctccctgctgctccgcgcctgccgtcgggtagcctgcaagcaagccatgtcagcaatatgtgtccgtcgatccgtccatccacacggatttattcggagatgacgatcgatcgatcgatctgacccgcgggtggtggcggcggcgcctgctgctgctgcctgttgctgttgttctgatccatcctcgaccgtctcctcgctgctattgctagagctagagcacgcacgctcggcgatcgatgatgctgttgtagtggaagcgt

SEQ ID NO: 115719 - DNA, 96 bp, Zea Mays
gtcagtcctcgaccgtaccgccaacacggcccgctccgccacgtccttgcgcgagtgcgagtcccaggtgtcagccatcatggatggtcatctggc

SEQ ID NO: 115720 - DNA, 1027 bp, Zea Mays
aagtttattttactcttaagttacatagacggagtgcttgcagcgggcggcaggtaagccaaccgaaaccgatggcgtcgggctccggcagcgggagcgacttctccgtggtcgtggtgggatccgacttcgcggtcgacgccggcgccgcgctcctcgcccccgccgaccacgaggtgtggcacgactgcctccccgtcctcgctgaggcggacgcctgcttctccgacctcgaggagcgccaggtcgtgcgcatccagggcacggatagggcaggccgaaccatcgtccgcgtcgtcggcaagtttttcccggctccagtaattgatggtgaacgtctgaagaagtatgtgttctacaaactgcgcaccgaattgcctgtgggtccattctgcattttgtacatccacagcaccgtacagtctgatgataacaaccctgggatgtcgatcttgaggacaatttatgaggagcttccacctgaatacaaggaaaggcttcaagttttctacttcttgcatcctgggcttcgctccagactggccatcgccacacttggcaggctatttttaagtggagggttgtattggaaaatcaagtatattagtcgactggagtatctctggggggatataaaaaagagagaggttgaaattccagattttgttattgaacatgataaggttcttgagcaccggccactgactgattatggcatagaaccagatcccctacatcttgctgatgtacctgctgtgggatactcgcttggaagatatgaagataaatggactccagaagatcgatggtattcaaggaattacatgtgaaattttctgttgtagcttaaaagatgattgtatagtaacacggtactatgagatttgtattagattgctatgaaaaccttgtcaaggtcctgtatttccaactaaatttatacctgtttgaagatttttgagcagacgctatatgctgtctgtggttaacccgccgtataaaactgtggccgatgtgtctgcttatg

SEQ ID NO: 115721 - DNA, 1075 bp, Zea Mays
aagtttattttactcttaagttacatagacggagtgcttgcagcgggcggcaggtaagccaaccgaaaccgatggcgtcgggctccggcagcgggagcgacttctccgtggtcgtggtgggatccgacttcgcggtcgacgccggcgccgcgctcctcgcccccgccgaccacgaggtgtggcacgactgcctccccgtcctcgctgaggcggacgcctgcttctccgacctcgaggagcgccaggtcgtgcgcatccagggcacggatagggcaggccgaaccatcgtccgcgtcgtcggcaagtttttcccgggtactattcttggtgtcaatgtttacatgttattaactttggaatttgggcttccagctccagtaattgatggtgaacgtctgaagaagtatgtgttctacaaactgcgcaccgaattgcctgtgggtccattctgcattttgtacatccacagcaccgtacagtctgatgataacaaccctgggatgtcgatcttgaggacaatttatgaggagcttccacctgaatacaaggaaaggcttcaagttttctacttcttgcatcctgggcttcgctccagactggccatcgccacacttggcaggctatttttaagtggagggttgtattggaaaatcaagtatattagtcgactggagtatctctggggggatataaaaaagagagaggttgaaattccagattttgttattgaacatgataaggttcttgagcaccggccactgactgattatggcatagaaccagatcccctacatcttgctgatgtacctgctgtgggatactcgcttggaagatatgaagataaatggactccagaagatcgatggtattcaaggaattacatgtgaaattttctgttgtagcttaaaagatgattgtatagtaacacggtactatgagatttgtattagattgctatgaaaaccttgtcaaggtcctgtatttccaactaaatttatacctgtttgaagatttttgagcagacgctatatgctgtctgtggttaacccgccgtataaaactgtggccgatgtgt

SEQ ID NO: 115722 - DNA, 654 bp, Zea Mays
atggagttgctggtgtcggttccatggcagtcggtgtcgacgacttgcaacctccacccagggaagataagactttcatgggcttcgatgccgcctacctccgcgagcacctcgccggagggcatgagcgtgctcctcatcggtgagcccagcgccggcaagacggacgtcgtggagggccttgcgcaacctagtcctcatcgcaacctcctcgacatccacttcatcgcgctcgacatggacacgctcgttgtgggtgccaaataccgcagcgagttcgatgagtggctcaagatacacctcatgttgggcgtaaggaggacagaggattccatgcacacgaccaacctgttcgacccaatgctggtgaggggacagctccggtgcaccgacaccaccacgctggtggagtaccgcaagacttttgtcctaatgcggatagaactatacaagtcaatgcttgaaaaggagggtgcagagggtgaagaagaagctaagagagcatacattgctgctagagagaaatcaggttgtcgtgttgatgctgctgcagaagaaaaggtcttatcagcacttactgaaaaggttgatgctatgctccaagaattagaaaaggagattgatgatgcagatgcacaaattggaaatcgttga

SEQ ID NO: 115723 - DNA, 1602 bp, Zea Mays
tttaaagcctgagcactttgtagttggccttttttttttgctacactgttagtgacttgcaatgcgatcgatttcattggtaatgttcattgaatgattcctgatcagatggtaataacttgagtaccatcatcatgtagctagtgaaacttggcttctctgttgttacctgtaccataattccaactgattttttcctcatgtactcctttttgtgcatcctcgtccacatgcaggctgcagcaagcaactggacgatgatggcttccaggcagtcagagaacaatgcacaagaagaaacatcaccattgacgactcctaacgccaacatagccaggatcatcccttcgctgcccctcgagaccaggtggccaccgttccctctccgacggtacgccaatttttggctgcctgaggtagcattgaaggaaggcgtccccggcgttcattcctgcttcgagccgagacccaccgacgtgttcctcgcaagcttccccaagtctggcaccacctggctcaaggccctcgccttcgcgacgctgaagcgttccacgcatccgccgttcgacgacgaccatccgctgcgccattgcaaccctcatgactgtgtcaggttcctcgaacttgatttcaaccagcagaaggatgagctcgaggcgctcccgtccccgcgtgtgctggccacgcacctcccctactccctgctgcccggcagcatcaccggcgacggagagcgctcggggtgccggatcgtctacgtttgccgggaacccaaggacgtgctggtctcctcctggctgttcacgagaaaggcagcgccggcttgtggggttgacgcccggtcgttcacgatccaggaggccttggagctgttctgtgatggccgctgtctcggcggcccacagtggaaccacgtcctccactactggaaggagagcgtgaggaggcctgacagggtgttgttccttcgttacgaggaggtgctgattgagcccgaggcgcacgtcagaaagctggccaatttcatgggctgtggattctcagaggaggaggaggagcgcggggtggtgagcgccatcgtggagctgtgtagcttggggaagctgagagacatggaggtaaatagaaatggaagcactttgttggggatcaagaacgaaagcttcttcaggaagggagttgttggggactggagcaagcatatgacgcaggagatggcgcagaggctagacaaggtcgtagaggatgcattgcaagggactggattcacctttgcgagcacagcatgatgaggcagtgcgctcatagtagttgcgaactacagaataatgccaaggtcaactcgttttattggtgttgctggttggagatcataccagtcatggtgagcattcttctttggtgatgaagggggaaatatggacatcatcttatcatttaacgaaaattgatttgtgtacaattcatttgtataactttgttacaaaccatatgttgtggcaccttggcacgccaaaaccatatgcattactgtgtaagatttgtcataaagccatgtatcatcattgatatattatcgattaatgtttggagaagctacaa

SEQ ID NO: 115724 - DNA, 1737 bp, Zea Mays
atggcgtccgataacctcagcagatccacgtccgtacgtgcctgtcttgtctccctcgccaaccgcgaatacgactccgcgcccgctgaagccttcttcttcctatattgtgctactgtaagagctgctgcattcgccaagggaaacgcggccagtttgccagcacagcaccaacacggccctgccggcatcgtctttctgcttctgcaaaagacgaacaaatcaaaagggtgatcatctcggtgcccaccaaacctcaacaaccaagtttcatgtctaatctcgacgttcagcttccatctgctttgatctgtttgttgaggcaaatgctgaggctctggtgttggtcctggaacgaaggattacgtgcatgtgcgcatctaagagcgcaatgatagaaagactttgactacagtccagggtctgaataaagaatccagttataacaagatcctcaaggatctgaagaaggaattctgctgcaatggtactgtagttcaggacccagagctaggccaggtcattcagctccaaggtgatcaacacaagaacgccctcacgtccaccatagtgcagcaattgcccgtgtgtatttcctgtctcagaggcggcggcgccaagatccagcccaaggagcagcagaagcaagtaaggaaagtgatcagaaaagtggctagcaatcgggctgcagcaagcaactggacgatgatggcttccaggcagtcagagaacaatgcacaagaagaaacatcaccattgacgactcctaacgccaacatagccaggatcatcccttcgctgcccctcgagaccaggtggccaccgttccctctccgacggtacgccaatttttggctgcctgaggtagcattgaaggaaggcgtccccggcgttcattcctgcttcgagccgagacccaccgacgtgttcctcgcaagcttccccaagtctggcaccacctggctcaaggccctcgccttcgcgacgctgaagcgttccacgcatccgccgttcgacgacgaccatccgctgcgccattgcaaccctcatgactgtgtcaggttcctcgaacttgatttcaaccagcagaaggatgagctcgaggcgctcccgtccccgcgtgtgctggccacgcacctcccctactccctgctgcccggcagcatcaccggcgacggagagcgctcggggtgccggatcgtctacgtttgccgggaacccaaggacgtgctggtctcctcctggctgttcacgagaaaggcagcgccggcttgtggggttgacgcccggtcgttcacgatccaggaggccttggagctgttctgtgatggccgctgtctcggcggcccacagtggaaccacgtcctccactactggaaggagagcgtgaggaggcctgacagggtgttgttccttcgttacgaggaggtgctgattgagcccgaggcgcacgtcagaaagctggccaatttcatgggctgtggattctcagaggaggaggaggagcgcggggtggtgagcgccatcgtggagctgtgtagcttggggaagctgagagacatggaggtaaatagaaatggaagcactttgttggggatcaagaacgaaagcttcttcaggaagggagttgttggggactggagcaagcatatgacgcaggagatggcgcagaggctagacaaggtcgtagaggatgcattgcaagggactggattcacctttgcgagcacagcatga

SEQ ID NO: 115725 - DNA, 275 bp, Zea Mays
ggcttttcctaatggacttagcgccaacattggtttcagagagtcccgacgaggatggtaaatatagcgatgaaactatgttttgtagagattttataaatttaggaaattactttacataactgttggaaaagctgcacatgacttcaatcaccagtctagtcaacaccgtataatttatcatcgaactccgctcccatatatgatggtttgtcgaaggtcatgatggtaatggatcatgattcaaatgtttcttcacgatttatttgatccat

SEQ ID NO: 115726 - DNA, 1629 bp, Zea Mays
acacgacgccgcgcccgcggaatccatcttctccatctccaactgtgctactgtaggagctgctgcaatcggggagagaaacgcgaccagtttgccggcaccaacacggcctgctgccacatctccggcatcttcttccggtgcgccaaatcacttcccctttcccgtcaatcttccgctccgctccgcatgttgaggactatttctgtctgaaaactgtcgctgttagttgttctttcaggtgcgccaaataacccctcctcttttctgactgctagtcagggttggggactgaaaactgtcgctgttagttggggttggggactctttcaggctgcagcaagcaactggacgatgatggcttccaggcagtcagagaacaatgcacaagaagaaacatcaccattgacgactcctaacgccaacatagccaggatcatcccttcgctgcccctcgagaccaggtggccaccgttccctctccgacggtacgccaatttttggctgcctgaggtaacattgaaggaaggcgtccccggcgttcattcctgcttcgagccgagacccaccgacgtgttcctcgcaagcttccccaagtctggcaccacctggctcaaggccctcgccttcgcgacgctgaagcgttccacgcatccgccgttcgacgacgaccatccgctgcgccattgcaaccctcatgactgtgtcaggttcctcgaacttggtttcaaccagcagaaggatgagctcgaggcgctcccgtccccgcgtgtgctggccacgcacctcccctactccctgctgcccggcagcatcaccggggacggagagcactcggggtgccgcatcgtgtacgtctgccgggaacccaaggacacgctggtctcctactggctgttcacgaggaaggcagcgcccgcttgtggggttgacgcccggtcgttcacgatccaggaggccttggagctgttctgtgatggccgctgtcccggcggcccacagtggaaccacgtcctccagtactggaaggagagcgtgaggaggcctgacagggtgttgttccttcgttacgaggaggtgctgattgagcccgaggcgcacgtcagaaagctggccaatttcatgggctgtggattctccgaggaggaggaggagcgcggggtggtgagcaccatcgtggagctgtgtagcctgggcaagctgagggacatggaggtcaacagaaatggaagcactaggcttgggaccaagaacgaaagcttcttcaggaagggagttgctggggactggagcaaccatatgacgccggagatggcgcatagcctagacaaggtcgttgaggatgcattgcaagagactggattcaccttttcgagcacaacatgatgagccactgcgctcatatagtagttgtgaactgcagaatgtcaagatcaattcgttttatcggtattgctggttggagatcatgggatcccggagatcataccagccatggtgagcattcttctttggtgatgaaggggaaattgatttgtgactattcatttgtataacatttttacaaaccatagtctttggcaccttggcatgccaaaatcatacgcattactatgtaaggttcgtttt

SEQ ID NO: 115727 - DNA, 1597 bp, Zea Mays
cgcgaatacgactccgcgcccgctgaagccttcttcctatattgtgctactgtaggagctgctgcattcgccaagggaaacgcggccagtttgccagcacagcaccaacacggccctgccggcatcgtctttccggagctgctgcaatcggggagagaaacgcgaccagtttgccggcaccaacacggcctgctgccacatctccggcatcttcttccgggttggggactgaaaactgtcgctgttagttggggttggggactctttcaggtgcgccaaataacatctccggcaaggatcggctgcagcaagcaactggacgatgatggcttccaggcagtcagagaacaatgcacaagaagaaacatcaccattgacgactcctaacgccaacatagccaggatcatcccttcgctgcccctcgagaccaggtggccaccgttccctctccgacggtacgccaatttttggctgcctgaggtaacattgaaggaaggcgtccccggcgttcattcctgcttcgagccgagacccaccgacgtgttcctcgcaagcttccccaagtctggcaccacctggctcaaggccctcgccttcgcgacgctgaagcgttccacgcatccgccgttcgacgacgaccatccgctgcgccattgcaaccctcatgactgtgtcaggttcctcgaacttggtttcaaccagcagaaggatgagctcgaggcgctcccgtccccgcgtgtgctggccacgcacctcccctactccctgctgcccggcagcatcaccggggacggagagcactcggggtgccgcatcgtgtacgtctgccgggaacccaaggacacgctggtctcctactggctgttcacgaggaaggcagcgcccgcttgtggggttgacgcccggtcgttcacgatccaggaggccttggagctgttctgtgatggccgctgtcccggcggcccacagtggaaccacgtcctccagtactggaaggagagcgtgaggaggcctgacagggtgttgttccttcgttacgaggaggtgctgattgagcccgaggcgcacgtcagaaagctggccaatttcatgggctgtggattctccgaggaggaggaggagcgcggggtggtgagcaccatcgtggagctgtgtagcctgggcaagctgagggacatggaggtcaacagaaatggaagcactaggcttgggaccaagaacgaaagcttcttcaggaagggagttgctggggactggagcaaccatatgacgccggagatggcgcatagcctagacaaggtcgttgaggatgcattgcaagagactggattcaccttttcgagcacaacatgatgagccactgcgctcatatagtagttgtgaactgcagaatgtcaagatcaattcgttttatcggtattgctggttggagatcatgggatcccggagatcataccagccatggtgagcattcttctttggtgatgaaggggaaattgatttgtgactattcatttgtataacatttttacaaaccatagtctttggcaccttggcatgccaaaatcatacgcattactatgtaaggttcgtttt

SEQ ID NO: 115728 - DNA, 1395 bp, Zea Mays
ctagtgtctgtcgtgtccactcgtaagattcgagctggaaatgacagtattattaaaaagctgacattaactcaggccattgacgcaagagatgcactagcaaagtcaatatacgccaatttatttgactggatcgttgagcaaattaaccacacacttggaacggggaggcaatttacatggagatccataagtatattggatatttatgggtttgagtgtttcaataagaatggttttgagcaattttgtataaattatgccaatgagaggctgcagcagcacttcaaccgacatcttttcaaactacaacaggagaaatccatgctctgaaacttgatccaggacatagagcccttggacctaagtgtcatccagaaagatgttgctcctgaaacagtagatgcaatgaagaggactatttctggcatgttgggtcttcttccatccgatcagttctgtgtcattgtagaagccctttgaaatcccttcttcaagttattggtatcttcaattatgattggctcccgtcactccactcaagatccagcagaagtggagcaactgcgagaaaaacttaggaatcaggattacttgaagcaacaagctgcgcaacatgaatattatgctaaacagattcaacaacaacaaacactcatacaacaactagcacagacccaagggatacacgtcccggtacccccctaccaccacctcccgttcattatccttggtcttcacctccacctacacctacatctccacctaccgaacatcaggtatgcaaaattcatcatcatttacttgttgttagttatattatgatgtaactcagcaaatatcatttgtacatgtatattagaccccttcagctaccttgccgacgcatgaacgagaagacgggttagactttttcgaaaccctcttcgctagtggaggtatggaccatcactcgtcactgtaacccgatggtgatcggcgatcgtgagcttccatgttatgtgttctaatacttaagacttttattatgactatgtatgagatattgtctcttattagtactggatgagatgtgccttattatgattatggataagacttttgtgatgtaattgatgagactatggatttaaatattgttatgtgattgtgtgtaagatgttttatgtgaaaatatgttgtgctatatagcggttgatatatttgttatattgtggagtgtggtgtaaaataaaaataaacaacatttgtaatgctggtcaaattaacttcctagaggccattaggccgtaggaagttagccagctaacttcttaggggttagactcagccgtaggaagttagtcagctgacggcgtgaagctactaactttcgataacctactaacttacgag

SEQ ID NO: 115729 - DNA, 1071 bp, Zea Mays
ctagtgtctgtcgtgtccactcgtaagattcgagctggaaatgacagtattattaaaaagctgacattaactcaggccattgacgcaagagatgcactagcaaagtcaatatacgccaatttatttgactggatcgttgagcaaattaaccacacacttggaacggggaggcaatttacatggagatccataagtatattggatatttatgggtttgagtgtttcaataagaatggttttgagcaattttgtataaattatgccaatgagaggctgcagcagcacttcaaccgacatcttttcaaactacaacaggagaaatccatgctctgaaacttgatccaggacatagagcccttggacctaagtgtcatccagaaagatgttgctcctgaaacagtagatgcaatgaagaggactatttctggcatgttgggtcttcttccatccgatcagttctgtgtcattgtagaagccctttgaaatcccttcttcaagttattggtatcttcaattatgattggctcccgtcactccactcaagatccagcagaagtggagcaactgcgagaaaaacttaggaatcaggattacttgaagcaacaagctgcgcaacatgaatattatgctaaacagattcaacaacaacaaacactcatacaacaactagcacagacccaagggatacacgtcccggtacccccctaccaccacctcccgttcattatccttggtcttcacctccacctacacctacatctccacctaccgaacatcagaccccttcagctaccttgccgacgcatgaacgagaagacgggttagactttttcgaaaccctcttcgctagtggaggtatggaccatcactcgtcactgtaacccgatggtgatcggcgatcgtgagcttccatgttatgtgttctaatacttaagacttttattatgactatgtatgagatattgtctcttattagtactggatgagatgtgccttattatgattatggataagacttttgtgatgtaattgatgagactatggatttaaatattgttatgtgattgtgtg

SEQ ID NO: 115730 - DNA, 1873 bp, Zea Mays
caggtcgcctccgcctactcccactgactttaccttcttggctacccgcaggccgcaggccgtgtctctagagaggaaggagaaacctcagcgccgccacgacttcctcctcgggccataccatttcggcggtcgtataaatccacaccaccccgagcacacaaaagctctagagctttgcctgcttcacagaccaaccaaactaaagcagcggtggtcgcgtcgccgccgcgtactcgcgtgcgtgccaggaagacgaaccaccagccagcccaggccccaggccaacacgcacgccgtcgctacctggcgaggaaggctgcctgcctgatggtccaggacgaaggctcgtcgtcgtcggtcacatcgtccccgctgcacaacttctccaccatgccgctccacgcgtcgcccggcggcgcgccggccccgacgccgccgtggctggtgcgcgagctccgctccgacgagcgcgggctgtgcctcatccacctcctcctcaaccgcgcgccgccacttcctcgacctctgcccgttcctccgcctcgcgggcgccgccgccaaccagtccgtgctggaggccatggagtcggagaggatggtgcacgtcgtcgacctcggcggcgccgacgccgcgcagtgggtcgagctgctgcacctgctggccgcgcggcccgagggcccgccgcacctccgcctcaccgccgtgcacgagcaccgggacgtgctgacgcagacggccgtggcgctgaccaaggaggcggagcggctggacgtgccgttccagttcaaccccgtggtgtcccggctggaggcgctggacgtggagtccctccgcgtgaagaccggcgaggcgctggccgtcacctccagcctgcagctgcactgcctcctggcatccgacgacgactccggcaagcaccaccagggcagcggggaccacaagaggcagcggagcccggagtccggggtgtccccgtccacgtcgcgcgcggacgcgttcctgggcgcgctgtggggcctgtcgcccaaggtggtggtggtgacggagcaggaggcgtcgcacaacgcggcgccgctgacggagcggttcgtggaggcgctcaactactacgcggcgctgttcgactgcctggagtcggcggcgccccgcgggtcggtggagcgcgcgcgcgtcgagcgctggctcctcggggaggaggtgaagaacatcgtggcctgcgacggcgcggaccggcgggagcggcacgagcgcctggaccgctgggcggcgcggatggagggcgccggcttcgcccgcgtcccgctcagctactacgcgctgctgcaggcccggcgggcggcgcaggggctgggctgcgacgggttcaaggtgcgggaggagaagggcgccttcttcctctgctggcaggagcgcgccatcttctccgtctccgcctggcgcggccgtcgcttcgactgatggaggaacgcgtcgacgccttcccgtatttgtgcggaggaggagacgggccgcccgtcgtggcgttgcgcgtcaggtggccgtcacgcacgttggggcttcttttggtcgttttgtgtgttcagtttacgccgtatctagttagatttcaatcaggtttgttcatagtgtacccctgccgctctccaatttggatggatggaatctcatgcttgtttggatcagtcagtccttttagatctgttaatgtaacaactagagctgcttaacagctactatctcactcggtcccggtcccggtcctataacaagcgtggtaatgtacttgtggagtttcaaattttctgacaattatggacatttgtaacaaacacttctggagtttaaaatttgatggatggattagatttg

SEQ ID NO: 115731 - DNA, 2156 bp, Zea Mays
acgcaccgcccaccaccaccaccacctcctcctctttttctctccatgcatatacagggctgccgcagcctttggcaggtcgcctccgcctactcccactgactttaccttcttggctacccgcaggccgcaggccgtgtctctagagaggaaggagaaacctcagcgccgccacgacttcctcctcgggccataccatttcggcggtcgtataaatccacaccaccccgagcacacaaaagctctagagctttgcctgcttcacagaccaaccaaactaaagcagcggtggtcgcgtcgccgccgcgtactcgcgtgcgtgccaggaagacgaaccaccagccagcccaggccccaggccaacacgcacgccgtcgctacctggcgaggaaggctgcctgcctgatggtccaggacgaaggctcgtcgtcgtcggtcacatcgtccccgctgcacaacttctccaccatgccgctccacgcgtcgcccggcggcgcgccggccccgacgccgccgtggctggtgcgcgagctccgctccgacgagcgcgggctgtgcctcatccacctcctcctcaactgcgccgcggcggcgggcgcgggccgcctggacgccgccaacgccgcgctggagcacatcgcgtcgctggcgtcccccgacggcgacgccatgcagcgcgtggccgccgccttcgcggaggcgctggcgcggcgcgccctgcgcgcgtggcccgggctgtgccgcgcgctgctgctgccccgggccgggcccacgcccgccgagctcgccgccgcgcgccgccacttcctcgacctctgcccgttcctccgcctcgcgggcgccgccgccaaccagtccgtgctggaggccatggagtcggagaggatggtgcacgtcgtcgacctcggcggcgccgacgccgcgcagtgggtcgagctgctgcacctgctggccgcgcggcccgagggcccgccgcacctccgcctcaccgccgtgcacgagcaccgggacgtgctgacgcagacggccgtggcgctgaccaaggaggcggagcggctggacgtgccgttccagttcaaccccgtggtgtcccggctggaggcgctggacgtggagtccctccgcgtgaagaccggcgaggcgctggccgtcacctccagcctgcagctgcactgcctcctggcatccgacgacgactccggcaagcaccaccagggcagcggggaccacaagaggcagcggagcccggagtccggggtgtccccgtccacgtcgcgcgcggacgcgttcctgggcgcgctgtggggcctgtcgcccaaggtggtggtggtgacggagcaggaggcgtcgcacaacgcggcgccgctgacggagcggttcgtggaggcgctcaactactacgcggcgctgttcgactgcctggagtcggcggcgccccgcgggtcggtggagcgcgcgcgcgtcgagcgctggctcctcggggaggaggtgaagaacatcgtggcctgcgacggcgcggaccggcgggagcggcacgagcgcctggaccgctgggcggcgcggatggagggcgccggcttcgcccgcgtcccgctcagctactacgcgctgctgcaggcccggcgggcggcgcaggggctgggctgcgacgggttcaaggtgcgggaggagaagggcgccttcttcctctgctggcaggagcgcgccatcttctccgtctccgcctggcgcggccgtcgcttcgactgatggaggaacgcgtcgacgccttcccgtatttgtgcggaggaggagacgggccgcccgtcgtggcgttgcgcgtcaggtggccgtcacgcacgttggggcttcttttggtcgttttgtgtgttcagtttacgccgtatctagttagatttcaatcaggtttgttcatagtgtacccctgccgctctccaatttggatggatggaatctcatgcttgtttggatcagtcagtccttttagatctgttaatgtaacaactagagctgcttaacagctactatctcactcggtcccggtcccggtcctataacaagcgtggtaatgtacttgtggagtttcaaattttctgacaattatggacatttgtaacaaacacttctggagtttaaaatttgatggatggattaga

SEQ ID NO: 115732 - DNA, 446 bp, Zea Mays
ttctgtcaatcatctcttcgatgtcgcgcaacagtctgcttgatgacaaatactaaaattgacgtgggaaggactgaaggtgttgtacacctgtgcctgtcgcgttgcttaattctatcctaccggagggccgaccctaataacctacattgcttaatcctagtttagtttgctgaactttgtttttagaagatttgctctaatgtatttagatttggtttactgtgcattttaaggtttatgctagtttggcaaattaaaagtaaaaatactctctcaaaagtcaaaacaaatgtagagttatattacataatttgtataattttatgactcataaaataatgtaacaacgtctacagtcatatcattttgaataaaactgtgtaaatctttaacttcttttattttttcagatattatttaaaagttgaaaaaatagcagactc

SEQ ID NO: 115733 - DNA, 1045 bp, Zea Mays
atttgttccctgagccattttgctgtggatgtcaggcaattgcctgtgggagatggtatttggattgcccgtcataaggaagatcacacagagtatgttcttgatttcattgttgaaaggaaagaggttatggatttagatggctcaattgaagacaaccgatatagagatcagaaattaaggatgaagaaatgtgggctgaggaagttgatatatcttgttgaaggtgatctcaaccgtgcaccaaagagggttaaaacagcctgtttcaccactgagattctcgatggatttgatgttcagagaactactgggtttgccgatacccagaagagatatgttgatcttacacgttcggtaatagcatactatgatgcaagtttctcgatcgttggtaaagcttcccctgtttgcccaacctacgatgacttcaagagaaagtgttatgatcttaagaagaaaacagtgagcgacatatttggctgtcagcttatgcaggtaccacaagtaacagaagaagctgcacaagctgttgtagagctctatccaacccctttgttactggcaaaggcatactctatacttggtggcgatacctctgcacaagagaagatgctaaagaagaagaacgagatggtaaatgcaggagcaagccgaaacatatttcaccttatctggggtgacggatgaaaaatactctggactggaaccagttgcgggccaactgaactttggtggcttatggtgtcaccgtcgtggtgaccatcttttgtgtctccgagatttagaggctcccatgttctaaagcaaatagtggctccatagaacactagggatctagattaggaagagtttctctctacgtcgcgtctagagagtactctgctgtggtgtcgtggttgcacagtggaatgaagtggtcccttggatttacgtggtcgggatttcgtgtatcggtctgggttgtctggattatgtgctgtctcgagctacctcggggctgttaagtctacaggatagcataaaatatcgcagtgtacctaca

SEQ ID NO: 115734 - DNA, 1678 bp, Zea Mays
atttgttccctgagccattttgctgtggatgttagttgggatcagagtttgcactcttctatatcatgtcctactttctctctgctgtagaaatgaaaatgggggcatagttatactgattagcgatatctcttatatggtgccagacctagagcctgacaatttcattggccactacattttcccgctttcatgtttatgcctctattacatagttggtttcaaaatataccattggagtcctaattctttcagtcaaggatctttgactattaacaagctacctgaaaaaatattagaaaacaattagaaatgaaaaaggcaaaaaaagtacataaaatacagtgaaaatttagtagaggtaacaagataacttgcttgatattttgtctgtttcaactttcaacttctcatgctggcagcctatagtatctccttgtgctcaaggtggctgatggcatcagtgtctaatgtcacattgtggacagtgttgcaaatcattggattagttttttgtataaacgtctagaatgcatcctcttggatatagtttttgttcttttttaacataagaaaggttgaggcgtgatgcttgattgattcgtttgcgtaatgtgccagagaaagtggttttgattcttcagtttgaaccttgtcgtccaggtcaggcaattgcctgtgggagatggtatttggattgcccgtcataaggaagatcacacagagtatgttcttgatttcattgttgaaaggaaagaggttatggatttagatggctcaattgaagacaaccgatatagagatcagaaattaaggatgaagaaatgtgggctgaggaagttgatatatcttgttgaaggtgatctcaaccgtgcaccaaagagggttaaaacagcctgtttcaccactgagattctcgatggatttgatgttcagagaactactgggtttgccgatacccagaagagatatgttgatcttacacgttcggtaatagcatactatgatgcaagtttctcgatcgttggtaaagcttcccctgtttgcccaacctacgatgacttcaagagaaagtgttatgatcttaagaagaaaacagtgagcgacatatttggctgtcagcttatgcaggtaccacaagtaacagaagaagctgcacaagctgttgtagagctctatccaacccctttgttactggcaaaggcatactctatacttggtggcgatacctctgcacaagagaagatgctaaagaagaagaacgagatggtaaatgcaggagcaagccgaaacatatttcaccttatctggggtgacggatgaaaaatactctggactggaaccagttgcgggccaactgaactttggtggcttatggtgtcaccgtcgtggtgaccatcttttgtgtctccgagatttagaggctcccatgttctaaagcaaatagtggctccatagaacactagggatctagattaggaagagtttctctctacgtcgcgtctagagagtactctgctgtggtgtcgtggttgcacagtggaatgaagtggtcccttggatttacgtggtcgggatttcgtgtatcggtctgggttgtctggattatgtgctgtctcgagctacctcggggctgttaagtctacaggatagcataaaatatcgcagtgtacctaca

SEQ ID NO: 115735 - DNA, 605 bp, Zea Mays
tttcccgaatccccaacccagcgatccgcctccagcgccgggccccaatcactgtgcgaccacgatgaggccgctgccgaagaaaccaaatgcagcgctgccggtgccgaagcaactcaaggtgcatcacccggaaaatgagtccctctctcgtttcttcctagagaagtggcgggcgatgatgcaggagccggatgggctctcgcagaacaactacctggccttcgccaacgccaaccgcagcctctgctcctccaaggagccaatccggaccctcaaggacttctcgaacgtcaagggtgtgggaacatggctcataaatcatatgaaaagtttctttgaaaagtcgagtcaggatttatctcctgccaaaggaaagaaagcaaaagggacaaaaagttatttgccaaggaagaacactgctgcttatgccatactaataacactccatagggcaaagactagcgggaaagattttatgatgaaacaagagcttattgatgctgctgaagccagtggactgtcacgagacgcgattggtccaaataaaagtaaagcaaaacagagttacgggaaggactggtacactggttggagctgcatga

SEQ ID NO: 115736 - DNA, 2313 bp, Zea Mays
tttttttttttttttttgaattctgcccgctcctcagtcgtcgccaatcgcggagagagggagctcggctgagagagaagagagaagagagaagcgagcacgcggcggggtgaacgggggagaaaatttgaacaacggttattaacgagtgggcgagcaggcttggagtcgaactaaagcccactaaggattgcccttctagatggacagcccagcccaagccagcttgcgaagatcacatgcatcgtgagtcccgaccgcaaaattcaaatcagttcgagcttcgaaccatttcaacggtgacctgttcttccccacccggccacggctacggccacgggtcacccctccaccccaaaccctagcacccccgatccagcagcagcccccctctccgagctccaaaacctctcagagatggcggcgccggcgccggcgttgatgcagctcaaggtgcggatcccggagaacgaggaggtggctcgctgcctccacgagaagcggctgtctatgagggagcagccggccggtttcaaggagcacctggaccgcacgttcgccaaagcctaccgcaatgtctgcgccgccaatgagcccatccggactctcaaggagttctccaaaatcaatggtgtaggaccatggctcatacgctgtatgaaaggcttctttgcagagtccaagcaggattctccagcgaaaggaaagaaaacaagagtaccaaagtgctgtgtgacaaagaagaaaactgctgcttctgcttctcttggcaagggacctccttccaacttaaattgtcagaatgctcagttttcttcatcccaaggaacattggagctgcaaccatctggtaaaacgggttctactgacttcaatatgctagacaaggatgttgtatcaatgaacaattgtatactggctatgccacctcgtcaatcaagtgaagagtttcttgaagcttacgaggttgttctgatattggatgatcgtgagaattttgggtattgttcaagaaaagttgcttcaaaaaaggttgctgataacattggctcgcagtttaacgtacctgtagaggttaaacgtttgcctgtaggtgatggcatatggatcgctcgtcataaaaaaaattttacagaatatgttctagattttattgttgaaaggaaaaatgttgcagatttaggtagttcaattagagacaatcgatacaaagatcagaaaacaaggctgcagagatgcgggttaaggaagcttatgtatcttgtcgaaggtgatccaaatacttcaaaaggatcagcagcaagcataaaaacagcctgctttaccactgagattttcgaaggatttgatgttctgcgtaccaatgggtatactgataccatgagaacatatggttatcttacactctcgataatggattactacagcacaaatttctgcagacttgataaaagtgcctgtatatgcccaacctatgatgagtttgagagacactgtcattgccttcagaaaagaacagtgagccaaatatttgctctgcagcttatgcaggtgccacaagtaacagagaaagttgcattaactgttatagagttctatccaactcttttctcactcgcaagggcgtactccatgcttgaaggtgatatccatgcccaagaggagatgttgaagaacaagagcaagatgataaatgcaggggctagtagaaatatcttcaggcttgtctggggtgatggatgtcaatcttcagggttaattttggactagccgacttaactgagtatatcaccgacttggtgatctcgaggcatattattgtgtggttcactagccccttatgctcagatattcaattgaaaggctttcgcattctgaaggcaaatgatccaattgaacactgaccgtttgggagcatgtagtcaccatgaaagtgtctgaaagtgcctccacaagatgtagagcctgtttggttcgtggctaaggacatatttggtgtggtgcctacgccgccacaccgcgccacacttttcaagccgcaggtgtggcggccgatttggccgccgcgggttaggcgcggtgtggccgcctaggcgccacaccaaacatgccctaaatgtgccacattttgcctaaggttagtcgtctgtattgaacaattaaccttaggcagaaaggttatgcaaattttaattgcaagttagtcagtgaaccaaatatgctcgtaatgttatctggatgagatgcgttgtgtttcattatgtacatcttgacttttgctcacttgcttgcattatgagatgtctcttgtta

SEQ ID NO: 115737 - DNA, 1764 bp, Zea Mays
ttaataacagcattccactgcttgtctggtcgtcgtcctgtggttatacttttaaaacggcccgcgtccggcgccccgcgcccccgctccctcttgtctgtctgcgaaccaaccaacgaacgccaaagccagcgccgcggcgtagccaccaccctctactattatagccaacgtctctgcgcgtgcggtgccggagcggcggaacctccccccatcctacctcaccatgatggcaatgccggacgcggaccgcaacgccatgtcggcgccgctgctcccgcggcccgcgtgcctgacggcgtccttctcctcctcctcctcctcctcctcctccttcgcctccttctcctcctccaactcctccgacccctcacccccgtccgccttcccgccggcggggccgtgcaaggcgttggcggtgctgcgggaccacgcgggctccgtctccagcctctccctctgcggggagttcctgctcagcgcgtccacggccggcgacgtcgtggcgtggcagcagcccgacctccggcgcttcgcgcgcttcggccacggcgagagcggcggctccgtcaaggcgctggcggccgcgggcggccgcgtcttctccgcgcaccaggacggccgcgtccgcgtctggcgcgtctcccgcggccgccgctccgagaacgccttcaagctcgtcgccgcgctgcccaccgccagggactacctgggccgggtgttccgccaggacagctacgtgcagaccaccgccaccacggcggcgcgccgcgcccaccaccgccgcctctggatcgagcacgccgacagcatctcctgcctcgccgtcgccgtgcacgacgccgcgctcctctactcgggctcctgggaccgcacgctcaaggtctggcgcgtcgccgacctcaggtgcctcgagtccatccgcgcccacgacgacgccgtcaacgccgtcgccgcagacgccggcatcgtctactccgcctccgccgacggccgcgtcaaggcctgggagaaggggaaggcgtcgcatttcctccagggcgtcctcgtcgcccgcgacggcgtctcgtggaacgcgctcgccgtcgccgccgacgaccgccggctctacgccgcgggctccgacggccacgtcgccgcctgggaccgcctcggcggcaggaccgccgcgcgctggaccctcgcgtgcgacgtcagggcgcacgacgccgccgtgctgtgcctctgcgtcgccagggacctgctctgcaccggctccgccgacaagaccatcggcctgtggcgccgtcagagcgccggcgagctggccaaggtgggcgtcgtcagaggccacgagggccccgtcaaatgcatccaggcgtcctggtgcaggctcaccaatggctgcatggtctacagcgggagccttgacaagaccatcagagtttggtgggtgcccggtgccttgcagcatgccaatgacaaagagcagcagcagcagcagcaaaaagatggcttcaaggatcacaagcacaaggcttctttgttcttgagatgaaacttgtgtctgctccaaatttcgaaatggattgattgagattgctcaggtctagtctgtattttggattggttgatttatattacaaggataaatgggtaacacacaaaagtagccatagagtgggtgtgcttctgtaaatggctgtatactatgttctgattcttctttgatataggttgactacatggagagagagaaaaggctcaatgaccttatttgtgaaa

SEQ ID NO: 115738 - DNA, 223 bp, Zea Mays
cgcgcggcaaataagaaaagagcgagctatgcgtgagcagagaggtcgaccagcggcgcgcgcgcacggacaacagcgaagagctcggcgcgcagcgagttggaactggagcgtcgcgatgggcgaagtggagcacggtcagcgcgcgtctaccaaagaactcgcgcggtacacagggagaacaggcggccaccagggagagcgtccaggcgcgcgcgacgag

SEQ ID NO: 115739 - DNA, 106 bp, Zea Mays
ctcagattgaaaaaaacatcactgaaaaattgtggtctgctcaaatttacagaaaacatcactgaaaactggtcctaagctcagactttaaataatttcatcactg

SEQ ID NO: 115740 - DNA, 829 bp, Zea Mays
atccgccgcctcaatcagtccaggtccaggtccaggtcactgaagcgcgcgcgcgcgcattgccaagttgcccagtgcctggtgcttgccaacagcaccaccgccaccggataaggctgccccgaccgctgggagcctgcgattccggaggcttcgaggagcaggccatggcgcggggcggccacctcagtgcgctctgcctgccacctcgcctcggcgccacgccgccgtgctgcggccgccctgccgccgtccgagccagcagctgctgcgccaggccgctgccaccaggcggcgcgcggcggcggggtcggggccggggccgcctcttggtggtgcgcgccggcgggccgcccagcaccaacgcgctcatcctcgccttcgtgctcccgctctccctcttcgtcggcacgctcgtcaccgccgctcgcgtcgccgacgacctcgacgaccgattcctaagggagatggagataaaccgggcgatactggaagagaacgaggcgtccgatgacgacggcgccggtgaggaagacgacgacattaacgaagcggatgaggacgcagaggaagagctgccgccggtaccggtggaggagaaggaacccgccaccgttgtcggtccacgcaccaggaacaggccgagaagacgagtgtaattagacgctctcttctccgtgttcatgctcagagacacagagagagagtttaattatagcgtgtatggtttgaggaatgagttctcgctttttttttgtttagtttgtggaatataataagttcatctatcactattttattttttataatctaataattagtaataata

SEQ ID NO: 115741 - DNA, 150 bp, Zea Mays
gatctattccaaagggtgatgggtcgtgggtacgactcttcagaaggcgcttttgccaaccaccgagcaccaacaaatgaagagagtaaccacaagtatgagaccactgaaactacttcgcctgctttgaatcagagcaaactgctttta

SEQ ID NO: 115742 - DNA, 2285 bp, Zea Mays
cttcaaccctccttccgtcttcctcctctagtcttacctcgttgcacctcaagaaacttggcgcgcaaccaggaaaccccctcttctctctctctctctctctctctctctctgccttctgattccaagctccccaactgcccagcaccaacctgccgaactcccctcctttttgttggtttgtcgaattataaattgagcccggccggctgactaccatgaagccgccatcactggtgcactgcttcaagctgctggtcctgctggcgctcgccaggctgaccatgcacgtccccgacgaggacatgctatcgcccctcggcgcgctgcgcctcgacggtcatttcagcttccatgacgtctccgccatggcgcgggacttcggcaaccagtgcagcttcctgccggccgccgtgctccacccaggctcggtctccgatatcgccgccaccgtgaggcacgtcttctccctgggcgagggctcgccgctcaccgtcgcggcgcgcgggcatggacactccctcatgggtcagtcccaggccgcccaggggatcgtggtcaggatggagtcgctccggggcgctaggctccaggtccacgacggctttgtcgatgcccccggaggagagctctggatcaatgtcctgcgtgagacgctgaagcacggcctggcacccaagtcgtggacggactatctccatctcacggtcggtggcaccttgtctaatgcgggggtcagcggccaggcgttccgccacggaccgcaggtcagcaatgtcaatcaactggagattgtgacaggaaggggagacgtcgttacctgctcacccgaggataactctgatctcttctatgctgctctcggcggtcttggtcagttcgggatcataaccagagcaaggattgcacttgagcctgctccagagatggtgaggtggataagagttctttactcggattttgaaagcttcaccgaagaccaggagatgttgatcatggcagagaactcctttgactacattgaaggttttgtcatcataaacaggacaggcatcctcaacaactggagggcgtccttcaagccacaggacccagtccaagcaagccatttccagtcagatggaagagtgctatactgcctcgaactaaccaagaacttcaatagtggcgacactgataccatggaacaggaagttgctgtactgctatctcggcttagattcatacagtctactctattccacaccgatgtcacgtacctggagtttttggacagggtgcacacctctgagctgaagctgagggcacaaagcctctgggaagttccacacccttggttgaatcttctgataccgaggagctcaatccgcagatttgctacggaagtctttggcaggatcctgaaagatagcaacaatggtcctatattgctttatccagtgaacaaatcaaagtgggacaacaaaacgtcagtggtcataccagatgaggaaattttctacctagtgggattcctttcttcagcaccgtctctctcaggtcacggcagcattgcacatgcgatgagcctgaacagccaaatagtagagttctgtgaagaggctgatattgggatgaaacagtatctagcacactacaccacacaggagcagtggaaaacccactttggagcaaggtgggagacatttgaacggaggaaacacagatatgatcccctagccatcctagcaccaggacagagaatattcccaaaggcgtcactcccattgtctttgtgacggttcctgctatttaaaggcttctgtagagcatacattgtacaaaagtgtaggtaaaagtatcccctgtaaagacaatatctacggaaggtagctagcctgaagaacacagcatagcgactttttcagtggccaaagatacctcaaagcagtacttcaatgtggagcaacgtcacctgaaccctgaaggtggtgagtgcaactttggaggcaatcactggtagtggagcctggagggttgtagcggtccaaggaacctgtctgttgttacagcgttgagatgagctgtgctgatcaactgatcactaaccagtgtcccgaggaaatcatgttggtctgtatgtattttccgttaacaacagtgcagaagtttgcatgagggtagtgcattgattagcaaatagcactgcctgttatttcacttgtaactggcatctcatctcaaggagagcctgcgtaactgtagcaggttatattgttttccatgagtcagaaactcagaatatt

SEQ ID NO: 115743 - DNA, 658 bp, Zea Mays
agtcaccactccggcctccgggcacctcccacggaccacggtcccaccgcatcggaactcggaaggcgaagccgaggcgccgcgcggatcgagcgatggcggcggcgttggagcaactgagcagcagcaaaatgttcgacggcttcaacctccgtttccgccaccagagcgccaccctcggctgcgcaatgaccttctccatctacctgcccccgtccccggcgtccaacatatccgtgctgtactggctctcgggcctcacctgtaccgacgagaatttcatcatgaagggcgcgccgccgccgccaacggcatcgcccttgtcacgcctgacacctccccacgtcttctaggaagaagcggctttcagctgaagctgcttgtgtgagatggccgaaggttcctcttcatgaagcttcggtattacaaaccgacttaaagatagaatgaccttttagtccataaaggtctgagtcaatgttgtaaacttttatgaagggcataattgtaattcctcacgggccgtgtcctgtgcctataaatagtgaaacagtattcctttactgtacacgcattctgataattgtaatcgcatctttcggaaacctatctttgccaaggaagaggtataattgtattcagtaattcaatatattaa

SEQ ID NO: 115744 - DNA, 2422 bp, Zea Mays
cgctggcgcatcggtgtcgatcgcagcagttcgcttcatcactcaaaaatccatcttcgtcaataaccagttcgggaagctgcgagcgaagcactgaagcagatgcttgtcttgtcttgtcccggccctctcatcctcctcccccactccactacggcactcccggccctcgctcgcttgctcattaatggcgggcactgcatggttggcgccatccatgcccattaacgcctccacccacctccgggccgcccccgcccccatctacttttattcacgccgatcgggcacttgcttccaatacagcgccggccgggccgttgcgtccgtccatcctcatccccatccgccacccaccccgcgcccctccttctcactccagtgctggctgccggccagctccgcccccggggtccttgagctggaggtggcggtggatgaccagctctcggagttttctgaggcgaggatcggagggcgttgcgttaggtccgcggttggtgagcggcggtcggagcggtctcgcgcgcggcggggtcgttcgatgacgcaggaatcgcgctctgggagggtgggaatacctcgcgctcgcgctcaaggtgctcgattaatttactgcctgaggctgagggggggcgcgcctgtgagctgaaccgttcccgctgcactgactcctgagctcgggaaatggttgggagcgtgcacgtcaatggatcggtccacggcggcaatggcacggccacggaggagcggctggacgagctgcgccggctgctcggcaagtcggagggggaccttctcaagatcgtcagcgtcggcgccggcgcgtggggcagcgtcttcgccgcgctactacaggacgcgtacggccatttccgggacaaggtgcagataaggatctggcgtcgcccgggccggacggtggaccgctccaccgcggagcacctgttcgaggtgatcaactccagggaggacgtgctcaggcgcctcatccgccgctgcgcctacctcaagtacgtcgaggcgcggctcggagaccgcacgctgtatgccgacgagatactcaaggacggcttctgcctgaacatgatcgagacgccgctctgccctctcaaggtcgtcactaacctgcaggaggccgtctgggatgccgacatcgtcgtgaatggggtgccgtccaccgagacgagggaggtgtttgatgagatcagcgagtattggaaggagaggattagtgtcccggtgataatttccctcgccaagggaattgaggcctcgttggatccaatacctcgtatcattacacctactcaaatgattagctctgcaactggagttccaactgaaaatatactctatcttggaggaccaaacatcgcctcggaaatttataacaaagaatatgcaaacgctcgaatctgtggatccaacaagtggaggaagcctcttgctaagtttttgaggcagccacatttcattgtctgggacaacagtgatcttgtcacccatgaggtgatgggtggcctgaagaatgtctatgcaatcggtgctggaatggtggcagctttaacaaacgagagtgcaacaagcaaatctgtatattttgctcattgcacgtcagagatgatattcattactcatttgctgacagagcaacctgagaaactcgctggtcctctgctggctgacacgtatgtaactctcttaaaaggtcgcaatgcatggtatgggcaaatgcttgccaagggagagttgagtcctgacatgggtgatagtatcaaggggaagggaatgattcagggtatctctgcagttggtgcattttttgagctgcttagtcaacccagcttaagtgtgcagcacccagaagaaaacaagcaggttgctccagctgagctatgcccaatcctgaagaggctttacagaatactgataaaaagggagctcccagcaagggacattcttcaagccctgagggacgaaacgatgaatgatcctcgggaaaggattgagatggcacaaagccatgcattctaccgcccgtctctccttggaaaaccatgatctagttagtcttgtagattagtagaatataaacggacgctgtgctgcaggtttctccactgtgcttgctgtccttgtgtccgagctacatggggatggggctttgtcagttgtcgaattctttgtgcttcctcgttgccatggtgtacaagagattactgaaccaataaatgttctaagtgcatattatatgaacacccaatttgaaagtacccgaggaagatttcttatgcatggatttgtttggtccaacgtcatatgctagtttgggtggcaacatctatattctcatgattgtagattattattcaaggtatacttaggttttcttacttcaaaacaagactaaagttgcatc

SEQ ID NO: 115745 - DNA, 1006 bp, Zea Mays
cgagaggatttttttaaccacagcctggaaattcgctcccacggggagtcgaactcaggacctgaggagtgctactcagaccacctaaccaactcagctagaggccctttcgcgagtaccagttttatcatatttctctaattctctttatgtttcaggaatggtggcagctttaacaaacgagagtgcaacaagcaaatctgtatattttgctcattgcacgtcagagatgatattcattactcatttgctgacagagcaacctgagaaactcgctggtcctctgctggctgacacgtatgtaactctcttaaaaggtcgcaatgcatggtatgggcaaatgcttgccaagggagagttgagtcctgacatgggtgatagtatcaaggggaagggaatgattcagggtatctctgcagttggtgcattttttgagctgcttagtcaacccagcttaagtgtgcagcacccagaagaaaacaagcaggttgctccagctgagctatgcccaatcctgaagaggctttacagaatactgataaaaagggagctcccagcaagggacattcttcaagccctgagggacgaaacgatgaatgatcctcgggaaaggattgagatggcacaaagccatgcattctaccgcccgtctctccttggaaaaccatgatctagttagtcttgtagattagtagaatataaacggacgctgtgctgcaggtttctccactgtgcttgctgtccttgtgtccgagctacatggggatggggctttgtcagttgtcgaattctttgtgcttcctcgttgccatggtgtacaagagattactgaaccaataaatgttctaagtgcatattatatgaacacccaatttgaaagtacccgaggaagatttcttatgcatggatttgtttggtccaacgtcatatgctagtttgggtggcaacatctatattctcatgattgtagattattattcaaggtatacttaggttttcttacttc

SEQ ID NO: 115746 - DNA, 2342 bp, Zea Mays
gaagcagatgcttgtcttgtcttgtcccggccctctcatcctcctcccccactccactacggcactcccggccctcgctcgcttgctcattaatggcgggcactgcatggttggcgccatccatgcccattaacgcctccacccacctccgggccgcccccgcccccatctacttttattcacgccgatcgggcacttgcttccaatacagcgccggccgggccgttgcgtccgtccatcctcatccccatccgccacccaccccgcgcccctccttctcactccagtgctggctgccggccagctccgcccccggggtccttgagctggaggtgggtggcgacgtaaaggcggccgcttgctttgccaccgccggcgctcgtcatctccttacttattcatccctgcggccctgctacacatcggtgccgtgccgcgcttgattccgtcctgtcctgtgcttgaattgtaggtggcggtggatgaccagctctcggagttttctgaggcgaggatcggagggcgttgcgttaggtccgcggttggtgagcggcggtcggagcggtctcgcgcgcggcggggtcgttcgatgacgcaggaatcgcgctctgggagggtgggaatacctcgcgctcgcgctcaaggtgctcgattaatttactgcctgaggctgagggggggcgcgcctgtgagctgaaccgttcccgctgcactgactcctgagctcgggaaatggttgggagcgtgcacgtcaatggatcggtccacggcggcaatggcacggccacggaggagcggctggacgagctgcgccggctgctcggcaagtcggagggggaccttctcaagatcgtcagcgtcggcgccggcgcgtggggcagcgtcttcgccgcgctactacaggacgcgtacggccatttccgggacaaggtgcagataaggatctggcgtcgcccgggccggacggtggaccgctccaccgcggagcacctgttcgaggtgatcaactccagggaggacgtgctcaggcgcctcatccgccgctgcgcctacctcaagtacgtcgaggcgcggctcggagaccgcacgctgtatgccgacgagatactcaaggacggcttctgcctgaacatgatcgagacgccgctctgccctctcaaggtcgtcactaacctgcaggaggccgtctgggatgccgacatcgtcgtgaatggggtgccgtccaccgagacgagggaggtgtttgatgagatcagcgagtattggaaggagaggattagtgtcccggtgataatttccctcgccaagggaattgaggcctcgttggatccaatacctcgtatcattacacctactcaaatgattagctctgcaactggagttccaactgaaaatatactctatcttggaggaccaaacatcgcctcggaaatttataacaaagaatatgcaaacgctcgaatctgtggatccaacaagtggaggaagcctcttgctaagtttttgaggcagccacatttcattgtctgggacaacagtgatcttgtcacccatgaggtgatgggtggcctgaagaatgtctatgcaatcggtgctggaatggtggcagctttaacaaacgagagtgcaacaagcaaatctgtatattttgctcattgcacgtcagagatgatattcattactcatttgctgacagagcaacctgagaaactcgctggtcctctgctggctgacacgtatgtaactctcttaaaaggtcgcaatgcatggtatgggcaaatgcttgccaagggagagttgagtcctgacatgggtgatagtatcaaggggaagggaatgattcagggtatctctgcagttggtgcattttttgagctgcttagtcaacccagcttaagtgtgcagcacccagaagaaaacaagcaggttgctccagctgagctatgcccaatcctgaagaggctttacagaatactgataaaaagggagctcccagcaagggacattcttcaagccctgagggacgaaacgatgaatgatcctcgggaaaggattgagatggcacaaagccatgcattctaccgcccgtctctccttggaaaaccatgatctagttagtcttgtagattagtagaatataaacggacgctgtgctgcaggtttctccactgtgcttgctgtccttgtgtccgagctacatggggatggggctttgtcagttgtcgaattctttgtgcttcctcgttgccatggtgtacaagagattactgaaccaataaatgttctaagtgcatattatatgaacacccaatttgaaagtacccgaggaagatttcttatgc

SEQ ID NO: 115747 - DNA, 1670 bp, Zea Mays
ctttttagaattttaagaaaagaaacaatcaatttggaaatccgatgtcgggtcaaatacttgctgcttactttttgaatagtttccattctaacgttgttttggtcataaaatggcaaggggcacaaataggatagtttcttctactttgttttactacattttctgtgagtaccagttttataaaaaaaacttgacctgcggggggtaagacagcccccgggtattgtattaagaataagaccttctcacacaggtcaagaaaacccccgaacccctgccccacacatacacagcggcatcgaagctcatgtgagaacgaccacgaccagggctgagccttagacctatgctttggcgtggaacagacgagaggatttttttaaccacagcctggaaattcgctcccacggggagtcgaactcaggacctgaggagtgctactcagaccacctaaccaactcagctagaggccctttcgcgagtaccagttttatcatatttctctaattctctttatgtttcaggaatggtggcagctttaacaaacgagagtgcaacaagcaaatctgtatattttgctcattgcacgtcagagatgatattcattactcatttgctgacagagcaacctgagaaactcgctggtcctctgctggctgacacgtatgtaactctcttaaaaggtcgcaatgcatggtatgggcaaatgcttgccaagggagagttgagtcctgacatgggtgatagtatcaaggggaagggaatgattcaggtaatggaatgacttttttctttccattttgtcttgttttattctgagaagatgtcaaagctattatagtactacatccgttctcgaatatttgtcgcccgctagttcatttttgaactaaaccacgacaaataaaaaagaatggagtgagtatttgataaccctgacatttgcagccatccaattttgcttttttacacggttaccatgatcattttaccattccattggacagggtatctctgcagttggtgcattttttgagctgcttagtcaacccagcttaagtgtgcagcacccagaagaaaacaagcaggttgctccagctgagctatgcccaatcctgaagaggctttacagaatactgataaaaaggtttgtgctatgtatcatcactactctccatatttggagagtttacagtgtgcttgaggagtgagtgccgcagtgcagacgaagtgagaagtgaccacttctcactcattcattttattggtttcattttactctcctgattagatatagacctgacttatgtgcagggagctcccagcaagggacattcttcaagccctgagggacgaaacgatgaatgatcctcgggaaaggattgagatggcacaaagccatgcattctaccgcccgtctctccttggaaaaccatgatctagttagtcttgtagattagtagaatataaacggacgctgtgctgcaggtttctccactgtgcttgctgtccttgtgtccgagctacatggggatggggctttgtcagttgtcgaattctttgtgcttcctcgttgccatggtgtacaagagattactgaaccaataaatgttctaagtgcatattatatgaacacccaatttgaaagtacccgaggaagatttctt

SEQ ID NO: 115748 - DNA, 1427 bp, Zea Mays
atgtatacgtcgtcagtagattcttatcatgaaaatcccccggcctctacggcctcgatcgaccacccggacacctccagctctggccgtcaccacccacctcctgcagctccgaacgagagcttgcggtaatgcccccgaacgcgcggcggcggactcccgcccggcccccaacggcgctgcgtacgaacgacccagataggtgtcagcacctctgtggaggagaaggaggctgtggaagagacggaagtggaacaggcagcactcggcggcaaacgcactcgacgcaccaacgttcgtgtgatgggtccagaatgggctgtgtaatcctaatctcttgtaattcatggccagcccatgtgagggtataatacctagtatgtggtttctggagaggcatgcaaaacttgaacaaactcatacgcaataacatccgccgccttctgcctcctgttcactgttcttctctaatctctgattcttcttccacttctgatctctgagcataacatttggtatcaaagacttgtcatcctggatctgctgccggaggtgccgcggcgggcgcgatcgtctgcgatggagcaatcggagactatcacccacaagttgcttgaggaaatgcgtctcatggaggcgcgtctatctgagcaaatcagcgggcgctgcgccggcgtcgagcgccgcgtggaggaacactgtgaggagatacgcgtgccttcacccagcgctgcgatgccatccaccaacaagtggatgttgcggcgttgcgcggtgaagaacgcctgatcgccctcgaactcatgaagaccgaggctgatatgtggcgtcccgatctggagaagcgggtcgacgatctggagttggaagttacccgtgtcaacaaattccttgaacgggaacgtcgccagccagccttcgacaagccgggactctttggtccacacgcgtcggcatccgtgcgtcctccagccggatttcctcacgctgatggggcccgtggccaccgcttcgaaccaccaaaccgggagggtgagtttgggttccctgcgacccaacctcacggcctggtcaagggtacgtacaatgcccatccatcgcgcattactggttttatgcctgaacaccaatatccttctgagtttatgcgtgagtctgggctgggtagactgccgaaagtcaatttcccacaatttgatggctcgaaaccacaattatggaagaagtgtgaaaattactttgagatgtatgacactgaatactatatgtgggttaaggtttcatctatgcattttgttggtcgtgctgaacgctggttacaatcggttgagcgacgtttgcgtcagttctcttgggagggattttgtagtttgattcatgaccgatttggtcgcgagcagcatgagacactgatcagacagttattt

SEQ ID NO: 115749 - DNA, 449 bp, Zea Mays
tcaccgtgagctggaactgcacgaacttctggatgttgatgtagaccgaccggccccatttggcgacgttgatgatggtcgagaagttgtcgtccatgatgatcacgtccgcgttctccttggcgacctggccaccagttgttggaagtgtgcgtgagaaacagttgccgtcaggaactaacacatgccatgaacaagggtacggctacaggctactactacaaacctctgttcctgcaatgcccatggcgaggccgatgtcggcctcgtgcagcgccggcgcgtcgttggtgccgtcgccggtcaccgccaccacctcgttgaacatgcccctcaggttcgtcaccagcgtgtgcttgtccagtggcaacgaccgagccatcacctgcagacagacacagacgacaggccaatcgggtcactttccccatgcaaaaaaaaaaaaaaaa

SEQ ID NO: 115750 - DNA, 1331 bp, Zea Mays
ctgctactgcattgggttctgcacagtccttcctcctaatgctcaccatgtaccacaagtagatgatcattatgttcttctttagcatgctatcataaatcaatctggaaatattgtacttatctataagacccaactaatttggtggtggtttcggtgtagcgctaaatttctcttatcatggtttatacattctgcttatcatcagaacgagacactaatccactaatatattatgtgcctattctgcttcttctgtacgggcctgatagtttctctaaattttaactagcaagaaagagcatatttgccttgtgccattgtccttgatcttctgcctttttttagaaaaaggaattaaatggtactcctaacaggataagttggattattagatgccctgtgatgctttggtttattgggaaaaaagatcgcaattgatattggttattcaaagcagacacttccctactgcatttaatctttactgtatttcctttgttatgttatatttcattgccccctctttattttggttcctggccttgttcttttgtttcttctgattcattttcagttctagctgtgtgctgaagtgttattctggatgtatacttgattatttgtcagtttcctaaacgcacagcacattactaccattactccccccattgccatctaggtctgatatggtttttgtgagttcttaacttgtcgcgcaataaatttccaaggatgcattcacaatcccaaggcataggaagtgctgcagggaacgccctaattccaccgcagcttcgtggaaggagcaatgttgttactgaagacatgagcaaactctttgtggctaaacgaaaagagtagcatcttaaccttttctggacctgaacctctgtttggactccatagactgataaacgcatgtactggtcccatagtgcaatggatgtgccggcatgatccaaggttgttgctgaatcctaaagaaccggacgaaggatgctaacggtaggacgacctggtctcttagcctacagtgggctgttgtcagatgtcaaaaatgccctcttagaagtttagaacatttctttggtgctcactcgcgtttcatgttcaacggtgctacatgactggtgctggatgcatgtaaactctgcaaccctatcatgttatggcagctagatgctactacgtctatcttttgatcggtgattacaaccatgtattacgtctagtagtggtaatacatcgcgatccaaatgcttcttaataaaatagtagaaccctaaataattatagttaaaaaatgaatagaaataagattctgatat

SEQ ID NO: 115751 - DNA, 1203 bp, Zea Mays
tgcaggtctctatggagctgaagtgttatgtattggcagcgtgactggtacttgacaatactctagattaaccgaacaacagtttgagccagggattatagccaaaagggattatacccccaaggggttcaagtgacaaagaggggattaactcaatccctcctggattcaatacctctctggaataaaaacctgtaaaccgaacatgcccctagggaagtaatccattgcaaacgaacatgccctcagggtttactattgtgtccgctcccaccgggtctgcgcatcagagaccgacaagactgggaaatccagagatgcatttttctaccgatcagctgatcggctcggcgttcattgcctttgggctcacattgttcgtgtgtttcttctacgttgccgtcgtgtccaagctgcttccgccacatcaaaatggattcctggccgccatccaaaacgactggtattactgtctgcttgtgccgttgacgcttcctgtaataatcgtggctgtctacctgcactggctcagcatgaagatgttcaagcacgcatgaagcagtcatgcagcttccttccggtttcagaatcctggtcaaaatcgaggatgcattcacaatcccaaggcataggaagtgctgcagggaacgccctaattccaccgcagcttcgtggaaggagcaatgttgttactgaagacatgagcaaactctttgtggctaaacgaaaagagtagcatcttaaccttttctggacctgaacctctgtttggactccatagactgataaacgcatgtactggtcccatagtgcaatggatgtgccggcatgatccaaggttgttgctgaatcctaaagaaccggacgaaggatgctaacggtaggacgacctggtctcttagcctacagtgggctgttgtcagatgtcaaaaatgccctcttagaagtttagaacatttctttggtgctcactcgcgtttcatgttcaacggtgctacatgactggtgctggatgcatgtaaactctgcaaccctatcatgttatggcagctagatgctactacgtctatcttttgatcggtgattacaaccatgtattacgtctagtagtggtaatacatcgcgatccaaatgcttcttaataaaatagtagaaccctaaataattatagttaaaaaatgaatagaaataagattctgatat

SEQ ID NO: 115752 - DNA, 866 bp, Zea Mays
tgcaggtctctatggagctgaagtgttatgtattggcagcgtgactggtacttgacaatactctagattaaccgaacaacagtttgagccagggattatagccaaaagggattatacccccaaggggttcaagtgacaaagaggggattaactcaatccctcctggattcaatacctctctggaataaaaacctgtaaaccgaacatgcccctagggaagtaatccattgcaaacgaacatgccctcagggtttactattgtgtccgctcccaccgggtctgcgcatcagagaccgacaagactgggaaatccagagatgcatttttctaccgatcagctgatcggctcggcgttcattgcctttgggctcacattgttcgtgtgtttcttctacgttgccgtcgtgtccaagctgcttccgccacatcaaaatggattcctggccgccatccaaaacgactggtattactgtctgcttgtgccgttgacgcttcctgtaataatcgtggctgtctacctgcactggctcagcatgaagatgttcaagcacgcatgaagcagtcatgcagcttccttccggtttcagaatcctggtcaaaatcgaggttggtttggtttagctgaaagtgtcaaggcaatagccaatttgcttatatacagcctgcattttttttgctgtctccaagatgtaatctggctatcgaatcactgtactaacaaaccctgcatcaatacgagctgcaatccattgtttcgctttactccatagctcacggtagcgcgacatatctcgtaggaaggttcaattcggaataattactggcatgtatgcgttttttttcaatgtgcacctttagggatgcta

SEQ ID NO: 115753 - DNA, 461 bp, Zea Mays
cggccgtccctgctctgctggacgctcggagaggcggagagcggacgccggcagagacgcagagggcagaccgtgtcctctctccattgtccagtgatccagtctcctccggcctccgcgaccgtgggtgcacggagccggacagccgatcagccggccgcgagctcgccgcgaggacaaaggaggccgccggaccggagcctggagactggagagccagccgccagagccgaggtatcctgttgccggcttgccgctgttggatctagcggccaggagggcgatttggtgccgttgccgtactgccgtgagccaagagtgactgctgttggcgctcggcgattgggcccatattgccatacactgaagcaattaacctcaaaacaagagaacgaagaggacaaaaacattgagatcgttttattgtccggctcctacacctttgatacgaactgattcat

SEQ ID NO: 115754 - DNA, 1303 bp, Zea Mays
actgggtctgcgcattagagaccgacaagactgggaaatccagagatgcatttttctaccgattagctgatcgactcggcgttcattgcctttgggatcacattgttcgtgtgtttcttctacgttgccgtcgtgtccaagttgcttccgccacatcaaaatggattcctggctgccatctaaccaagagagatgcttgttaagcatgcactaaactaggtgatccttgtgcaacagcgtacaacccgtgcaaattatacaagaaattcacgccttcttcgtaattctgcaggtattactgtctgcttgtgccgttgatgcttcctgtaataatcgtggttgtctacctgcactggctcagcatgaagatgttcaagcacgcatgaagcagtcatgcagcttccttccggtttcagaatcctggtcaaaatcgaggtgctcggagagctatagagatgggacaacaatgttcttgggagatttagagaagaggataggtgagggaactttgcgccgggttttaggtgctccgcaagctggaaaccttggctgtccaaatgagtctggaatgggtggcgcaacttggcatgccaagaacaagtttggagacagatgcaatgcaacaaccttgggactagctgctcgatggagacacgcacacgcagacgccgccttcttcctgaccagcggtacaggcggtccagccttccagagtctagacgccgccaggcgccagcgccgccgcccgccagcagcaggatccagctccacgtccagccgcactgccgcagccagcagccagggctccacgtccagccgcagccagggctcgccggggatcctagacgccgagtcgcccaccacgccggtcggccacgccatccaggaccaggttagggccactgcctcacgccctcaccagtcacccaccctaatcgaatcgagcaggctcgcagtgccgccagcctggtgtgaccccgggatcaggttctgattccgaagaggcaaaagggaatgcgaagtggaatccggctacatggctttgcattatatcactagtgtaaattgtaatgtcgtaatggtgctgattatagagtggtgatcaaatgtctttttgtgacacgctgctcaacaaagcctagaagaatcttgcgagagttcaagtcggactggttttgtttctggttattttggtctcaaatggcaccagcaggatctcaaccgctcgcttcgttaaaattttattcctaatccgacctcgcaggctcttgagtatcctgaataccaattattattgtggttg

SEQ ID NO: 115755 - DNA, 997 bp, Zea Mays
gaaaaccgctgctaccgcgcgcccagcccccgcgaaaatcgccgcaaccgaacgcccgccgccgccgcgaaacctcgccgcctaccatacgcccacccgcgcccaaccgagcaccgaaaaccccgccgccgcgaaacctcgccacccacccgcgcccaaccgagcaccggaaatcccgccagccgctaacaacctcctccggcatgcggcatatgcggcaggaggttgggccctctacttcaaggcgtgcgacctgccgagaacagcctgcctcctccgtcgccatcgcccaaggaggagctgatgaaggaggagcaaataccgctgcagatggagaagaaggaggagatcatgccgccaccgccagtgaaagccgcccaaggagaatcggttccacggtgagcctgttcagtgcaatccatgggtactgtcactggaaagccgcccaaggaagcttatcgtcgcatcgcagcaacaaagtcacagggtcccatataccaaatctatttccaaacccccaaggccaagatccatctctcaatctagccaaccttaccgtctgatgcgcgcgaggtgcgctgcgggaatctgggatcgaggctgcggcatcaggccacacagctgccatggcggtttatggtggttctccggtttgagcgatgctgacgcggtggttcttcaatttgggtgatgagatgctaactgatgcctctgcggatgtttggatgtgcccgtgtaggtatcttgcgtgactcgatgcataagctccggccacccgtggaaagcagaagacttggaggaagaagcgaaagtaatgattgtttctcttccatatgtttttgtcatttggattcatttagctttgcttttgttctatagtttatggtgcttcttgattagatcaccggtcctacggttgttaactttttatgccgactcattgtggatcttgtagtggttccgacggtattaattggtctgagctatatcaaggaaa

SEQ ID NO: 115756 - DNA, 761 bp, Zea Mays
atggctgcagtcgcagcgatgaaggctctcgcggtcgccgcctcgccggtgtcggcacagatagcacagcagccccgtcggtatgtcgcaggtggcgttagccggcggctgcagtcgctgttccacggcgttgccctgggcgaccgcggcgggcgacgccccggcgggggccgcaggtggtggtggcggcggcggcggtccggccggcgatccagttcatccagggcacggacgagcagacgatcccggacgtgcggctgaccaagtcccgggacggcacgaacggcgtggccatcttcacgttcgagcagccgtcggtgttcgactcgtcggcggagctcggggacatcacgggcttctacatgatcgacgacgagggcgtgctgcagtccgtggacgtgagcgccaagttcgtcaacggcaagccggcgcggatcgaggccaagtacgtcatgcgcacgccccgggactgggaccgcttcatgcgcttcatggagcggtactctcaggccaacggcctccagttcgtcaagaactgacgagccggctttgagatcgattgcctgcctgctgcgctacgttctgcttgcttgctagtgttcttttttttttctttcctttctcccctgtgctgcgcccctggtgttgtgattgtgacctgctgtgtgcttgtgagtgattttttttttgtagagaaaagaaagaaatatgggaggtttgttttgctctgaacgttcatatgcctggcaggatcggactat

SEQ ID NO: 115757 - DNA, 937 bp, Zea Mays
accaccacccaatcactcccgtctcgctctgcaccactcaaacctcttcttcctttccggaaaccacaccagcagtccccgcaggctgcagcttccccggccgccgcgcccaagccccagctgcctcgatcgctcgagagccacaaccaccactccaccagcagggcaaagctggaggatggccgcagtcgcagcgatgaaggctctcgcggtcgccgcctcgccggtgtcggcacggcagccccgtcggtacgtcgcaggtggcgctagccggcggctgcagtcgccgttccacggcgtgtcggtgcagtgccctgggcgaccgcggcgggcgacgccccggcgggggcggcaggtggcggtggtggcggcggcggtccggccggcgatccagttcatccagggcacggacgagcagacgatcccggacgtgcggctgaccaagtcccgggacggcacgaacggcgtggccatcttcacgttcgagcagccgtcggtgttcgactcgtcggcggagctcggggacatcacgggcttctacatgatcgacgacgagggcgtgctgcagtccgtggacgtgagcgccaagttcgtcaacggcaagccggcgcggatcgaggccaagtacgtcatgcgcacgccccgggactgggaccgcttcatgcgcttcatggagcggtactctcaggccaacggcctccagttcgtcaagaactgacgagccggctttgagatcgattgcctgcctgctgcgctacgttctgcttgcttgctagtgttctttttttttttctttcctttctcccctgtgctgcgcccctggtgttgtgattgtgacctgctgtgtgcttgtgagtgattttttttttgtagagaaaagaaagaaatatgggaggtttgttttgctctgaacgttcatatgcctggcaggatcgga

SEQ ID NO: 115758 - DNA, 97 bp, Zea Mays
ccttcgcgtttctcgaaccccgtccgtcctagccacacgcgcgtcgttccaccgttcgtcggacaacgcccaccacctgctcgacggaatgccgcac

SEQ ID NO: 115759 - DNA, 119 bp, Zea Mays
tacatgctgactgaatttctgtgttatttccaactgcacatatatatctttattctctattgtttcaacgtgtatttacactgtatatatacgtatgtagcatagtatacaacagtcgt

SEQ ID NO: 115760 - DNA, 2069 bp, Zea Mays
ctggctggtgagcggcagcagagcccagacgtcaggtatgtttgacccgcgtaccctactacccaccccgtcgcggcggctgtctgtgcggggcccggcgcgtgtgggtccaccgcgtttttttttgaaaggtcgcgaaggggtaggtgagcgcaccgcacaccaacgcgatctgtgcagccctgcagacttgggatttggccattgggaaggggcaggtagtaacgtaggctggcgctgcagatcaaaaggctctcgcctcggcttggcagtcggcactccctctccaccgcgctgcaggggcgacgcaaggccgagcgctcctcgatccagatccaaggtaggagatggctctcacgagaattggcctcgccggcctcgcggtcatgggacagaaccttgccctcaacatcgcggagaaagggttccccatctcggtctacaacaggacaacctccaaggttgatgagaccgtgcagcgtgccaaggtcgaaggaaacctcccagtgtttggtttccacgaccccgcgtccttcgtgagctccatccagaagccccgtgtcgtcatcatgctcgtcaaggctggggcgccggtggaccagaccattgccacgctcgcggcgcaccttgatcagggggactgtatcgtcgatggtggcaacgagtggtacgagaacacggagaggagggagaaggcgatggaggagcgcgggctcctatatcttggcatgggcgtctccggaggagaggagggtgcccgcaatggcccgtccttgatgcccgggggctccttcgaggcatacaagtacattgaagatattcttctcaaggtggctgctcaggtacctgacagcggcccgtgcgtcacatatattggcaaaggtggatcaggcaacttcgtcaagatggttcacaatggaattgaatatggtgacatgcaacttatcgccgaggcttatgatgttctcaagtcggtgggtaagctcacaaacagcgagctgcatcaggtgttctctgagtggaacaagggtgagctcctcagtttcttgattgagatcacggccgacatctttggtatcaaggatgacaagggtgaaggctacctggtcgacaaggtcctggacaagaccgggatgaagggaactgggaaatggacagtccagcaggctgctgagctttctgtagctgctcctacaatcgaggcgtccttggactccaggttcctcagcggtctgaaggacgagcgcgttgaggcttccaaaatcttccaaggtgactactccactggcctaccggtggacaaggcacagctgatcgaggacgtgaggcaagctctatatgcctccaagatctgcagttacgcgcagggcatgaacatcatcaaggccaagagctcagagaaaggatggggcctcaaccttggtgagctagcgaggatctggaagggagggtgcatcatccgtgccatcttcctcgaccgcatcaagaaggcgtacgataggaaccctaaccttgccaacctcctcgttgaccccgagttcgcccaggagatcatagacaggcaagctgcctggcgcagggttgtctgccttgccatcaacaatggcgttagcaccccaggcatgtctgcaagtctggcctacttcgactcgtaccgcagggataggcttcccgccaacctggtgcaggctcagagagactacttcggcgctcacacgtacgagagggttgacatgcctggttctttccacaccgagtggttcaagattgcgcgcaactccaagatctgaacatggcctcgtgtttgcatatgccagtatgccaccgtgtcgagtaatcaatcatattactgcttgcagggaggaactgtgtttgatttttattttccatgcgcaatgcttaatttaggtcaggaagtccaaagtctctcccattgttttcctgtaagagctaagcagtaccagatggagaaccttatatttgctggaacatgaataaaagcatttgacatgcttgtgtttagttctctgtcggccatgcattatattttcctttccccttgacagaaa

SEQ ID NO: 115761 - DNA, 2402 bp, Zea Mays
ctggacgcgctgtggcctgccctgccaacctcacactggccgctgctgagcagagctgacttttgctccgcttgccttgccccaaacctcatattcccctcctccttgctgtagctatagctgtagctttcaccccactccctccacggcaccgcgcctccctcccccccttccccaaatcctcctcccctccccaattgggccaatagcccgctccgcttccagtcgcggcgtcggtcggggaagaagcttcgctcccgtgccgcagatcgggagaggagctccccgctcccgcctcgtcgtccgcttccccgccgccggtctctccgggaggcgtctccgtcgccggcgatgagctgcttcgtctgcttcgggtcggcggcgcaggacgaggagcctaggaagcccgctgccgcgggcgccggcaaggacgccgcgccggatcgcgcagtggctcgcgtcggatcagataaatcaagatcacagggtggaccagactctaagaaggatctaattatccataaggatgggaatagtcaaaatattgcagcacagactttcacttttcgtgagctcgctgcagccactaagaacttcaggcaagattgccttttaggagagggaggttttggtcgtgtatataaaggacgcttggagaatgggcaggctgttgctgtgaaacaacttgatcgtaatggtctccaaggaaacagggaatttctggttgaggttctcatgctcagtctcttacatcacactaacctggtcaatctaattggctactgtgctgatggtgaccaacgccttcttgtttatgagtttatgccattggggtcactagaagatcatctgcatgatctgccaccagataaagagcctcttgattggaacacacggatgaagatagctgcaggtgcagctaagggcttagaacaccttcatgacaaggcgagtcctcctgtgatttaccgggattttaagtcatcaaacattcttcttggagaaggatttcatccgaagctatcggactttggccttgcaaaacttggtccggttggtgacaagacccatgtttcaacacgtgtgatgggtacatatggctactgtgccccagaatatgcaatgactgggcagctgacggttaaatccgatgtgtatagctttggtgttgtgttccttgaacttatcacggggcgtaaagcaattgacaatactaagacccaaggggagcaaaatttagtggcatgggctcgtccactgttcaaggaccgaaggaaattccctaaaatggctgatccaatgcttcagggccgcttccctatgaggggtctataccaggccttagccgttgctgccatgtgcttgcaagagcaagctgctacacgtcctcacatcggggatgtcgtcactgctctctcatatcttgcttctcaggcatatgacccaaatgcccctgttcaacacgtccggagcaattcatccacccccagggccagaaaccctgctgggtggaacggcgaccagcgcagcgtgcgctcgcctaaccatcattctccagacccgcggcgcagagacgctgcgggggcatccaagtatggagcagaggttagcaggactagctctaccagcgactctggccggcgatcaggcctggatgacatggacctgaccgggtcgcaagtgggaagcccagcgcagaccggaagaagaagagaagctccaaggggcaccgacagacagcgtgctgtcgcagaggccaggacatggggggagaattcaagggagcgaacaaatggccatggcagcttcgacagcacccatgagtgaagccgtcaggttctgttccagtcatcattccagaacccccaccatgggttgagtccactcattcatcagcaccagtcagatccgatcttgggacatggcgtcggtccaagtgtctgtgaataaggcttttcttgccctcctgtggcgaatgcaattctcctggcgcccattccttgccaatgcgacctgtgtgtgtcatgcctctggcgactgggagcctcaggaggagcctgtaggattcagtcagaggtagacaggtcagtgaagaaagaggaggggcgcggagtcacattggcgagtgttttgttttttttggcggctaaatgctgagtatgttcagctgcatgtgtcctttttgtgtatgtgtacgtgtaagacgtgtaatagcaaccgtgtcaggtttggctacctgagaggcctttgaagcttctgctgctgcttccttccccttgggaattgggagttcagagttgaaatgtaggataggcgatgttgttgagtacatcaactgtttttacccttccatgttgtacggcgacgcttccctgaacaatatgaccatgatgtgcccccct

SEQ ID NO: 115762 - DNA, 950 bp, Zea Mays
cgctgctgagcagagctgacttttgctccgcttgccttgccccaaacctcatattcccctcctccttgctgtagctatagctgtagctttcaccccactccctccacggcaccgcgcctccctcccccccttccccaaatcctcctcccctccccaattgggccaatagcccgctccgcttccagtcgcggcgtcggtcggggaagaagcttcgctcccgtgccgcagatcgggagaggagctccccgctcccgcctcgtcgtccgcttccccgccgccggtctctccgggaggcgtctccgtcgccggcgatgagctgcttcgtctgcttcgggtcggcggcgcaggacgaggagcctaggaagcccgctgccgcgggcgccggcaaggacgccgcgccggatcgcgcagtggctcgcgtcggatcagataaatcaagatcacagggtggaccagactctaagaaggatctaattatccataaggatgggaatagtcaaaatattgcagcacagactttcacttttcgtgagctcgctgcagccactaagaacttcaggcaagattgccttttaggagagggaggttttggtcgtgtatataaaggacgcttggagaatgggcaggtaagtatctcttaaacatgatgcatcgacattttatctgtgaagctaaatccttccaaatttggcttctgagttgaaacattaagtaaaatattggaaggaaatgctaacataacgattatacttaagccctggattagtcctggatactaacagagttttacttcccaggctgttgctgtgaaacaacttgatcgtaatggtctccaaggaaacagggaatttctggttgaggttctcatgctcagtctcttacatcacactaacctggtcaatctaattggctactgtgctgatggtgaccaacgccttcttgtttatgag

SEQ ID NO: 115763 - DNA, 468 bp, Zea Mays
ctcaggcaacacacgcagcagcagcctaaactcgatcgatctcaagtgagcaataacagtgtgtgaatggcaatggaggcgtcggcggcggacggcggcgtggcgaggctggcgtcgcagcgggcggtggtgatcttcgggacgagcaactgctgcatgtgccacgcggtgaagacgctcttctcggagctcggggtggggtgggcgctgcacgagctggacacggacccgggcggcaaggacatggagaaggcgctggcgcgcatggtgggccgctccccgcccgtgccggcggtcttcatcggcggcaagctcgtcggccccaccgaccaggtcatggcgctgcacctccgcggcaagctcgtgccgctcctgcgcgaggccggcgccctctggctgtgatccgatccatcaactcatgtagtatataaactgctgtctgcttaattgctgtacatgcatgcatat

SEQ ID NO: 115764 - DNA, 1668 bp, Zea Mays
aacaaaagaaacggacggctatgagaaatcttgggacccggctatacatatggccacctcacataaagactcgatcgacgatgcagggcaagacgagatcatcttggttcgcaagcaaaccaagataggccaggtcgtctcgttggttgttgcattggaggagcgagcaggtgccatggcagccgctgagatcaagataggccaggtcgacgacgtccaggagctgcaccggacgggcctgcagacggtgccggaccggtacatcagggacggcgacgaccggccggacggcgacaacgtctgcgctgtcgcgcacatcccggtgatcgacgtcgccgagctccagcgcgacgacgtcgggcttgacaagctcaggctcgcctgcgaggagtggggcttcttccaggttgtgaaccatggcatcgcgcacgagctgctggacgagatggagaggctggcgagggagttcttcatgctcccgctggaggagaaggagaagtaccccatggcgccgggcgggatccaggggtacggccacgcgttcgtcttctccgaggaccagaagctggactggtgcaacatgctggcgctgggcgtggagccggcgtccatccggcagccgaggctgtggccgacggccccggccgggttcggggagaccctggagacctactccgcggaggtcggggagctctgccggaggctgctcgcgcgcatcgccgagacgctgggcctggcgccggccacgttcgccgacatgttcggcgaggcggtgcaggcggtgcggatgaacttctacccgccgtgcccgcgcccggacctggtcatggggctcagcgcgcactcggacggcagcgccgtaacggtgctccagcaggacgcgggctgcgccggcctgcaggtgcgcggcaagggcggcgcctgggtacccgtgcaccccgtcccgcacgccctcgtcgtcaacatcggcgacaccctagaggttctgacgaacggcaggtacaagagcgtggagcaccgtgcggtggccaacggcgagcaggaccggctgtcggtggtgacgttctacgcgccggcctacgacgtcgagctgggaccgctgccggagttcgtcaccgacgaggcgccgtgccggtaccggaggttcaaccacggcgagtacagccgccactacgtcaccagcaggctcgagggcaagaagacgctcgagttcgccaagattgatccgctggccggagagcacgacggcacagctcccgaggaaacctctacctagtactactgtctagctgcatagaatacggtttggtcgatgaagcacaagctgcctctctacctacctgggctttgcaaatttgcaaaaggaaactactgtgctaccgaagcatgcagtgccgtatcaatcacctttcttatctgaaaacaagacgtattgacgtattgtatacattatttgctgtgtgtgtagtgcatcaacctgtgcaacacgtgtcaaagctgatcgtgcgtcaaaatacacatgaaaagctgctttgaaccctggccatccaagtccatagtggccttacacatgggaatggggatgaccggccgagcttatcccttgaacttgaacatgaggtgccaaaaggcaggagaattaggccggccatcactttttttttcctt

SEQ ID NO: 115765 - DNA, 1597 bp, Zea Mays
gacggctatgagaaatcttgggacccggctatacatatggccacctcacataaagactcgatcgacgatgcagggcaagacgagatcatcttggttcgcaagcaaaccaagataggccaggtcgtctcgttggttgttgcattggaggagcgagcaggtgccatggcagccgctgagatcaagataggccaggtcgacgacgtccaggagctgcaccggacgggcctgcagacggtgccggaccggtacatcagggacggcgacgaccggccggacggcgacaacgtctgcgctgtcgcgcacatcccggtgatcgacgtcgccgagctccagcgcgacgacgtcgggcttgacaagctcaggctcgcctgcgaggagtggggcttcttccaggtggacagccgggttgttgcttgattcatcgcgcgcgcggcgtcatgctgagatatatatatgtgtaggttgtgaaccatggcatcgcgcacgagctgctggacgagatggagaggctggcgagggagttcttcatgctcccgctggaggagaaggagaagtaccccatggcgccgggcgggatccaggggtacggccacgcgttcgtcttctccgaggaccagaagctggactggtgcaacatgctggcgctgggcgtggagccggcgtccatccggcagccgaggctgtggccgacggccccggccgggttcggggagaccctggagacctactccgcggaggtcggggagctctgccggaggctgctcgcgcgcatcgccgagacgctgggcctggcgccggccacgttcgccgacatgttcggcgaggcggtgcaggcggtgcggatgaacttctacccgccgtgcccgcgcccggacctggtcatggggctcagcgcgcactcggacggcagcgccgtaacggtgctccagcaggacgcgggctgcgccggcctgcaggtgcgcggcaagggcggcgcctgggtacccgtgcaccccgtcccgcacgccctcgtcgtcaacatcggcgacaccctagaggcgagcatagcagattagcagcacatggtttccgtacgtccatgtaagacacacacacaccccactcgacactgaccacgctgccgcgtatgcaggttctgacgaacggcaggtacaagagcgtggagcaccgtgcggtggccaacggcgagcaggaccggctgtcggtggtgacgttctacgcgccggcctacgacgtcgagctgggaccgctgccggagttcgtcaccgacgaggcgccgtgccggtaccggaggttcaaccacggcgagtacagccgccactacgtcaccagcaggctcgagggcaagaagacgctcgagttcgccaagattgatccgctggccggagagcacgacggcacagctcccgaggaaacctctacctagtactactgtctagctgcatagaatacggtttggtcgatgaagcacaagctgcctctctacctacctgggctttgcaaatttgcaaaaggaaactactgtgctaccgaagcatgcagtgccgtatcaatcacctttcttatctgaaaacaagacgtattgacgtattgtata

SEQ ID NO: 115766 - DNA, 1530 bp, Zea Mays
cggacggctatgagaaatcttgggacccggctatacatatggccacctcacataaagactcgatcgacgatgcagggcaagacgagatcatcttggttcgcaagcaaaccaagataggccaggtcgtctcgttggttgttgcattggaggagcgagcaggtgccatggcagccgctgagatcaagataggccaggtcgacgacgtccaggagctgcaccggacgggcctgcagacggtgccggaccggtacatcagggacggcgacgaccggccggacggcgacaacgtctgcgctgtcgcgcacatcccggtgatcgacgtcgccgagctccagcgcgacgacgtcgggcttgacaagctcaggctcgcctgcgaggagtggggcttcttccaggttgtgaaccatggcatcgcgcacgagctgctggacgagatggagaggctggcgagggagttcttcatgctcccgctggaggagaaggagaagtaccccatggcgccgggcgggatccaggggtacggccacgcgttcgtcttctccgaggaccagaagctggactggtgcaacatgctggcgctgggcgtggagccggcgtccatccggcagccgaggctgtggccgacggccccggccgggttcggggagaccctggagacctactccgcggaggtcggggagctctgccggaggctgctcgcgcgcatcgccgagacgctgggcctggcgccggccacgttcgccgacatgttcggcgaggcggtgcaggcggtgcggatgaacttctacccgccgtgcccgcgcccggacctggtcatggggctcagcgcgcactcggacggcagcgccgtaacggtgctccagcaggacgcgggctgcgccggcctgcaggtgcgcggcaagggcggcgcctgggtacccgtgcaccccgtcccgcacgccctcgtcgtcaacatcggcgacaccctagaggcgagcatagcagattagcagcacatggtttccgtacgtccatgtaagacacacacacaccccactcgacactgaccacgctgccgcgtatgcaggttctgacgaacggcaggtacaagagcgtggagcaccgtgcggtggccaacggcgagcaggaccggctgtcggtggtgacgttctacgcgccggcctacgacgtcgagctgggaccgctgccggagttcgtcaccgacgaggcgccgtgccggtaccggaggttcaaccacggcgagtacagccgccactacgtcaccagcaggctcgagggcaagaagacgctcgagttcgccaagattgatccgctggccggagagcacgacggcacagctcccgaggaaacctctacctagtactactgtctagctgcatagaatacggtttggtcgatgaagcacaagctgcctctctacctacctgggctttgcaaatttgcaaaaggaaactactgtgctaccgaagcatgcagtgccgtatcaatcacctttcttatctgaaaacaagacgtattgacgtattgtat

SEQ ID NO: 115767 - DNA, 601 bp, Zea Mays
gttttgcaggcggtctttgagaccaggctacgacaacttagcatagcgttgcctttaatgtgttgcgcagcagatatgctctctgttccttcaaggaagcaggtagtgatagtggggcagaaaggatctgaagaatttcaggacatggtagcagctacgttttcgtcatatgatccgaatagaacagtgatccaaatcgaccctaggaacacagaagaaatggaattctgggacggcaacaatgcaaacatcgcgcaaatggcacggggcagccctccggggaaaccggcggtggcgcatgtgtgccaggacttcaagtgcagcccgccggtaacctctcctgggtcgcttcgcgagctgctgaacaagacactggctgctgcaagctcagcctgaggccttttgcctcctgctatgttcgtagatgttctgataccagtgtaacaatagttaaaaaaaaacctgtgtacatatttacatgtgagaaatataaataggattgtcagttaagctgtacagcctgttaaagccttctcagctgtacacatgttcacaataataaggcacggagcataatggtttccttttcagcgttttcttc

SEQ ID NO: 115768 - DNA, 601 bp, Zea Mays
cacctcctggcggtctttgagaccaggctacgacaacttagcatagcgttgcctttaatgtgttgcgcagcagatatgctctctgttccttcaaggaagcaggtagtgatagtggggcagaaaggatctgaagaatttcaggacatggtagcagctacgttttcgtcatatgatccgaatagaacagtgatccaaatcgaccctaggaacacagaagaaatggaattctgggacggcaacaatgcaaacatcgcgcaaatggcacggggcagccctccggggaaaccggcggtggcgcatgtgtgccaggacttcaagtgcagcccgccggtaacctctcctgggtcgcttcgcgagctgctgaacaagacactggctgctgcaagctcagcctgaggccttttgcctcctgctatgttcgtagatgttctgataccagtgtaacaatagttaaaaaaaaacctgtgtacatatttacatgtgagaaatataaataggattgtcagttaagctgtacagcctgttaaagccttctcagctgtacacatgttcacaataataaggcacggagcataatggtttccttttcagcgttttcttc

SEQ ID NO: 115769 - DNA, 273 bp, Zea Mays
agcgagcagctatgatccaaaatttggtggatttggctctgctcccaagtttccaagacctgttgaagattatataatgctatacaaattccataagtacatggaggctgggaaggagattgaagccttgaacataaagaagatggtgactcacacattggactgtatggcaagaggtggagttcatgaccacataggtggtggttttcacagatatagtgtggatgagtgctggcatgttccacattttgagaagatgatttccgatcaggg

SEQ ID NO: 115770 - DNA, 1129 bp, Zea Mays
atgtcccccgccgcttccgcaccggtcttctcccacctcggccccctcatccctcctccaactccaatgctctccactcttctccgccaccgcctcaccgccgccgcctcctcctcgtcgccgacccacagcacgcctctccgtctgcgccccctcgccgcagccatgtcgtcgtccgcgtccgcgcctcacggcggccggaagccgaaccgcctcgccgccgagcacagcccctacctgctgcagcacgcgcacaacccggttgattggtacccttggggggaagaggctttccagaaggcgcgcgccaaggacgtccccatcttcctctcgagtatgaactctcctgataccattgtgttagctcagtagttttgttgcagccttgcaggcatgtagtgccaccaatgtgtgacatggtaaattgttttgcttaaccatattatgatggtcttgtcaagagagaactaagttaaaatggtaatcgaattttctgattccgttctagtcaactcaaacgttctgtacctaacgttcttattttgcttcattgcaatccggttgtgtcccacaagttggctatagcacatgccattggtgtcatgtgatggaggtggagtcctttgagaatgaggaagtggcaaagttgctgaatgattggtttgttagcatcaagtctgattattaattttgataggttgaccgtgaagagcgccctgatgttgataaggtttatatgacatatgtatcggcactgcatggtggtggtggttggcctctaagcgtctttttgtcacctgacttgaaacctctgatgggtggtacatactttccaccggatgataattatggaagaccagggttcaagactgtattgaggaaggtcaaggaagcctgggaaactaaacgtgaagcgcttgagcggacgggaaatcttgttatcgaacaattaagggacgcattatctgctaaggctagctctcaagatgtgccaaatgacctagcagttgtctctgttgatcaatgtgtcgaaaagccatctaataaagcatcagttagcccaaccatatcatctagcttcccagagttgcttctgcagaggttctatgactacgcggacatgtactga

SEQ ID NO: 115771 - DNA, 870 bp, Zea Mays
atgtcccccgccgcttccgcaccggtcttctcccacctcggccccctcatccctcctccaactccaatgctctccactcttctccgccaccgcctcaccgccgccgcctcctcctcgtcgccgacccacagcacgcctctccgtctgcgccccctcgccgcagccatgtcgtcgtccgcgtccgcgcctcacggcggccggaagccgaaccgcctcgccgccgagcacagcccctacctgctgcagcacgcgcacaacccggttgattggtacccttggggggaagaggctttccagaaggcgcgcgccaaggacgtccccatcttcctctcgagtatgaactctcctgataccattgtgtgtcatgtgatggaggtggagtcctttgagaatgaggaagtggcaaagttgctgaatgattggtttgttagcatcaaggttgaccgtgaagagcgccctgatgttgataaggtttatatgacatatgtatcggcactgcatggtggtggtggttggcctctaagcgtctttttgtcacctgacttgaaacctctgatgggtggtacatactttccaccggatgataattatggaagaccagggttcaagactgtattgaggaaggtcaaggaagcctgggaaactaaacgtgaagcgcttgagcggacgggaaatcttgttatcgaacaattaagggacgcattatctgctaaggctagctctcaagatgtgccaaatgacctagcagttgtctctgttgatcaatgtgtcgaaaagccatctaataaagcatcagttagcccaaccatatcatctagcttcccagagttgcttctgcagaggttctatgactacgcggacatgtactga

SEQ ID NO: 115772 - DNA, 1402 bp, Zea Mays
gaaaaagcgagaagcgatagagagaagaaacggaaaatcccttcaaaacccctccggtccctcacccccatccgccgccgctttcctcccacggtcccaccacgcgcgcggccggcgggcggccaacggcggggagcagcaccgcgcgatcgtcaccgacgcttccacctacgtgggtattagccttctcgtctcctccgctcgcggggaaactgtcggtttacggttgctcgcatggcctcgcttcccccagcctccccgttgctgcgatcgggagcgatcgatcgaatcggaatccttccgtctaaccatgcccgttcttccccgcgcgaaatcaacctctgcctgggtttgcgcgtgcggtttgtgttttgtccgcgaagtctgtggtttcagttgggcagccccgttacgcgcgtccctggccaagtccgcgcctgctaaggttgtttacattggggatcaccgttgttgcttagagaccgcattcgccggtgcatgagaaacatcaaggaaacgaccatccccacaatcatctaccgcggtcgaagggcgaggagataagaagtatctctggcctcggccaaaccccaaacctgcagctcttcaccagcgagcattagggctctagataggttaggagacacaccatcaaacacacctattccagtaagttcatagagtccaggcgcccagaacaatcaacgacttgagacctttatgaagttgttctcctaatgtgtgtacttgtttgttttctataggaatttgagtagaccgaaaccgaacgaatctgtctgtccagtgggacgtgatcatccaattgtgaatgcttgctttgttgtttggctgccgataacttgcttgccttctctcttattaggtacaaggtgtcatttatagttttaccaattttcgggatggtatctgatgcatatgaaggcttggtgcacatgtacacatataggatactgagctttaaaatcagatctaacggtgcatgctatcagggttttttctatgaaacaaaccagtcatggatgagagtgggtttttaaaatagacgtgcaccgttatatctgattttgaagaccaagattctacatgtgcacaaacccttcgtgtgcactggatatcatcctctgttttttagcagttctgtttttttttctgtcatcccttttaagttagtaccctgagtttcagttatgtatcgtgttatcgaatgcatcatcttgtcatgccttgaccgataacttgtgatggctgtttcatcaatatgttaatcttctcttaggtttttttgccattacgtcaacatgttaaccttgacaacttcattgtacttgtactattcagttttgattaattgataatttatactagtttattttcaagtctg

SEQ ID NO: 115773 - DNA, 638 bp, Zea Mays
ggaaaatcccttcaaaacccctccggtccctcacccccatccgccgccgctttcctcccacggtcccaccacgcgcgcggccggcgggcggccaacggcggggagcagcaccgcgcgatcgtcaccgacgcttccacctacgtgggtattagccttctcgtctcctccgctcgcggggaaactgtcggtttacggttgctcgcatggcctcgcttcccccagcctccccgttgctgcgatcgggagcgatcgatcgaatcggaatccttccgtctaaccatgcccgttcttccccgcgcgaaatcaacctctgcctgggtttgcgcgtgcggtttgtgttttgtccgcgaagtctgtggtttcagttgggcagccccgttacgcgcgtccctggccaagtccgcgcctgctaaggttgtttacattggggatcaccgttgttgcttagagaccgcattcgccggtgcatgagaaacatcaaggaaacgaccatccccacaatcatctaccgcggtcgaagggcgaggagataagaagtatctctggcctcggccaaaccccaaacctgcagctcttcaccagcgagcattagggctctagataggttaggagacacaccatcaaacacacctattcca

SEQ ID NO: 115774 - DNA, 241 bp, Zea Mays
caactaaaaagttttgtcgtacgcgtgtaccgagacaagagtgttggttaccgtacctctggatctaacatagagtgatcagctccgcgtgtattgtagctgacatagagtgaagcggtgaacgcaaagcgcgagtgctgttgccgccataggggcgaagtagtttagcgtgaactattattcacagtctaagactgacttcagcggttccccctaaatttctccccatatatcccactca

SEQ ID NO: 115775 - DNA, 497 bp, Zea Mays
gcgaaacttagcatctttcatcaacaaaccactggataaatcatgttctgtaaccgatacaaaatatataaaaaggaaaaagggggagaagcaacaacaggaactgcaagttcgttggctgaaaccacggtttcacccctcatcacgatcacacacgaaaacttttgaaaatgaacatgcggtagcctagttatcacttcacaaccagagcacactccttgattcaatccttttgtggcagatgccaaccacacaaaatttcgcctgcttgttctgttcagtggctgatgcaggcgttctcatccacctcctcaagaggaagcctcttcccttcggtgacctcctcttcctttacataatgaataaagagtaaagaaagattcactaacgacaatgctgaatgagtgcacacgagatgagtcaattaatttcatacctttgcagtaaatgatatatttcttgtgcgtggctttaagcttcatgaggcttatgctatt

SEQ ID NO: 115776 - DNA, 308 bp, Zea Mays
gttgactccttgcgcgtggaagggagcatgaacggagaaattgggtgcgggcgccgcagtcgattccgcctgtacaccatcggaaggtctatgggccatgtctgggagcttccttgggccgccgcgggggtgctcgtccatcatctcgggcatgtgcgacggtcggcgagcagcaatctctcgtcgaacttcgacaccgccgcacttccgcctatcaccgtggccagaaaacctcctgcaataatcctcgcggtgaggtcatgaggatctgaagaatcaccctggtaactggaatctcaagtgccagg

SEQ ID NO: 115777 - DNA, 116 bp, Zea Mays
ctatttcggcggctattttcccaccctgttccggcagattctctcctctctagctctctccttgttcaacaccggtggatgtcctctcctattcctcccataattctccgcggaac

SEQ ID NO: 115778 - DNA, 597 bp, Zea Mays
atgggggatccgagctgcccagtgacagcgtccatggccacaagaggaaggggatgtgtagatacgagtcaaatagtcggagtgaggcgtgactgggccagcctagcgccgctggcggtggagaagatcgccaaccgcctccaggacgaggacgtggcagacttcatgcagttccgcttggtgtgcaagctgtggatggacgacagtggcatcaggaagccccgtgagctgggcgcacgcgtcatcgaccatagcttccaccctcgccggtggatcctgttgacggaggagaaggaggaggctgaagaggcgacgcccacacccacgcgccgcacgctgctcaacctcaccacccggaagaccatccaggtggatctgccggagctcgccaggcactctgtggtccccaaacccgccgcggcgccggagggcatgctggtggtgcgcgacaagaggagtctcgtcgtgcgcctcctcaacccgccgcaggggcctctttgctgtctagaaaccacctcctcaacctcccgacgctacggcctggaaatcgccgcagaggccccgttcacagctcgttcgccgaggaccacaaggtga

SEQ ID NO: 115779 - DNA, 824 bp, Zea Mays
tctgctggctacccgtccaaggacgtcgcagagttccccaggcttggagttcatgacggcgtggtcggcgccagcgatctcgtggacctccgtgccagggctcatggccaccatccagcgctgcatctcctcggtgctggagcagtcggcattggccaccacgaacaccttcctgacggacccgtagttggcggccgtgagcagcgccgcgtccttcatcagcgggtcgtccatgaactggttgccgggcctcaccagcagcttcgccagggtcaggtcctccgcggggctctcctggtagtacttctcctccatataccttggacccatcacgatcgctgtcccttgctgccccacgccggggatgggcacctgttggcagtccatgagcagcccttcggaagcattccttctcatgaactgcgggtgacacccaagtgcttgccgacgcacggcagcgcggcggccacgaacacggcggtggcgaccttgctagggaacctctccatggcgagcgcgaggctgacgccgccgtggctgtggccgacgaggacaagcctgtcgccgtcgggggccgcggcgaccgcgtccagcagtgggcgcgagtagtcctccagggagcgcacctcgtgcaggcgcgccgggtgcgcgcccgccgctgccaggtccagcgccgtcacgcggtggccggcggattccagcgcggtggccaccttgtaccagcaccacgcgccgtggcagaggccgtgcaccagcacgaagtgcctgccgccgccgactacttccattattgctgctagctgtgccctgtgcgtgcagcggcg

SEQ ID NO: 115780 - DNA, 1283 bp, Zea Mays
aaacccctccagaacacgcggaaaaccaaaccgatagccgagagcaaaagctcgccacggcacgccaaaatactcctccccctcccctcatcgtcctcctcggctcggccgggctcctctgatcctctcccagtccggcaaaatacacctcccgctctcgcgtcgcgttcctgtcccgtcgtgacaagcacaaacacgtagtagcagcaaaccgaagcgacgcgtgcccgtcccgcgatggccacggcggccgcggccaggcaccagcaccagcaccagcagcgccggggtgcccagcgggggcggcgccgcgggagcgggatacggtgctcgtcgccggcgcaggagttcgcgtcgctggccgcggtgttccggcggcggctggtggtcggggccaccacggcggcggccgcggcggtgggggccaacttcggcggcgtcaccagcttcctgctgggcctgtcgccggagctcggccgctcgctccgcctcgacgtgctctaccccgtcggcggcttcacgcgctgcctcgactccgacaatgggttcgaattcatctatccatcaagttgggttggagaccagacgctactgtacagagaagcgaagaaggcagaattgcaaagatcgctagacccaccgccactgccaaacggaggatctccatctgggcctcggaacatcagtgaacctgtggcagcatttggcccccctggatccaatggggagctcaacgtcagtgtcatcgtctccactgtgccacgagacttctcgatcgagacgttcggcagcccaaaagacgtgggggaagtggtgctcagaaggatcgcgaggacgaggcgaagcccggacatcaacgctacccttatcgacgccgccgtgagagaggacgcgggcagggtgaagtactacaagctggagttccgagtcgagagcccttctttccggcggcacaacgtcgcggtctgctgcgtgagggacggcaggctctacaccatgaacgcgcaggcaccggagtcggcgtggaaggcggtccagaaggagttcttggcaatggcggactcgttcggcttagttagcgacgcttgattgacatgcagttaggcacgcagttttggttttgtacccctgagcgttttgtccactagtttgcaaggtctcggtaacgagatgccgtggtttggtgtagagaaactaggacatgatgtttctgtttctgttatactaccttacaatcatgtctgaagttttcttctgaatccgttggatctgatcttacattg

SEQ ID NO: 115781 - DNA, 3583 bp, Zea Mays
ggcccagctccaaaccctagcccgccgccgtgctgactcccctagccaggcacgacgtcgaagagagcagcggcggaggcggcaacctgatgcccagccccccgtgggggccatggagctcgtcctcgtcaagcccgcggcaggagctctcgtcgaggtgggctccgggtccgttgccggcgcgggctcgatcccggcgatggtggcggcgcagcaggagattttgcacgaacaggtggaccagctccaacgcctcgtcgtcgctcagtgccgcctcaccggcgtcaaccccctcgcccaggagatggctgccggtgcattgtctatcaagataggtaagaggccaagggatctgttgaatccaaaagcagttaagtgcatgcagtcactttttgccttgaaggacattcttggcaaaaaagaaacccgagaaattagtttactctgtggggtcactgttacacaggttagggaattctttacagttcaacgatcgcgagtgagaaaatttgttcgtctgtctcaagaaaaagcgctgagaatagagacacccaaagagcaggacaattcatactccataaacactgagcagataccgccggacatagaagcacaagctgaagttattgaacctttgagaactttagaaccggtggtcctacagagctctttgcaaccaacgtgtgtccctcagatctcttcgcaatcaatggagctccaacaaagcgatttgcagcacatggaagtcttccaaaactctttgcaacaagcagaggcacaacataacattgcagctcctataatgccatctggagcaatggttatgcaaccaactgacgctaagattagttcagactctgttcaaaaggaagttaagcaagagggagttcattctggtgttgcgtcagaagataagaagttcttggaaagtatctttgctctaatgcagaaggaggaaacattctctgggcaggttaaattaatggaatggattctgcaaataaataatgttacagttcttagtaggttcgtaacaatgggtggtttgaccattatgtcaacatggttgagtcaagcagcaattgaagagcagacatcagttatccatgttattttcaaggtgctgctccaccttccgttgcataaggctttaccagtccacatgtcagttgttctgcaaacaattaataagttgcgcttttatagaacacaagacatatcgagcagggctaggaacctcctctccagattgagcaaagtgcttgtaaggattcaggcattgaagaaacctcagaaggacttaatatgtaaacaaaggataagtgaaattctccgtgacgagtcttggaaatctgaagttgatattaccgaggaggtacttgctttgactgatggtgctaatgagagcagaaagcctgaacccagaaaaacaccaatgcttctcactgcttctgctattgagacaaataaaaggagttctgtgcagacaaaatccaaacaaaaaagaaaagttctacttgtggagcaaccaaacaagaaagctacgtggaagaatgctaattctgtcaggaacacatctacaaacaatagccggccattatctgcagatgatattcaaaaagcaaagatgcgtgccatgttcatgcaggagaagcgtggcaagattgacataaataaattgagtgataaaccacaagcaatggacacgaaaaaagcagctggattagtaaattcaaatccatcagctatgcccataagtccccatacgtcagctgcacaacctgttgacccaagcccatctacttcaaaacaaagcacagatcctcagcctgataatacagaaatttcaggtggtttgaagttaaacataggttccaaaaacaatgtcatagagaagttggattgcaagagagttctttggcaaataccaccagctgtatggatagacccctcgtggagtgtaggagctggtgacaacagcaaggagcttgaggttcaaacacagaggaaccggcgtgaaaaggaaaccttttatacaagccagaaggacgtcccaatgaatccaaaggacccatgggatctggaaatggacttcgatgacagcctgaccccagaggttccaattgaccaggtgccagatgtggacgccatggaaacggaaagcgttggcgcggcgcctagcgctgtggctcctgttaaggacaagcagattgaatctgcctcatcgacatcaggcgcagttgctgatgatgaggaagctaataccgattacgaattgcttacggtgctactcaggaacccggagcttgtctttgcattaacctctaacaagggggagaacatgcctaacgagcagaccattgcgcttctggatacactgaagcagaccggccttagcctatcagagcttgttaaccgtctggggaacggcgctgggctcccaaaagagccagagccggagccagaacctattcccgcttcgcttccgtcaccaactccgccagaccgtacatcaagggctgtctggataccagaacacgcaatgcaggtgagggctgctccaaccttgcatctgccaagccgggggagtacacctcctgttgcaaatgccgtgcaacaaggcttctcaaacgttgtcagttcgttaccctcacaaccttacgcccctccagtctcggtcttgccggcacagattcaagctaacgcacccccatctcttcctctgctggcggtctctgtaaacccgccagtccaacatgtttcccctgtgaataaccttctgaacagagcttcagtgcatcagcatggacagcagcaatacgctttgttgtctgaccctgttgccacgcccttgcatcaacaagcagcggggagcaaaccagctgtagcagcacatccgtcgttgcctgagcctaatgcatcatctcacacagcattcccttggcaatctaatgctgctgacatgacccacgctggacggaatgcgacggctgatccatgggccgccgcccgcgcagctaactcgtatagtacagcatcagcaagcacagtgccgtctgctaaccagaatgcttacggcgatcaaggcaagcagggtgcgtacagctcttatggatcttcggcagcctcgtcccgtcctgttgtaccagggcacgggcatgacagaaatggctacagccggtctgccctggtggagtacccatgggacgggcaccaccagcggcactcgaggtcaccagatcctggcgtggtccgggactacgacaccgactatggcggtgcgcagggctacagtcagcagcccctgacgcagtggagtgcagggaaagtgcagcagcagggctacaatcctgagccgtcaaggcagtggagttcttcccaggcgcaccagggcggctacgcacccgccgagccgtcgaggcagtggagttcttcccaggcgcaccagagctacgctcccgagctaccgaggcagtggagctccgaacgccgtggctacgatgatgcggagccctcgaggacatggagctccggccagcagaacccggaggcgccgaggcagtggagccgcgggaagcaggat

SEQ ID NO: 115782 - DNA, 1987 bp, Zea Mays
ggcccagctccaaaccctagcccgccgccgtgctgactcccctagccaggcacgacgtcgaagagagcagcggcggaggcggcaacctgatgcccagccccccgtgggggccatggagctcgtcctcgtcaagcccgcggcaggagctctcgtcgaggtgggctccgggtccgttgccggcgcgggctcgatcccggcgatggtggcggcgcagcaggagattttgcacgaacaggtggaccagctccaacgcctcgtcgtcgctcagtgccgcctcaccggcgtcaaccccctcgcccaggagatggctgccggtgcattgtctatcaagataggtaagaggccaagggatctgttgaatccaaaagcagttaagtgcatgcagtcactttttgccttgaaggacattcttggcaaaaaagaaacccgagaaattagtttactctgtggggtcactgttacacaggttagggaattctttacagttcaacgatcgcgagtgagaaaatttgttcgtctgtctcaagaaaaagcgctgagaatagagacacccaaagagcaggacaattcatactccataaacactgagcagataccgccggacatagaagcacaagctgaagttattgaacctttgagaactttagaaccggtggtcctacagagctctttgcaaccaacgtgtgtccctcagatctcttcgcaatcaatggagctccaacaaagcgatttgcagcacatggaagtcttccaaaactctttgcaacaagcagaggcacaacataacattgcagctcctataatgccatctggagcaatggttatgcaaccaactgacgctaagattagttcagactctgttcaaaaggaagttaagcaagagggagttcattctggtgttgcgtcagaagataagaagttcttggaaagtatctttgctctaatgcagaaggaggaaacattctctgggcaggttaaattaatggaatggattctgcaaataaataatgttacagttcttagtaggttcgtaacaatgggtggtttgaccattatgtcaacatggttgagtcaagcagcaattgaagagcagacatcagttatccatgttattttcaaggtgctgctccaccttccgttgcataaggctttaccagtccacatgtcagttgttctgcaaacaattaataagttgcgcttttatagaacacaagacatatcgagcagggctaggaacctcctctccagattgagcaaagtgcttgtaaggattcaggcattgaagaaacctcagaaggacttaatatgtaaacaaaggataagtgaaattctccgtgacgagtcttggaaatctgaagttgatattaccgaggaggtacttgctttgactgatggtgctaatgagagcagaaagcctgaacccagaaaaacaccaatgcttctcactgcttctgctattgagacaaataaaaggagttctgtgcagacaaaatccaaacaaaaaagaaaagttctacttgtggagcaaccaaacaagaaagctacgtggaagaatgctaattctgtcaggaacacatctacaaacaatagccggccattatctgcagatgatattcaaaaagcaaagatgcgtgccatgttcatgcaggagaagcgtggcaagattgacataaataaattgagtgataaaccacaagcaatggacacgaaaaaagcagctggattagtaaattcaaatccatcagctatgcccataagtccccatacgtcagctgcacaacctgttgacccaagcccatctacttcaaaacaaagcacagatcctcagcctgataatacagaaatttcaggtggtttgaagttaaacataggttccaaaaacaatgtcatagagaagttggattgcaagagagttctttggcaaataccaccaggtatatttttgctttgtgctccccaatttgccattcttttgaatgttgaatag

SEQ ID NO: 115783 - DNA, 1757 bp, Zea Mays
cctctggcctcttcgcgcagagccgcacaccgacccacgccggccgcgcccaccaggcagccaggcaccacgacgcggcagcccccggcctcggaagccaagagccataccgcctctttttcctccaaaagccaaaccaccacaccccctaatctctcgctctcttcctttctcacccccgtgaccctgtctcgccccttctcgcctcgccgccgcagccgatgggctccggggaggagccgtcgcagatgcggagggcgctggtggactcgctcgcgggtgccatctccggcggcatctcccgcaccgtcacctcccccctcgacgtcatcaaaatccgcttccaggttcagttagaacccacaacctcgtggggtattcttcgaagggatatatatggaccttccaaatacactgggcttctgcaagcaaccaaagatattctcagagaggaaggtttaccgggattctggagaggaaatgtaccggctttgttgatgtatatgccatatacagctatacaattcactgtcctacacaaactaaaaacatttgcttctggttcatctaaaacagaggatcatttgcatttgagcccttacttatcctatgtaagtggagctctagcaggatgtgcagcaactatagggtcatatccatttgaccttctgaggactattcttgcatcacagggtgaaccaaaaatttaccccaacatgaggtctgcatttgttgatataattaaaacccgtggtgttcaagggctttattctggtctatctccaactcttgttgaaatcataccatatgctggtttgcagtttggttcatatgacactttcaaacgttctatgatgacatggaacagatataaatattcgcatcttaactttggaagcgaggatgattctgtatcaagtttccagctatttctttgtgggtttgctgctgggacattttcaaaggctgcatgccacccacttgatgttgtaaagaaaaggttccagattgaagggctaaaacgccatccaaggtatggagctcgaattgagagcagcacatacaagggcatgtaccatgccctaaaggagattgtcgcaaaggagggatttggaggcctttataagggccttttcccctctttggtgaaatcggcccctgctggtgctgtgacatttgtggcatatgaatacatctcagactggttagagtcgatactgatgtgaaaatcttcaatgcagatagggagcaaggctggagttgagtgaggtcttgatggatcatggagctatcaagataccatgacgagaactttttgcacaccgtggacatggaggatggagaccggaaggtcaatcgtcaagtgcatacaattcctagagatccgatacatgtaaagccttacatagaaaagagctgttttgtcgtttcttattctttccccaattgcctaatgtggtggtagggcattcgttggcttgtaaaacaaggctgactacaactaacttagtgatcgcgacgcgtcatacatgactaagtcaaaagcagccggcagttttgctgggatcgtgttacgaatcttttctcggctgcagtcatgttttccttgcggcttgttggggctgcgtcttctacagtcttttttatttatatggattgcacctgcaacagactgcagcagctacggttgtagggcagccgaacaaatttcatggttgatggcagtcgtaatttattcaaccattttgttgagcacc

SEQ ID NO: 115784 - DNA, 1719 bp, Zea Mays
cctctggcctcttcgcgcagagccgcacaccgacccacgccggccgcgcccaccaggcagccaggcaccacgacgcggcagcccccggcctcggaagccaagagccataccgcctctttttcctccaaaagccaaaccaccacaccccctaatctctcgctctcttcctttctcacccccgtgaccctgtctcgccccttctcgcctcgccgccgcagccgatgggctccggggaggagccgtcgcagatgcggagggcgctggtggactcgctcgcgggtgccatctccggcggcatctcccgcaccgtcacctcccccctcgacgtcatcaaaatccgcttccaggttcagttagaacccacaacctcgtggggtattcttcgaagggatatatatggaccttccaaatacactgggcttctgcaagcaaccaaagatattctcagagaggaaggtttaccgggattctggagaggaaatgtaccggctttgttgatgtatatgccatatacagctatacaattcactgtcctacacaaactaaaaacatttgcttctggttcatctaaaacagaggatcatttgcatttgagcccttacttatcctatgtaagtggagctctagcaggatgtgcagcaactatagggtcatatccatttgaccttctgaggactattcttgcatcacagggtgaaccaaaaatttaccccaacatgaggtctgcatttgttgatataattaaaacccgtggtgttcaagggctttattctggtctatctccaactcttgttgaaatcataccatatgctggtttgcagtttggttcatatgacactttcaaacgttctatgatgacatggaacagatataaatattcgcatcttaactttggaagcgaggatgattctgtatcaagtttccagctatttctttgtgggtttgctgctgggacattttcaaaggctgcatgccacccacttgatgttgtaaagaaaaggttccagattgaagggctaaaacgccatccaaggtatggagctcgaattgagagcagcacatacaagggcatgtaccatgccctaaaggagattgtcgcaaaggagggatttggaggcctttataagggccttttcccctctttggtgaaatcggcccctgctggtgctgtgacatttgtggcatatgaatacatctcagactggatagggagcaaggctggagttgagtgaggtcttgatggatcatggagctatcaagataccatgacgagaactttttgcacaccgtggacatggaggatggagaccggaaggtcaatcgtcaagtgcatacaattcctagagatccgatacatgtaaagccttacatagaaaagagctgttttgtcgtttcttattctttccccaattgcctaatgtggtggtagggcattcgttggcttgtaaaacaaggctgactacaactaacttagtgatcgcgacgcgtcatacatgactaagtcaaaagcagccggcagttttgctgggatcgtgttacgaatcttttctcggctgcagtcatgttttccttgcggcttgttggggctgcgtcttctacagtcttttttatttatatggattgcacctgcaacagactgcagcagctacggttgtagggcagccgaacaaatttcatggttgatggcagtcgtaatttattcaaccattttgttgagca

SEQ ID NO: 115785 - DNA, 299 bp, Zea Mays
acctacaacctaggcttgattgtatctatgggagttgtaacaagaggtcacatcaccagcaaaaatcccccctattgcttgaacaccaactattttcaattggttaggagcctattgtttgttatgcaaatggccaagggcactattccaatatgtaaaatagtaatagttaattacttcggctaagttaacaaggcaagaaatacaatctttcaactatcgatcacaaagaaataaactaacaaaaatggaactgaatccagaagacttacatacacgctcttaaaagcataaacgca

SEQ ID NO: 115786 - DNA, 1946 bp, Zea Mays
ggaagcaggcgccaatctgaacaaaagaaaactgtgtgccattcatataatgtcacgcttccagtatcatatcaataacatgcagtgtatcagatataagatgcataatttgatttcgtcctaacaatcagatcgcgtataaagcgaaagaagtcacaaagtcagatccaagacgaaagaactcgtctctcagatgcgcggtatcacgtcaccactgcgctgctctagaaatcgaagccaccgccgtcgtcgaacccggcgtcgtagccggcatcatacgccgacgaatccgagatcatgtccccgaccagaaggcccccgacggcgccacccagcagcccggcgccgagccccatcccgaagttgttcttcttcttgggctgctgctgatacccgtacccggcctgtggcggtggcgggtacccgtacgcggcggcctgcggtggcgggtacccgtaaccgccgtactgcgacggaggagcggcgtagggcgccgccgtgctgggaccggcggcagggtaggccgtcaccggctcgcccgccttggccggcttgcctgccgcaggcgggtacgcgccgcccggaggtgggtacccgtcggccttggctgccggcgggtatgcggcaggaggcgggtacgcgtcggccttgcctgaaggaggcgggtacgtgtcggccttgccggacggtggctggtacgcggaggtaggcgggtacgcagcggcctgggtgtaggcggcctgggcgggggcgtagccgttggcgcctgtcgtctgggtgacctcgccgagcctgtacgacaggttgaggactccctggggcttgcccgaggagatcttgcggacctggtaggcgacaaacttggcggggacggggccgtcgggggcgccggagaggagctcggagagcgggatgtggacctcaccgacgtcgcggtcgccgagggcgcgctcggcgcggaggaggatgtggagggaggaggaggcgccggttgccgggacggcgaagcggagcgtggcgttccaggtagggttgcggccgccggcgcggtcggcctggatccgctgccgcgaccgggggtcgccagagagcgaagccacggcgtagacctccatcttggatagcaggttcacgtccttgaggtccttggccgagatcagtgtcagctccagcggccgcgtcgtcgccatggccgggagctcgcgggtgggcactttttttcttgtttggatccggcggagacgcgagagagtcgagatagatgatggattggttggttctccctctgcgagattgatcggttttgtgtgatgctgcttgtgctggatgaatcgatgacttgagattgtttccacgacacaaggctcgtgtttatgctagggaggggatcggagctcggaggaggctgctaggacatttcttgaacgcggatactttgccttctgcatgactggtgggtccaagtaacatgggactgtatgtcagtgaaacctttggtggcttgcaggtacttctagaatctagacccccgtgtgtgatggaggtcagcggtttccttacacgcggatgagaagaggagagtgtagcatgtatgacgcgtggtctcagggtgtgtctgggcttactctgtggcgctttgcgaccgcaccgcaacacgcggatcggttgccaaaggcgccgaaggaatgggaccgtttcttttgctcagtgccgttgggccaccttgtcggtgtctcagtgctgtttgtgtaatatcccaagtggcgacgtttctgcgcattgaccaacgccagtgtggcgtggttctcagcgaatctcagccgtcagttgtggtagcgccggcgattctcttgcgaaaaaagaaagatcgccttcgccgtttgccggagggatctttccacgcgtcgacgacgctgctcgtccgtcgctatggttttcttcgcaca

SEQ ID NO: 115787 - DNA, 124 bp, Zea Mays
tttttttttgaagaggcggtttttaactttccagttcaaagtaaaaaagatttcaacaaagaggttagacttaggtcatacgataataggagagaagattggccgaagtgcatgcatggtgagg

SEQ ID NO: 115788 - DNA, 1246 bp, Zea Mays
cgcccccgcccgtccgcctccttcgtcagctggcagctgctataataaggaaggaagaagataacggagggcaaggaaactcgctcccactctactcctatccactgcggcctggacgcgtgcgagagacttgaccaagcagcagcagcagggatggcgcctctgaagctgtacgggatgccgctgtcccccaacgtggtgcgcgtggccaccgtgctcaacgagaagggcctcgacttcgagatcgtccccgtcgacctcaccaccggcgcccacaagcagcccgacttcctcgccctcaaccctttcggccagatcccggctctcgtcgacggagacgaagtcctcttcgagtcccgtgcgatcaaccggtacatcgccagcaagtacgcgtcggagggcacggacctgctccccgcgacggcgtcggcggcgaagctggaggtgtggctagaggtggagtcgcaccacttctacccgaacgcgtcgccgctggtgttccagctgctcgtgaggccgctcctgggcggcgcccccgacgcggcggtggtggacaagcacgcggagcagctcgccaaggtgctcgacgtgtacgaggcgcacctcgcccgcaacaagtacctcgccggggacgagttcacgctcgccgacgccaaccacgcgtcctacctgctctacctcagcaagacccccaaggccgggctcgtcgccgcccgcccccacgtcaaggcctggtgggaggccatcgtcgcccgccccgcgttccagaagaccgtcgccgccatccccttgcccccgccgccctcctcctcggcttgacctcgccttgcgttgcgccgttgcctgggtcgcggatgcgtcggagccccgagtcgaataaaagaggcagcatcctgtcttgcatttgctgctgcgccatgtgttaacagcctgtgtaataaacactgttgctttcgtgtgtgttcattgccttttggttggtctttgcatatcctactagtgctgatctttttgtgaagcttggattggatggacgcgttttcttcaccgtaattcccttcttcctgagcgacgtgactgttgattcgaacaacaacaaaattttcggcccacaaccgcaaggcccgttcctacgactcacctgttgggtttgggttacagttaaggccttcctcttggatgaatttatatcccatatctaattctatggtgggattaaatccatcatttaattcatgtatctctc

SEQ ID NO: 115789 - DNA, 1986 bp, Zea Mays
cttccccgctacgcctatcccacccttggtccctaccgctaacccccagcagccgcgtgacacggtcactcgcgccacccgttctgcacctcggcccttctcatggcgacgcccgcctccgcgccggccacaccaaaccctaaccccgtctccggcgacccgccgtcgctgctgctacagcagcagcaggaggaagaggtgccagcgccggtcccggagacggcgccgacgcccctcaccacctcgatcgaccccaccccctccggcggcgaggagggcgaaagcgatgactcctcgtccgtctggtcggcgccctcctccgcgcccacccccgtcctcgcccccgcccccgcccccgcggcgccctcccccgcggccaaggacatcctccacatctccttcaaccaggactacggctgcttcgcagcgggcaccaagtcgggcttccgcatctacaactgcgaccccttccgagagatcttccgccgggacctcgccgccgagggcggagtcggcgccgggggagggggtatcggcgtcgtcgagatgctgttccgctgcaacatactcgcgctcgtcggcggcggagataacccccactacccgcccaacaaggtcatgatctgggacgatcaccagagccgctgcatcggggagctctccttccgctcccccgtccggggcgttcgtctccggcgcgagcgcatcatcgtggtgctcgagaacaaaatcttcgtctacaacttcgcggaccttaagctgttgcaccagatcgacactttgagcaaccccaagggcctctgcgccgtgtcacagcagcccgggtccattgtgcttgtttgccctggtgcccagaaggggcaggttagggtggaacactataagacaaggaagaccaagtttatcaatgcacacacttcccgcgtcgcgtgctttgcgttgtcgcaggatgggaggctcattgcgactgctagcaccaaggggactcttgttagaatctacaatgcagctgaaggcaatctcttgcaggaagtaaggagaggtgctgatagagcagaaatatatagcttggctttctcgaatgatttgcagtatttggctgtctccagtgataaaggaacaatacatgtcttcaacttaaagataaatgtgggatcaactgcaaatgacaagcctatgccttctccggatcctgaagttcctcacataaggccctctctttcattcattaagggtgtgctgccaaaatattttcactctgaatggtcagtagcccaattcaggctgcaggagggtgaacactatattgttgcatttggacatgagaagaatactgtggcagtcgttggcatggatggaagcttctacagatgccggtttgatccagtcaacggaggagaaatgctgcagctggattgctacagtttcctgaaaccgtcggatcaaccgtagtcactagtccgtagcaacgcaacatactgtcagcatcaccctcaatctattcatgcccactaccgcggtaccaggattgtacattatctttgtgtgccttcgttgactcgtgggtttagcaaaaataataatagtttatttgtaaatatatatttcttgttggctctgctgtttgttctgcggaaggcctaaatcacccgtctgcagacgaacgtagtagaatgcatcgttatttatttcatgaataaaataaagtagcctaataatgttgtcttagcgtggtgaataagttaggctagcgttgtattttttttttgcccttgccttttaggataaaatattgtcggtatgcctaactattctgtccttgtgtttgattggttggttgcgctgtgatccttataatagtaatgtttcgtcttcatgcgaatcatcatccgcatccgctctcccaagcccccaaccaccaccacacggctggcggttcgtcgcttcaccacacagcacacgtcgtccgttcttttatttgttatc

SEQ ID NO: 115790 - DNA, 1706 bp, Zea Mays
cttccccgctacgcctatcccacccttggtccctaccgctaacccccagcagccgcgtgacacggtcactcgcgccacccgttctgcacctcggcccttctcatggcgacgcccgcctccgcgccggccacaccaaaccctaaccccgtctccggcgacccgccgtcgctgctgctacagcagcagcaggaggaagaggtgccagcgccggtcccggagacggcgccgacgcccctcaccacctcgatcgaccccaccccctccggcggcgaggagggcgaaagcgatgactcctcgtccgtctggtcggcgccctcctccgcgcccacccccgtcctcgcccccgcccccgcccccgcggcgccctcccccgcggccaaggacatcctccacatctccttcaaccaggactacggctgcttcgcagcgggcaccaagtcgggcttccgcatctacaactgcgaccccttccgagagatcttccgccgggacctcgccgccgagggcggagtcggcgccgggggagggggtatcggcgtcgtcgagatgctgttccgctgcaacatactcgcgctcgtcggcggcggagataacccccactacccgcccaacaaggtcatgatctgggacgatcaccagagccgctgcatcggggagctctccttccgctcccccgtccggggcgttcgtctccggcgcgagcgcatcatcgtggtgctcgagaacaaaatcttcgtctacaacttcgcggaccttaagctgttgcaccagatcgacactttgagcaaccccaagggcctctgcgccgtgtcacagcagcccgggtccattgtgcttgtttgccctggtgcccagaaggggcaggttagggtggaacactataagacaaggaagaccaagtttatcaatgcacacacttcccgcgtcgcgtgctttgcgttgtcgcaggatgggaggctcattgcgactgctagcaccaaggggactcttgttagaatctacaatgcagctgaaggcaatctcttgcaggaagtaaggagaggtgctgatagagcagaaatatatagcttggctttctcgaatgatttgcagtatttggctgtctccagtgataaaggaacaatacatgtcttcaacttaaagataaatgtgggatcaactgcaaatgacaagcctatgccttctccggatcctgaagttcctcacataaggccctctctttcattcattaagggtgtgctgccaaaatattttcactctgaatggtcagtagcccaattcaggctgcaggagggtgaacactatattgttgcatttggacatgagaagaatactgtggcagtcgttggcatggatggaaggtttgatccagtcaacggaggagaaatgctgcagctggattgctacagtttcctgaaaccgtcggatcaaccgtagtcactagtccgtagcaacgcaacatactgtcagcatcaccctcaatctattcatgcccactaccgcggtaccaggattgtacattatctttgtgtgccttcgttgactcgtgggtttagcaaaaataataatagtttatttgtaaatatatatttcttgttggctctgctgtttgttctgcggaaggcctaaatcacccgtctgcagacgaacgtagtagaatgcatcgttatttatttcatgaataaaataaagtagcctaataatgt

SEQ ID NO: 115791 - DNA, 1663 bp, Zea Mays
gacgccacaacgtggaataggcaagttttgtacttggccgaaccacgggataaatcactgtgtcttctctgtattgaattctttgtgattaccatattgtgcaagatcttctctctagccacttggcattaactgtgctaacacttaatcaaagttttgtggcttaagttttgaagtttacaggatcacctattcaccccccctctaggtgctctcaccatgttggaaagaatgtgaagaaaatgcacgtctgcaacaccgcaggctctagaggctaaagagaagtgcaagaaagcaatagaggctgtaaaaaggaagagggaggagaatactgttcgtgagctagaacttagagaggaagtgaatgtatctagggttggagaggagtcagaagaagtcacttgtgttggaagctcacagcctcacaaattagggccaattgacaaatggacacgtgccattgatcctaccaaggctgattctttcaaacaacagcagctgaacaaggaactgtggaaagaaagagagcatgaggtgcacaagtttattgcaagatgggcctataatcgtggaatacctttcaatgcatgtgacaatgatgagttcaagcaaatgtgtgaagcaattggacaatttggaccaggacttacacctccaactcaagatgcctttcgaggtagtttgctggaagaagaatatgaaagaaccaagtgtttgctgcaggaacatgaagccgagaagatgaaaaatgggtgctctattatgatcgatgcttgtatgcaagagaagaaggaccagttaaggaagatggtggttcatagcaggtgggactcattaaaggatgtgaaatcaaagaaaggaaaagaggccacaactactatattgagtccagccttttggaaggatgtgaagctaatgttggttgtttttgagccattggtcaaagtcctccgtttggttgatggggatgtgaagccatccatgggtttcctttatggagagaatagagaaggaccatttagcaagaagcttgcaagaacttttcaaaactatgattacaatccaggtagagcatcatggtggcggttatatggaactgaaacaccagctttacagaagatggctacaaggatattatctttgacatcaagctcttctagttgtgaaagaaattggagtgggtttgaagggatacacactaagaagagaaataggctgactacaacccgcctcaacaatgatacaactgaagctcaaggttttctccaagagggtggagatgattgtgcacaagttgtctttagagatggggaggaagatgagatggaaggtacagggataccttggtctgttattggagaggcagtgggagcagaagaacagcttgagcctcgtagaagtgcaagagtgagagagctctatgaaggagaagagtttgagtctgaagaagaagagtatgaatatgaagatttgtgctacagtgaagatgaaatatgatctggaccatctccatctagtagtgaagccttttgtgatgccctggtcttatgaactgcagctgtgtcactttgtgtctgtgtgtcttcttttgtgtgagacctgaactaagaactatgtgcttgtgctgtcctttatttataaattgtgttctgcacttgtatta

SEQ ID NO: 115792 - DNA, 853 bp, Zea Mays
agcccctcctcgcccaccaccctctcccgcacatccggacatcgatccccacagagccagggcgtgcaggcgggcgggcgggcgagcgagcgagaggaaaagccaaggcggcagcagtaggcagccaccatcaataaagaaggtccaagcatgtcgggggtgtgggtgttccggaacggcgtggtgaggctggtggagaacccgacgtcggggaacgcggcggcggcgccgggcaagcgcaaggcgctgctgcacacgccgtccggggaggtggtcacgtcctacgcctcgctggagcgcaagctggcggcgctcggctgggagcgctactacgccggcggcggagacggcggcggcgccggcctgctgcagtaccacaagcgcacctccgtcgacctcatctcgctgcccaaggacttcgcccacttcggctccgtccacatgtacgacatcgtcatcaagaaccgcgacgccttccgcgtcatcgacgcctaattataagctagcggatgcagcagatgacagatactcacctctcctcgctcgctcctcgctccggccagtgcatcatctacctcgctgtagctacctacctaccctaatataatagcagctatagccttcgtcacccattgctcgatcgatttagttgccgtgtcgatctcagtgccgcgttggtctaaattaatatatatagatcatgtactgatgatttggtttgttcatgcatgttttctctattttacatcttgtgttgctgggtctctgctgctttgtattcttcctctcatcagttttttcatcatctcatgcgctgtgacccagctgcaagaactgatctcgattacttgtt

SEQ ID NO: 115793 - DNA, 575 bp, Zea Mays
gagccagggcgtgcaggcgggcgggcgggcgagcgagcgagaggaaaagccaaggcggcagcagtaggcagccaccatcaataaagaaggtcctacgcctcgctggagcgcaagctggcggcgctcggctgggagcgctactacgccggcggcggagacggcggcggcgccggcctgctgcagtaccacaagcgcacctccgtcgacctcatctcgctgcccaaggacttcgcccacttcggctccgtccacatgtacgacatcgtcatcaagaaccgcgacgccttccgcgtcatcgacgcctaattataagctagcggatgcagcagatgacagatactcacctctcctcgctcgctcctcgctccggccagtgcatcatctacctcgctgtagctacctacctaccctaatataatagcagctatagccttcgtcacccattgctcgatcgatttagttgccgtgtcgatctcagtgccgcgttggtctaaattaatatatatagatcatgtactgatgatttggtttgttcatgcatgttttctctattttacatcttgtgttgctgggtc

SEQ ID NO: 115794 - DNA, 270 bp, Zea Mays
atgaagatcctgagaaggaacgatgtagggtttacagagtcttactctgacaacagagaccttttgctcggcgtcataggtcgtgacgccgagctacctgatgcgctgccacctacatggtcgtatctcggcaccaacgccgagctccttgagaaattactttccagttgcatgtgcttcgttggtgacggttgcagcatagaaatcagcagcatagaaatcaacaatggacgagacagggccatgtgcttgcgtcatagcaatcgatga

SEQ ID NO: 115795 - DNA, 337 bp, Zea Mays
tctattcatagacgaaattaccgaacaattaaatagtcgtacgtgagtagtgacttactgatatgcaagtacgaccttagagatgccacattaccacctgcatataaatgaaagatctttacacattattgaaaagttagatgtgaaaaaaaatctcatggtaagttaagaatcgctagtcatacaaaacgcaaactcaaataagcatgtcagcaaccaataaaacatgacaaactcaatgaagccactgttagcagcgtagtttttttacagtattagtagcatagtttctattcttagaagaaaaaagtagaagtgtcaactccaccaagaaact

SEQ ID NO: 115796 - DNA, 1037 bp, Zea Mays
atgggaagccacgcttggctaccgtccctgtgccattgcctcctagcgcgagtgcagctattgcatcatcttctggagcagtataacatgtcatcacccctggagggctggaggagcttaggaagtcaggaactcgcaatcatgtggtgtcacttccacaggaattcctcaccgctgcggtcgcttggtggccatgtacgagatctcgggtctgtttggttctcgactaattgtgccacaacttgcctaaggttagttagccaaaatgaagaactaactttagacacaaaaggttagacaaactgtggcaagttaggcgtcgaaccaaacagcctcctcgcctttgcatttgtaattctgcatcatagtcaatacatttgtttgccatggattttaacttcgttttcttgacagacccgtataagtgcaaaagctcagcgtaagattgcaagagagatcaaaactgcgcgtgcgtttgggttaatgccttttacaacaatgggtagaagaccattcttctttggcagaagtgcggaggagcattattcggatgatggatattttggctttgtgaagcagaaggatggtgagcctgttgagaatgaggacgctgagccaaatgtggaggctgtgtaaacattctggagcatcctttttttgcaagcgctccgttcggtttcttctggtgccttcatgacaagtcacacaatgctcgttttgcgtcttcagatcatagcgtagctcagcttgaataaaactgtaacatcacgcctgttttgtgaaaactcgtgccttgctcaattgtgccactttagcagacatccccagctcacctcatcctggctggagatcatatcatatgcagatatgaaatggaacgttggatcagagttttagtggacgctcaattttttttgaggtagcagcactgatttcagtttctgttggataatgattgtttggctgcttaacgagaaaaatatagtatgcacgtacaaaatgttagattttttaataactaaaatgttttcttcaaa

SEQ ID NO: 115797 - DNA, 1670 bp, Zea Mays
actagcatgtaaatatagaaatatataggaatataatcttaaataggtttattgatttaatagagaagtaaaaaaaaagaaaaaaagaaaacagttaagattaaggttatatgggccaccagtttcccggtccatgctaaactcaccctgcagccgccacctcatgaactcaccctgcagcaccctcaggcctcaccgcctcagctgccaccctcaccctgcatccgagagagagagaggagagttgccgccggagggaggaggtcgccgcggaggggaggggctcgccggtaggggacatcgccggcgcctggagagctcgtggaggggacagccaccgtcaccgccaggagacaagcgccgccgccgctaggaatcaggagacaagcgagcgcgatggtgagctccgcactgaggcgctgtctcccctgccatgcctctctctgtcatgccttccctccccatccgctgctggccgctgccggcgtcttccgtcgttcattccagtccggggatggtgagactatggacgaattcgaagaacggttgtttgggggcaaggacacagacaaaggatcactctacgagaagctcgatagggctgagaacactggtaggagatacaattttgggttgtccaagggtggtttcactaggttaagtgacagtagcagctctggtttccctgggtttcctgcatctagcgacaggagcagttcaggatggatggatggttatgattcttttaatgatggcttaaatgatacaattgctaatgcggcacgcaacatccaaatggaggaggacgaggacgtcgacggtgactgggaagatgactttgagttcaggcctgatgttcggtttaggcgaggttcaacgtattctgttcgggaccttgaccttagaaaacctgcagccgcaaagaaccctcctagacgacagtttgaaacaactacagcggaggtactgaagaaggctgattttaggaatgttagattcctctccaactttcttacggaagctggaattatcatcaagagaagccagacccgtataagtgcaaaagctcagcgtaagattgcaagagagatcaaaactgcgcgtgcgtttgggttaatgccttttacaacaatgggtagaagaccattcttctttggcagaagtgcggaggagcattattcggatgatggatattttggctttgtgaagcagaaggatggtgagcctgttgagaatgaggacgctgagccaaatgtggaggctgtgtaaacattctggagcatcctttttttgcaagcgctccgttcggtttcttctggtgccttcatgacaagtcacacaatgctcgttttgcgtcttcagatcatagcgtagctcagcttgaataaaactgtaacatcacgcctgttttgtgaaaactcgtgccttgctcaattgtgccactttagcagacatccccagctcacctcatcctggctggagatcatatcatatgcagatatgaaatggaacgttggatcagagttttagtggacgctcaattttttttgaggtagcagcactgatttcagtttctgttggataatgattgtttggctgcttaacgagaaaaatatagtatgcacgtacaaaatgttagattttttaataactaaaatgttttcttcaaa

SEQ ID NO: 115798 - DNA, 1558 bp, Zea Mays
actagcatgtaaatatagaaatatataggaatataatcttaaataggtttattgatttaatagagaagtaaaaaaaaagaaaaaaagaaaacagttaagattaaggttatatgggccaccagtttcccggtccatgctaaactcaccctgcagccgccacctcatgaactcaccctgcagcaccctcaggcctcaccgcctcagctgccaccctcaccctgcatccgagagagagagaggagagttgccgccggagggaggaggtcgccgcggaggggaggggctcgccggtaggggacatcgccggcgcctggagagctcgtggaggggacagccaccgtcaccgccaggagacaagcgccgccgccgctaggaatcaggagacaagcgagcgcgatggggatggtgagactatggacgaattcgaagaacggttgtttgggggcaaggacacagacaaaggatcactctacgagaagctcgatagggctgagaacactggtaggagatacaattttgggttgtccaagggtggtttcactaggttaagtgacagtagcagctctggtttccctgggtttcctgcatctagcgacaggagcagttcaggatggatggatggttatgattcttttaatgatggcttaaatgatacaattgctaatgcggcacgcaacatccaaatggaggaggacgaggacgtcgacggtgactgggaagatgactttgagttcaggcctgatgttcggtttaggcgaggttcaacgtattctgttcgggaccttgaccttagaaaacctgcagccgcaaagaaccctcctagacgacagtttgaaacaactacagcggaggtactgaagaaggctgattttaggaatgttagattcctctccaactttcttacggaagctggaattatcatcaagagaagccagacccgtataagtgcaaaagctcagcgtaagattgcaagagagatcaaaactgcgcgtgcgtttgggttaatgccttttacaacaatgggtagaagaccattcttctttggcagaagtgcggaggagcattattcggatgatggatattttggctttgtgaagcagaaggatggtgagcctgttgagaatgaggacgctgagccaaatgtggaggctgtgtaaacattctggagcatcctttttttgcaagcgctccgttcggtttcttctggtgccttcatgacaagtcacacaatgctcgttttgcgtcttcagatcatagcgtagctcagcttgaataaaactgtaacatcacgcctgttttgtgaaaactcgtgccttgctcaattgtgccactttagcagacatccccagctcacctcatcctggctggagatcatatcatatgcagatatgaaatggaacgttggatcagagttttagtggacgctcaattttttttgaggtagcagcactgatttcagtttctgttggataatgattgtttggctgcttaacgagaaaaatatagtatgcacgtacaaaatgttagattttttaataactaaaatgttttcttcaaa

SEQ ID NO: 115799 - DNA, 2875 bp, Zea Mays
cccgattcgctggcctctcccgaccctgccccgcctcatcactccccatcccaccgacacacggcgtgtcaggtgtcacgcgcctccgctaaaaccctagccccacccaggcctgatggctgctccgcggcagccgcacccaccggcagcggaggagggagccgcgccggcgggtcccctgcccgccgccgcgccaggtccgcgtccgtacgacgtgacggtcgcggcaacggagctccggccggtggactgcaatctcgccgcgctctgtgaccacgttcaggcggagggcttcggctccggggccttctccgacctcgtcgtggaggccatgggcgccacctaccgcctccatcgcctcatcctctcccgcagcgcctacttcaggaatatgctacatggtccttggagagagtcgggagcacccacagtggttttgcacatagatgatgccaatgtcgattcagatgcaattgcaattgcgctcgcatatctttatgggcaaccccccaagcttactgatagcaatgcattccgagtgcttgcagctgcatcatttctggatcttcaggacttatgtacaatatgtacagattttatcatttccgagctctggacatcaaactttttacaataccagttgtttgctgagagtcaagattatgggagccatggagaacgtgttaggaacgcttgctggggttatctttgtcaaagtgccacaatggaattacgagaggtgctaccaaagctttcttcacaaactttgcatgctcttcttacatctgacgaattatgggtacctaacgaggagaaaaggtttgaactagcattacttactctacttgcaaaggttgctatgtgtgagatacaagttagtggtaatgaaacaaatttaccaagtgctgatcgatccatgaggaaggggaagactccaatgaatgaatctggggaggaactgctaatggactctgaattgcagaacttgaagttgcatgataacttggggaatgaaatttcccataacattattgctatttcagatatgaatggtgaagctcccaagagaatggagattgattgttctaccggaggaccatcaggagaaagcacttcatatcaatttaatgaaaataactggatttctagtgagcaaactgcaaataattatttctcaagaacttccagtagtgttgttgttcctactgagtggggaaggcccaatgcaccactttggggtggcagggtcgttggacggcggcaaattagatacattagaggaagctcttgtctatctactgatgaatataatgcttttatgaatatatttgagagaggttctcttctctactgcaatatgtcctttgatgcactgctaagtgttcgaaagcaactcgaagaatttggattcccttgtaaagctgtcaatgatagtctatggctacagatgcttctgtgtcacagggtgcaagcgattgttgctgatacttgcaggaattgttgccttatgaatagttcttgtgcttgcaagcaagcatatgtgagctcgcatacacattacaggcaggagcatgacaggagcagtgcctccgacaacataggtaatgtctaccttgcggatggccagggtgatgggaatggtgtacttgggcctgtccgtgttaatgtaagaggagcagtcgatggacttgctggtattgggagagggaactcaaatgtgcctggtgcagcttgggctcctacacgatatgtcttctcccgtgtcccttatgggcttggttcaagaaatggccagcaatttgccattgatgaatcagaacctagaattgaccgcaatggagatatttcagcagatggtctgactgcattggttaaccttagccaagaaaacaatgctgctcatctgcaggatcaaagtctatttgagacagggatgcagacaagatatcgcagtgttccatctgtttccactccaggtggttcttctgtccagatgcaggagtcaaaggagcatgaacttggatcagattgggaaaccacaaaggatgcaactatatcattagacatgaaaacacctcttagccattttccacctttccgctttggggttgagttcgaggatgtgcacaggcttgctgatggtcaggtgaaacattcgactgaagtgttttatgcaggctctctatggaaggtgagtgtccagccattcaatgatgaggatcctcatgggcgacgcacccttggactatttctccaccgacgcaaggctgagttgttagatcccttgaggaaggctcacttgtacgttgacccccgggaaaaggtcactgctcggtatcagctcatctgtccatcaaagagagaggtcatgatatttggaagcctgaagcaggctgggacgctgctaccaaaagcgccgaagggctggggctggcgcactgctatactatttgatgagcttgctgatcttctccagggtggtgccctgcgaattgctgcagtggtccagcttgtctagattagttgcagaaaacaactgcttgcaaggatggtgatagcacagcagtttgtgtaattgatatactccctccgtcctaaaatatagttttttctggtccttttttccgtccacattcgaacaaatgataatgaatagacatacatacaaactacattcataaattaagttaagtagtcaatgcttgtttagtgtaaaacgaattatattttaggacggggtgagtatgtaagaactcaatctgtcatgtactcgttgtcatgtactcgtgctctgaaatattgtataatctatagcggtttgctgtttggtatataaaagagaatatatcagatgcaaaccaaccacttgtacaaa

SEQ ID NO: 115800 - DNA, 175 bp, Zea Mays
tttgacttcatgtgacttattttagaaacttgagctcacgaactttctcttattaggtctctgtatgatggaattatgttattttataatctctgttcgttcagtcagtcgttgtgaactctcttctaattgctcacttcattaaccgtgttgtaccaagacatattgcatgtag

SEQ ID NO: 115801 - DNA, 2890 bp, Zea Mays
ctcgcgggagtgcatgccgtagcgcgcgtgcgcacagggcggacgacgggatctcaggcggacgttgaggagcggctgatgttggagccgtcaacactcaacaaaaagcacacgttcataccctagctagcatcacgagagaaactgcctataaaatccaagctatgtgaaacagaaacaagaggtcgatcggccagagcaactgagcgtgagagaccccccataccttctagtctagcatggctgaacctcaccacacaagcagcaacggagctgctcacggtgatgctgatgatgcgtcggagaaaatgccgcccaagaggctacagagatatgattcactgcacatggaggctggaatgttccctgctggtggatcgacgcatgcagccaaggttggctgggcgaccacactgcacctagcattccagagcataggtgtggtctacggagacatggggacttctccgctctatgttttctccagcaccttcacaaacgggatcaacaacacagatgacctcctcggagtcatgtctctcattatctacactgtgattctccttccgttgataaaatattgttttattgtcctgcgagctaatgataacggtgatggaggaacgtttgcactttattcattgatatcacggtatgctagggttagcttgatacctaatcagcaggctgaagatgcgatggtatctcactacaagttagagtctcccacatatcccatgaagagggctcattggatcaagaagaagatggaaagcagtccaaaatttaaggtcttgctttttctagtgacagtcctggcaacatccatggtgattggtgatggtgtactaactccatctatgtcagtacttagcgctgtcggggggatccaacaaagagcaacgaacctgactcaaggacaaattgttggcatctcaatagccattttgatcgtcctctttcttgttcagtgctttggcacagacaaagttggttacacatttgcacctataatcttggcatggttcctcctgattgcgggtattggagtttataatttgatcaaacatgatgttagtgtcctgaaagcattcaatccaaaatatatcgtggactatttcaaaaggaatggaaagcagggctggatttctcttggaggagttattttatgcatcacaggaactgaggcaatgtttgcggaccttggtcacttcaatgtgagagctattcagattggcttttcagtagttcttttcccttcggtactgctggcatacattggacaagctgcatatcttcgtgtctacccagaaaatgttgcaaatacattctacaaatcaattccaggtccattgtactggccaacatttgtggtggctgtagctgctgctataattgcaagccaagctatgatatctggtgcctttgcaattattgctcagtcccaagttctaggttgctttccacgagttcgtgtcacccacacatcaacgaagtttgaaggacaggtctacatcccagagatcaactatgtcttgatggttttgtgtgtagctgttacagctattttccaaactacagaaaagattggcaatgcatatggtattgctgttgtctttgtgatgtttataacaacacttctagtcactttagtaatggttatgatatggaagacaagcctgctgtggattgcactctttctagtaataattggtggagcagagctcgtatacttatcttccgcattctacaagttcactcaaggtggctacttgccattagcttttgcaggaattttgatgtttataatggccacatggcattatgtccatgttcatcgatacaactatgagctccagaacaaagtatcaagtaactatgtggcagaattgtccgcaaggagaaatctggccaggttgccaggaataggctttttgtactctgagcttgtacaaggcatcccacccatacttcctcacttgatagaaagggtaccttccatccattcagttctcgtgattatctcaataaagtacttaccgatcagcaaaatagaaacaagcgagaggttcctcttccggtatgtggagccaagagattacaggctattccgatgtgtggtgcgctatggatacaatgataaagtggaagacccaagagaatttgagggcttagttattgaacatctgaaacaatttatccatcaagaatcattttacagccaaggagataattcaacagaagaagtagaagatgcaaatgagccttccgtcagagttcaaggggcaacattgtccgatagttcttcagatagaagcactgctgctccatcaaatggatgcatctatgagatccaaacaatacaaagagagatggaggatggtgttgtccatatgctaggagaagctaatgtggtggcagaaccaaatgcagatttcttcaagaagataatagttgactacgcttacaatttcatgaggaagaacttcagacaaccagagaagataacatgtgtccctcataacagactgctccgggttggaatgacatatgagatctagggcgatgctgaactttgtggagcacagcaatttaatcaaagcaggcaggtggttagctacttgacaatggagtcggtcttctcagtatcaagtcaggaaatggaagggttctgttcaaagaggtggagaaattaactagagtacatctaatgggtccttccttatgtcataaacctgttagaaatatttcgttttaacttactcatgccaaactaggtacgaaatactctgtattgttctaatgacattaaacggtgttatactgttacttattttccctcccaaataattcatgggtgaagatcctcacctagaaaatttgtattaca

SEQ ID NO: 115802 - DNA, 1645 bp, Zea Mays
ctcgcgggagtgcatgccgtagcgcgcgtgcgcacagggcggacgacgggatctcaggcggacgttgaggagcggctgatgttggagccgtcaacactcaacaaaaagcacacgttcataccctagctagcatcacgagagaaactgcctataaaatccaagctatgtgaaacagaaacaagaggtcgatcggccagagcaactgagcgtgagagaccccccataccttctagtctagcatggctgaacctcaccacacaagcagcaacggagctgctcacggtgatgctgatgatgcgtcggagaaaatgccgcccaagaggctacagagatatgattcactgcacatggaggctggaatgttccctgctggtggatcgacgcatgcagccaaggttggctgggcgaccacactgcacctagcattccagagcataggtgtggtctacggagacatggggacttctccgctctatgttttctccagcaccttcacaaacgggatcaacaacacagatgacctcctcggagtcatgtctctcattatctacactgtgattctccttccgttgataaaatattgttttattgtcctgcgagctaatgataacggtgatggaggaacgtttgcactttattcattgatatcacggtatgctagggttagcttgatacctaatcagcaggctgaagatgcgatggtatctcactacaagttagagtctcccacatatcccatgaagagggctcattggatcaagaagaagatggaaagcagtccaaaatttaaggtcttgctttttctagtgacagtcctggcaacatccatggtgattggtgatggtgtactaactccatctatgtcagtacttagcgctgtcggggggatccaacaaagagcaacgaacctgactcaaggacaaattgttggcatctcaatagccattttgatcgtcctctttcttgttcagtgctttggcacagacaaagttggttacacatttgcacctataatcttggcatggttcctcctgattgcgggtattggagtttataatttgatcaaacatgatgttagtgtcctgaaagcattcaatccaaaatatatcgtggactatttcaaaaggaatggaaagcagggctggatttctcttggaggagttattttatgcatcacaggaactgaggcaatgtttgcggaccttggtcacttcaatgtgagagctattcagattggcttttcagtagttcttttcccttcggtactgctggcatacattggacaagctgcatatcttcgtgtctacccagaaaatgttgcaaatacattctacaaatcaattccaggtccattgtactggccaacatttgtggtggctgtagctgctgctataattgcaagccaagctatgatatctggtgcctttgcaattattgctcagtcccaagttctaggttgctttccacgagttcgtgtcacccacacatcaacgaagtttgaaggacaggtctacatcccagagatcaactatgtcttgatggttttgtgtgtagctgttacagctattttccaaactacagaaaagattggcaatgcatatggtaaattctcaattctagaaacaagcatccctcccatcccagg

SEQ ID NO: 115803 - DNA, 189 bp, Zea Mays
ttagatgtttgtgaactcttcatattgatacatcctaatgtggtggcaggaccaaatgcagatttattgaagaagataatagttggctacgcttgcagtttcatgaggaagaacttcagtcaaccagagaagataacatgcatccctcataacaggatgctacgagtgggaatgacatatgagatctag

SEQ ID NO: 115804 - DNA, 1390 bp, Zea Mays
gcgttgcggcatccttccttccttctcacgaaaaggcaggcaagggaaaggcaaaggacaacccatcccctgcctcctccgttgctctgctgctccccctccttatctaatcctctggttcctggacaccggcctgcaagctccagcagcagcggcgccggcgacgaaaggaggaggattgctaccatcctatatcatatcatacatatacacaaggaggaggagaaggtgtgtagcgaggttgaggtccggaggatgccttccagtgccatgagttccgggctggagccggtgctctgcgcgcctcggccgcgcagggtccagcagctgcacccctgcagcgccgacctcatccttggcgcaccgcccttcccgcgcaacgccaacagcaaggtacgtacgcgctcgctcgtcgctcctcccccccaagctcttgttgttcgccgtcgcttacaaagccgtgctcttcctcgctctcgttacaggccagcggcagcagcagcagggaaggaggcaggaagacgaccaggccggcggcggaggacgaggactgccgctgggcggcgttcggcgggtcgccgccggcgcgcgcggacaacccgctggtgcacgacccccggttcctgcggaaccagcgccacccggcgccgctggagctcgggtcgccgaaccaccggcggccgacctacagcagcggtggcgacggcagcgggtttgcctcgtcgtcgttcgcgccggccgtgaggatccagggcttcgacgtcgccgcgtgccgcgcgtgagagcgagctccggccgggcggggctttggcttttcgatctattaaattaaattaacagcaggtgaggtcaggtcagatcagatcatagtagggaggaaggcgaggagggcgggagggatgggatgagatctcctcttcctcctcctcgcgagggaggcgatccagtcgtatgagtgaagtaaagaagagtactccagtcgtactataggttgatgttcgccgataccacaccacacagcagccggtcaaagggagtgaaaactgattttttgtttacggggttttgtcagcaaggttattaggttttgtgtttgtgctgtagcctgtaagatgtaagctactactagcacgggtctcttgttcgttgctgctgctctgctctggcctctgggtgcccctgtattgtagatataaatcagcacccagttcgggcggtcggccagcgttcgtttttcttctagttgacgaggaggaagaagatgtccgctcctcgccatgtaatgtaaccatggctgtactcctacatacatgcaatcatgtataaagatgaaaacgtgtacatacacaagatgaaagtggcatgcagtgatgatctatcagaaaatgag

SEQ ID NO: 115805 - DNA, 1290 bp, Zea Mays
gcgttgcggcatccttccttccttctcacgaaaaggcaggcaagggaaaggcaaaggacaacccatcccctgcctcctccgttgctctgctgctccccctccttatctaatcctctggttcctggacaccggcctgcaagctccagcagcagcggcgccggcgacgaaaggaggaggattgctaccatcctatatcatatcatacatatacacaaggaggaggagaaggtgtgtagcgaggttgaggtccggaggatgccttccagtgccatgagttccgggctggagccggtgctctgcgcgcctcggccgcgcagggtccagcagctgcacccctgcagcgccgacctcatccttggcgcaccgcccttcccgcgcaacgccaacagcaaggccagcggcagcagcagcagggaaggaggcaggaagacgaccaggccggcggcggaggacgaggactgccgctgggcggcgttcggcgggtcgccgccggcgcgcgcggacaacccgctggtgcacgacccccggttcctgcggaaccagcgccacccggcgccgctggagctcgggtcgccgaaccaccggcggccgacctacagcagcggtggcgacggcagcgggtttgcctcgtcgtcgttcgcgccggccgtgaggatccagggcttcgacgtcgccgcgtgccgcgcgtgagagcgagctccggccgggcggggctttggcttttcgatctattaaattaaattaacagcaggtgaggtcaggtcagatcagatcatagtagggaggaaggcgaggagggcgggagggatgggatgagatctcctcttcctcctcctcgcgagggaggcgatccagtcgtatgagtgaagtaaagaagagtactccagtcgtactataggttgatgttcgccgataccacaccacacagcagccggtcaaagggagtgaaaactgattttttgtttacggggttttgtcagcaaggttattaggttttgtgtttgtgctgtagcctgtaagatgtaagctactactagcacgggtctcttgttcgttgctgctgctctgctctggcctctgggtgcccctgtattgtagatataaatcagcacccagttcgggcggtcggccagcgttcgtttttcttctagttgacgaggaggaagaagatgtccgctcctcgccatgtaatgtaaccatggctgtactcctacatacatgcaatcatgtataaagatgaaaacgtgtacatacacaagatgaaagtggcatgcagtgatgatctatcag

SEQ ID NO: 115806 - DNA, 1166 bp, Zea Mays
atgccacagcacgacagctctgctactccacccgttgagtaccacgacagctctgctacgttcgaaacgaaaaaagggacaggaaaagacagcggaaaaatcctggacggtaggtgtccaactccagcgcaccattatccgcttgcttttttgtctcttggccgcaacgtgaagtgcagcagcagccagcagcgggggctggagcactcaccagtcaccactcagcagcgatcgcagcaccgcggcgagataatgagcagcctgtcctccggcatctctgcctcgccatctgcagcgcccagcaccgctcggcgccgccatgacgcagcgccgcagcagctgagggtgaaggcggcggcgcggccacagctgctgcacgccggccgccggcgttcgagtgtcgggaggaggccgggcggcggcgcggtggtggtgagggccgggcctgggccgctgtcggagatcgagccggacctggaggaggacgccatcgacgtgtaccgcaccaacggcatcagcccggaggacttcgagtacgggaagtatgacggacaccacacctatttcgaaggccaagacaagaagggcttctgggaggatgtctccgagtggtaccaagaagctgagcctcctcagggctttcaagcactcatctcctgggcatttcctcctgcgatcatcctcggcatggctttcaatgtgccgggggagtacctgtacatcggggcggccgtcttcatcgtggtgttctgcgtcatcgagatgggcaagcccgacaagccgcacaacttcgagccggagatctacatgatggagaggtcggcccgcgacaagctcatcgccgactacaactccatggacatctgggacttcaacgagaagtacggcgagctctgggacttcaccgtcaacaccagggacgacatcgtcaagtcgacctagatgcattgcgtacaccgctcgctgcccttcagattgttgcctcacagcaaaaaaaaccctgtgaaaggaagctgtagctgctaggaaaatctcttgaataaaaaggaaagccatccttcctgtaagactggagagcctgaaaatctgttctatcctcgtgccatataatacacgacatgttctgcagactgttgcttcaactttctgcatgaattgcctttgtt

SEQ ID NO: 115807 - DNA, 2350 bp, Zea Mays
atggctgcgccgaggaaggggacggcgacgccactgggcgccgtattctcgccagaggagacgaagagggccgtggcgagggtggccgagtccatcgctggccgccgcgccgagctcgggcacctactgggcttcgtcgccgacaacgcggccctcgtctccctcgtcaacaggctcccagtcgaactctcccacgaaatcatggtgcttctgggtgaggggtactatgccgagaggtctgctaagcagacgactgatatattgcacaggagggggcaggaattggaagctcaggtcgaagcaatgaaggcaactatcactgatcttgaagctgaggcgaatttttttgagtccactgccaccgaggcttcagagggtcttgttgaaatcagggaagagtatgatgaggatacagagacaaagacaacaagatcaggaaagattaatcaaagaaagagattgagtcttgcctccctgctgttctcaaccccattgctgcgcctgaaccctaggtcaggcgtcaccacggcaatctctcacacctcttcctccaaccctctaaccattagccactcatataacctccgcagccggagtaattctaacaacctggtatcggatatgccaggatctgctgaagctgaaactgcagcttcagcccagccgtcggagttggcagcaatcaccaccgcccttgctgaagtccagcgccaactggggctcttcgccacgcagatggcctccatgtcctcccgcattgccgcggtggaatccacctcaggaacatcggccatggcgccaccaccagactgcccctacgacatgcctggatatgatgggctgtggctagcctacagttccaaccaaggtttccaggccacagtagcaaatggtgacaagattcactgccgacagattgctaacagtattgaggcttcaattgctactggggttatgtttgataatgatagggaacatgctcaaatcatggcaaggttagttgaactcgaaagggaagaaaaggaagctggaaatacttgtgaagatgatgatgatgatggcgacgatgatggagatgctggtacaagtgaggatggtgaggaaaataaggaacccggaaatgctttaagtgatggcaatgaggaccacagttctggttctggtgctttattttttggaaatggtggcaatgataggagtaatgggaatatcaagctgaagagtgcactgaagaagcctggaggagatgaaatgctgaaagacatttctcatacaccatcagccgatacatctcatccagtatttggtggccaaacttctataacaaatcctgatgtccgagttcacactaaagatggaactgaacctgaattttgtttttcacttggtgcttcatctgctttctctgtttcttttgaagacgacaaatttgtggttagttcgtcaaagtctcctaccttgctagtgggttcaatacagtctgatcctgggctcaagagttcttcagaccccactccatcatgtgaccgaaagataatatcgagtgggcgaaaggccttcacaggatctatcgtcgagcacgacgatgacgatctttcaaccattcaaccttctgcgggcaattcgttggcaaaacctggtacttctgcgtcttcaaggcccatgtcaaaattcaagatgcagaaaggagggcgtgcaccttcaccagtgagactgtttggcggggatacatgggatgttcagttagattcagtttaattagtggctggtggtgcagtatctctttcagaaacctatatatatatgccgccatgccgtttgtaaatctttcggcaacaaaagaaagaaagaaagtgtcgaaagattatattctctggatttaattggaaaaccatgctgcttaagactgatgacaacacaatctacggagactaaatagtgacgagggaacccatgggaaatggagcaaagaaggaaatcgtgagggtgatttggttggttggtccaacgtccaagcatcgcatcatcggttagccagccatcagtgatcggagttggtaaaacccccccaaagaacatgtcggccaataagtggagttaattacagatctagtggtgctagctagcttgcaatgctgttcctacttgtgctgtaacacagtgtcatgacatggtcagtagcagctgacgagcgccgccgcgcagtcaggtggtcgtcggctggtgtctcttcttctactccttccctaggcgccgccgccgccgccgtggagcaccagattgtctcccacacgtctctcaccagcagaaagggaggaaggacctgccctctgcatgtcagctccacctg

SEQ ID NO: 115808 - DNA, 1759 bp, Zea Mays
cgccaccgccgcctcccgtttgttctcaagattctctcccgccaccgctccgagtcccaacctccatcgacggggaggcgtcctccatccgggccggttagattcatcgctttgtagctggtcctcgtcgtttccctctgctgtggtgggagaagcgactcgcgcgcgcgatcggccaacaaattaagcacggggcagggccgtacgcaggaggcgagctctagggctctccggggagaaggttgccaggcacgccaggtgaacgccgtactgagtttgcagtccgggacgtagcgcgttctctggtcgggaggtggggaagcggagagcgatggctgcgccgaggaaggggacggcgacgccactgggcgccgtattctcgccagaggagacgaagagggccgtggcgagggtggccgagtccatcgctggccgccgcgccgagctcgggcacctactgggcttcgtcgccgacaacgcggccctcgtctccctcgtcaacaggctcccagtcgaactctcccacgaaatcatggtcccctttggtggtgctgcatttttcccagggcgtttaatacacacaaatgaactcttggtgcttctgggtgaggggtactatgccgagaggtctgctaagcagacgactgatatattgcacaggagggggcaggaattggaagctcaggtcgaagcaatgaaggcaactatcactgatcttgaagctgaggcgaatttttttgagtccactgccaccgaggcttcagagggtcttgttgaaatcagggaagagtatgatgaggatacagagacaaagacaacaagatcagaggcttcaattgctactggggttatgtttgataatgatagggaacatgctcaaatcatggcaaggttagttgaactcgaaagggaagaaaaggaagctggaaatacttgtgaagatgatgatgatgatggcgacgatgatggagatgctggtacaagtgaggatggtgaggaaaataaggaacccggaaatgctttaagtgatggcaatgaggaccacagttctggttctggtgctttattttttggaaatggtggcaatgataggagtaatgggaatatcaagctgaagagtgcactgaagaagcctggaggagatgaaatgctgaaagacatttctcatacaccatcagccgatacatctcatccagtatttggtggccaaacttctataacaaatcctgatgtccgagttcacactaaagctgtttcttttgaagacgacaaatttgtggttagttcgtcaaagtctcctaccttgctagtgggttcaatacagtctgatcctgggctcaagagttcttcagaccccactccatcatgtgaccgaaagataatatcgagtgggcgaaaggtcagtcttcttgtactctgtttgatgccactggcaaacttgctgtgcgcttcgcttattgacttattctgtcagcaggccttcacaggatctatcgtcgagcacgacgatgacgatctttcaaccattcaaccttctgcgggcaattcgttggcaaaacctggtacttctgcgtcttcaaggcccatgtcaaaattcaagatgcagaaaggagggcggtaagtctcgataccacggggcgatgtatcttcggtggttgattagatgcatctggaacaatcatgttaagtggtagttttgtgcgagctgagcacctggaagctagacattttgttgtggagcgattgccctcttggggcc

SEQ ID NO: 115809 - DNA, 1310 bp, Zea Mays
cactgtactgtactgctgcctccaattattactagagtactcccggtgccatctcctccatctccctattcctcagctcctggaccggccatggccgcaccttccggcacgatgcgcgccgtgcagtacgacagatacggcggaggagcacgggggctcaagcatgtggaggtgccgatcccgtcgccgaagaaaggcgaggtgctcatcaggatggaggccaccagcatcaacgtcgtcgactggaagttccagaacggcttcgcgcggcccttcatgcccaggaggttccctttcatctctggtttcgacctagcaggagaggtcgtagagttgggtgctggagtgagcagcttcaaaccaggggataaggtgatcgccatcaacttcccgaacggcggagggctcgccgagtacgcggtcgcgtcagcgtctcgtacagccgcaaggccgccggaggtgtcggccgtcgaaggtgtctgcgtgccgatcgccgcagtcaccgcgctcgggtcgctgcggacagccggggtcacagtcacactggacgacccggctcgcgcccccgccacgcccaagaacgtgctggtcaccgcggcctccggcgccgtcggccacttcgccgtgcagctcgccaggatgggcggccacaacgtcacggccacctgcggcgcgcgcaacctcggcctggtccggagcctcggcgccgacgaggcgctggactacaagacccccgagggcgccaagctgcggagcccctccggcaggaagtacgacgcggtggtgcactgcgccgcgaaggggctcccgtggtccgtgttcaggcccgtgctcgccgcctcgggcacggtcgtcgacatcacgccagggttcgtggccgtcgtcaccgcgatcctccaggtggcgaccttctccaagaagaggctggtgccgctcatagtgacgcccaagaaggaggagatggagctgctgctgggcatgctgaagcagggtaggctcaagacggtcatagattcccggcacccgctgggcagcgctcacgaaggctgggccaagagcatgagcggccacgccaccggcaaggtcgtcatagagatcggagccgcgcaaccataataatagtgcagcaatatattgattcaaaaaataattatgaattttgtaatttttagatctataatttctatatttttttgttcatgaattatgtatttttatttaaaatttatgaatcatgtatttttatttttatatgaattatgtatttttactagatgaatgcacgtgcgttgcaacgggaatatataata

SEQ ID NO: 115810 - DNA, 1382 bp, Zea Mays
gattcatcaatgctagttctattagctactactaggcgttgggcactgtactgtactgctgcctccaattattactagagtactcccggtgccatctcctccatctccctattcctcagctcctggaccggccatggccgcaccttccggcacgatgcgcgccgtgcagtacgacagatacggcggaggagcacgggggctcaagcatgtggaggtgccgatcccgtcgccgaagaaaggcgaggtgctcatcaggatggaggccaccagcatcaacgtcgtcgactggaagttccagaacggcttcgcgcggcccttcatgcccaggaggttccctttcatctctggtactgtaacagcacgcagagcagagccatggcgtgctgctggcctcgtccccccactccttccctcttgtttaatcgatggccatttcagttttggcttttgacgtgccgtacgtcccgagtgcgcgtgaggacgggagatttgcacaggcgagtaatcgtgtttgctttctggaggacaggtttcgacctagcaggagaggtcgtagagttgggtgctggagtgagcagcttcaaaccaggggataaggtgatcgccatcaacttcccgaacggcggagggctcgccgagtacgcggtcgcgtcagcgtctcgtacagccgcaaggccgccggaggtgtcggccgtcgaaggtgtctgcgtgccgatcgccgcagtcaccgcgctcgggtcgctgcggacagccggggtcacagtcacactggacgacccggctcgcgcccccgccacgcccaagaacgtgctggtcaccgcggcctccggcgccgtcggccacttcgccgtgcagctcgccaggatgggcggccacaacgtcacggccacctgcggcgcgcgcaacctcggcctggtccggagcctcggcgccgacgaggcgctggactacaagacccccgagggcgccaagctgcggagcccctccggcaggaagtacgacgcggtggtgcactgcgccgcgaaggggctcccgtggtccgtgttcaggcccgtgctcgccgcctcgggcacggtcgtcgacatcacgccagggttcgtggccgtcgtcaccgcgatcctccaggtggcgaccttctccaagaagaggctggtgccgctcatagtgacgcccaagaaggaggagatggagctgctgctgggcatgctgaagcagggtaggctcaagacggtcatagattcccggcacccgctgggcagcgctcacgaaggctgggccaagagcatgagcggccacgccaccggcaaggtcgtcatagagatcggagccgcgcaaccataataatagtgcagcaatatattgattcaaaaaataattatgaa

SEQ ID NO: 115811 - DNA, 657 bp, Zea Mays
ggataaaaccaaatggtgacggatttcattgcttccataagtctcagtcaacaaatgggatggatttttttttctttttctgtgagctagtttggcaacaccattttctcaagggattccaattttcttaagagaaaatgaactaattttcctttaaaaaatggaaatcccttggaatttccattgaaaaaatatggttcccaaactatactaaaataaaccgacttctagaatcacccttgtaagtagtagtatatcatggaaacagatttcacacgattcaaatatcgtaaataagttccgcacgaattaactaaaaactacagcaaacaagcaacgcaggctattctcaggtgcatacatattggtagcgatgcccttgtcctactcccaggtgctattctctgtaaacatggcgacgtatgctattctctgtaaacatggcgacgtatgtctgtctgataaaacacacactggtttacacgcaagttcaccacaaaactttgaccaccttttaaggtaaaaaaaaatggcgtgccatccttttctttttttgcttgaaaggctggagcatgcctttattgacgactcacttgtttgctaccacacgatctggattgtgtatccttatgccgttcaagatataaccaccaaaag

SEQ ID NO: 115812 - DNA, 2951 bp, Zea Mays
gtctaccctcctctccttcctcgccgcacacacagacacacgcaaaaacatttctcccccctcccgactgctactgccgctgcctcctccccctttccgcccgccttcgctccctcccaacccccttcctcctccgtctagggtttcccgccgccgcctgatccgagtcagatgccgcccgcaacagccatggcgccgccgtcccagcccccgtctaactcaggggatccgctgtacccggagctctggcgcgcctgcgccggcccgctcgtcaccgtcccccgcgtcggcgacctcgtcttctacttcccccaggggcacatcgagcaggtggaggcgtccatgaaccaggtcgccgggaaccagatgcgcctctacgatctgccccccaagctgctctgccgcgtgctcaacgtcgagctcaaggcggagacggacaccgacgaggtctacgcgcagatcatgctcatgccggagcccgagcaaaccgatgtgccggctgagaagccgagttctgcacctgctgcgtcgccgaggccagcagtcaggtccttctgcaagacgctcaccgcctcggacaccagcacacacggtggcttctctgtgctgcgccgacacgctgacgagtgcctccctcccctggatatgacccagtcgcctcccacacaggagctggtggcgaaggatctgcatggcatggagtggcgcttccgccacatctttagagggcagccaaggaggcatctccttcagagtggttggagtgtttttgttagttctaaaaggcttgttgctggtgatgccttcattttcctcagaggagaaaatggtgaacttcgagttggtgttaggcgggcaatgaggcaattgtctaatgtaccttcttcagtcatatctagccaaagcatgcacctcggagtccttgcgactgcatggcacgccattaacacgaagtccatgttcactgtctactacaagcctaggacgagcccttcagagttcatcataccgtacgatcaatatatggagtcggtaaaaaataattattctattggcatgagattcaggatgaggtttgaaggagaagaggcgccagagcagaggtttactggtacaatagttggttgtgaaaatcttgacccactatggcctgattccagttggagatacttgaaggtgcgttgggatgagccttctactatcccgcggccagatagggtctctccttggaagatagagcctgcttcatcgcctcctgttaatccactcgtgcattcttctagagcaaaaagacctagacaaaacgttcctccaccttcacttgaatcatctgttctcacaaaagaaggtgcaaccaaggtcgaaatcgattcagctcaaacacaacaccaaaattcggtcttgcaaggtcaggagcagatgaccttgaggaacaacctgactgaaagcgctgattctgattccactgttcagaagccgatgatgtggtccccatcactcaatgggaaagcccacactcattttcagcagagacctgctatggataattggatgccattgggaaggcgtgaaaatgacttcaaggacacccgttctgccttcaaggatgcccgcaccgcctctcaatcatttggagatacacagggtttttttgtgcaagcttatgatgacaatcatcaccgtctctctttcaaaaatcagggttcaactcatcgcttcgcagatccgtacttctatatgcctcaacaatcgtcagtgacggttgaatcaagcacaaggacacaaacagcaaacaatgacttgtgtttctggggtgaccagaatgctatgtacggcaatccaagtgaccaacaacagggtttcaactttggacaaaacccatcaagttggttgaaccagccatttccccaggttgaacagccacgagtggtcaggcctcatgcaacggttgctccatttgatctggagaagactagagaaggaagtggcttcaagatttttgggttccaagttgatacaaccagtccatctcctgtccaattgagctctccattgcccgctatccaggagcatgtgttacaaactcgaccatcggcaccggtgaatgaattgcaacctgtgcaaattgagtgcttgcctgagggatctgtaagcacagctggaactgcaacggagaacattcagcaagccccgcagagttcaaaagatatccaaagcaagtcccagggtgcttcaacaaggagctgtacaaaggttcataagcaaggagtcgcacttggcaggtcggtggacctctctaaattcaccgactacggcgaactccaagcagagctggacaagatgtttgacttcgagggtgaattggtatctggcagccaaaactggcagatcgtctataccgacgacgagggcgatatgatgcttgtgggagacgacccgtgggaagagttctgcagcatagtgcgcaagatctacatctacacgaaggaggaggtccagaagatgaactcgaaatcagctgcgccaaggaaggaggaatctccggcagcgggcggcggaggaggttgcgccgccgccacaaacgagtagtatggtggtttgctcttggtggcaagttgaggccaaggttttactactgctattgttattgctgatttgctctccccgccttccggtgtaaatatctgtgtgtacccagtcccggccttgtgctagtaagtagcaagcagtgttaccttttggtattttaaccagcagctaagttcgcggcattttagtccctgtaagcggtaagcagctctgtagcgtgagatagatggccaagcgccggtacgtacgtgtagtgtctggtcttctcactgagtgtactataaagagttaatataggagctgaccctgtgaacccgcgtgatggatgcatatgcttagtgcaaacctgcattttgtctcta

SEQ ID NO: 115813 - DNA, 2737 bp, Zea Mays
cgaaacagtgtgggcaattgctgtgcacgggcatcaaggcatctctgctccgtcttgggctcctcctctctcgcccatcggccatcgccctccgctacggccacgcgccgcgctgcacccctgggccccgcgggtgaggggtagaaacgagagagagagagagtccaatccagtcgcgcgcgcgcgccggggagcggggacggggcggaggagaatgtttggctggtccgggtccggtcgcacggcatggtggtggacgcgagccgcctgcgagggccgaggggagagggatgcgtcaagaaagctctcggcttttagcttgctttgggcgcccacaccaatgccacactgctctgctctccgagtaacttattgcgagcagcgccccaggtgaccgagcgagcgggccggcgagggctcagctttggataattcttgctccctcttgtcctttcggtttgaagctttctggagggagaagggagcacgcagctcggcgccagtgagagagaggattagaggagcgagaggaaaggggggagatcatgcttgcagagcgtgctccgtgatgcggtgagcgccgctaacctcggttgatttcttggtgggaggcgacaaacgcgtgcgtgagccgccgcttgcttgggaggtggtggtgagaccaggcgtgctccttcgcacttgtctctgtttgagttcgttgtcgtcaggtaaatatcacgagcaccatgctcgagttcttgtagctccgcagcttcctcgcttcttgcatcctttgcaacttgtctcctgttgttttcctctgatttccatggaggaaagatgctgggtgtgccagtgatgtgggcgtggagcaggcaacaattggctcgtcctggacattgatcgattctcccctattctcgtccaaggaattttattcgtttctcctagcaagtcgtgtatgcttgtttcgtggaggtaggagctaggatgacgagcaggaaccctaccaaaaccctgtcggtcctgaccactctcctgctgctgcttgagttcctcgcgctgtgcgcgcccgcctccgcccagccgctccactcggagcccatggctacgcagtccccgccgccgccgctgccgccggggtccacgattccccgggcgcaggccggcggcgccgcacgcctccgccgcattgcgctcggggtcctcttcggctccctctccggtttcctcctcgcgctcgccttcctctacgccatccgcctcgccatcctccacgccaagagcacgcccgcgatcgccaagggccccgtctccttcgccccgcaaatctccgccaagaacctcctggccgcgctccccgccgcgcagccgctcgcccatgggccccatggcaagtactacaagctggcactcgacaacgacctcaccgtcgccgtcaagcgcctcgaggcggccagccgccccgaggcctcgccgtccatgtccccgagcgcgtccaagtcggacatgaggagggtgcagaggcagcttgaggcacttgctcgggtcaggcaccagaatgtgttgtcgttgaaggcatacgttcgcgaggcggaccgcctctcgctcgtgtacgacttcgtccatgggggcagcctcgaggatctgatgaagagggtaaggtcgcagcaagtcagcctcggttgggatgcgaggagcaggattgctgttgggattgccaagggactgaggcacttgcattttgagtgcaatccgaggatagtccactgcaacctcaagccgtccaatgtgatgctagacgaaggtttggagccattattggcagattgtggtgttgcaaggctgattgcagcaggttcaggtgatccagaattgtgcactggcctctacgctgctccagaatgctatcaaagcagcaggtacacggataagagtgatgtgtacgcccttggcatgatcctgggcgtgctgctcactgggagagacccgacagactctttcttctcgggagagagtaccgggcagggcggcctcccaagatggctccggcacacgcagcagtccgcggacccgaaagaaacgctggatagcagcatcctgggggacgagggagaagaggaggagatgctgatggccattcgggttgccattgtctgcctctcggactcgccaaccgaccggccatccagcgacgagctcgtcgccatgctaacgcagctccacagcttatgattaatcaccatatatcgcaaatttcttgagcggctgccgctgcgcatggccttaaaaccatgggggggcgatcatgttggatcagtgcttcctgtttcacagctagcacgggggagtgtgcagcagatctcattgtgtggtgcttgtgagtcacaagcgctgaaatggtcgacaagggaactgacagttcaaggccatataggacaggcgcagtcgctgtgttccctgtacgattcatcagtgatgtagtagctaggtacaatacaagatggtggttgagcttcctgggttgttttgcgcgtgggctgtgaatatgtcttggtagaaaaaaagctctgtgccgtggatctgatctgttggtgttagctgtagcctgtgtatagcctgtagaaagacgtgcttgtgctgtgcactgagacccatcatgtacacccccccggctccactccaatttgcctgagagcagagagactatgatgccgagtatttaacaggctgctggggccaacggtttccatat

SEQ ID NO: 115814 - DNA, 1394 bp, Zea Mays
atgtctgccaacgagaattcaccgccggtggaggccgccgcggccgcctccacgccacggtcgcggctgccgcggtggacgcggcacgagacgctggtcctgatccaggcgaggcgcgccatggagcggcgcggcgtgcagctgccggcggtgcggccgcggcccaagtgggcggcggtgtcggcctactgccggcgccacggagtggagcgcgggcccatgcagtgccggaagcggtggggcaacctgtcgtgggacctgaagaagatcgtcgcgtgggaggggaaggccatcgccggcgccggcgccggcgccgcgcagcacgagtcgttctgggacatgcgcggcgaccagcggcgcgccaggcagctgccgtcgtccttcgaccgcgaggtgtacgacgcgctcgtctgcggcgcgtccgccggcgaggacgccgccgccgcggccgtgctgccgccggacttcggcgacggggagccggaaggggtgtaccggcagccgcccatcatggtcatgcctatatcagtgacagagagtgatcagaagaaggcgggcgcggcggcgtcggacaagaactcgacgtcgtcgcaacacgacggcggcttcaaggacagcgacgcgacgttcgtggcggatcaggcggagggcacggccacggccagcatcgggaagcaggtggtcgaggccctggagaggggcaaccgggcgctggcgcagcagctggaggcgcacaggagctggtgggacgccgacagggagcagcgggcggcgctcctccgcgccatggacagggtcgccgacgccgtgtgcaggatcgccgataagctctgagggggagggggcctcgccgacgggaactggcacgcttcggttggcttcgatcgctgtggactgagtgaagagtgagaagtacaagacatgcgtgcacgcattcagaacttcaggtagcggtgcattcagtacgacattggcatacatacatcagattattgcagtacaagacatacttctgctgctctggtctgaaacgttgagccgtggcgtggctccaggtccagggtttggggcttgctctggctggatcactctgtatcgcttatgctattgctagtgcgtgcgttgagcttttctgtcttcctgaaaaggcacctcgcctcagccctctcagcgatcggttcttggtccctctcccggtctcactctccctgctatgattaacaaccggttcttggtccgtgcttttaccgactgaatctgaacctactcccagctctgttcatccaaaacccactccctccttttgttttcctcctcgagtttgaggggtcctgctgcaactcaaatgatgtatttcgttcgtcccacaataaacacacatcatacttttcagt

SEQ ID NO: 115815 - DNA, 2278 bp, Zea Mays
atgccgtacgaaagctggtggacgccgaaggtgaattcggtggcgccggtgccgaacccgatattcatggacgcctctcccctgaacccgccgccgctggtggaggaggagcttgtgctgcgccgcagtgctcgttgcctcaataggccaacccggcccagctacgcggaacaggagcctcctaaaaaacccggcggccggggccggagcaagcggaagagggacgaggagaaaccggagctggcaccggcgcagcagggtgccaagagtccggacaggaaggactccaaggatgaggcgggtgagaagaagccgacgcccatgattgcggcgctgccggtctcttgcgctggcgttgctgctgaagacgatgcgacggggaccgggaagagcgccaagctgagggtgaaggagacactgagggcgttcaatagccactacctccactttgtgcaggaggagcagaagagagctcaggctgcgctacaggagaaacgcccatcaaagcggcctgacctgaaagcaatcaccaagatgcaagaaatgaatgccgtgctttatccagagaaaacgattggacatctaccagggatcgatgttggagatcatttctattctcgcgctgaaatggtagtgttgggcatacacagccattggctcaatggcattgacttcatggggctgaaataccaaggaaaggagtattcaaacttaactttcccactggccacctgtatcgtaatgtcgggggtatatgaagatgatctagacaaagctgatgaaattatttatactggtcaaggaggaaatgatttgcttggtaaccatcgccaaattggctctcaacagttgaaacgtgggaatttagcgttgaagaatagcagggagaatggtaatcctgtccgagttgttcgaggacatttgtcaaagaatagctacactggaaagatctacacctatgatgggctttacaaggttgtagatgactgggtgcagaagggagtgcaaggccatgttgttttcaaatttaagttgaagcggcttgagggtcagccatcattgacaacctctgaggtgcgatttactcgtgcagaagctccgacaactatttccgaattacccgggctggtttgtgatgacatctctggagggcaagaaaatattcctattcctgctactaacttggttgatgatccacctgttcctccatctggtttcaagtacttgaaatctctacaaattccaaaggacatcaagattccgtctagtattattggctgtgattgtgaaggaggttgtgctagcaacaaaaaatgtttgtgtgctcagcgcaatggttctgatctgccttatgtatcatataagaacattggcaggttggtggagccgaaagcagttgtatttgaatgtggggctaactgcagctgcaaccatgattgtgtaaacagaacatctcaacaaggtttgcagtaccgcttagaggtatttaagacagcttcaaaaggatggggagtcaggacttgggacactatcctccctggggctcccatctgtgagtacacaggggtgttgaggaggaccgaagatttggatggttcacagaacaactattgttttgacattgactgtcttcaaaccatgaagggtttggatggaagggagaaaagggctggatccgaaatgcacctgcctaatcttcatcctgagaatgattcagatgcacaacctgcacctgagtactgcatagacgctcactctattggcaactttgcaagatttataaatcacagctgccaacctaaccttttcgtccagtgcgtcttgagctcacacaatgatgttaaactggcgaaagtgatgcttttcgctgctgacaccatacttcctcttcaggagctatcctatgactacggttatcgattggacagtgttgttgggcctgatggaaaaattgtgaagctggcctgccactgtggtgctcctgattgccggaagcgcctctactaacctgcagtgtgtttatttctatttggatttttgaggaaacagcttatattgtaggaaaaacagtcatggtacctatgtagttgacatgctcttgatcatatatagcaaaagaggagcaatttatggggtgttcggtttaagaatgaaattagagatttagaggacatggtggtcatggtagcatattttgccgacaatcttcgattaactgatatatctggacatctggtcctgcaacacttatcctctggataaatatatatacgttaca

SEQ ID NO: 115816 - DNA, 1459 bp, Zea Mays
cgacgcttcactctgcccctccctcctcccttcgtcttccaccattcactatagcggagcgcaggctggtggacgccgaaggtgaattcggtggcgccggtgccgaacccgatattcatggacgcctctcccctgaacccgccgccgctggtggaggaggagcttgtgctgcgccgcagtgctcgttgcctcaataggccaacccggcccagctacgcggaacaggagcctcctaaaaaacccggcggccggggccggagcaagcggaagagggacgaggagaaaccggagctggcaccggcgcagcagggtgccaagagtccggacaggaaggactccaaggatgaggcgggtgagaagaagccgacgcccatgattgcggcgctgccggtctcttgcgctggcgttgctgctgaagacgatgcgacggggaccgggaagagcgccaagctgagggtgaaggagacactgagggcgttcaatagccactacctccactttgtgcaggaggagcagaagagagctcaggctgcgctacaggagattaacgctaagagtggcctcaaacgtcagaccaaggggggtgaaaagaaacgcccatcaaagcggcctgacctgaaagcaatcaccaagatgcaagaaatgaatgccgtgctttatccagagaaaacgattggacatctaccagggatcgatgttggagatcatttctattctcgcgctgaaatggtagtgttgggcatacacagccattggctcaatggcattgacttcatggggctgaaataccaaggaaaggagtattcaaacttaactttcccactggccacctgtatcgtaatgtcgggggtatatgaagatgatctagacaaagctgatgaaattatttatactggtcaaggaggaaatgatttgcttggtaaccatcgccaaattggctctcaacagttgaaacgtgggaatttagcgttgaagaatagcagggagaatggtaatcctgtccgagttgttcgaggacatttgtcaaagaatagctacactggaaagatctacacctatgatgggctttacaaggttgtagatgactgggtgcagaagggagtgcaaggccatgttgttttcaaatttaagttgaagcggcttgagggtcagccatcattgacaacctctgaggtatacttgaacaaatacaacaaactgagttgttgtattgatagtgcccaccgtcttcttatgatttggatgggtggacttcgcgtgaaaataatatgacacatctcatatttgctatcaattgtcaaaacatttctagttctagtcatggttgttatggcgctaaggtgacctacgagtgatctaggtcctttttatattttaaatgtctaagagtttgtttagaagcactcagttttttaaaaactggtttatgaaaattaatgcggttccaaacgtactagtt

SEQ ID NO: 115817 - DNA, 1092 bp, Zea Mays
attgccaacgcaacagttccgatcctccacaccagcacccgccgccgccgcctcttcccttgcgcacctgctgctgtgcggatcggtgaggcggaggagtaggatggcgagcgcggccggaggcggagcggcgggggaaggggagtggcttaaggtatcccagctcaggcccatggtggaagcgcaggaccccaacgccaaggcagtggacaacctgacgctgcgtcggttcctgcgcgcgcgcgaccacgacgtggacaaggcctccgccatgttcctcaagttcctcaagtggcggagggaggcggcgcccggcggctccgtgccggaggagcaggtgaggagggagctgtcgcaggacaagctgtgcatgggcggcgtcgacagggccggccgccccatcctcgtcgccttcgcggccaggcacttctccgccggccgtgacatggcagagttcaagagttttgttgtctacttcttcgacaagatctgtgccagaatccccagagggcaggagaaattcctctgcatcgttgatctcaagggctgggggtactcaaactgtgacgtccgggcatacattgccgctatagagatcttgcagaactactacccggagcggctcggcaaggcgctgatgatccacgtgccctacatcttcatgaaggcgtggaagatgatctaccccttcatcgacaccaacaccagggacaagttcgtgttcgtggaggacaagagcctgcaggagacgctgcggcgggagatcgacgaggggcagctcccggagttcctcggcggcaagatggacgtgatcccactcaaggactatggcgtgcagcagcagcctcaggccgtgtaatagccatgccatgcgtagcatacacgagttgtggctaggagcatagcatggcaataactgtgtagctgctgtgaaagtgaaaatgaaacgttgcgctgtttagccgggtcaattgaccagcccaactgcagatctctgggctaccactatgaacagcaagaactgtttcccttatccttttcagccaaactaatcaaaccagaaaatgtttcttgtatgactgctaattaaaa

SEQ ID NO: 115818 - DNA, 1298 bp, Zea Mays
attcttccactccacctcgcccgtggcccgtacccgtcgtcgtcgtccacacagccacaagctgctgctgctgctgcgcgtgcttcctcttcagttcagctgaggtagcggcgcctcacccatcccccccgctacatacacatatctccttcttcgaagaactcggtcctttgggagcgagcaggagcaggagcaggacaggaccaggaagatcattatcaggagaagctaggcggggatatggcgaacgctggcggcggggcggccgaggaaggggagtggctcaaggtcgcccagctcagggccctcgtccaggaggaccaccgcgccaaggaggtggacaacctgacgctgcgtcggttcctgcgcgcgcgcggccacaacgtggacaaggcggccgccatgctgctcaagttcctcaggtggcgggcggaggcggcgcccggcggcggcaccgtgcgggaggagcaggtgcgcggggagctggagcaggacaagatctacatgggcggcgtcgacaggaccggccgccccatcatcgtcggcttgctcgccaagcactactccgccaaccgcgacatggcggagttcaagagttttgtggtctacttcttcgacaagatctgtgccaggatccccagagggcaggagaagttcctcgccatcatggatctcaagggctggggctacgcaaactgcgacgtccgggcctacatcgcggccattgagatcatgcagaactactacccggagcggctgggcaaggcgctgatgatcaacgtgccctacatcttcctcaaggtgtggaagacgatgatctaccccttcatcgacgccaacaccagggacaagttcgtgttcgtggatgacaagagcctgcgggagacgctgcggcgggagatcgacgagagccagctcccggagttccttggcgggaagatgcctctcgtctccctcaaggactacgcccagcagcctcagcccgtttgcgagtgagtctgtcgtagcgatggtggccggccggtgacgtgagcgacccaaagccgaaagctgattcgatctagactaagctaatacagcctacaagagggaggaagagaggccctacccgtggaattaagtcattagtttgtggtccaattcaataagaaagtaaatgtggtgtgtgaagatggtatggcattatcagtctttaatcccatattatacatttagatagaagaaaatcaacttatatgtggtagtgttccctactttttatatgagataaataaagggatacggagaatgctgcacgc

SEQ ID NO: 115819 - DNA, 1167 bp, Zea Mays
atgtacaacgagtccagtccactaccagggcttgaggtcgctctggagtccggcgtcccagtcgagcgccttctccccgggctgcaggaacacgccctcgccgtgcggcagcttccgcgccagcccgttgagcacctggtggaaggcgtccccgggcctggcgggctggtggaacagcagcgcctgcttgacggagtcccgcgccagcaggcgctgcctccgcaggatgtcgggcagcgggatggaggtgaggatggagtcgaggcgcggcacgtcccgctccgccacgaacacgctgatgtcctcccaggggatggcgtccgcgaacggcagcacgatgtcgtcggcgatgatgacggggatgcacccgaacaccaccgcctccaccagccgggggctccagggcgcccaccccagcgggcacaggcagaagatggcgcgctgcatgtcctcgtagtacgtcgacgggtgctccgtcgagatgtcgaacagcgggttgtccttgaagttctcccacaccgacgcgcgagcgcccctggcgtagtagccgccctcggggtcgttgcccatgtcgtagaagaggcccctgaagtagacgaagatggagcgcggcgtgccggggctgatgaggtgcgcctgcatcttgcccgggtcggcgtagggcgggacggtgatggagccgtcctgcaggcacacgtggttgcgctggccgaacgtctgcaccagcgtggcgcggcggagcagcggcaggatgccccgctccatggcgcgctcctcctggtagtggaagcaggcgccgaagtcgtgcggcgtgaggaagaagtggtcggcgccgtcggtgcggttccagaagggccacgtggtggccacgtagcggatggcgctgcgcatgatccgcggcgcccggaacggcagcgggaagccctgcggcgtgaggtcgcaggtggtgtacgcgggcgtgtagaaccagtcggcctcctccgggtccagcgtccgcaccgcgctcgacagcaggaactggtgcatgaagatctccgccgcgaacatgtggtgcaggcaccggctgtccttgtccagcagcatcctgttgtacttgcgcggcatctcgtacacgaacaccttcagcttccccacggggtcgtcgtccagcacgcccaccgcgtcccc

SEQ ID NO: 115820 - DNA, 1350 bp, Zea Mays
cgcgcaccaaccctccgatgtcccatcccctccctagcctccgctccgccgctccccccaactccaccaggctcagtgtctccgcttctcgccgctttcccctcctccgcctgggcgcgccgcccgcccgcccctcccgatcccgtggacgtcctcgcaggcggcgtgttgcacgagagcttagggaatgttttaccagtattgttcatggtaaactcagagtttctatcaactgcccgggaaagtgaacttgtttccactccatctttagtgtcaaaaccaatttcttctacaggggcaacggaactacttcgaagtgaattatgggtgggttctgctgctgcctcagtgctgaagaatttgatgaatatgtctatccaaacaaccctatctataggcaatgcgtatccttgaggcatcttttccacagcatttttggcgggtatactgcaacattccagaggcttgagtctaggccaaacaacccagctcaaggggttgctccactgggatccactaatccaagtgtcaacataaatgacaattcactcaatcttgtttctagaccacctccatatgataccgatcctagatatgcccgtgttcaaagagagggattagtctccaggcgtgagaaatccataaatcttgcacaagaagagtcactggcccttagacgaaatgccagcagctctggtattgaacatttagctgctcagaagaaacgcaacagcactgaaaatgagggtgaatataaggtccatcgttctgaatcaactaagagtttgtctgcaaaagcttatagtagcagctatgctgttgtcgcttcagaagatgaggatgtctgccctacttgcctggaagaatacacgccagacaatccaaaaataataaccaagtgctgtcaccattttcatcttggttgtatttatgaatggatggagagaagtgatacatgcccaatttgtggaaatggagttttgcgagagcccatgatagcctttcggtttacatgatctcacatgaagtctgagctgcaggaaatggggttctgtgagaaccaatgatagcctttcgatttacatgatctcagatgggagcaagggaaacattctacagagtacaacagaatgctggagaattgtaaataatagttccttatgcatgcgatgtccaaatagatctctttctcgagatcagtttcttacatgtactgagatggttatctgtcttactaaattcatgctagaatttgcttggccagtttttgttatatttgcaaatggtagctcatagatggaagcacaactcatggatgaaagaatatattaacctgatcatgtgactgtc

SEQ ID NO: 115821 - DNA, 1355 bp, Zea Mays
cgcgcaccaaccctccgatgtcccatcccctccctagcctccgctccgccgctccccccaactccaccaggctcagtgtctccgcttctcgccgctttcccctcctccgcctgggcgcgccgcccgcccgcccctcccgatcccgtggacgtcctcgcaggcggcgtgttgcacgagagcttagggaatgttttaccagtattgttcatggtaaactcagagtttctatcaactgcccgggaaagtgaacttgtttccactccatctttagtgtcaaaaccaatttcttctacaggggcaacggaactacttcgaagtgaattatgggtgggttctgctgctgcctcagtgctgaagaatttgatgaatatgtctatccaaacaaccctatctataggcaatgcgtatccttgaggcatcttttccacagcatttttggcgggtatactgcaacattccagaggcttgagtctaggccaaacaacccagctcaaggggttgctccactgggatccactaatccaagtgtcaacataaatgacaattcactcaatcttgtttctagaccacctccatatgataccgatcctagatatgcccgtgttcaaagagagggattagtctccaggcgtgagaaatccataaatcttgcacaagaagagtcactggcccttagacgaaatgccagcagctctggtattgaacatttagctgctcagaagaaacgcaacagcactgaaaatgagggtgaatataaggtccatcgttctgaatcaactaagagtttgtctgcaaaagcttatagtagcagctatgctgttgtcgcttcagaagatgaggatgtctgccctacttgcctggaagaatacacgccagacaatccaaaaataataaccaagtgctgtcaccattttcatcttggttgtatttatgaatggatggagagaagtgatacatgcccaatttgtggtaaggaaatggagttttgcgagagcccatgatagcctttcggtttacatgatctcacatgaagtctgagctgcaggaaatggggttctgtgagaaccaatgatagcctttcgatttacatgatctcagatgggagcaagggaaacattctacagagtacaacagaatgctggagaattgtaaataatagttccttatgcatgcgatgtccaaatagatctctttctcgagatcagtttcttacatgtactgagatggttatctgtcttactaaattcatgctagaatttgcttggccagtttttgttatatttgcaaatggtagctcatagatggaagcacaactcatggatgaaagaatatattaacctgatcatgtgactgtc

SEQ ID NO: 115822 - DNA, 1664 bp, Zea Mays
cgcgcaccaaccctccgatgtcccatcccctccctagcctccgctccgccgctccccccaactccaccaggctcagtgtctccgcttctcgccgctttcccctcctccgcctgggcgcgccgcccgcccgcccctcccgatcccgtggacgtcctcgcaggcggcgtgttgcacgagaggtgagctccaccacgcgccccctctctcacctccctatcgctgtcagtcggtgcccagttcctcagccaaccagccgcgatctgtcggcgctgctcgccttccctggccctcgctcctgtcgacgccgctttataggggggctgcgtactgccgcgattgccttgcgatgggagtggggctcctctcgacgcctgtcagcgcaagatgcagatcggccgaggatgcagctgtgctatgctcgcagatgccagttgctccgagcaagcgcttcgcgccactcctagcacttttagttcactcgacagacgcttagggaatgttttaccagtattgttcatggtaaactcagagtttctatcaactgcccgggaaagtgaacttgtttccactccatctttagtgtcaaaaccaatttcttctacaggggcaacggaactacttcgaagtgaattatgggtgggttctgctgctgcctcagtgctgaagaatttgatgaatatgtctatccaaacaaccctatctataggcaatgcgtatccttgaggcatcttttccacagcatttttggcgggtatactgcaacattccagaggcttgagtctaggccaaacaacccagctcaaggggttgctccactgggatccactaatccaagtgtcaacataaatgacaattcactcaatcttgtttctagaccacctccatatgataccgatcctagatatgcccgtgttcaaagagagggattagtctccaggcgtgagaaatccataaatcttgcacaagaagagtcactggcccttagacgaaatgccagcagctctggtattgaacatttagctgctcagaagaaacgcaacagcactgaaaatgagggtgaatataaggtccatcgttctgaatcaactaagagtttgtctgcaaaagcttatagtagcagctatgctgttgtcgcttcagaagatgaggatgtctgccctacttgcctggaagaatacacgccagacaatccaaaaataataaccaagtgctgtcaccattttcatcttggttgtatttatgaatggatggagagaagtgatacatgcccaatttgtggtaaggaaatggagttttgcgagagcccatgatagcctttcggtttacatgatctcacatgaagtctgagctgcaggaaatggggttctgtgagaaccaatgatagcctttcgatttacatgatctcagatgggagcaagggaaacattctacagagtacaacagaatgctggagaattgtaaataatagttccttatgcatgcgatgtccaaatagatctctttctcgagatcagtttcttacatgtactgagatggttatctgtcttactaaattcatgctagaatttgcttggccagtttttgttatatttgcaaatggtagctcatagatggaagcacaactcatggatgaaagaatatattaacctgatcatgtgactgtc

SEQ ID NO: 115823 - DNA, 932 bp, Zea Mays
atttaatagaagataatctcaagttcccacgtaaaaatggtaaagtgaagtattgattatgttgaaacttggatacttagagtgatttcacgtgtaactcacgcaataagtgaaaataaaatagaagaaacgttgacatcctgtggattttatggtcccattattttttatgactatatgtggccatatgttgtaccttcgtataatttcatagatttctgaggctatttatacattattaatttctttctacataaaatcatcaaagtataattaaaattcataaatacactagttttgatccaaaattgcaaaaagcttaccaaaacaaataaacattctattcaaataaaacctcaagtcgccacatgaaaatgataagtgaaatattaattatgttgaaacttcgatacataaaaatgatttcacatgtaactcacgcaataagtgggagtagaatggaagaaacaccaacatcttgtggattttatagtccaaaatatttttgagaactatatgtggatatatgttgtgtccccgtaaaaattcatgaattttttaggctatttggtgtattattaatttcttgttgtagaaaatcatcaaaatacaattaaattcataaaaatattgtagcgtcgaccgaaaattgcaaataagttaccaatattaataaatagtttataaaaaggtaattctaagttcccacatggatataatcttaagtccccacatgaaaatgataaagtctattattttgatataaatttagacattattttaatgattttggcctaaagatatgtttaaacaaaaatgtgatgtactacaaagttatagatctcttcgagctctacaattttcatataaactttatcttcatccgatttcatatgtaaaagttatgattttataactatattattttgcag

SEQ ID NO: 115824 - DNA, 549 bp, Zea Mays
atggggtgcgcggcgtcggccgccgacggggccgagctccggcggcgggggtgggcgcgggcgggggagccggggcacagcgaggcgtccacctcgggtctgctggcgccgccgcaccagcaggaagggcaggaggccgagtcgtcgtccgggggcaggaggcgagggtgcaaggtggcgccggagcccaaggagctggaggaggggaccgccgcgctcccgtcgatgcccggctcgccgagcttcaggtactactgccagaagaagacggcggccgtcgataggatcgtggctgatgccatcgacgccgatgacaccgtcaggatcagagcgacggcgcgacagctgagcaataggagcgaaatcacggcaaacaaggcacaggactccaacgaggtctctcaacctaaaggggggaccaaatggcttaggttcagtggcttgtcgatcgtcgctgccgcttggcacaagcacaacttgttcagccgccaaagaagcaagccttcgccgcctcctgctgccgcttcagatgcaagctcccaaccctga

SEQ ID NO: 115825 - DNA, 908 bp, Zea Mays
catcaagaggatattttgcattatcatgctcaagaagcctaaggagttcctcatttattagttcatcagcttgttcaagtgatgtaggaggcataaaggtgcttctgcttctgctttctccacttctaataagagattgccggataatctctactgaaacagccggtggcctaggcagactcctctgcaacactttggatctctttctgagcaatgcctcatgcctagcttgttcctcagccctttctcgtgccagtctgtctgacatgtcctcttcaattttctcttcagcttcttctttctcatcttccgtaataggtggcatgactatctggtactcattctttggttgtggaatagaagcaaaaccagatcgcaggcttttcctcagttcggcttgcctacgaagctcaagtttagtgttgtcctgcatttccacttcatttatgttaagttcatcacgaagaggagttgctttcggtgttaaaccaaagctgtgcccctctctggatggtgtcatactaatccttggagtaataccagggccagggcttgctaaaggtgttgccattggatttggagtctgtatctccttcttgcgtggtgtaacaccagagaaatctgatggatgaagctctgggttatcacctcctaatagaggtgtttgtgattctctgagacgtgcaagattttctgcctccatcatgattgcatcacccttcccagctggagttcgctgcggagttcgcaatggtgtcataccaagccttggagtctgagaatagctggcaagcaaggttcttgtggcagtgcttccttcaccaagctcatcagctaaagcaggatcaccagcactgcccatctttgctatctcctctagctcgtggtcagaaatttgaggaggcggc

SEQ ID NO: 115826 - DNA, 1201 bp, Zea Mays
tttcctctcctccataaccacgagccaagcgcgacggatcccaatccatcttctcctcatccccaccacgaccaaaaaaaaatccggtcgccgatgccgtctgctgcctgacatcggtcagccagggtagatcgcgcaggcaggcagccccacacacatacgaaacccaatcctgcttcgatcccgtcggccggcgatggagggccggcggccgggcgcgcccgtggcgggcctgcccatcggcttccgcttccgccccaccgacgaggagctgctgctgcactacctccgccgcaaggcgctggcctgcccgctccccgccggcgtcatccccgacgccgacctcgcgcgcctccacccgtgggacctcctccccgccgccgcaccagggggatccggagccgacgccgacggggagcgcttcttcttccaccgcccggcgacgcagtgctggcgcaagggcggcggcgcggccagggcggccggcaccggcgtctggaggccgtccggcaaggagaccctcgtcctgtccccgcgctgcaagcgccccgtcggcaccaagcggacgctcgtattctgcccccgccgcggccgcgcccgcacccactgggccatgcacgagtaccgcctcctccccgccggcctccacccctatggctgcgccgccggcgccggcgccaacgcgcctccgcccactaatgtgagctcccacggcggcgacgcggcggccgactgggtggtctgccgcattttcaggagggccaggccggcccaccgcgcccgccttggtggtggcgccagggaggaactagaagaggagcacgcggcggaggagagcccgtcgtcctgcgtcaccgacgcctccgagaccctcgaccaggaagaggatgacggcgacgaagggagcagcagcagcaccgtcgcctcctctaactgagactgagtagaagagttggctaccccatgtcgatcagatcgcgggcgccatgttctaattgccgtagaagcctcatcatcagtacctagttgcaatcaatagagagacaagaagatcggcctccaacaaaccaacaaaaaaaaagctaagcgctttggtggtatgttgctgttggagctcgtcgcgaatccagattgttaattagcgagaaattaatccgttcccccctccggcaattattaattaatcaccgttccctggttc

SEQ ID NO: 115827 - DNA, 1317 bp, Zea Mays
aaactagctctaaaataatgaccgagctcgagtgccgagtggcagcttgcgggaggacaatgatggatggcatgtttcgtcctgctgtgcatttgcagatttcaaaggagttcactggacgggaacctataaatgtgtccgcttctcttccccacgcccggtcttgtcgctttatcgccaacctgtggccatggacgttccagcacgcaccaccaccacggcaccaccaccctgcccccctcctcctgctcaaacccaccccctctcgctcgcctccccgccactcccctcccgtccctatggcggccgttaccacagccactgccgccgcgtcctcctcctccttcctccaccgccgaagccccgcctgcctgcgcgccacgctccgcgccgcgccgcggcactgccgcaactccagctccaggctcgcctgccgcgccgccgaggtgtccggggccgagtcgtcctcggccgcggcggagggcgcgggaggaggcgggggcgcgtcgtgggtgcccgtggtgccgctcgccgcgctgccgcgcggagagcgccgcgtgatcgtgcaggacggggaggagatcctgctgctctggtacaagaaccaggtcttcgccatcgagaaccggtcgccagcggagggcgcctacaccgagggcctcctcaacgccaagctcacgcaggacgggtgcattgtttgtccatcaacagacagcacatttgaccttcgcaccggggagataaaagaatggtatccgaaaaaccctgtcctacgggctcttacgccagccttgaggaaactattcacctaccgcgtgaaaacagacgaagaaaacatatacatcagcttcagcggagccgacggtgcggggtcagcggagattatattcagcgggaaagctcagcctggtgtgactgcatcggatgtcaatgtggaagaggtgaggatggtcgtcgacgaggatgtcggaggcttcggcttcaccagtgacaacgagctgatcaacggaaaagccgccataatcggcttcctcctgctgatcgatttcgagcttctaactggcaagggccttctcaaggggacggggttcttggacttcatctacgcagtttcgggagctttcaactgagagtcatatgtgtgtttgttgttcgttccttggtatcaagaatgccatcgaggtgtacttgactacccttagaagcctaggttttgtcagcgtgcgattcagtcagctgtgcttgtatttgaacatcaccatgcttgtctgtgaagtgaggaagggacacgagaaagtcacatttgcggtgcttctt

SEQ ID NO: 115828 - DNA, 498 bp, Zea Mays
atggatgatttggacctattcaatgacgcagacattgccatttcttccccaccagacattgtcgtaatgtcttcaccgccttgttcaagttccttaccgctagttgcattaggtggaaataatgctaataaggacaatgataaggtacaagacaaatctaggttagattgggaatctatggtactatgtgatttttgggaggaggaagggagacgtgatgttccaagtgagatgcagatgtattctcaactaggactcaatgaagaggacaaggcaaaggaaaataaaagagatgaagccgttttaggtggtataagtaatttggatcaatcggagcctattaattttggagacaacattatagaccaatcatgtgaagactacctaccaaatgagaagaggattatgtatgataaaatgaatctgtcaatgcaacctggtagtttatggtcccagaacaatgttggtgtttgtggtcagtgtatctgtttgtggtaa

SEQ ID NO: 115829 - DNA, 150 bp, Zea Mays
atggggtcaaggaacgggaacgtggtacgcggtacgctacaaaaactaggatttaacactactggaacgagattgttcccacatccccgaaacggaacgaacgttccaggaacgaggaacgtggtcaagttcccggttcccggttactaa

SEQ ID NO: 115830 - DNA, 351 bp, Zea Mays
atgagggtggaaatgttggccgagaacatcggtaggctgccgtcactagaggatgagggctgggtcttagtgaccgaggttggcggcggtgagtttgctgttgggaagaaggggtatagatcccagtggagggggttgcgaaagaggacgggtgtgtctaggcgtcgacgaggtgacgacaagcgacgcctacgccagcggcacgacgctaggagtggctgtagggtggcgcggaggaggggcaggctaggtggcggttgtgacgtctgtggggtgcgaggagatataggtgcgtggagaagctcgcggggcagcccaagaaggaagatggtgcggtgggggcggcactag

SEQ ID NO: 115831 - DNA, 79 bp, Zea Mays
ttttctgattttgatacaagatttttcatggtgacttccgtttccgtcattattttactcgggttctcattttttcacc

SEQ ID NO: 115832 - DNA, 196 bp, Zea Mays
tatgagttcatgtgacttattttagaaacttgagcttacaaagtttctcttatttggtctctgtatgatggaattatgtcattttttaatctatgttcgttcagtcggtcgttgtgaactctcttctaatcgcccacttcattggtcgtattgtaccaatacatattggatggagtaaacaataacatcagttagc

SEQ ID NO: 115833 - DNA, 369 bp, Zea Mays
acttcgttcgagagaaagttgccctcggtcatgctcggattcttcattgttggaatataatataagtaaattgtccacccctcctatcagcttaagcttttggattgaattagttggtgcatgcaacttaatatggtatcagagccagaggtcacgagttcgaatcctggttagcacaattaaataaaataattgttgctcgctcttattccacgtctgagagccaagagaggctcgacgtgagggggagtattggaatataatataagtgaattgtctatcccctcctattagtttaaacttttaggttgaattagttggtgcatgcaacttaatattcatgtttccacgacatctcagtacacaaac

SEQ ID NO: 115834 - DNA, 840 bp, Zea Mays
atgaggaggtggtgcccggctgtcctgctgggctgcgtagtggcgctgttcgttctggtggccgccgttgaatgcgttgtggcttacgacaagaaggtagtgctgattgatgggcagatgcgaattcttttctccggatccatacactaccccaggagcacccctgatgtaactgcattttacaaaatctcttctccccccactattccctggagaggtttatggctgcggatctatggatctgaaacgaccatgcagggtttcactgagaaaactgtgggaatgatgaagagcgaaaacctctttgcatcccaaggtggcccaattatcctctctcaggcaagtataatctttttccttaggtttggtacaaagaggttatgtcgtagcctggtgaagcttccaaaaccatttgacaaactgactggcttcaatgccttctggtactctcatcgcttagttagaattgtgtatttggctcattgttcatggccagttcctgtacctcattcatatctggtatcgaaaaacggtgaaaagcatagagaacatgtcagtgtttcatgtagatctaagggctccaagagatcaagagaccatcttccccagcagacaccaactgatagaatgcagtataggaggcacttttcttctaatggcatctgtttcaaaacaaagactatcatagctttttatggtagggaacgcaaaacgaatattgagttggagcctattttttcaactcgtcaaagaaagcaacaggccacagtgattgtcagtggcgtgcgccagaagagtgtgcggaaggcgacgattccatgtgcgctagaagagatgtga

SEQ ID NO: 115835 - DNA, 1915 bp, Zea Mays
aacagcgagaaagaggggaaataaaatctccccgtctcgctgctgcgtgcctgcggggacactccatctcctcctccagacctccacgatccggcctcccccacctctcgccggccgaggacgatccgccggcatcagagcgcgcgccccggagccgaaaagcggggggcgtcatgaagcccccggccggcgccagcggcaagggcggcgcggtggacccctctctgccgcggttcaggtgccaggagtgccgccgcgccctcgtcgtcgtcggggtcgagtcctacgccgacagactgcccgcacacgccgcgcccggtaatcatgcatcttctgttcagggcagtgttatgggtgcaagcaagatggacaactcttatgttgtgctatctagacagaacaaatctcagggtcctagaattcctccacgcccaccaagtgcagcagcggcacatgctgatcccagccaatcaacaagagcgatagaggggtcatatatagtgcttccacctcctgccgcttccatatacaggacatctgcctctgaaggtggtgcacagctcacaccatcaggtgtaatctccagtagcccctcgctgggaaacaattctgggtttcactctagtgttactgtgctgaaaagggcctttgagattgctagctcgcaaactcaggttgaacagccactttgtctggaatgtatgagggttctttctgataagatggataaggagattgaagatgttaatgctgatattaaagcttatgaggcttgtcttcaacgtttggagcaggaaccttacaacatcctcagtgaaacagattttcaaaaggagaaacaaaagattgaggaagaggaaaagaaacttaaagctgctattgaagaagctgaaaaacaatattcagaagttagatctgagatggaaaatcttgaaataaagtctaaacaatttgaggaattggaagagcggtattggcatgaattcaacagttttcagtttcagttgacatctcaccaggaagaaagagatgcagtttttgccaagatagaagtttctcaggttcatttggaactgttgaagcgtactaatgttctcaatgatgcattctatatatcacatgatggagtaatcggaacaataaataactttcgcctaggacgtctttctaatgtagaggttgagtgggatgagataaatgctgcatggggtcaggctgcactgctgttgcataccatggctcagtatttcaccccaaaattccaataccggatcaagattcaccctatgggaagctatccaagagtcacagacatccagaataacacatatgaactgtttggtcccgtgaatttgttctggagcacccgatttgacaaagccatgacatggtttcttacttgcctgcaagagtttgctgagtttgccataagtttggataagcagaacaatgttccccctgaaaaatcactgaagcttccctacaagattgatggtgacaaagtagggagccacacgatcgtccttagtttcaataagaatgaaaactggaccaaggctctaaagtacatgctgtgcaatctgaagtgggttctctactggtttattggcaatacaagttttgcaccaccctctgtatcactgcacacacaatctctgaagaacaagagttgatgctgttctctctctgcaacaactgtacatagtttgtgtactcgaccctattcgttggatatagccgcagtgacaataatgacacgtttgatgtgcatttgtttattgcttgaaatctgccatgatgtgtttattgtacaatctaaatctcaggaactacattttcacccttaggtaacgcctccaacattacgttttgaaaaaacaatgcaaaaacagtgttttaggtgacatgagtgaaa

SEQ ID NO: 115836 - DNA, 2821 bp, Zea Mays
cttctctctcttctcttctattctctttctctctctccttcccccgccccctcgcctcccctctcccacccccaccaagcaccgccggtcactatccctccttggtcttctccctcctcagagcagggaggggaagcggaagagggaggcgagagcacgggaaacctgatctgatttgcttttggtcgccacaagagaagggagttggtgcagtttgtaggcgtgcctctgtgtctccgtgtgtgtggagatggaccccaagttccccacacccctagcgctaaacaaaacggagcccaccaccgcgacgaccaccaccacctcgaccgcgcagcatcatcagctggatcctaaggactaccagcagcagacggcgcagcaccaggagcagcagcagcaccaccatcacccccacctgcaaatccaaatccaccagccgccgccgccgccgcaggacgggggcggcggagtgaaggagcagcagcagctgctgcaggtggtggcgcagcccggggatcggaggcagcaggcgctcgcccccaagcggagctccaacaaggaccgccacaccaaggtcgacggcaggggccgccggatccggatgccggcgctctgcgccgcgcggatcttccagctcacgcgggagctcggccacaagtccgacggcgagactgtgcagtggctgctgcagcaggccgagccggccatcgtcgccgccaccggcacgggcaccataccggcgtccgcgctcgcctccgtcgcgccctcgctcccgtcgcctacctccgggctcgccaggccgcaccaccaccacccgcaccacatgtgggcgccgtccgccggcttctcctcgccctccttcctgaattccgcgggcgcgggcgacggcaccggtatcggcggcatcatgcagcggatgggggtccccgcgggcctggagctgccgggaggcggcgccgccggcggccacatcggctttgcgcccatgttcgctggacacgccgcggccatgccggggctcgagctcggcctctcgcaggacggtcacatcggcgtgctcgccgcgcagtcgatcagccagttctaccaccaggtgggtgccgctgccggcggcagtggccagatgcagcacccgcacgggcaccagcatcaccatcatcagcagcaggaggacggggaggacgaccgcgaggacggcgagtctgatgacgagtctgggcagtagtgtagtcgttcaaccttgcgttttctgggtcttccctcaagtggaggaggagagaaaagtgtatgcgtgcagccacggaatgcttctgctactcctggattcttgttggtcgatggatttttatgttttttttttctctcgtgtggtatccaaactcggcggaggcctctcttgctgtgaagacttgcgggctcaagatcatcctcacttcttcctacaatctcatggggtggatgatcgccacagccttctctccgacttccaggtgtataatagctgaaaacttgatggattggaccaatcacccttgagtgagtgccttatttgttatattgcaaagtgtgtagatattcaggtaattttgcagttagagaggtgttctttttattggagtaaacatccacgttttaaaacaatcaaggtattcgccggcaattcgaccatcctccacaggctgtctatgcatcataaacatgatacgtatacaattctagtccatgatcactcagacctcctttttcctcctctgatacgtctggtctgtttctgacgagatttcttcttcttttgtgtgatgaaacatgcacgtcctagttgtttgcttgaatcatcagttattgtttcagtatatttgtttacctaggagagttgtttgctactacattttactagggaaaggttcagtaggttttattggtaaccatagatggtgacacacacagctatatatgcttgtgcagaaacagagcacaatagaaggctgcatgacacctgattcagaaacaagaatataaggattagacttggtccagcatagaaactagtgcttcattgccagcgaatattttctggacagtttgcattcttgagttcgattttctggacacttttgggatgttttgccgtgataagatgtgttctctaactgaaaatcacaaagattatactaccccaactacagtcaccttgctgcttgcatggtgttttataaacaactaatgctaactataaacctcccagttacattcttcagttcggggggatgtcaatgataaaccctgcacatcttctactacaagctgtataattttatttcctgatctttttgtcttggtgaatgactacccgtctatttctacggttacaaaaaaaagtggttatgacattgtgggttatgagatagtagctattttaaacgtgtagcatcagggatatgtctgttttttaaggaacatccataatcatcatctgaacagtgcttgctgtggatcttttcgctttaaacaacatgctgaagacaacatcgagatcaagccgactttaagcatggacagcggcatgttgggtaaagttgctgagagtgcacagaagatgactttttttttctatgtgggtatcatgattgtgttggcaagtgtatgtgttctactccctcgggaccaaattataagttgctttgatttgttttttttacatccattttactatacatctagatatatagtacattatttgtctagatagacacatagcgaattgcatgtaaaaaaaagtcaaaacgatttataatttagaacaaaggagtactagtttgtg

SEQ ID NO: 115837 - DNA, 1833 bp, Zea Mays
attctctttctctctctccttcccccgccccctcgcctcccctctcccacccccaccaagcaccgccggtcactatccctccttggtcttctccctcctcagagcagggaggggaagcggaagagggaggcgagagcacgggaaacctgatctgatttgcttttggtcgccacaagagaagggagttggtgcagtttgtaggcgtgcctctgtgtctccgtgtgtgtggagatggaccccaagttccccacacccctagcgctaaacaaaacggagcccaccaccgcgacgaccaccaccacctcgaccgcgcagcatcatcagctggatcctaaggactaccagcagcagacggcgcagcaccaggagcagcagcagcaccaccatcacccccacctgcaaatccaaatccaccagccgccgccgccgccgcaggacgggggcggcggagtgaaggagcagcagcagctgctgcaggtggtggcgcagcccggggatcggaggcagcaggcgctcgcccccaagcggagctccaacaaggaccgccacaccaaggtcgacggcaggggccgccggatccggatgccggcgctctgcgccgcgcggatcttccagctcacgcgggagctcggccacaagtccgacggcgagactgtgcagtggctgctgcagcaggccgagccggccatcgtcgccgccaccggcacgggcaccataccggcgtccgcgctcgcctccgtcgcgccctcgctcccgtcgcctacctccgggctcgccaggccgcaccaccaccacccgcaccacatgtgggcgccgtccgccggcttctcctcgccctccttcctgaattccgcgggcgcgggcgacggcaccggtatcggcggcatcatgcagcggatgggggtccccgcgggcctggagctgccgggaggcggcgccgccggcggccacatcggctttgcgcccatgttcgctggacacgccgcggccatgccggggctcgagctcggcctctcgcaggacggtcacatcggcgtgctcgccgcgcagtcgatcagccagttctaccaccaggtgggtgccgctgccggcggcagtggccagatgcagcacccgcacgggcaccagcatcaccatcatcagcagcaggaggacggggaggacgaccgcgaggacggcgagtctgatgacgagtctgggcagtagtgtagtcgttcaaccttgcgttttctgggtcttccctcaagtggaggaggagagaaaagtgtatgcgtgcagccacggaatgcttctgctactcctggattcttgttggtcgatggatttttatgttttttttttctctcgtgtggtatccaaactcggcggaggcctctcttgctgtgaagacttgcgggctcaagatcatcctcacttcttcctacaatctcatggggtggatgatcgccacagccttctctccgacttccaggtgtataatagctgaaaacttgatggattggaccaatcacccttgagtgagtgccttatttgttatattgcaaagtgtgtagatattcaggtaattttgcagttagagaggtgttctttttattggagtaaacatccacgttttaaaacaatcaaggtattcgccggcaattcgaccatcctccacaggctgtctatgcatcataaacatgatacgtatacaattctagtccatgatcactcagacctcctttttcctcctctgatacgtctggtctgtttctgacgagatttcttcttcttttgtgtgatgaaacatgcacgtcctagttgtttgcttgaatcatcagttattgtttcagt

SEQ ID NO: 115838 - DNA, 1167 bp, Zea Mays
tgtacatacattcttacccactgttcaactggtgtctgtgtcgaaatggatcccatcagcatagacaagatcagggccatgaacaagtacagcaagggcaggaggaggcagccgcagcttcttcctactctctcactctacttctacctggccgtcgccacctttgtcctctgcctgttgctcactagccctgcctggttccccgggctgtgctcggccctcgcctcctccttcctcaccaccctccctggcttgttcacggccttcctgctcagccccaggtgcctcttcgtcgtcggcaacctcatcatcgccttcctcgtcggggagtctaggctggcaccaaggaggagggacgacgacgcccagccttccttggtgaacgagatacacgaggagcatgtgaagaacaacgcggcggtggctgaccacagctccttcgttggagcagttgttgggaaggaggtgcaggtgcaggtgcaggtgaaagaagaggaggagcaggaggaggaggaggaggaaggaaacgaggaggagctgcacacgagagtggaggacttcattgcgagggtcaagaggcaaaggaagctggagctcaagagcttcttcgatgttgatcgatgatgactatgatatgtttggcaggtgcaaaattacagtaaggttgcgggcgccctaaaaaggatctgtaatggtttgtgctgctagctatccttttgattaattctgtcacttgtagttgtagtaggttaaaatgtcgaaggtaaaacgataaggagacgaacccattccactgtaggatcggatttgcagtgtaactgaggtagagtcatggcaagtaaggaaaaggagaggaggcaatggatgtatgtgatctctgaaaaagggtaaaaaaagtgtgtttcttatattgctttatgtcaatgctcagttggcatgaaaccatgttgatgatgatgatagcacttgtgtactggggaacaaagagatcctgtaccctcaacctgatgctacaaagttgtcgggataataatagtgaggactgaggaacgatcactagttatatactcaaatgatacagcaacttattcatcactgatacttgattcagcaaccccaagagagattataaaaattaaatcctgaaatcagtgcaagaaaaaaaaa

SEQ ID NO: 115839 - DNA, 1034 bp, Zea Mays
agggctcgcgcctcctctcctccgacccctataagcacccaaccctagcgcaaaaccccgcctccgctggacaccccgctccgcctccactcctcgcgccgctgccgcatctcctctacaggtaagaaggagagaaagagggcgaaatggtgaagcacaacaacgtcatccccaacgggcacttcaagaagcactggcagaactatgtcaagacatggttcaaccagcccgcccgcaagcagaggcgccgcatcgcacgtcaaaagaaggctgtgaagatattcccacgaccaactgctggccctcttcgtcccattgttcaatgccagactctcaagtacaacatgaagtcaagggctgggagaggctttacccttgaggagttgaaggctgcgggcattccaaaaaggcttgctccaaccattggcatttctgtggatcaccgccgcaagaacaaatcccttgaggggctgcaggccaatgtccagaggcttaagacatacaaggccaagctggttatcttcccaaggcgtgctcgcaaggtcaaggctggtgactctactctggaggagcttaccactgctacccaggtacagggtgactacatgccaattactcgcggtgagaagcgctctgtagaggttgtgaaggtcacagatgagatgaaggcgtttgcggcctatggcaagctccgccttgagcggatgaacaagaagcacctcggtgcccgccagaagaaggcagctgaggcagagaaggaagacaagaagtgaagcagccaaactttgtagcctgttttgttctgttcagtcatagcgagatgctacttccatcaagtgcttgttccaagttttttttgggtgctggaaatagagaccagtcaaatattttggtgtcctactgtttgataccttgtatttgtttgcgaactcagctatctaatgggttaatgaattcttggcgacgcacgattctgccttaatgttttgaatttatatagcaaaaaaaaaaaaaaaaaaaaaaaaaaagcagca

SEQ ID NO: 115840 - DNA, 1012 bp, Zea Mays
agggctcgcgcctcctctcctccgacccctataagcacccaaccctagcgcaaaaccccgcctccgctggacaccccgctccgcctccactcctcgcgccgctgccgcatctcctctacaggtaagaaggagagaaagagggcgaaatggtgaagcacaacaacgtcatccccaacgggcacttcaagaagcactggcagaactatgtcaagacatggttcaaccagcccgcccgcaagcagaggcgccgcatcgcacgtcaaaagaaggctgtgaagatattcccacgaccaactgctggccctcttcgtcccattgttcaatgccagactctcaagtacaacatgaagtcaagggctgggagaggctttacccttgaggagttgaaggctgcgggcattccaaaaaggcttgctccaaccattggcatttctgtggatcaccgccgcaagaacaaatcccttgaggggctgcaggccaatgtccagaggcttaagacatacaaggccaagctggttatcttcccaaggcgtgctcgcaaggtcaaggctggtgactctactctggaggagcttaccactgctacccaggtacagggtgactacatgccaattactcgcggtgagaagcgctctgtagaggttgtgaaggtcacagatgagatgaaggcgtttgcggcctatggcaagctccgccttgagcggatgaacaagaagcacctcggtgcccgccagaagaaggcagctgaggcagagaaggaagacaagaagtgaagcagccaaactttgtagcctgttttgttctgttcagtcatagcgagatgctacttccatcaagtgcttgttccaagttttttttgggtgctggaaatagagaccagtcaaatattttggtgtcctactgtttgataccttgtatttgtttgcgaactcagctatctaatgggttaatgaattcttggcgacgcacgattctgccttaaaaaaaaaaaaaaaaaaaaaaaaaagcagca

SEQ ID NO: 115841 - DNA, 1010 bp, Zea Mays
agggctcgcgcctcctctcctccgacccctataagcacccaaccctagcgcaaaaccccgcctccgctggacaccccgctccgcctccactcctcgcgccgctgccgcatctcctctacagaaggagagaaagagggcgaaatggtgaagcacaacaacgtcatccccaacgggcacttcaagaagcactggcagaactatgtcaagacatggttcaaccagcccgcccgcaagcagaggcgccgcatcgcacgtcaaaagaaggctgtgaagatattcccacgaccaactgctggccctcttcgtcccattgttcaatgccagactctcaagtacaacatgaagtcaagggctgggagaggctttacccttgaggagttgaaggctgcgggcattccaaaaaggcttgctccaaccattggcatttctgtggatcaccgccgcaagaacaaatcccttgaggggctgcaggccaatgtccagaggcttaagacatacaaggccaagctggttatcttcccaaggcgtgctcgcaaggtcaaggctggtgactctactctggaggagcttaccactgctacccaggtacagggtgactacatgccaattactcgcggtgagaagcgctctgtagaggttgtgaaggtcacagatgagatgaaggcgtttgcggcctatggcaagctccgccttgagcggatgaacaagaagcacctcggtgcccgccagaagaaggcagctgaggcagagaaggaagacaagaagtgaagcagccaaactttgtagcctgttttgttctgttcagtcatagcgagatgctacttccatcaagtgcttgttccaagttttttttgggtgctggaaatagagaccagtcaaatattttggtgtcctactgtttgataccttgtatttgtttgcgaactcagctatctaatgggttaatgaattcttggcgacgcacgattctgccttacaaaaaaaaaaaaaaaaaaaaaaaaaaagcagca

SEQ ID NO: 115842 - DNA, 1801 bp, Zea Mays
gaagcggaaagggagggtgcgaccggaaggcccgaccccgacccggaagacgaggtagaggagggggcgagcgacagaggcagtggaggggcgcggtgaggaggccggcggcgcgcgcgcgcttgcggcgccggcggcctggcgatgggggaggtggccgcgctgcgccagctcgtcggccaggtccaggagctctgggacctctacggcgccaacggcaaccccgtccccaggtggtatttacctgacttcgaacatggttcaatcaaggatgattattgtgggggaagctcaggatacaactcggaattactgaagatcatggaaactaaccaatctcccccttgcaagcgaccgcggagagatcgaaaccgtgaaaaggcaccctcctcaaacaaaattgaagtcatggaacaagagatatggagagatttccctgaagatcttttcgaaactgtcatagcaaggcttcctgttgctgcaatttttcgattccgcactgtctgccgaaggtggtcttcccttttgggctcagacagtttctctcgtcagtactctgaagctccacatggactgccatggttctatacaatcactcatgagaattcaaacaacaatgttgcgatgtatgatcctttgctgaagaaatggcaccaccaatctgttcctctcaatcatacgaagatagttattccagtggcatccgtgggtggccttgtatgtttattggatctgagccacaggaatttttacatctgcaaccctcttacgcaatcactgaaggagatcccaccaagatcagtccatggttggtcaagagtcgttgtagggatggtgttgaatggaagaagttctagtgatggctacaaagtaatgtggttagatattgatgggacttgcgaagtttatgactctacaaagaacgtgtggtcttgccctggaacttttcctccaagcatcaaacttccacttgctctaaatttgaggtcacaaccagtggcggttggcagcatgatatacttcatgtgcgcagaaccagatggtgttttgtcatatgatgtaagcaccgggatttggaggcaatttgccatcccactgccactgcatctgactgatcacacacttgccgagttccagggaagggttatgctggtgggtctgctgtgcaaaaatgcagcgacctgcatctgcatatgggagttgcagaagatgactctcctctggaaggaggtggacagaatgccaaatctctggtgcttagagttctacggtaagcacatgaagatgaaatgcctgggcaacagtggtttgctcatgctctccttgaaggcgaagcatatgaaccgccttgttacatacaaccttttgaaaagggagtggcagaaggttcctgattgcatgctaccatggagtcgaaaaaggcaatggataacatgtggcacagcatttgatccggtcccctgcgccttggtctgacatggaattttaccttctttgtctgagcactataatattttagtcctttcatatcattggcctatctttagatctttctatgttgttgtgacaagttctgcgaaaacgcattactgtggtttgctttgtataacgccgccgaaacaatcgaacggtttcctttatcacctgctgttctgttaagcttgtaatctttctgaacgtgcagttacctgcccagagctgagttcattatacaataaataccgggatgttaatgtttggactctggtgcatggagatgcagtggtgcttgttattaccatgaaaataatgtttttaatta

SEQ ID NO: 115843 - DNA, 204 bp, Zea Mays
atgcccccgagggagcaggcacgtccgcaaggggcaggctttctttcctccacccccgcccctctctctttctccctctcttcccccttcctcttgatttctcgccgcacaggcttgatttctccaggaaggaagcagcggcaaatcttgggagccgctggtttgaccagacaccagaggacgggaggggagcagggcggctga

SEQ ID NO: 115844 - DNA, 3530 bp, Zea Mays
gcgcgtcattgccagcggaggcgcgtcgctatcgcctgggaacaataagagtttgcgcgtctcgcgactgatcggtggcgactgccactcggcggcgacttggactcgacttccgggcaacagggcgaggagtcggccggccagtccactgggttcaaatcggcctcggcaccgcggcgcccccccgcgagttcttgctggattcgctcggagcacggcgcgggcttgtcggcacggcgccatgcagcagcagcagcaaggcttagacataggcaagctacaagaggtagtgaagacccgctggctaaagcctcaagaagttctcaagatactgcagaatcatgagctgttcacgatttcgcataagccccctcagaagccacagagtggttcttggtttcttttcaaccgtagagtactccggtacttccgaaatgatggatttgaatggcaaaagaagagaaatgggaagaccattaatgaagcccatgagcgccttaaggttgataatgtggatgcactgaattgctactatgctcgtggagacaaaaatccaacatttcagaggcggatatattggatgcttgatccggcttatgaacacattgtccttgtccactatagggatgttctagagggcagcatttcagtatctgcacgaaatgattcttcaacattgaatcagaatggcagtgctagcagagctgaagtacatagttcacctggttggacaagcgagttaattgcacattgtactaattcgtgcagtccgggatctgctgaagaagtcagttcccaaattagtgcaagtgaatctgatttgattcaacataaggcagccttgcggaagcttaaaatgcagctgagtctggaagacaaagaagattgtgatgttaatgccgaggatgttccagcagataatgagcctattattttacctgtgattcagaatgaggagccaggcacttctagaaatcatgatgatatctttgatgtgctggactttagtgaagatcatatcaacggaactggaacccatccatgtcacagtgctattgacgtgctaaaaaattcagacacatggttagaggatgatcaacttgaggcaattctgcatccagcgtgtatgacattgactgaaaatcaatggttcaggatacatgaggtttctccagaatcagcgttttcttatgaaagtacaaaggttatcattgtaggagacttcctttgcaatccccctcacagttcatggcaagtgctgtttggtgatgttaaggtatgtgtggaaattatccagcaaggtgtcatccgttgccatactccatgccttgatgctggaaaagtgagaatgtgcttgcttgatgggaatgggaagtcctgcagtgaagcacgagaatttgaattccttgaaaagcctaccaaatgcatgattgatggaaacacgaacccctgcaatgaagcacaagatgtcaaactgcatcagatacctaccaaaagtagtgaggagctgtcactgttactacattatgtgcatacactttttgatggtcatgctagtgggctattttcaaattttagcttgccactccaaaatcttggctgtggaatccaaagcaatcaaatggatgttatgaagaaggcgtataagcagctggaccctgagaatgtggtaagtagtgtcatggaagtattgcttaatgacaagtttaagcaatggttgtcatccaaatgtgaacagaatattgatggagaccatttgcttcctaagcaataccgcaatattatacatacggttgcagccttgggatatgatttggctttgaagccactgcttagttcaggagtgcctataaactaccgtgatgcaaatggatggactgctctacattgggctgcaaggtttggcagagaagatatggtggtggctcttcttactgctggtgctgcagctggtgcactttcacatccgacatcagaggatcctgctgccaaaacacctgcttcaatagctttagcatatggtttcaagggcctatccgcgttcctttcagaagcacaattaacaactcatcttgattctatcgagtcaaaagaaaatggaaaacttgattctagggaagaggggatatgtcgtgctgtggacagaatatcagacaaaagcagccacgtgcatggtggaactgatgatcagcttgcgcttaaggattccctgggagctgtccggaatgcagttcaggctgcagggcgcatacaagctgcattccgaattttttcctttaagaagaagaaagagatggctcttgggaacagaaatagctgctgcttgtccattagtgaggcaggagcagtttcacatgatatgctggagaaagctgtattatctatccagaagaacttcaggtgctggaaaaaacgtaaagaattcctgaagatgcgaaataatgttgtcaggatacaggcccgggtgcgagctcatcaagaaagaaacaagtacaaggaattgatttcaagtgtcggaatccttgagaaggtgatgatacggtggtaccataaaggtgttggtctgcgtggattcaattctggggcaatgacaatcgatgaagaggtggacgaagacgttgccaaggtcttccggaagctcagagtggaaacagccatcgatgaagctgtttcaagggtatcatgtatcattggtagccctaaagcaatgcatcagtaccgaaggatgctcaataggtaccaacaaacaaaggatgatcaggagaagtaatgcttgtgttaaaccaacagtgatggagcaaacagcaaagcacaagccacccactatttatttatctcccttactgaagcacaagccttggtgactgaatggacagtggatcccgagtaaaactgaaaatttcttgggtgaactagaaccagctccaattcatgctggacgctgtttgagtgtacacagcaacgtcatgtgcaatagctgacttctggctgaaagttggtaaaggcgatgacttagtggtatatgcagaagcttccaaaagcctgatgagcaaggtagatgaggtctgagaaacactgcattcgatatatatatgccttatgtactaccttcatgcagtaggtttgtagtaaatttgtgcgtaactcttcttctgcgtattccagaaaaaaagtttgtagtaaatttgtactatatggtagtaaataggggtcaactattgtaatttgtagcacaatgaatcttgtaagaaatctcagtttagaaatactccatcttttacacatgggatgatgacgaccgatgatcaattttgccagttaatacgttcgccgcagtcctctattggcagtgacattccaacagttgaacgccagctgtttcatgcctttggcatcagctttcaaatggagcagcgatcaaagaaagcctcgtagcattaaacttctctctcggtagtctcgtgatcagaattcagatggctcaagcaactgccaacagaataaacaatcaggcagggtgcgagccactg

SEQ ID NO: 115845 - DNA, 2247 bp, Zea Mays
acgggacgggggcatccgaacaccaccacccagcacccaccagctcggcgaaaaaaaagaaggaaaattttagataccctgccgcacgccgcgaccttcggccccgtctccggtctccgccttcccccacctattggggagcgctcctgattcgcgggagccagcgggcgagacaaagagaatcccccgctcctgcgccgccgcggatcagcgccgtcgccgatcggaggctctcgcttcccccggcgggcggcgcgcgccgggagatggacggcggcgcgggcgcgggcgccggccggaggaacgtctcatcgtcctccggatccaggaggagggtcctgcccgccgagaacgggcacggccatgacgccccgccgccctccaggcggtcctccgtctccctctcccgcggccactccacgtcactgaccggcgagaggaccgtgaaaaggctgaggctgtccaaggcgctgacgataccggatcacacaaccgtgcacgaggcttgtcggaggatggcgtcacgcagggttgacgccgtgctgctgactgactccaacgctttgctctgtgggatcctcaccgacaaggacataaccacaagggtgattgctcgtgagttgaagatggaagagacaccggtctccaaggtcatgacccgaaaccctgtatttgttctcgcggacacgcttgcagtcgaggcgttgcaaaagatggtgcaaggtaagttcaggcatctgcctgtcgtggagaatggcgaggtcattgcaattctggacatagccaagtgcctatatgatgctattgcacggatggaaagggcggcggagaaaggaaaagcaattgccgctgccgtcgagggcgttgaaaagcattggggagcagctgtgcctggtcctaacaattttattgagacgcttcgagaacggatgtttaggccatcgctgtctactattatctctgagaatccaaaagttgtcactgttgcaccatcagacatggtgttgacagcatcaaagaagatgctggaattaaaagtgagttcagcagttgtagcaattgaaaacaaacctggaggaattctgacatctagagatatattgatgcgtgttatcgcccaaaatcttcctcctgagtccaccacggtcgagaaggtcatgactcagagtcctgaatgtgccacagtggacaccccaattcttgatgctcttcacacaatgcatgatgggaaatttttacatttgcctgtcctggacagggatggaaatgttgtgactgttgttgatgttcttcacataactcatgctgcaattgctacggttggaaacagcggggcagctggatccgaggcaacatctgccatgatgcagaggttctgggattcagcaatgtccattggacctattgatgatgacgatgactcgagaagtgaagggtcgactagagtggtatctgaggcaacagatataggaagaccagccttctttccagcttctggcttatcaaacacttttgggttcaagattcaggataagcaagggaggatgcacagatttaactgtgaaacaagcggcctggcagagctgataaccagcattcttcagagggtcggcgacgacattgacagaaaacacctgccgcaaattttgtacgaagacgaggaccgtgataaggtcgtgctttcgtcggacagtgaccttatagccgctgtggaccatgcgagaaagatcggttggaagagcataaggttgcatctggattacgccggcgttggccggcggaagggagggggtggaccttcggacttggagtacgctggcaaggacgcagcatgggcttctgcgtacagcgccgtcgcggcaggggcggctctggttgctgggctcggtgtgatggcctacttgaaacggtcggggtaaaagcttggaggcggagagcacgacggcagagggagcacacgcttctcatcggatctgtgtgatacaaatgatactgcgtcggaacgagcagaatggctgtgtaagtaattcttgtgaaaaagagagagagagagggagattttaataatactagtgtcaaggcagtgaatggccgcctgcatacgagggagtacacggaactggtcgagcctttttggtgggttcagagtctccacgactaatttaccacggctgttagcgtcgtcacgattgtatttgtatcataaatcacacgatcattatacaagaagagtcttgttgagcctca

SEQ ID NO: 115846 - DNA, 711 bp, Zea Mays
acgggacgggggcatccgaacaccaccacccagcacccaccagctcggcgaaaaaaaagaaggaaaattttagataccctgccgcacgccgcgaccttcggccccgtctccggtctccgccttcccccacctattggggagcgctcctgattcgcgggagccagcgggcgagacaaagagaatcccccgctcctgcgccgccgcggatcagcgccgtcgccgatcggaggctctcgcttcccccggcgggcggcgcgcgccgggagatggacggcggcgcgggcgcgggcgccggccggaggaacgtctcatcgtcctccggatccaggaggagggtcctgcccgccgagaacgggcacggccatgacgccccgccgccctccaggcggtcctccgtctccctctcccgcggccactccacgtacgtgatccgccgcacccgccttgctctgcccttgttatgcgtagcgtagaccgtgctccgtacctaccgtctctgtggcatggacgcatggtgtcttcggatcaaggcttcaagcgtcgcgtcgcgtgtcaacctggagtagcttccgtgtgcctcgctttgtttgtagctgggagcttccatagcctagatttgacacctcccccggtttgtggaatcgatggatgttacgcactttttagtctaacaataccaagtacgggccgtttttcagttacaacagacaa

SEQ ID NO: 115847 - DNA, 1332 bp, Zea Mays
gcagagcgacgagcgacgagctaaaccccgaccgagtcgctgcttgggtgcccaagatagccctaccgcctcgcctctctcgttccccctcatcgccacgccagtcgcctccactcccagtcatctcccatcaccgacgacgtgtcgaggcgagagaagagggcgagtccaagtctagggttcccgccgcatcgacacgggcatcgcaccgcaccgcgaggggcgggcacggaggaagatggcaccgcgcgggcgcgtggagctgcggcggatcgaggacaaggcgagccggcaggtgcgcttctccaagcgccgcgcggggctgttcaagaaggccttcgagctggccctgctctgcgacgccgaggtcgcgctcctcgtcttttcccccggcggcaagctctatgagtactcctcctccaggtagtttgatgtgaagttcaaagcattgctctttaattgaatcaaagaatctcttgaaacaaagacatagaagatacatatgaccgctatcatcaatttgcgggagcaggaagaaaagtgaacggacataacaacgataaccgggatgtagctgcttcagatttacagtcgagacttaaggagatcgcaacatggtctaaacaaaacaacgctgaggagtcggatgccaatgaacttgagaaacttgaggaactcctgacaaatgctttgaggaatacgaaagccaaaaagatgttggcaaaagaaaacaatggtggtgccggtgcaagtacaagcagccagatgttgctttactcggcagagcgtgcaaccgacaaatgaaacggggcgtgcatctgttgctaacggggcggtgccggtgccgcatactattgttgtgtagctgaggtttgtcaaggtggctgctggcaaggttagccgaggaagtggagttcaataacaggatgcggaaactgtgccgctccttgccgaacttaagccccgttacgttgtcgcacaaagtttatttcctagcactgtgcttgctgcttatgtttgtttggatgtgccaacctgcagtgaccctcgtggagcctgggtctcacgctcctcttacctagtgtgatgtgcagaaaaagtgtgatgctgtaaaattatgtgattgcctagcagatgtcaaattttcaatcagtagctaactccttttaatggtacaggcttgcatgatttcatctgcaaaaaagagagggcgggttgggtgtcaaatctagccggatgttttcgcaagtttgtgataaaaattgtgctgtacacttgtgtttatgcagttgccctaggcgtcagtgggctgaaaggtaatatctgtgaatt

SEQ ID NO: 115848 - DNA, 1267 bp, Zea Mays
gcagagcgacgagcgacgagctaaaccccgaccgagtcgctgcttgggtgcccaagatagccctaccgcctcgcctctctcgttccccctcatcgccacgccagtcgcctccactcccagtcatctcccatcaccgacgacgtgtcgaggcgagagaagagggcgagtccaagtctagggttcccgccgcatcgacacgggcatcgcaccgcaccgcgaggggcgggcacggaggaagatggcaccgcgcgggcgcgtggagctgcggcggatcgaggacaaggcgagccggcaggtgcgcttctccaagcgccgcgcggggctgttcaagaaggccttcgagctggccctgctctgcgacgccgaggtcgcgctcctcgtcttttcccccggcggcaagctctatgagtactcctcctccagaaccgggatgtagctgcttcagatttacagtcgagacttaaggagatcgcaacatggtaacactaagttttcactactctctcccaactttctatgttcaatggtggcaacaatgtaacaaacctgcaggtctaaacaaaacaacgctgaggagtcggatgccaatgaacttgagaaacttgaggaactcctgacaaatgctttgaggaatacgaaagccaaaaagatgttggcaaaagaaaacaatggtggtgccggtgcaagtacaagcagccagatgttgctttactcggcagagcgtgcaaccgacaaatgaaacggggcgtgcatctgttgctaacggggcggtgccggtgccgcatactattgttgtgtagctgaggtttgtcaaggtggctgctggcaaggttagccgaggaagtggagttcaataacaggatgcggaaactgtgccgctccttgccgaacttaagccccgttacgttgtcgcacaaagtttatttcctagcactgtgcttgctgcttatgtttgtttggatgtgccaacctgcagtgaccctcgtggagcctgggtctcacgctcctcttacctagtgtgatgtgcagaaaaagtgtgatgctgtaaaattatgtgattgcctagcagatgtcaaattttcaatcagtagctaactccttttaatggtacaggcttgcatgatttcatctgcaaaaaagagagggcgggttgggtgtcaaatctagccggatgttttcgcaagtttgtgataaaaattgtgctgtacacttgtgtttatgcagttgccctaggcgtcagtgggctgaaaggtaatatctgtgaatt

SEQ ID NO: 115849 - DNA, 1267 bp, Zea Mays
gcagagcgacgagcgacgagctaaaccccgaccgagtcgctgcttgggtgcccaagatagccctaccgcctcgcctctctcgttccccctcatcgccacgccagtcgcctccactcccagtcatctcccatcaccgacgacgtgtcgaggcgagagaagagggcgagtccaagtctagggttcccgccgcatcgacacgggcatcgcaccgcaccgcgaggggcgggcacggaggaagatggcaccgcgcgggcgcgtggagctgcggcggatcgaggacaaggcgagccggcaggtgcgcttctccaagcgccgcgcggggctgttcaagaaggccttcgagctggccctgctctgcgacgccgaggtcgcgctcctcgtcttttcccccggcggcaagctctatgagtactcctcctccagcatagaagatacatatgaccgctatcatcaatttgcgggagcaggaagaaaagtgaacggacataacaacgataaccgggatgtagctgcttcagatttacagtcgagacttaaggagatcgcaacatggtctaaacaaaacaacgctgaggagtcggatgccaatgaacttgagaaacttgaggaactcctgacaaatgctttgaggaatacgaaagccaaaaagatgttggcaaaagaaaacaatggtggtgccggtgcaagtacaagcagccagatgttgctttactcggcagagcgtgcaaccgacaaatgaaacggggcgtgcatctgttgctaacggggcggtgccggtgccgcatactattgttgtgtagctgaggtttgtcaaggtggctgctggcaaggttagccgaggaagtggagttcaataacaggatgcggaaactgtgccgctccttgccgaacttaagccccgttacgttgtcgcacaaagtttatttcctagcactgtgcttgctgcttatgtttgtttggatgtgccaacctgcagtgaccctcgtggagcctgggtctcacgctcctcttacctagtgtgatgtgcagaaaaagtgtgatgctgtaaaattatgtgattgcctagcagatgtcaaattttcaatcagtagctaactccttttaatggtacaggcttgcatgatttcatctgcaaaaaagagagggcgggttgggtgtcaaatctagccggatgttttcgcaagtttgtgataaaaattgtgctgtacacttgtgtttatgcagttgccctaggcgtcagtgggctgaaaggtaatatctgtgaatt

SEQ ID NO: 115850 - DNA, 799 bp, Zea Mays
gcagagcgacgagcgacgagctaaaccccgaccgagtcgctgcttgggtgcccaagatagccctaccgcctcgcctctctcgttccccctcatcgccacgccagtcgcctccactcccagtcatctcccatcaccgacgacgtgtcgaggcgagagaagagggcgagtccaagtctagggttcccgccgcatcgacacgggcatcgcaccgcaccgcgaggggcgggcacggaggaagatggcaccgcgcgggcgcgtggagctgcggcggatcgaggacaaggcgagccggcaggtgcgcttctccaagcgccgcgcggggctgttcaagaaggccttcgagctggccctgctctgcgacgccgaggtcgcgctcctcgtcttttcccccggcggcaagctctatgagtactcctcctccagaaccgggatgtagctgcttcagatttacagtcgagacttaaggagatcgcaacatggtaacactaagttttcactactctctcccaactttctatgttcaatggtggcaacaatgtaacaaacctgcaggtctaaacaaaacaacgctgaggagtcggatgccaatgaacttgagaaacttgaggaactcctgacaaatgctttgaggaatacgaaagccaaaaagatgttggcaaaagaaaacaatggtggtgccggtgcaagtacaagcagccagatgttgctttactcggcagagcgtgcaaccgacaaatgaaactgtgccgctccttgccgaacttaagccccgttacgttgtcgcacaaagtttatttcc

SEQ ID NO: 115851 - DNA, 716 bp, Zea Mays
gcagagcgacgagcgacgagctaaaccccgaccgagtcgctgcttgggtgcccaagatagccctaccgcctcgcctctctcgttccccctcatcgccacgccagtcgcctccactcccagtcatctcccatcaccgacgacgtgtcgaggcgagagaagagggcgagtccaagtctagggttcccgccgcatcgacacgggcatcgcaccgcaccgcgaggggcgggcacggaggaagatggcaccgcgcgggcgcgtggagctgcggcggatcgaggacaaggcgagccggcaggtgcgcttctccaagcgccgcgcggggctgttcaagaaggccttcgagctggccctgctctgcgacgccgaggtcgcgctcctcgtcttttcccccggcggcaagctctatgagtactcctcctccagaaccgggatgtagctgcttcagatttacagtcgagacttaaggagatcgcaacatggtctaaacaaaacaacgctgaggagtcggatgccaatgaacttgagaaacttgaggaactcctgacaaatgctttgaggaatacgaaagccaaaaaggtacagtaaaatgcctttcttttactacgtcatgtatcgttgcggctgatgatttagatagagatctcgctccaaaaactttttgatacattttgtattcctatcctgcggaccaattattgctacaatactttggtgca

SEQ ID NO: 115852 - DNA, 527 bp, Zea Mays
attgtgcattgccaagcaaccgcgcaaggtccacaagtagccaaaagatggaggcacaggccaaggcaggtgctagaggtgccaggggcgggacgaaggtggccatggtgtactactccaagtacgtcaagacccagaacagccctgccgtgagtattggtatagcacagcagctcgagtctacagccgccgccgtcgtaggagtagcaggaggcggcggcgacgcggacgtcgacgagagggcgtcggctttcatactggcagtccgggagcggttcaggaacgagaacaagtattaacctagctagctcatccggtgaggaagctccggaagaggttaatatttacagcaatgtcttccgggtcgccatggacgatgtgtagctaggtaaagaagaaaaaaaaaagtagctcttgattgcgtgctatatacatgcacctttgatgtctcctcttccctctttctttagggccgcctacggttgtatgtacctgaagaatggaacaagtgaaaaaaaaattaacta

SEQ ID NO: 115853 - DNA, 2734 bp, Zea Mays
acttttgtacttttcccccccctgccctccacctccactccacccccgctacaaaaggtgagagggaggaggagcctctgcacttaagttttattagtccttctcatcagccatcagagcccctctatctccgggtttctgttaacgagtattgtattttaattaggagggagtggttcagctggtgcgcgcagtggtagctctcctcatctttgccgccttgcccatttgctggcgcagtgactgagcttccttgcaaccccacttgagaagaaaccaatcctcaagcgcaaggaggcaaggcaaagcctactcataggggctgccgagctgaaggagcaaaccggaggaaaaggcagtagtagctagctagcagcaaccaccaaagaagggagaatcctccaccttgctcttggtggatgttcttcactgcattgccttcagccactccgtcctccgcttgcttcttgttcgagagtggtacctgctgctgcttcttcttcttccctttttatctctgaaatcttttgccacacatccatctgcttgctgctgtgtgtctgtctgtctgtctgattccttatttccttctccttctccctctcccacctaccctccccaaccacacatcacacccacacactgtatgtttactgccattggtaagaaaataaagaaggggggagtcgagtgagcagtgggaggtgcccccagctcgcctctcgggtctcggcaattattgccacctttggagtttggagtcctccaataggagtctcctccgtcgtcgtcctgttcctgtgctgtctgcaaccactggcactgccccgcccccttccctcctcttccttgccttccctcgcctcgtccgcctttttctcggaggagaggaggtgcttgcttccatccatccatccgtgtcctccgctcgctttaaagcttaacccaccgctctgcccggcgggcggccgagcacccaagaacccagccccttgtctcgtcccttcctttcttgccgctcccgcccgctgctcttggattctttaattgcatgctgttgctgttgctgccgccgccgccgccgccgctgtgatctctctctctctttcccgtcctccaaagctttttggttgccatcaactttgcttttgctctctgggcgagcagtacacagctgttgttccgtctccaacggcctgcgcacgcagcagcagccagcagagcagaaaggcctcccaaaatccaccatttcggagccggccgccaccagcgacggaggtgcctgcctgcttgggttgagtcccgaggagagagctgctactccctgtgcaaggatcccgacaacaggcaggcacgtacacgcgcgtcggcctggggacgggctgtcgccatggactgggacgccaagatgcttcctgcctgggacctcggcacggtggtcgggcccagcagcagcgggggcggcgcgctggacctgaagctgggcgcgccgacgagctcgagggcggtgctcacggccgccgccggtgccgcgcccgcgctgccgtcagcgaaccctcctccgcccccgcctccgccgtcgtcgtccgcgccggcgaagcggccgcgcccggggctcgcgcggcaggcggtgcccgcgtgctccgtgcagggctgcgacgccgacctgtcccggtgccgcgactaccaccgccgccacaaggtctgcgaggcgcactccaagacgcccgtcgtcaccgtcgccggccagcagcagcgcttctgccagcagtgcagcagcgtcaagccgtctgctagcagccggtgcatgcgctgcgcacccgtgctttcgggggcgtgtccctacaatgcaacaaggcaggtgcaatggaactggacttccgttcagttcaggtttcatctgctcggggagttcgatgaggtgaagcggagctgcaggaagcgcctcgatggacacaaccgccgccgccggaagccgcagccggaccctctcaaccccgccggcttgtttggcaatcaccacggagtgacaagattcacgtcttacccgcagctcttcgcggcgtccatggaacagcctaaatggtcggtggtcaagacggaggccgacgtgttccaagaccagtactacccggccgtccacctcaatggcgctggcggcggcgccatcggctcccacttccacggcaaggagcagaagcacttcccgttcctgaccagccacagcaacggcggcggcggcggcgacgtggcgaccgccgcggccctgggctgccagccattcaccatcaccaccacggcgtcctcagagagcgacagcaagcagagcaacggcaactgtgctctctctcttctgtcagacaacccgacatcagcacagacggccatgatccctactaccgcgcagtccctcgccgcggcgatgcagtacggcggcagactccctggcagcgtcagcgtcagcggcggcggcggcggcgacgtctccctcaccgggatgtcgtacatgagggtgggagacagcaggcaggcgtccattctgacggcgtcgtcacccggccacgctgcggtcgcttcccctgtcccggccaccaccgcagccgcaacgccgccgccgccgccgcagctgctgcagtaccaccatggctatggctactaccatgtgagcggcggcgagcagggcaacaaccccgacggcgccgccgttcacgcccttcccttctcgtcgtggtag

SEQ ID NO: 115854 - DNA, 222 bp, Zea Mays
gcgaggagaggaaattcgatagtggtaggagcttcctttcctttccttaatttgtaccggatcggattaactagctaggaatcaatatagtctgtctctatcgatcaatggtggcgtggtgtggtggtggatcgatggattggtggatggagatgatgaactatagagagatcagaggtaattttgatctgatcgtaatttaatcattctgggtagctagct

SEQ ID NO: 115855 - DNA, 298 bp, Zea Mays
ggtaggatatgtattccgcatgcggaaaaatcggacgaggatctacccaacgagtgaacccacaattctccttgaccaatgaatgctgcataaatgtttatagttagtttcactcaacaacaaaattgtatagaacaaaggattagaattaatttatacatatgtataagtacatctgaagaaacgccgacctccatcaattcccccctcaacgaacatctacaccaagcaatcctctttgttgaaatcttttttactttgaactggaaagttaaaaatcgtcttttcaaaaaaaatc

SEQ ID NO: 115856 - DNA, 447 bp, Zea Mays
atgtcgcactacaagttcaagcactcgaggcacggttctctcagcttcctccctaggaagcgatcctcccaccaccgcgacaaggagacgcacaagcttagggttcgcaggtcttactccagcggtagcatgggaaagaagatttgcagcaccgatggcacctcaacgcctaccaggtccatgaatcagcaagtttgtattatctcggtctccatctcgctacagggtctcggcctctcgggcgagctcgccgcctcctccctctgccgcgtgcggggcctggtcgcgctgagcctcgcgtccaacggcttcgagggccaggtgcccgtcggcctcgcggcgctcggcgtcatcctccaggtgctcgacctcggggagaacctgctctccggcgtgctccacccggcgctgttcggcaacctcaccagccttttgaactgttattaa

SEQ ID NO: 115857 - DNA, 1244 bp, Zea Mays
atggcggcgctctccgcgcccctccgcgccatcgccgccggatcccgcgtcgccgcgtccgaccccgtcaaggtctcggtccggtggcgaagggaaggcaagatgtacaccgcgaggaagaagatccagaaggagaagggccttgagccctccgagttcgaggactccgttgcccaggctttctttgatttggagaatgggaaccaggagctcaagagcgacctcaaggacctgtacatcaacaatgctatccagatggatgttaccgggagcaggaaggctgttgtcatccacgtcccataccgcctgcgcaaggcctttaggaagatccatgtcagactcgtcagggagctggagaagaaattcagcggcaagagtcaagtttgcaagaatgcttatcatgcgttttacctggcacaggatgtggtaattgttgctacaaggaggatcgtgaggccacccaagaagggttcagctgttgtgcgccctcgcaccaggactctcactgctgttcacgatggcatcttggaggatgttgtctacccagccgagattgtggggaagcgtgtcagataccgtctggatggttccaagattatcaagattttcttggacccaaaggagaggaacaacaccgaatacaagctggagacctgcactgcagtctaccgcaggctgtgtgggaaagatgtggtttttggcatgtcatccctcctcatattttcacctcaagaacttgactatctaatatgtggccaacaagaaatttgggagtctagaatacctggtgcagttacatggatgttaggatataagattgctatagttttatccaaggaggataccgcaacagtcatctccaccatgttattagtctctggtcttactacaatactacatacttttttgggttctcgacttccactgattcaaggaagctcctttgtatatttggctccagcgttggtaattgcaaactccgaggagttcagaaatcttactgacaataaattcaagcacataatgagggaactacagggggctatacttgttggttcagtattccagataatattaggatacactggtcttatttcactgtttctgaggttaataaatccagtagtggtggcaccaactattgttgcagtgggtttggcatttttagttatggtttccctcaggcttgcagctgtgtagaaatcagcatgcccctcattctgttggttcttctgtgcactctg

SEQ ID NO: 115858 - DNA, 1647 bp, Zea Mays
aaaacctcagctccaaagctccattacaaaacggcttggaaattggaattctacgatttctagcttggaaatgccagaacattacaagaaaataaaggagaggcgcggctgctggatctccactgctctttggctctttgcttccctggtactacctagtagaaaatgcgcatctgaacggcaggcagcgccagcgatatacacctcattcaattcatcagcaggtgaaaaagaggcaaaaagaaagagaaaacagccgaaacgccttcccctccctgcgccgctttccgctacgcccggtccacgcagcggagccgtgggcctgtaggggactcggtgctggtacgtcatgtcagccgccgagccgtttcctcgctcactgctggtgctgctgcgcctcgacgccgccgccaacggcaacgccggcgaggagccaccggtccatgggcacgcactgcgccttgtgcgcgcgcttccagtccagcgcctggcacgcgcgggagcagtagttggccgcgccgcacacggagcaccgccggaactcgtgccgccgcgtctcgcgccgcccgcaccgcacgtgggagcaaagacggagctccgcgccgtctccgtcgccgtccacgccgctgccgtcgccgtccttcttcccgcccgcctgggcggcgcagcgggaggcccaccagtccaccatgaactggttcgccgcgtggggctccgcctcggggaggctccacccgaagtcggacaggagggggcaccccccgccgccgccgacgacgccggcggccgcggcgaagggcagcgcggcgacggcgtggcgcgaggcggccgcggagagcgcgagcgtgagctcgcgggcgttcgccgcgaccagcaggcgccggccctcggcggggtcccgccgcacgccgtagccgtcctggaggcagtgcccgagctcgcggagcgcgtcgacgtggcccagcgaggccgcgcgcgcgcacagggcagcccccgcgcgcaggtcgcggtccgacttggccccgccgctgccgttgaactggatgaccgccagcgagtagagcgccgccgcgtgcccgccgacggccgccctcgccagcagcgccgcgccgccgctgcggctgcccaggcagtagaagcggatctgcagaagttgtagcaggcctcgaggttgccggcgtcggcgcagcgcttgaggaacctctgcgccggctcggaccacgccgccgccttgaccgccagcgacgccggcgaggccttggcgaacaccatgtcatggctgccgagctcgttcagcctcttgcacctgcaaacgcgaaagaccaggtcggacggcgccgaggaggcggcggcgagcttggacaggatggagaggacaaggtcatcgggaagcgcgtccaggtagtccggctcgccggcaggccgcttcctgcgcccgccgcagtcgcactctccggcgacggccgacggcgacctcttcctcttctgacccaccaaggcaaccacctcgccgccgttggaataccgggacccgctcctcgtcctcatctctctgtacctccgcaggagtcgtcgctgccggggggaaagcgggacggggcgagcggtgggagaaaaaaggttaaacgaccgcgcgcgcgggcgggc

SEQ ID NO: 115859 - DNA, 803 bp, Zea Mays
gtttgtgttatttttggtagcttccttttctgtatcatgtgctttgctcttattcagtgttcttttgattcatcagtgtcatgggtattggctagaaaaatcctgatagcatattgaaactgtaactggaatttatttgtgttggacctctcatggattcttcactccagacaatgcaatagctaatgagttctttacaaaggcaaccggatgtttccagaaggctgttgatgtggaacctgcaaatgagctgtacaggaagtctctagacttgtcaatgaaggcacctgaactgcatttggagatccagaggcaaatggtttctcaagcggcaacacaagcatcctcagcctcaaatccaaggcaatcaaggaagaagaaggacaatgacttctggtacgatgtttgtggatgggtgatccttggcgccggcattgttgcttgggttggattggcaagagcaagcatgcctcccccgacgccaccagccaggtgagaactgatcgagtgccaagaacgctttgcaaatgatggcatgcctatattaaggtgtcccagaaccttctaggtgctagtgttgtatggagaggagagaggtgtttccatacggtttgctcaaattttcatgcttgttcttttcgagcctcatgtgctgctggatagttttgtactttgcttaccttgataccgttttgaggcaaaaaacatacagtgttgcgactttttgcgttctctatgaatactgaatgttctcaaatggtgccatacataaagtggacatgctgttcaacaccgcaaataaa

SEQ ID NO: 115860 - DNA, 1550 bp, Zea Mays
attttccccttcagccccattcgcaaccgttgtggccgcgtcgatccccatcgcctctccccatcccctctcctgtctgaaaaccagcacgccacgtcccaccgccaaccaccgcgctccggctctccccaattctaagcgagacggggcacaggaagaggagagcctaaaaccctaaccccccgaatcggatccggccgccggagcgcggaaccccaccccggccgccatggagatgggagggatgagcgacgctgagcggctgttcttcttcgagatggcctgcaagaactccgaggtcgcgtacgagcagaaccccaacgacgccgacaacctgacgcggtggggcggcgcgctgctggagctgtcgcaggtccgaaccggccccgacagcctcaagcttcttgaagatgcggaagccaaactggaggaggcacttcaaattgatcccaacaagtccgatgcactctggtgcttgggaaatgctcagacctctcatggattcttcactccagacaatgcaatagctaatgagttctttacaaaggcaaccggatgtttccagaaggctgttgatgtggtatgtgtaggccgctattgtgttagctaatttcaaacacatttacattgttccttttatctaggctgaccaattgtcacaaaattcctggtacgttttggttgtggaatatagggaccaaggaatgcagtacactctttgagaaagtttttccttttgttcctgcattcctaggacacggaacatggctctgtaccatgttcctggtgacaatggctgacctgcagacctctgcgcatggggcttgagccacatgcagtcaggttgtcagcaagcatctggaagaatattccatgaaagaactaagattttgcctttttccttaaaaatttatgtttcttctgcaatgtcgtgtccaatttggtttgactggaaactgaagttcagacctgctgtttgtaggaacctgcaaatgagctgtacaggaagtctctagacttgtcaatgaaggcacctgaactgcatttggagatccagaggcaaatggtttctcaagcggcaacacaagcatcctcagcctcaaatccaaggcaatcaaggaagaagaaggacaatgacttctggtacgatgtttgtggatgggtgatccttggcgccggcattgttgcttgggttggattggcaagagcaagcatgcctcccccgacgccaccagccaggtgagaactgatcgagtgccaagaacgctttgcaaatgatggcatgcctatattaaggtgtcccagaaccttctaggtgctagtgttgtatggagaggagagaggtgtttccatacggtttgctcaaattttcatgcttgttcttttcgagcctcatgtgctgctggatagttttgtactttgcttaccttgataccgttttgaggcaaaaaacatacagtgttgcgactttttgcgttctctatgaatactgaatgttctcaaatggtgccatacataaagtggacatgctgttcaacaccgcaaataaa

SEQ ID NO: 115861 - DNA, 1186 bp, Zea Mays
aattttagtgcttcagccgcgcagctgggccaagagatattttccccttcagccccattcgcaaccgttgtggccgcgtcgatccccatcgcctctccccatcccctctcctgtctgaaaaccagcacgccacgtcccaccgccaaccaccgcgctccggctctccccaattctaagcgagacggggcacaggaagaggagagcctaaaaccctaaccccccgaatcggatccggccgccggagcgcggaaccccaccccggccgccatggagatgggagggatgagcgacgctgagcggctgttcttcttcgagatggcctgcaagaactccgaggtcgcgtacgagcagaaccccaacgacgccgacaacctgacgcggtggggcggcgcgctgctggagctgtcgcaggtccgaaccggccccgacagcctcaagcttcttgaagatgcggaagccaaactggaggaggcacttcaaattgatcccaacaagtccgatgcactctggtgcttgggaaatgctcagacctctcatggattcttcactccagacaatgcaatagctaatgagttctttacaaaggcaaccggatgtttccagaaggctgttgatgtggaacctgcaaatgagctgtacaggaagtctctagacttgtcaatgaaggcacctgaactgcatttggagatccagaggcaaatggtttctcaagcggcaacacaagcatcctcagcctcaaatccaaggcaatcaaggaagaagaaggacaatgacttctggtacgatgtttgtggatgggtgatccttggcgccggcattgttgcttgggttggattggcaagagcaagcatgcctcccccgacgccaccagccaggtgagaactgatcgagtgccaagaacgctttgcaaatgatggcatgcctatattaaggtgtcccagaaccttctaggtgctagtgttgtatggagaggagagaggtgtttccatacggtttgctcaaattttcatgcttgttcttttcgagcctcatgtgctgctggatagttttgtactttgcttaccttgataccgttttgaggcaaaaaacatacagtgttgcgactttttgcgttctctatgaatactgaatgttctcaaatggtgccatacataaagtggacatgctgttcaacaccgcaaataaa

SEQ ID NO: 115862 - DNA, 2643 bp, Zea Mays
ccccttccattcctcttctctcccccggccttttccccttctcttccctcgttcgaagaagctcgcagcagccgcctaatccagcggcagttgaggatggcggcggcgccgccgccgccgccggacgggcaggagaaggtgatcgcggcggcgcagcacatcgtcaagtcgctcgcgaactccaagaacgccgccgacgacatgatccgcatcctctctcgcttcgacaaccgcttctcgctcatgtccgacctcttccctcctccccctaccgccgtcgattccatactggaggcggacgaggggacctctcagggggaaggggacgagcccgatctcgaccccgaaggcgacgcggcggcccgcgccgaggcggagtgggacgcggcggccgaggtggttgagcgctgggagtcccccaccgccgacgcgctggtgttcgactcgcgggagggcgaggagtacctcgccgcggccgcctgcctcacgggcgcgccgggcccgcgcgccgaggccgcgctgcagaccgccatggcgcggctcgaggacgagttccgccacctgctcatccgcggcgcgccgccacttgccgcggaggacctccaggtctcgctcctccgccgactctcgctcacggtaccctccttcaactcctccgccgtagacctagactgcccctcctttgcccaacaccacgccgccgtcgccgccgagggggtaaacgagcagcagggcggcaggagttccgcctccgacgacgagatctcgccctacctcatcgccccggacaccgtcagcgtcctcagggacatcgccgacgtcatgctgcgcgccggctacgcgcccgagctgtgccaggtatacggggaggtgcgccgggacacgctcatggaatgccttgccgtgctcggggtcgacaagatgagcctcgaggaggtgcagcgggtggagtggggcgtgcttgacggcaagatgaggaagtggatccaggcgctcaaggtcgtcgtccggggcctccttgctgaggagcgccgtatctgcaggcagatcctttcgccggacatgaacactgaggaggagtgcttcactcaggcggccaagggttgtgtcctgcagatgctgaactttggtgacgccattgcgattgggaagaggtccaccgagaagctgttccgcatccttggtatgtatgaggcgctcgctgaggtgctgccagagcttgagggtttgttctcgggtgatgcaaagaatttcatcaaggaggaggccgagggaatactcttgcggcttggggatgcagtgtgtggcacgatcgaagagtttgctaatgacatacagggagatacttctcggagagcactgcctggtggggagatccatccccttacccgctatgtcatgaactatgtgtggctgcttgcagactacaatgcctcgctaaataagcttctggaatgttgggatactgagctgaccggggttgataatccaaacatgactccattggggcactgcgtgctcatgctgatcacacacctacagtgcaagatcaatgagaaatcgaggctgtatgaggatgaagcgttgcagaacatatttttgatgaataatctgctgtatattgtgcagaaggtgaaagattcagagctcaagacattgcttggtgataactggattcgcaagcgtcgtggtcagattaggcaatactctacagggtatcttcgatcatcatggactagggtgttagcttgcctgagagatgatgggcttccgcacacgatgggttcatcaagcacactcaaagccgcattgaaggatagattcaaaaactttaacttggccttcgaggagttgcacaggacacagacatcatggagggttgtggatcctcagttaagagaagagctgaagatctcaatctccgagaaggttcttccagcataccgttcatttgttggaagatttcggggacaactagagggagggaggggttctgcaagatatataaagtacaaccctgatgatttggagaaccatgtctcagaattttttgaagggagaaagtcaaatgcttgatggtcaaggcatgttcatatcaactatgcagcctgaagacccgtgcaaattttgatgatgctagttccaagtccccttccaaatttcttggcactatacagggaacttgaccttcaaacatcttttgaaggtctgaagatggaaatataatcttctcctgaactgacagaaactttgtgaattgcaaagcaacccgaattgaatggtttagcttgtcattcttgatcctgtcacagcgagtggtgacgtcattgaggcttgcccatggaattatgacaactgcatctgccatgagctgtgtaattgcaattcttacattttacctgtcttttgtcaatggtaacatctcgtgactcttgtttgactaaaatggaatttcggtccctggaatttttatgtacaatcctaccaggagttatgttcacatttaccttgttgcatccttttttatagtgtgttgcagccttctgttatattcattcgttgatgatagacaaagcgcatagttgatgcgacatgctgttggtcccgtttccttgtcaacctctaatgaaaaattgcattttc

SEQ ID NO: 115863 - DNA, 1136 bp, Zea Mays
tccattcctcttctctcccccggccttttccccttctcttccctcgttcgaagaagctcgcagcagccgcctaatccagcggcagttgaggatggcggcggcgccgccgccgccgccggacgggcaggagaaggtgatcgcggcggcgcagcacatcgtcaagtcgctcgcgaactccaagaacgccgccgacgacatgatccgcatcctctctcgcttcgacaaccgcttctcgctcatgtccgacctcttccctcctccccctaccgccgtcgattccatactggaggcggacgaggggacctctcagggggaaggggacgagcccgatctcgaccccgaaggcgacgcggcggcccgcgccgaggcggagtgggacgcggcggccgaggtggttgagcgctgggagtcccccaccgccgacgcgctggtgttcgactcgcgggagggcgaggagtacctcgccgcggccgcctgcctcacgggcgcgccgggcccgcgcgccgaggccgcgctgcagaccgccatggcgcggctcgaggacgagttccgccacctgctcatccgcggcgcgccgccacttgccgcggaggacctccaggtctcgctcctccgccgactctcgctcacggcatgttcatatcaactatgcagcctgaagacccgtgcaaattttgatgatgctagttccaagtccccttccaaatttcttggcactatacagggaacttgaccttcaaacatcttttgaaggtctgaagatggaaatataatcttctcctgaactgacagaaactttgtgaattgcaaagcaacccgaattgaatggtttagcttgtcattcttgatcctgtcacagcgagtggtgacgtcattgaggcttgcccatggaattatgacaactgcatctgccatgagctgtgtaattgcaattcttacattttacctgtcttttgtcaatggtaacatctcgtgactcttgtttgactaaaatggaatttcggtccctggaatttttatgtacaatcctaccaggagttatgttcacatttaccttgttgcatccttttttatagtgtgttgcagccttctgttatattcattcgttgatgatagacaaagcgcatagttgatgc

SEQ ID NO: 115864 - DNA, 222 bp, Zea Mays
gtcacaaaccattcacagacatctcaaacaccatcatttgaggtaaaagtcaataaacacgtgtcgattgatgattgaatcgtagtaagtaggggaacactaataatcaaacttacattataggtgatcaaaatgaatcaaactcgttcggaccaatggtcgatgctaaggaacgtaagaggaagagggataaggaaagatatgatgcgatgtctattgaac

SEQ ID NO: 115865 - DNA, 1900 bp, Zea Mays
gcagaagcggagcactaaccacacgagcgcgagagtggaggcgcagagagccgtcgccatcgtccatcgcaaattcgctagcggacacaaatccacccagccagccgttcatcgcaaccaccacaaccaccaaccaacgggcgtgcccaccacgcggcgccgttggggttggcgggcgccatgggggcgccgagcagccgcgcgctggcgctgggcgcggccttcctgctgctcctcgtcgcgctgccctccgccttcctctacctcacctcctccgcggccacccgcgccaccctcctcgacctcaagcccttctccgccaggtgcgcgcccgcagtcgcgccgctccgcgtcttcatgtacgacctgcctgcgcgcttccacgtcgccatgatgggggccgccgccggcgcggggttccccgcgtggccgccgtccgcgggcgggatcaggcgccagcacagcgtggagtactggatgatggcgtcgctccaggatgggggcgcgggaccggagcggggaagggaggccgtcagggtgcgggatcctgacgccgccgacgccttcttcgtgcccttcttctcctcgctcagcttcaacgtgcacggtcgcaacatgaccgaccctgacaccgaggccgaccgcctcctgcaggttgaacttgtggatattctctggaagtctaaatattggcaacgttctgcgggccgtgaccatgtcattcctatgcatcaccctaatgctttcagattcctgcgagcaatggtgaatgcatctattcttatagtttcagactttgggagatacacaaaggaactggcttccctgaggaaagatgttgtggcaccatatgtgcatgttgtgggttccttccttgatgacgatccacctgatccatttgaggctcgccatacactgcttttctttcgaggccgtactgtcaggaaagatgaagggaaaatccggtcaaaacttgagaagatattaaaaggcaaggaaggggtgcgctttgaggatagcattgccacgggcgacggcattaacatatctacagaaggtatgcggtcatcaaagttttgtctccaccctgctggggacactccttcctcatgccgcctgtttgatgccatagtcagtcattgtgttcctgtgatagtcagcagtcgaatcgagctcccttttgaagatgagattgattacagtgagttctcccttttcttctccgttgaagaggctctaagacctgattacttgctgaacgagctcagacaggtccccaaaaggaagtgggttgatatgtggttgaagcttaagaatgtctcccatcattatgaattccagtatccccccaggaagggcgacgcggtgaacatgatatggaggcaggtgaggcacaagatccccgcagttaaccttgctattcacaggaacagaagactgaaaattccagactggtggggataatgattggtggtgaatcgtgtacatattaccatatccactgttagtcctggttattttcggtgcgttatgatggaaacattgctcaccgtcctttgtgaaccaaagtgttcatcttaagatccaaggaccgagtccacaactatttgctgacaggaactgagattatcacctcttttttggtcgatttttgtgacggcttcctatttccccccctgatgctacaaaatagaggggacaaataaacttacagtaacattatagaggagtcatgcctgacaaataggatctgtagcttctttgtgctcccacactggaagtttaaatatataattcatatatgtctggtgctggactgccggtagatacggtttttctctgtgtttgctactttgaaatctgttgactcgattaacgtaggtttcaatatgtttggtgt

SEQ ID NO: 115866 - DNA, 85 bp, Zea Mays
aatcagaatctacaatctcagaatctgcgtatccaaacacacagattctaaccaccagcttttctacacagcagacgaaccaaac

SEQ ID NO: 115867 - DNA, 1007 bp, Zea Mays
tggcactttgtttgcaacacatggttatcaactttgattgtgaggttatttttgtaggttcgaatgagatggtttgatgtgaaagacaacaataatatgagacgagagttcttgcgaggaacattacaagcccctcagctgcagttagtaccccatgttggctatgtcagcctcttcccattcatgatggggactattccacctgaatcatgggttcttgagaagcagctcaatctgatatctaacacatctatattgtggacagattatggccttcgatcactttctagaacaagttcaatatatatgaagcgtaatacagagcatgaccccccttattggagaggtgccatttggataaacatgaactacatggttctttcggcactacatcactatgcacataaggatggtccatatagcggcagggcaaaggaattgtatgacaagctaagatcaaaccttatccggaatatagtgcagaattacgatgcaacaggtttcttctgggaaaactatgaccagaaggacaaaggaaagggaaagggtgcacggtcatttactggatggacttcactcattgttctgatcatggcggagtcctacccaacattgcacaggtgagatatagatcgcgaacaaccacagcagaagatagctatggcaattggaatggaggggctggcagctggcgcttgtttagcccggtttgcaaccagaacactgggatagtttgattcgtagcatctgctgccttaatcatgaaaattttgacaacacctcctggtcaatctgttcagcatcatttatagagtgttagtggtcatccctgttcactctcatactgtaaactagctcctcgaagaactgattttggggggccaaaaccaccccaggaaagcatgagcatatggaaaacatgttcttgaaagctgacactacgtggagctgttacttgctattgagtgtaatctactgctactcttactatgcttggccatttgcac

SEQ ID NO: 115868 - DNA, 1914 bp, Zea Mays
agcagcgacgcgaaaaggagcagagtacgtatggaaacccgtccagtctcccaagaccccaagtgagacggacgactcgacccagtcacaatccggtccctagtagaaacggcgagatcgtcagcgagaattttccgatgaccggcggcggcagcagcacccgccgtccggccgccgtggccaggagccgcgggaggccctctgaggcttctgaaccagatcccggcgctcgacgagccgcggccgcagcggcgcagcgccgtggccgcggcaaccctggccccttgcgcctgatggacgtgaggccccgaaccctcgcgtacttcgtggttgcttccttcgccctcgtgtcagtcacattcgtggtgtatactggtgggtggtgggaggaggtggaaggagagggcgcggcgacgctgcgaaaggtcatgcgctccgtaacgccgctgccggcgcccaggatgatggatctgcctcagtttcaaaataaccacaaggaaagtttgtattggggcacttatagaccaaatgtgtacctcggaattcgtgcaagaacccctctgtctctaattgctggattaatgtggattggcttgaaaaatggtcaatattttcttcgtcatgtttgccaagattctgatgagctgagaacatttgggtggacagctcacaatggtagggattatgggcgtcaagtgctggttgatcatggtcttttcctaactactagttttctgaaagagaaaggagagagcagtggttatggtggagactgggccgttcgattggatgctaacaatgagaggtcaggtttaagtgatgctgaagaaagcaccacacatctttttttctatattgctgatgaaactggaaatccgatcactatgggttcatatgaaccttcatcaagaggctctgttcttttggcatctgggttgcatgaggagattggtggttgggaattgtacttgagatctgaggacaatttggaaattcacagagctggattcaaatcaatgagtatgcataatctgagcgacttagtgcaacaagccgttgctactaatgcaatgcaatctggaaaccttaacctaccagacattactgaagattcttcaaatataatggtctatcaggtttccataaagtctcctgctcaaatagacatagtatttttgtcagggtccgcctcaaagtctccagtgattgaagagcggattagcaagctaacaggtcccatgctgagtgaccgtcttgaaacaaaacaaaaggaatttgaagagagatatgatcaaatctttaatgtgaacaataaggttgattccaaagagttatctgttggtagagctgccttatcaagtcttctgggtggtgttggctacttctatgggcagtccaaaattgcactcccgaaaggttttacacaaaaaaatggggataagtacatttcatattggcctgctgcattatatacagctgtccccagccgctctttcttcccaaggggatttctgtgggatgagggcttccatcagttagtcatttggcgttgggatgtgcatatatctatggatatcattggacattggttagatctgcttaattcagatggatggattcctagggagcaaatcttaggagctgaagctttaagtaaagttcccgaggagtttgttctgcagtatccttccaatggaaatcctcctactttatttcttgcgatacgtgatttagcaagtggaatacatgcacagcagttttcagatgaggaagcggaaaagatttcaagttttcttgaaagggcttatatacggctaaatgcttggtttcagtggttcaacagtacacaatcaggtaagtatgaaggcaccttctattggcatgaaaacgaatcaagctgattcatcaacgtag

SEQ ID NO: 115869 - DNA, 733 bp, Zea Mays
agcagcgacgcgaaaaggagcagagtacgtatggaaacccgtccagtctcccaagaccccaagtgagacggacgactcgacccagtcacaatccggtccctagtagaaacggcgagatcgtcagcgagaattttccgatgaccggcggcggcagcagcacccgccgtccggccgccgtggccaggagccgcgggaggccctctgaggcttctgaaccagatcccggcgctcgacgagccgcggccgcagcggcgcagcgccgtggccgcggcaaccctggccccttgcgcctgatggacgtgaggccccgaaccctcgcgtacttcgtggttgcttccttcgccctcgtgtcagtcacattcgtggtgtatactggtgggtggtgggaggaggtggaaggagagggcgcggcgacgctgcgaaaggtcatgcgctccgtaacgccgctgccggcgcccaggatgatggatctgcctcaggtgatgcccatttgtttgccatgctgtttttgtcccgaaggttgaaattgcacgacagctaaagctagtactgaagtacaccactctaggtttcagggcctctagttgattttggcagggttgctttatgtattcgtgaagtagtggtgactactgatttagcttcatgagctattaaccgtgcatcacttcatatattacgatggcagagttatgtcaaagtgcagcagtatatattgatgttggtaaacaaa

SEQ ID NO: 115870 - DNA, 319 bp, Zea Mays
catgtattttgtgaaatctggacctccaaaatcgtcttcaatggaagttggccgcgagatacagctcctgtcggcaggaagagggagtatttatagtactaatttcactggcgggttgcttaagaaacagccagtggaaaccttttttcactggcggttatcctaacacaattggaagttgggctgcgagctatagttcttgtcgggaaggatgaaggggtgaaaccctatatccaaaatgtggctaaatttgaggaaaatgaacaaaaattggcaagaggaacataaaaccaaactttcctagccatactcttctctc

SEQ ID NO: 115871 - DNA, 1363 bp, Zea Mays
cttggactttttaaaatggaagccgaggacgggcggccaaggagttaggtgtaggccaggcaggcagaggcagcagttctcctctacgaagcggcgttccgatccgagatggggggccagcagaacgcgctccaccagctcgtgtccttcatcctcggggcgtccgccgccgccgtcctgctcttcttcctcacgacggcgacgagcggagcgcggttcacggggatctcgagctgggccaacggaaccacgggctttgacgacgatgctcccgtccaggcggctcctgctacccgggcaaatcacgccgacgcaaagggcgcggcggcggagcaggaggacgagctgcagcggctgctgcgcgcagtggcggacgaggaccggacggtgatcatgacgtcggtgaacgaggcgtgggcggcgcaggactcgctgctggacctgttcctggagagcttccgcagcggcgagcggatcgcgcacttcgtggaccacctcctggtggtggccctggacggcggcgcgctggagcggtgccgcgccgtgcacccgcactgctacctcctccccacggccgccgcgcgcaacctatccggcgagaaggtgttcatgagcaaggactacatcgacctggtctggagcaaggtccggctgcagcagaggatcctcgagctcggctacaacttcctcttcacggacgtggacattctgtggttccggaacccgttcgagcggatgtcggtggcggcgcacatggtgacctcgtcggacttctacttcggcgacccgtacagccctatgaacctgcccaacacggggttcctgtacgccaagtcgagccggcgcacggtgggcgcgttcgaggcgtggcacgccgcgcgggaggcgttccctgggaagcacgagcagcaggtgctgaacgagatcaaggtggagctgctggccacgcgcggcctgcgcatccagttcctcgacacggaacacaacgccggcttctgcaacaacacccgcgacttcaacacgctctacaccatgcacgccaactgctgcgtcggcctgggcgccaagctgcacgacctcggcaacctgctgcaggagtggcgcgcgtatcggcagatggacgacgaggaacgcgcccggggacccgtgcgctggaaggtgccgggcatatgcatccactgattggtagtcaatggcgtgtgagtgtgatcgatcgaggccacccggcggtaggtgtgtgcgtaagtttattattgtacagtaatttgtacttgtacaaatcagtactagctacgatcatacaactacactgttcagtgttcacttattctttgcctatagcatatagtgttgggaaaagaga

SEQ ID NO: 115872 - DNA, 1584 bp, Zea Mays
gtctgactcacctcctccgagcagaacgtctcgcgtgcagcggtgtagcacaccagaaccggtctcgtcgtcgtcaccctcctcatttgacaggatcaacaccttaagaaccaccaaattctcaagctcctcttgtatatcttggactttttaaaatggaagccgaggacgggcggccaaggagttaggtgtaggccaggcaggcagaggcagcagttctcctctacggtacccctccatcgccgtcctgtctctgttcttggctcctggcctgcagctgcaccagctgacaccggcgtcgttggctcggcagaagcggcgttccgatccgagatggggggccagcagaacgcgctccaccagctcgtgtccttcatcctcggggcgtccgccgccgccgtcctgctcttcttcctcacgacggcgacgagcggagcgcggttcacggggatctcgagctgggccaacggaaccacgggctttgacgacgatgctcccgtccaggcggctcctgctacccgggcaaatcacgccgacgcaaagggcgcggcggcggagcaggaggacgagctgcagcggctgctgcgcgcagtggcggacgaggaccggacggtgatcatgacgtcggtgaacgaggcgtgggcggcgcaggactcgctgctggacctgttcctggagagcttccgcagcggcgagcggatcgcgcacttcgtggaccacctcctggtggtggccctggacggcggcgcgctggagcggtgccgcgccgtgcacccgcactgctacctcctccccacggccgccgcgcgcaacctatccggcgagaaggtgttcatgagcaaggactacatcgacctggtctggagcaaggtccggctgcagcagaggatcctcgagctcggctacaacttcctcttcacggacgtggacattctgtggttccggaacccgttcgagcggatgtcggtggcggcgcacatggtgacctcgtcggacttctacttcggcgacccgtacagccctatgaacctgcccaacacggggttcctgtacgccaagtcgagccggcgcacggtgggcgcgttcgaggcgtggcacgccgcgcgggaggcgttccctgggaagcacgagcagcaggtgctgaacgagatcaaggtggagctgctggccacgcgcggcctgcgcatccagttcctcgacacggaacacaacgccggcttctgcaacaacacccgcgacttcaacacgctctacaccatgcacgccaactgctgcgtcggcctgggcgccaagctgcacgacctcggcaacctgctgcaggagtggcgcgcgtatcggcagatggacgacgaggaacgcgcccggggacccgtgcgctggaaggtgccgggcatatgcatccactgattggtagtcaatggcgtgtgagtgtgatcgatcgaggccacccggcggtaggtgtgtgcgtaagtttattattgtacagtaatttgtacttgtacaaatcagtactagctacgatcatacaactacactgttcagtgttcacttattctttgcctatagcatatagtgttgggaaaa

SEQ ID NO: 115873 - DNA, 1307 bp, Zea Mays
ggctgtttcagaattaatagcccccaagatttttttattccacgcccgtttctaaaaagggagagtatggccgccccagcgtcgccgtactgttcccagtaaagacggctactccttccctctccccccttctccccctccgtcttcttcccccaggggcatccgtgttttcactttttgctcccccacgttgaaccttgatcctcgtgctccctttcttgattctttctccgtaggatctcttgctaggagtagcctgccccgtgtgcgcgctcgcacggacatgcttgtttccgcgtcttgaaaggcgagaaaaagtggagatgggcgcttgcgcttcggtacacaaggacccggggcaccccaagaagcagtttcttgactctcccaccaaggcgaaggccgccaacgggaagggtggcgggggcggcggtgttgctccggttggtgatggcttcggtgatctcaagtccaaggtcgacgctgaggctgagcagctgcgggcagagtttaaccccaagaacccggattctggtagcaaggatgaagtgttcttcgaatctcgagcctggttagattccgactgcgaggatgacttctacagcgtgaatggagatttcactccgtctcgtggcagcacacccgtctaccagcccagagcgcagacggtgatgagcagcatctttcagccagacacgcgcagttccaaatcaccggagccttctccgaccggacggaggaagctcgctgagctgctgcaggaggcaatgcaagacggtcccgaagaaagcgccgacgaggaggagcagcagcagcagtcgctatctgctgccgctgatgggaagccgccggtgtctgagtccacgtccagctccgcttgcagcaccgtgccgactccggtcgcagtcgccaagagccggaaggagaaggcgtggtacaccggacgctgttgcctgccgagctttgttcatagcctgaccttagacgagagtgagagggggcagaagatgagctctaggccatgtgctgtttgactgtggggctccagtgccctcctgagtcctgccctgagctgtatttagcgcgatatgttatctgaatgcccgattgggacgctgaagctactgtattgagagtactatatagtaatcaagtggataataggcactcgttaaatcctgtggagaccatgtgtatgtgtcgaccaatttgcgcgggtagagcatctacctcaaggaattgcccttccctgtgcatgtctaactgaatctttgaataaataaacacactgtataatttttcagatg

SEQ ID NO: 115874 - DNA, 948 bp, Zea Mays
ggctgtttcagaattaatagcccccaagatttttttattccacgcccgtttctaaaaagggagagtatggccgccccagcgtcgccgtactgttcccagtaaagacggctactccttccctctccccccttctccccctccgtcttcttcccccaggggcatccgtgttttcactttttgctcccccacgttgaaccttgatcctcgtgctccctttcttgattctttctccgtaggatctcttgctaggagtagcctgccccgtgtgcgcgctcgcacggacatgcttgtttccgcgtcttgaaaggcgagaaaaagtggagatgggcgcttgcgcttcggtacacaaggacccggggcaccccaagaagcagtttcttgactctcccaccaaggcgaaggccgccaacgggaagggtggcgggggcggcggtgttgctccggttggtgatggcttcggtgatctcaagtccaaggtcgacgctgaggctgagcagctgcgggcagagtttaaccccaagaacccggattctggtatgcgtgtttgtttctttggtctttttctgaagagatgttccgatctttatcttcctataatcagttactgtagttttttgaagttctttggaggtaaagagcagatgggcagtcagctctttatgtgaaaaggaaacttttgggtttatttattcatcttttgggcttttgatttcaggatttgacagcgaagtgtggtgttatcatcgcattaatcgcttctggagatcagttagctttctaggggtgggtgatcttgaacggaaaacgatttacgggagctgactgattttgggctcttgtaatggaaaaggagtttttagttgttcctaagttttgtccttgaaaatggaacacttaatataaacgaggattctgttctacacaaagtggattgctctattgactgca

SEQ ID NO: 115875 - DNA, 1696 bp, Zea Mays
atccatatcgacgacgacgatctagctagcctgcttgagatctccatttttacccacgcgcgatcgcgatcgcactgttcttcttcttcctcgctcctacgtgcacgatcgactagcggcatatatatactgctgctagctaaccgtacgcgcaggtatagcggccgcagctgcgcacgagttcattcctcacctagctagcctggtgaaacaaaagctagcagctagctagcaagagagatcatatatatcgatcaagctatcagaagaggcgatcgacgagctaggacgatgatcgggtggggcgacgtgtacaaggtggtggcggcgacggtgccgctctacttcgcgctgttcctgggctacggctcggtgcggtggtggcgcatcttcacgcgggagcagtgcgacgcggtgaaccggctggtggccttcttcgcgctgcccttcttcacgttcgagttcacgctgcacacggacccgttccaggtgaactaccgcgccgtggccgccgacgtgatctccaaggccgtgatcgtgggcgtgatcggctgctgggccggcagcagggtgggctccgcgggcaagggcaagggcgccgtcggctggtccatcaccgggttctcgctgtccacgctaaccaactccctggtggtcggcgtgcccatggccagggccatgtacggcgagtgggcgcagcagctcgtcgtccagctctccgtcttccaggccatcgtctggctgacgctcctcctcttcgtgctcgagaccagaaaggccgccatcggcatgtacgtcgtccccggcggcgctgctgacagcgacggcggcgtgccggactcgccggtcaaggacaaggacgtcgaggccgctgccggcgatcgtcgtcccgccgccggccctgccgctgctgccaccgtcgtggtcgtcgtccccgtgaagccctcgctctgggcgctcatcaaggtggtggcgcacaagctgtcgcgcaaccccaacacgtacgccagcttcgtcggcatcacctgggcctgcgtcgccaacaggctgcacatcgagctgcccagcgccttcgaggggtcggtgctcatcatgtccaagtcgggcacgggaatggccatgttcagcatggggctgttcatggcgcagcaggagaaggtgctggcgtgcgggcccagcttcgcggcgctgggcctggtgctcaagttcgcgctcggcccggccgccatggccatcggctccatcgccgtcggcctccgcggcgacgtcctccgcgtcgccatcatacaggccgcactaccccaatccatcacatcgttcatatttgcaaaagaatatgggttgcacgctgatgttcttagcactgcggttatttttgggatgcttgtctccttgccgttgctagttggattttatattgttttggaactaattagatagaggacggggccgagggggcatagcctttgatacgtgactgcccttgaagctgcccaaacaatcattagactaacaagtgctaagaagtgcctcctgcttccgttccagctcattgcacaaaaatgcaaggagagctattgagtattatctaatatatgttttgacgtgtactatgtaagaagaatgcttatttcattctcttattcaaatgaatgtgtgacacgcacacttgattatggcatacaagccaacaaaa

SEQ ID NO: 115876 - DNA, 292 bp, Zea Mays
tcacccacctccaatggcgccgcagctcgccgcagctggcccgaccttatacgcgcctcgctttggcaccgccctcccctgccgcgcccggacaaggaagccggtctctcggcgccgggccgcgctccccaaggatgaggattattacttgatcgatgcggatgagtccattggggatggcttctcgttcagtggagggaagtacggggatggaccaagtaagtcggatgagtggtttgctcaagggaaaatgaaactgaaaaacgcgcacattagcacttttcttttgtag

SEQ ID NO: 115877 - DNA, 2007 bp, Zea Mays
aatggaagtttaattagatattttataacattaattagtataccacataggatttttgacgacattacagtatatttattatgaaatagttgaaactaactatgccaacatgtttccaaggtattggaaagcgtgtgaaactaccactgaacaatttattttatctccatctattttatctgttcctatagttatttatatttaacattttgtaatatgttagtctatgaaattgtgtcatgaaactcttcatcaagagagcatatttcatgctttatttcatcttactctggttgacgtggtgacattggaaatggtgtgataaagctaccactgaggccttactatccatttcgtgctcatctatgctgttgttatttatttttattacttggatggtagcatgctgctgctgtttgctgattctgcggtacctatgtggctatgtgattagcatgcatatctgtttcttgttgcttactgttccttattcctcccttggtctactgagactatgttcaacggtgcacccttggctccccctcccctaacactgtagccgatttaggggctacagtgtgcccctatccccttcaccggcttcctcctcctcctcttctcgcctcccgattccttctctctcccgctaaatggatgggcacgctacgccggatttctcccccgcagccggttccttcgtccacacgaccgcgcgctcggaaaactccgcggagggcgaaggaggcgaaccaagggcgacgtatccgccgccggagaaggtagccctcgatccgccgtctcccgcgattcgtttgtcttgcgacagctgggcgaccgtcgtcgccgccgcccttctccaggtgcccaggtcttcgccggtccctttgccgcctccttgccgccgacgagcaccagccaggaagaaaagaagctgaaccatggggaagagaaagtcagctgctaagccacctcctaagaagcggatggacaagcttgacactgtcttttcctgcccattctgcaaccacgggagtagtgttgagtgccgaattgacatgaagaatctgattggcgaagcatcttgtagaatctgtcaggaaaacttcagcacaactgttaatgcactcactgagcctattgatatatatagtgaatggattgatgagtgtgagcgtgtcaacactgttgaaggcgacgatgatgcgtgagcttgccccatgcgatgaaactgttacctacaatcgtaatgtaatgtgctggtattctcgaatgccatagcccatagtcagccatggcttggaataacgtagtggctgactgatatgccagtaggcacctgtctagtacttacagaactacaaaaagtttgtactatacatatatggacaaccttataagtggctatgtgtgtacctatcctaacgcttatcccagatggtgtatcagcgtttttctgtgagattgttttcaagcaaggggttgttcattcattgggtcttctcgggaaaaagagaattatgctgcagtcaaccagatggccgctgttgtgccgacaatacagggtaaaccaaatgcaaccagaatataatctgcagcggaagatattcatagatacaattgttttcagttcattcaacgctgaaagcggtttcggtctggaggctgagctttggatcattggatggcactatgcagctttggcacctggagtaccgctcattagtttttcataaagtcccgttcatttcttgtgcacattgctggagattgagagatcgagatcaagactgtacgcatcataaaccgatcagtctattctttgctgtgtacacctgggttgtctttgtgcctgtggtctctgccaggagggtgttcttcgaagtttgaagtacatgtggtttgtgtcttaatgcagttcggtttcatggacgggttgtcaagtgttttaccaggaacagttgtcggtgcagcagtatgcttaatcatgaataaatgatttttgtattt

SEQ ID NO: 115878 - DNA, 1170 bp, Zea Mays
ccccattcccaatctcgtcttgtgttgttcggagcgggcagcagcacacagccccatcccaatcctagtcgatcttcttcccctcctcaagaagctgaaccatggggaagagaaagtcagctgctaagccacctcctaagaagcggatggacaagcttgacactgtcttttcctgcccattctgcaaccacgggagtagtgttgagtgccgaattgacatgaagaatctgattggcgaagcatcttgtagaatctgtcaggaaaacttcagcacaactgttaatgcactcactgagcctattgatatatatagtgaatggattgatgagtgtgagcgtgtcaacactgttgaaggcgacgatgatgcgtgagcttgccccatgcgatgaaactgttacctacaatcgtaatgtaatgtgctggtattctcgaatgccatagcccatagtcagccatggcttggaataacgtagtggctgactgatatgccagtaggcacctgtctagtacttacagaactacaaaaagtttgtactatacatatatggacaaccttataagtggctatgtgtgtacctatcctaacgcttatcccagatggtgtatcagcgtttttctgtgagattgttttcaagcaaggggttgttcattcattgggtcttctcgggaaaaagagaattatgctgcagtcaaccagatggccgctgttgtgccgacaatacagggtaaaccaaatgcaaccagaatataatctgcagcggaagatattcatagatacaattgttttcagttcattcaacgctgaaagcggtttcggtctggaggctgagctttggatcattggatggcactatgcagctttggcacctggagtaccgctcattagtttttcataaagtcccgttcatttcttgtgcacattgctggagattgagagatcgagatcaagactgtacgcatcataaaccgatcagtctattctttgctgtgtacacctgggttgtctttgtgcctgtggtctctgccaggagggtgttcttcgaagtttgaagtacatgtggtttgtgtcttaatgcagttcggtttcatggacgggttgtcaagtgttttaccaggaacagttgtcggtgcagcagtatgcttaatcatgaataaatgatttttgtattt

SEQ ID NO: 115879 - DNA, 1179 bp, Zea Mays
ccccattcccaatctcgtcttgtgttgttcggagcgggcagcagcacacagccccatcccaatcctagtcgatcttcttcccctcctcaaggaagaaaagaagctgaaccatggggaagagaaagtcagctgctaagccacctcctaagaagcggatggacaagcttgacactgtcttttcctgcccattctgcaaccacgggagtagtgttgagtgccgaattgacatgaagaatctgattggcgaagcatcttgtagaatctgtcaggaaaacttcagcacaactgttaatgcactcactgagcctattgatatatatagtgaatggattgatgagtgtgagcgtgtcaacactgttgaaggcgacgatgatgcgtgagcttgccccatgcgatgaaactgttacctacaatcgtaatgtaatgtgctggtattctcgaatgccatagcccatagtcagccatggcttggaataacgtagtggctgactgatatgccagtaggcacctgtctagtacttacagaactacaaaaagtttgtactatacatatatggacaaccttataagtggctatgtgtgtacctatcctaacgcttatcccagatggtgtatcagcgtttttctgtgagattgttttcaagcaaggggttgttcattcattgggtcttctcgggaaaaagagaattatgctgcagtcaaccagatggccgctgttgtgccgacaatacagggtaaaccaaatgcaaccagaatataatctgcagcggaagatattcatagatacaattgttttcagttcattcaacgctgaaagcggtttcggtctggaggctgagctttggatcattggatggcactatgcagctttggcacctggagtaccgctcattagtttttcataaagtcccgttcatttcttgtgcacattgctggagattgagagatcgagatcaagactgtacgcatcataaaccgatcagtctattctttgctgtgtacacctgggttgtctttgtgcctgtggtctctgccaggagggtgttcttcgaagtttgaagtacatgtggtttgtgtcttaatgcagttcggtttcatggacgggttgtcaagtgttttaccaggaacagttgtcggtgcagcagtatgcttaatcatgaataaatgatttttgtattt

SEQ ID NO: 115880 - DNA, 1274 bp, Zea Mays
ccccattcccaatctcgtcttgtgttgttcggagcgggcagcagcacacagccccatcccaatcctagtcgatcttcttcccctcctcaaggaagaaaagaagctgaaccatggggaagagaaagtcagctgctaagccacctcctaagaagcggatggacaagcttgacactgtcttttcctgcccattctgcaaccacgggagtagtgttgagtgccgaatgtgagtatcattttccaagctttcctgtttagcttttgatgctagatttagtatcacattaagaatttttttcttgatttctctcttttatccagtgacatgaagaatctgattggcgaagcatcttgtagaatctgtcaggaaaacttcagcacaactgttaatgcactcactgagcctattgatatatatagtgaatggattgatgagtgtgagcgtgtcaacactgttgaaggcgacgatgatgcgtgagcttgccccatgcgatgaaactgttacctacaatcgtaatgtaatgtgctggtattctcgaatgccatagcccatagtcagccatggcttggaataacgtagtggctgactgatatgccagtaggcacctgtctagtacttacagaactacaaaaagtttgtactatacatatatggacaaccttataagtggctatgtgtgtacctatcctaacgcttatcccagatggtgtatcagcgtttttctgtgagattgttttcaagcaaggggttgttcattcattgggtcttctcgggaaaaagagaattatgctgcagtcaaccagatggccgctgttgtgccgacaatacagggtaaaccaaatgcaaccagaatataatctgcagcggaagatattcatagatacaattgttttcagttcattcaacgctgaaagcggtttcggtctggaggctgagctttggatcattggatggcactatgcagctttggcacctggagtaccgctcattagtttttcataaagtcccgttcatttcttgtgcacattgctggagattgagagatcgagatcaagactgtacgcatcataaaccgatcagtctattctttgctgtgtacacctgggttgtctttgtgcctgtggtctctgccaggagggtgttcttcgaagtttgaagtacatgtggtttgtgtcttaatgcagttcggtttcatggacgggttgtcaagtgttttaccaggaacagttgtcggtgcagcagtatgcttaatcatgaataaatgatttttgtattt

SEQ ID NO: 115881 - DNA, 760 bp, Zea Mays
ccccattcccaatctcgtcttgtgttgttcggagcgggcagcagcacacagccccatcccaatcctagtcgatcttcttcccctcctcaaggtatggcgattctctccccctctcatcttttctgttggtgtcactccccctcccttctagattggcgagtttctgtgagtagatgcttctcgtctaggtgaggggatctctgtcttgatttatttggctgctcggtacggataaatctggtcctgcttttcttaattcttggcgcagatcttgtgatctggttctatggtcatagataggtttgtgcgcatgatttgttcgattgacttcgtcctaggtcgtgtttgagtctagattagggtagaatagttgtcttatattagatctgtacctgtatgtcaccaaacatgctcatagttacgttgagttgatggatgaagatatatgattcgatagtcaatggcatgtgctgctgttactcgtttactaggctgtagcttttacacgacgagcgttattatcgtggtggtttgttttgacatgcatgcccgattcatttactgctactgattgttatttggagcatctccaaaggtgcctaaaaattaaaatactacatcatttaatgtgtgcagagcactaaaaaataaattgagatgcaacagttagaccttaaataatgtattttaagaagtaaattatattattaggaaagaaaatgttcataatgatctaggaaataaggatagaacactaata

SEQ ID NO: 115882 - DNA, 717 bp, Zea Mays
atggaaccgcgctcccccgtcaactggtccatcaacttcggcagccaccacagaggcagaggcggcgaccagcaagagtggcatgcgctcctcaggccagcctcttctcaaccaaccacagcttggggcatgaagctatataataaaaattaccttttgctttctacttacatgatatctattaaatacaagaatgtgtactacaatttcatgccaggacaagctcagctcctccaaacttggatgaacaaaaacgtaatcagattgttaccgcaggccatacacaaaacggggacagataaaagaaaaccacatttgcttttgattctgaattggaagcattacacaacttcggagatcaaggccaaggtagccacatttggatttggaggaccaactgaggtactcctggtggcaacgtacgccttcaagttgtatgcttctgcttgcttgaacatcaggcgtattggtctggtaaagaaaggcgaaaagcttttgaatgatgattccttccatttgcacacaataggtagtcaaattgttgtgaagattgtaaaaaacaagcatgcccaacccttcaagacttcacaatttgagcttgaatttggaaaatggatatgccacagtccagagctttttgaacagaatttctggagcagttgttcctgtaaaacaatatcttgggtcctgaagccaccaccatttggatcgacatga

SEQ ID NO: 115883 - DNA, 1681 bp, Zea Mays
ctcctcgccaaatcttccataccatttctcccgcgttctatcttgctctgatagactaatcgataagatttggatcgcgagatgagttttttttagtatgaggaaggcttaacagcctcccctaacttttctccgctcagtgtttccgctactggtttctcgcttctttctgtttgctcagttcagcagcgcgagaatcggaatttctgatcacgtgcggaattctctaggtcccgtcgccaacgatgcgtggcagaagcggttcttcagcgtcgcgccgccggccacgctggtcttcttcttcgtgctgatattcgtcgccggtgcaattgttacgcttgatcataaggagagcctggccatactgcagctgcagccaagaggagtgatcgcagcagagcagatgaggcctccagcgacgagcgagctgcgcgctgagccagcagcagaggaacccgacatctgtgagaataaatgtaggcctgcaggcagcgaggcgttgccgaggggcatcgtgcaggacaagtccaacttcgagatggagtcgctgggtggcaaccctgaacggaaggagaagaagggcaacggcaggcactcgaaaagcctcctcgccatccccgtcggcatcaagcagaaggcgatcgtcgacaagctcgtatccaagttcccggacaccaatttcatcgtgatgctgttccactacgacggcgaggtggacgggtggcgagacctggagtggtcgggccgcgcgatccacgtcggcgtacgcgaccagaccaagtggtggttcgccaagaggttcctgcacccggacctggtggcggagtacgactacgtcttcctctgggacgaggacatcgaggtggacagcttcgacccgctccggtacctgcgggtcgtgagggaggagcggctggagatctcgcagccggcgctcgaccggcggtcgcagatccaccaccggctcacggcgcgcgccgcgcggagcgggggcgtccaccggcggtactacaagacgagcgggcacggccggtgctacggcaacagcacgggaccgccgtgcgcggggtgggtggagatgatggtgcccgtgttctcgcgcgcggcgtggcggtgcgcgtggcacatgatccagaacgacctcatctacgcctggggcatggactacaagctcggctactgcgcgcagggcgaccggagccgcaacgtcggggtcgtcgacagccagtacgtgctccaccggggcatccctacgctcggcgacggcggcaaggcgacggcgacggctgccgcgtcggcattggggacggcagaccggttagcggtcaggcagcggtcctacaccgagctgcagctgttcaacaggaggtggaagaaggccgtggcggaggacgggtgctggaccgacccttacccgaacccggcgacgaccaccggctgaccgttggacggagcgaggcagcgcagggaagtacagtagttggtagctgtcagattgaccttgcctagaagatggtagtagatcatacactcgcattaatttacaggttcacagagagctatacatataatgtacagaactacagattgttttttttcctgtctcttgcctgtgatccatacaagggaataagcgtgcatgaataaaagaaattttgaaaatcataaatgaaattgccaa

SEQ ID NO: 115884 - DNA, 1738 bp, Zea Mays
caaaaatatccctccattaactctccaactcctcttcctcttcctcttcttctgcctcttcatttccaattccggcttcttcctcgcatcacaaaattccgattgcggcgcaatttcagattgcttgctccagggcgcaaatggtcatcatcagcggcagcaacttcccagcggattcgtgatccttccgcgatgggtcccgtcgccaacgatgcgtggcagaagcggttcttcagcgtcgcgccgccggccacgctggtcttcttcttcgtgctgatattcgtcgccggtgcaattgttacgcttgatcataaggaggtgcgttgtgacttgtgactgacagctagaggcatgttgtggtctctgagttctgaaagttcatccattcctgcgcaacttgtttctgcagagcctggccatactgcagctgcagccaagaggagtgatcgcagcagagcagatgaggcctccagcgacgagcgagctgcgcgctgagccagcagcagaggaacccgacatctgtgagaataaatgtaggcctgcaggcagcgaggcgttgccgaggggcatcgtgcaggacaagtccaacttcgagatggagtcgctgggtggcaaccctgaacggaaggagaagaagggcaacggcaggcactcgaaaagcctcctcgccatccccgtcggcatcaagcagaaggcgatcgtcgacaagctcgtatccaagttcccggacaccaatttcatcgtgatgctgttccactacgacggcgaggtggacgggtggcgagacctggagtggtcgggccgcgcgatccacgtcggcgtacgcgaccagaccaagtggtggttcgccaagaggttcctgcacccggacctggtggcggagtacgactacgtcttcctctgggacgaggacatcgaggtggacagcttcgacccgctccggtacctgcgggtcgtgagggaggagcggctggagatctcgcagccggcgctcgaccggcggtcgcagatccaccaccggctcacggcgcgcgccgcgcggagcgggggcgtccaccggcggtactacaagacgagcgggcacggccggtgctacggcaacagcacgggaccgccgtgcgcggggtgggtggagatgatggtgcccgtgttctcgcgcgcggcgtggcggtgcgcgtggcacatgatccagaacgacctcatctacgcctggggcatggactacaagctcggctactgcgcgcagggcgaccggagccgcaacgtcggggtcgtcgacagccagtacgtgctccaccggggcatccctacgctcggcgacggcggcaaggcgacggcgacggctgccgcgtcggcattggggacggcagaccggttagcggtcaggcagcggtcctacaccgagctgcagctgttcaacaggaggtggaagaaggccgtggcggaggacgggtgctggaccgacccttacccgaacccggcgacgaccaccggctgaccgttggacggagcgaggcagcgcagggaagtacagtagttggtagctgtcagattgaccttgcctagaagatggtagtagatcatacactcgcattaatttacaggttcacagagagctatacatataatgtacagaactacagattgttttttttcctgtctcttgcctgtgatccatacaagggaataagcgtgcatgaataaaagaaattttgaaaatcataaatgaaattgccaa

SEQ ID NO: 115885 - DNA, 1647 bp, Zea Mays
caaaaatatccctccattaactctccaactcctcttcctcttcctcttcttctgcctcttcatttccaattccggcttcttcctcgcatcacaaaattccgattgcggcgcaatttcagattgcttgctccagggcgcaaatggtcatcatcagcggcagcaacttcccagcggattcgtgatccttccgcgatgggtcccgtcgccaacgatgcgtggcagaagcggttcttcagcgtcgcgccgccggccacgctggtcttcttcttcgtgctgatattcgtcgccggtgcaattgttacgcttgatcataaggagagcctggccatactgcagctgcagccaagaggagtgatcgcagcagagcagatgaggcctccagcgacgagcgagctgcgcgctgagccagcagcagaggaacccgacatctgtgagaataaatgtaggcctgcaggcagcgaggcgttgccgaggggcatcgtgcaggacaagtccaacttcgagatggagtcgctgggtggcaaccctgaacggaaggagaagaagggcaacggcaggcactcgaaaagcctcctcgccatccccgtcggcatcaagcagaaggcgatcgtcgacaagctcgtatccaagttcccggacaccaatttcatcgtgatgctgttccactacgacggcgaggtggacgggtggcgagacctggagtggtcgggccgcgcgatccacgtcggcgtacgcgaccagaccaagtggtggttcgccaagaggttcctgcacccggacctggtggcggagtacgactacgtcttcctctgggacgaggacatcgaggtggacagcttcgacccgctccggtacctgcgggtcgtgagggaggagcggctggagatctcgcagccggcgctcgaccggcggtcgcagatccaccaccggctcacggcgcgcgccgcgcggagcgggggcgtccaccggcggtactacaagacgagcgggcacggccggtgctacggcaacagcacgggaccgccgtgcgcggggtgggtggagatgatggtgcccgtgttctcgcgcgcggcgtggcggtgcgcgtggcacatgatccagaacgacctcatctacgcctggggcatggactacaagctcggctactgcgcgcagggcgaccggagccgcaacgtcggggtcgtcgacagccagtacgtgctccaccggggcatccctacgctcggcgacggcggcaaggcgacggcgacggctgccgcgtcggcattggggacggcagaccggttagcggtcaggcagcggtcctacaccgagctgcagctgttcaacaggaggtggaagaaggccgtggcggaggacgggtgctggaccgacccttacccgaacccggcgacgaccaccggctgaccgttggacggagcgaggcagcgcagggaagtacagtagttggtagctgtcagattgaccttgcctagaagatggtagtagatcatacactcgcattaatttacaggttcacagagagctatacatataatgtacagaactacagattgttttttttcctgtctcttgcctgtgatccatacaagggaataagcgtgcatgaataaaagaaattttgaaaatcataaatgaaattgccaa

SEQ ID NO: 115886 - DNA, 1620 bp, Zea Mays
caaaaatatccctccattaactctccaactcctcttcctcttcctcttcttctgcctcttcatttccaattccggcttcttcctcgcatcacaaaattccgattgcggcgcaatttcagattgcttgctccagggcgcaaatggtcatcatcagcggcagcaacttcccagcggattcgtgatccttccgcgatgaagcggttcttcagcgtcgcgccgccggccacgctggtcttcttcttcgtgctgatattcgtcgccggtgcaattgttacgcttgatcataaggagagcctggccatactgcagctgcagccaagaggagtgatcgcagcagagcagatgaggcctccagcgacgagcgagctgcgcgctgagccagcagcagaggaacccgacatctgtgagaataaatgtaggcctgcaggcagcgaggcgttgccgaggggcatcgtgcaggacaagtccaacttcgagatggagtcgctgggtggcaaccctgaacggaaggagaagaagggcaacggcaggcactcgaaaagcctcctcgccatccccgtcggcatcaagcagaaggcgatcgtcgacaagctcgtatccaagttcccggacaccaatttcatcgtgatgctgttccactacgacggcgaggtggacgggtggcgagacctggagtggtcgggccgcgcgatccacgtcggcgtacgcgaccagaccaagtggtggttcgccaagaggttcctgcacccggacctggtggcggagtacgactacgtcttcctctgggacgaggacatcgaggtggacagcttcgacccgctccggtacctgcgggtcgtgagggaggagcggctggagatctcgcagccggcgctcgaccggcggtcgcagatccaccaccggctcacggcgcgcgccgcgcggagcgggggcgtccaccggcggtactacaagacgagcgggcacggccggtgctacggcaacagcacgggaccgccgtgcgcggggtgggtggagatgatggtgcccgtgttctcgcgcgcggcgtggcggtgcgcgtggcacatgatccagaacgacctcatctacgcctggggcatggactacaagctcggctactgcgcgcagggcgaccggagccgcaacgtcggggtcgtcgacagccagtacgtgctccaccggggcatccctacgctcggcgacggcggcaaggcgacggcgacggctgccgcgtcggcattggggacggcagaccggttagcggtcaggcagcggtcctacaccgagctgcagctgttcaacaggaggtggaagaaggccgtggcggaggacgggtgctggaccgacccttacccgaacccggcgacgaccaccggctgaccgttggacggagcgaggcagcgcagggaagtacagtagttggtagctgtcagattgaccttgcctagaagatggtagtagatcatacactcgcattaatttacaggttcacagagagctatacatataatgtacagaactacagattgttttttttcctgtctcttgcctgtgatccatacaagggaataagcgtgcatgaataaaagaaattttgaaaatcataaatgaaattgccaa

SEQ ID NO: 115887 - DNA, 1628 bp, Zea Mays
ggccgcatcctctccccccgcggccgagctccacccccacccacccacacgcacacactttgccggcggcgagcaccaccaggacagcaggtgttccctcctcttggttttcccttcatgcggtgcgactgggtctaacccttctggaatcatctccgattcggggggttttagacgatatctgggcgggatacaaggtttttggatggaattccggggatctctgtcgacccatatgtttagtggttggggaattggggaaagcggtagaaaggtgtgatgttttagtcctttttggttgaagcggagcttgagtctttgagaagccatttgggcgtaattcttctttcgttgattggggtcggccttgtgtgcaggttacgcagatgtttctttttagagttattgcatctcctcagttgtagtttatctcggttgtgtatccacgagtgctgtgtacaccaattcctgtagaaaagatgggtgaacatgttttcattgttcaagaatgttgttatatgtttttaaatcatgtaagacatgttttagttttaccatggggtctcgagaacaatattgtttatttcctcattctgttttgaagccgtcggaattatgcttgtaatcattgctgaagtttttgtgaacatatattttttttcaatcgattttgctcgagccagtatcttttattgcaacaccatgaactcccatggtgctggttcgcattcacggcttttggacctcaactatccccctgctgaaggggctggtgagggggcttcacgtttcagcagtatccctgtctctcatagagagggttcaagcagcatgcctgtacaacacatccaggcttcgagtagtacaccaccggctactggtgagcctcgcattggtatgcgtagttgccccatcgatgtggaagccatcgatgatgatgccgttatctattcttcaagaccactgcctcgagcaagacagcagttgaccacgacagaaagtattactatcataatagatgatgattccgaaacaaacctagaaacagcaggcgatgctcttgacgagcatgtgaacttactgctatctctgggcatagaacgctcgcatgagcctacaagtgcaaccaacaccttccctggaataagcatggtggacacaccaaaagtaaacaccttcaaggtgcctcctgaacctgtgaaggaggttccgaaggaaccgaagctcagctgcccgatctgtatgaacgagataaccgaagcggcgtcgaccgtatgcggtcacattttctgccagccgtgcatcaaggctgccattaaggcccagaagaagtgccctacctgccggaggaagctcactccaagacagcaacaccgggtgtacctcccatcgccttagtagcccagtgcagagtcattttgctacaagttctgccgtgccgggggctgtatgttggaggcaactggggggggggggggggggagcatagaggtcctgtttggttcgttcatttagtgtcataatcagttaacagggtaatctattaccattgctttatgtttggttagactatactgtaaacgattgcagtgggatgcaataccagccaatacaaaattattgccgct

SEQ ID NO: 115888 - DNA, 88 bp, Zea Mays
gttttggtatatgttgccttattgtgatgacgtattgtgaaactggagataaactattctccttttcattggtgcttgtattttttca

SEQ ID NO: 115889 - DNA, 2139 bp, Zea Mays
ccatccctccctccactgatgtccatgccacaatccttcctcctcctcccctcctttttacccccacctcccttagttcgcctcgcctcgcggccgccatcgtcgccatccctgaccgccctcagattccaccgcgtcgacgccaagctttccccgccactcctcgcggcatcccacagtcctcctggcggcttccgcggatactgtgattctggcggcagcgatggaggaagcggaggtgatggcgggcgaggaatggattctcctggccctggggacgggtggtggtgggagcggtggctccaggccctccacccggagttcttcctcctgttcctgctcctccagtccggcgccgcatccgcgctcgctgaggccctcagcacttccggtgatgacgcgggggacgtatgggaggtgaggggcggcaagcgcactcgcctcatgccggacccaacctggacctcctatctcattgctggggacgacggaacaaagcgggaggacggggatgaaaaggttggaagcatctctaaggacctggccgccctacggaggcagctggggcggtcgtggcggcggtacgccgaagttgctgttcatctgttactccctgacggataccctcatagtgtcagcagcgactaccttaactactcgctctggcgcggcgtacagggtgtggcgagccagatcagcggggtgctttccacacaggctctgctctatgcggttgggttagggaaaggagcgatacccactgctgctgcggtgaattgggtgctgaaagatggcctcgggtaccttagcaagatcatgttgtccaaattcggacgccattttgatgttaaccccaaagggtggcgactatttgctgattttctggagaatatggcttatgggctggagattctgactccagtgttccctcacctgtttgttccaattggggcggctgctggtgctggccgctcagcagcttctttgatacagtctgccaccagaagttgcttttacgctggatttgcagtacaaagaaactttgctgaggttattgcaaagggtgaagcgcaaggaatggttagcaaatttgttggcatagggcttggcattgcattggctaatcacattggctcatctgtaccattagctcttatttcgtttgctggaattactgcagttcacatgtattgcaacctcaagtcatatcaatcgattcagctgagaacactgaatccttaccgcgcaagcttggtgtttagtgaatatttgttaagtggacaagttccatcggtcaaagaagttaatgatgaagaacctcttttcttcaatttgtcacttggtgcttcacgtcaaagtaagattttgtcagcggaagcaaaagatgctgcagatagaatatgccggcggttacaaatgggttctaagcttagtgagataattgagagtaaagaagatgcttgtgcattgtttgatctttacaaaaatgagcaatatctgcttatggattacaaaggaaaattttgtattgtacttaaagagggatcttctcccgaagacatgctcaaatctttgttccatgttaactatctatattggttggaaaggtatatgggtttcaaaccaagtaatgttgcttcagaatgtagacctggtggaaggcttgaagtatccctggattatgcgcagagggaattcagccatgtcaaacatgatggttctgatggtggctgggttatggatggtctgattgcaaggcccttgcccgttagaatacgaataggagatggtacttcttaggtctttgctctattaactattctcagagctacatctacatccgttgtacagttttgcttattaagttgctgatgtggttcgacaccatattcgaaaggctctcgcctgcagtttttaccctgatattaggatggaagtggttacatctctggtatattttttatcttttgacttttgaagcctgtgatagtgcagtagtgctcacaagattaagggcactcgggctgttatagagattcgagacagcagagcagatgaaggatttctaggtttgtcaatgctcagtatgcgcaccttgtgtgctcgagatcaattttactggcaatacttgtctggtta

SEQ ID NO: 115890 - DNA, 1700 bp, Zea Mays
ccatccctccctccactgatgtccatgccacaatccttcctcctcctcccctcctttttacccccacctcccttagttcgcctcgcctcgcggccgccatcgtcgccatccctgaccgccctcagattccaccgcgtcgacgccaagctttccccgccactcctcgcggcatcccacagtcctcctggcggcttccgcggatactgtgattctggcggcagcgatggaggaagcggaggtgatggcgggcgaggaatggattctcctggccctggggacgggtggtggtgggagcggtggctccaggccctccacccggagttcttcctcctgttcctgctcctccagtccggcgccgcatccgcgctcgctgaggccctcagcacttccggtgatgacgcgggggacgtatgggaggtgaggggcggcaagcgcactcgcctcatgccggacccaacctggacctcctatctcattgctggggacgacggaacaaagcgggaggacggggatgaaaaggttggaagcatctctaaggacctggccgccctacggaggcagctggggcggtcgtggcggcggtacgccgaagttgctgttcatctgttactccctgacggataccctcatagtgtcagcagcgactaccttaactactcgctctggcgcggcgtacagggtgtggcgagccagatcagcggggtgctttccacacaggctctgctctatgcggttgggttagggaaaggagcgatacccactgctgctgcggtgaattgggtgctgaaagatggcctcgggtaccttagcaagatcatgttgtccaaattcggacgccattttgatgttaaccccaaagggtggcgactatttgctgattttctggagaatatggcttatgggctggagattctgactccagtgttccctcacctgtttgttccaattggggcggctgctggtgctggccgctcagcagcttctttgatacagtctgccaccagaagttgcttttacgctggatttgcagtacaaagaaactttgctgaggttattgcaaagggtgaagcgcaaggaatgttcacatgtattgcaacctcaagtcatatcaatcgattcagctgagaacactgaatccttaccgcgcaagcttggtgtttagtgaatatttgttaagtggacaagttccatcggtcaaagaagttaatgatgaagaacctcttttcttcaatttgtcacttggtgcttcacgtcaaagtaagattttgtcagcggaagcaaaagatgctgcagatagaatatgccggcggttacaaatgggttctaagcttagtgagataattgagagtaaagaagatgcttgtgcattgtttgatctttacaaaaatgagcaatatctgcttatggattacaaaggaaaattttgtattgtacttaaagagggatcttctcccgaagacatgctcaaatctttgttccatgttaactatctatattggttggaaaggtatatgggtttcaaaccaagtaatgttgcttcagaatgtagacctggtggaaggcttgaagtatccctggattatgcgcagagggaattcagccatgtcaaacatgatggttctgatggtggctgggttatggatggtctgattgcaaggcccttgcccgttagaatacgaataggagatggtacttcttag

SEQ ID NO: 115891 - DNA, 207 bp, Zea Mays
atggaggaggctatgctcaacctcaatgaagagtcgtcgagcaggcccaagcgtcgtcgacgctacatcaatcgtgatcctggacaggcatgccaaatatcagtcaaatgctggaaactggaagctactggagaagtgggtctgcaagcaccacgaagcctgcggccatcaaacaggaatgcaatggcattcatgtccaccgactga

SEQ ID NO: 115892 - DNA, 606 bp, Zea Mays
atgctgcctagtataagcactctagactccactaataaggccatgcacctcttgggccaacaaaaccaactggggacgaagacgagcccagagcaccagaaacgcaaaaaggccagtcgaactattagccgccactgtgcagtgcaggtgtcacaaccgcaaatggtcagcttagcctctggttctggtgatcgtgatgctccccttgcccccctcggtgtggatcttcgtcttgtggaccacaggcttccccgagatggccgaggcctggagcgagctgggctcctcgtcgctcttgtgcctgatcttgtacggcgggggcgcgtggagcttctcgtttatgtcgctcagggtgacgtcgccgcggatgctgctcggcttgatgagctcgaaagggaaggccacggatgtcctcgccttctttgccccgatgatgctcttgccagctttcagcggtgtaggtctagcctgtgcacgattgttgttgactacgatagactgttgactaggcgaagcattctgatgtgctgacgtatcaacatctttttccgtggcagcagcagggctattcatttcttctgccggaaaaccaggctcggtgtcttg

SEQ ID NO: 115893 - DNA, 4156 bp, Zea Mays
acatcttttctcctgcagcttatgttgatcctgtgtggtccttttgcagctactaacttgactattttctttgtgcaggttacaatttgaactgctggcaatggggcctcattgttccttcatcttgatcctactgctatgcttcacccccagctctgctttgactggacataatgatataaatacattgttcaaactgagggacatggtcactgaagggaagggatttctccgtgactggtttgattcagaaaaagccccttgcagttggtcaggtataacttgtgtggaacatgctgtagtggatatagacttgtcatctgtgccaatttatgccccgttcccgttatgtgtcgggtcattccaatcactggctcgtctcaacttcagtggttgtgggttttctggcgagcttccggatgccttggggagcttgcacaatcttgagtaccttgatttgagccataaccagcttacaggggcccttcctgtttcattgtatggactgaagtcattgaaagaagtagtgcttgacaataatttcttttctggtcaattgagccctgctattgcacagcttgagtacctcaagaagttttctgtatcctcaaattctatctctggtgccattcctccagagttgggcagtttgcagaatctggagttcctggaccttcacatgaacgcacttaacgggtcgataccatcagctttgggtaatctgtctcagctcttgcaccttgatgctagccagaataatatctgcggctcgatatttccaggaataactgcaatggcaaacctagttacagttgatctctcttcaaatgctttggtggggccactacctagggagattggtcagctacggaatgctcaactgataatattgggacataatggtttcaatggaagcattccagaagagatcggtgaactaaagctgctggaagagctcgatgtccctggatgcaagctcacaggcatcccttggacagttggtgatcttagaagtttgagaaagcttgatatttcagggaatgatttcaatactgaacttccggcatctattggcaagctgggaaatctgactcgtctatatgcaaggagtgctgggcttactgggaatattccgagagaacttggtaactgcaagaagcttgtctttgttgatctcaatggcaactccttttctggccctatacctggagaacttgcaggtttagaagccattgtcacattagatgtgcaagggaacaatctatctggtcccattccagagtggatccggaattggacgaaccttcgttcaatatatctggcgcagaacatgttcgatggacccctgccagtactgccattgcagcatctagttattttttctgcagaaaccaacatgctatcaggttctattcctgatgagatctgtcaggccaaatcactgcagtcactcttgttgcacaacaacaatctgactgggaatatcatggaggcatttaaagggtgcaagaaccttacggaacttaacctgcaaggaaaccatcttcatggtgagataccacattacttgtctgagctaccactagtaacagtggaattggcccaaaacaacttcacaggaaagctgccagagaaattgtgggaatcatcaactattctggagatcacactcagctacaatcagcttactggccctatacctgaaagcatcggtagactctccagtttgcagaggctacagatcgacagtaactacttagaagggcctattccgcggtcaatcggctctctaaggaatctgacaaatctctctctatggggcaataggctgtctgggaacattccacttgagctcttcaactgcagaaaccttgtcaccttggatctaagttctaacaatttgtctggccacatcccgagtgccatatcacacttgacatttctcaacagcttgaacttgtccaataaccagctgtccagtgctatacctgctgagatctgtgttggatttgggagtgcagctcaccctgactcagagtttatccagcatcatggtttgcttgatctttcatacaacagattgactggtcatataccagcagcgatcaagaattgtgttatggttacagtcctcaacctccaaggaaatatgctaagtggtgccattccaccagagctttcagaactgcctaatgttacatccatctatctttctcataacacattagttggccccatacttccttggtctgtaccgtcggttcaactgcagggcctttttctctctaataaccacttaagtggctccattcctgctgagataggtcaaatacttcccaaaatcgaaaagctagacttatccagtaatgcacttactggaacactacccgactctttactctgcatcaattacttaacctatctggatatcagcaataacagcctctctggacaaatcccattgtcttgtcctaaagaaaaagaggcatcgagctccctgatattgttcaatgggagcagtaaccatttctcagggaacctagatgagtctatttcaaacttcacacaactgtcttttcttgatatccacaacaacagcctcactggaagtttgcccttctcactttctgatctcagttatttaaactatcttgacctctcaagcaatgacttcaatggccccgccccttgtggtatctgcaatatagttggcctcacatttgccgacttctctggtaatcacattggcatgagcggcttagtggattgtgctgcagaaggcttttgtactggaaagggttttgatcggaaggcacttaattcatctgatagagttcgaagagcagcaatcatttgtgttagtatactcactgttgtcattgtcttagtttttctggtggtttatctgaaacggaggctattgagaagcagacccttggctcttgtacctgtcagcaaggccaaggctaccattgaaccaacctcaagtgatgagctcctagggaagaagtttcgagaacccttgagtatcaatcttgcaacatttgagcatgcacttctgagggtcaccgcagatgatatccagaaagccacggagaatttcagtaaggtgcacattattggggatggtgggtttggcactgtctacagggcagcacttcctgaaggtcggagagtagcgatcaaaaggcttcatggtggccatcagttccaaggtgatcgtgaattcctggccgaaatggagacaattggaaaggtgaaacatcctaaccttgttcctctacttggctactgtgtatgtggtgatgaaaggttcctgatatacgagtacatggaaaatgggagccttgagatgtggctcaggaaccgggctgatgccatcgaaacacttggatggccagaccgcctgaagatatgtattggttctgcccgcggtctttcgttcctgcatcacggttttgtgccccatatcatccaccgtgacatgaagtcaagcaacattctattggacgagaactttgagccaagggtctctgattttggccttgcaaggataatcagtgcatgcgagactcatgtcagcactgacattgctggtacatttggctacatacctccagagtatgccctgacaatgaagtcctctacaaaaggcgacgtctacagctttggcgttgtcatgcttgagctgctcactggacggccacctacagggcaagaggaaggggaagggggtggaaaccttgtaggctgggtgcgatggatgatggcacatggcaaggaaggtgagctgtttgatccttgtttgcctgtctcaagcgtgtggcgggtacagatggcccatgtgctcgccattgcccgagactgcactgtggacgagccatggaagaggccaactatgctggaggtggtgaagggcctcaagatggccgaaacgatagaatgtggacctctggttgtgacagtcaccaaggacatgtaatgctgacggcatcaacgctgatgtatggaactgggtgttcagggaatgttgttcttgtgtcgatataataatgtaggctccttgttgctgtagctgtactggtgactgtaatgagaaactaacgctgctcatgttcaggctgtagttattgatgtaaccttttcatctggaccc

SEQ ID NO: 115894 - DNA, 289 bp, Zea Mays
catttcctgctgcccaacacaacaccgcctccctcccatcgtcgcccctcgcgcacggccaccaccagttcgtgcgtgaactccgcgtcccctctcggctctcgccgctcacgcgttcctcgtgcccgcgccacacaccgcgggggcacggcactgccgagaccggcattgtggagcgcccgcgaccccggcgaggatctatattgttatacattgccgctttgattgctgatcttcttctgctgccactacttggatggagaatgccatcaagttaaaggtattgaca

SEQ ID NO: 115895 - DNA, 2434 bp, Zea Mays
agaaaacgaaacagaacggccagtggaagccgccgtgccgtgccgaggcggacggacagtcggacactgtccgaggaagccaggaaggatacccacccgcaccgactccgccgcggaggaatgcggcgacgaccagcgccgccgccgccgctgtaacggtagctagctggccgctcgggtcggagggaggaggaggaggaggctaatgggggtgtggagggagggcgcgggctggtgcttctgctccggcgggggcggcgacgacgggggccggtcggagcgggtcaaggcggcgatcttctccgccagggcctccgcgctggcggccgtccgtgcgcaggggcggcatcacggcagcgggctcctgatccaccggaacctgctgctcaccacgcacggcaacctgccctccgcggccgccgccgaggacgccgacgcgctgctcggccagggccgcctcgtcgcgcggctcgagccgcacagatttttcatcagcagctcgattcttgatcttacaatagttggtattgattatacagagggtgactcgaccctacagggtcagcaacctcactatttgaaaacaagctgcaaaccaagcctagatcatgggagtcccgtgtacctgctgggacatacagggaaaaaagaactggtgattggtgagggcaaggtggttattggcacagacaacctcataaaactctcagccgagggggtgacatggtgtcctgggtctgctggttttgatgcccaagggaacctagctttcatgatctgtgatccaatgaagctggcctcttctcccaccgcaagatcatcctcggcatcctcatcctcatcacattcatggaagaaggatcagccaatgcaatttgggattcccatatctgtagtttgtgattggttatatcagcactggcagggcagcttggacgaggttagcaagccaaagttacctcttgttcggctgatgtccagcaggagtgatcactcaagcacctcgttcactcgtcgtcatgtgttcaagcctgacgatgagaacgatgatgcatccgtttgttcaaagcctaaacatcagcaggtatcaggtagcacagccactgcaaggatttcacatgaagcaaatcctatagttgatctgcgcacaagctgtgagcagggtgttacgactccagaaatatatgaatcgccaaggcgaagttcttgtcaggctcagaagaacgctgctgcaccaattcaactcttggacatcaacttcccacccagggttccaaagactatatttctaccattgcctctgaagcaaatgctttctgatgagaacaatgttgaaacgtcgaagccaaaatatcggtcaaaagacaatggcttcccatcagggctgatatggcaccgcaatattgaggctgagtgtagggaccctccggtagctcttcagcatatggattgcagcagcgagggacagtcgagctcatcacctgctgagataccggagtatggatgccaagaccagtacgatagcgaggaggaaacaatgtactcagctgaaaccatggaaagcaggaacattccaagccccagggagaaacatgtggggaggagccagagctgtgttacctacagcaggtggagctctccaaggacctcatcaatgcagaatggaaccttgcgaaagcagcatacactgatccctgtgcggaagacgcactcgcagaacacgactcttccgcagaggagtcatgactacttaagcccaacagtttcctcagccatgaagaagaggaactccatggaacagcagcaggccacaaagcctcgacggagcaccatacagtcttctccaaaatggatgttttgatggttctatctatatctggttttgaggtggaaacaatgaagaaagcaagtgcctactcggtgaaaactactgctcctatgtttcctactcaaaacttacatgtaagtctgctcccttccctcagttctctacttctctccctgggttcctgtgtgcagaatggcatggataaataaagagaaacaaaaaggaaaagaaaagcaaaaaaatcatcacaaaagattacagatgaaatgtgttgaaggcggcatttgtgaggtgcgatgaggactgttatattcctgccgactctagtgttcagcttacaattttcaactaaacatttttaatatgttttttttggtattttgctattcatccatagccatgatgactgtaatcattttgtttgctactgcttgcggccttatgtaccatgtgtgtcatcctgaattagaccaggaaataggttgagagttggctaccaagtgagtttttttttttcaattgaccgcttgtccgcagtgttggctgtgtgccatactatatagcaatgtaaatagcttttatttgaatgatgcggcagagttcatt

SEQ ID NO: 115896 - DNA, 1857 bp, Zea Mays
cctcttgtccggttcgggtggtccgcggtcggggtgagtgagtgagcagctttgcttctccatctccccgttcccttccctccccagccccccggcccggcggcggtacgtgaccctgacgccgcagcgctagctagctcgccggaacggcaggcaggcgaccggcagaaaagatggcgggagcagcagctgtggagacggcggcggcggcggcagcggccaacggaaaagcgtgctgccacgccgccaaggggcccgggtacgccacgccgctggaggccatggagaagggccccagggagaagctcgtctacgtcacctgcgtctacaacggcactggaattaacaagccggattaccttgcgacggtggatttggatcccagctctcctacatactcccaggtgatccacaggctcccggtcacccacatcggcgacgagctgcatcactctggctggaactcctgcagctcctgccacggtgacccatcggccaagcgccgcttcctgatcctgccttccttgctgtcaggccgtgtgtatgtcgtcgacacagcgacagacccaagggcgccatccttgcataaggtggttgagtctgaggacattgctgagaatactgggcttgggttccctcacacgtctcattgccttgcgtctggcgacattatgatttcttgccttggggacaaggaggggaatgcagctggcaatggcttcctgctgttggattcagagtttaatgtcaaaggacgttgggaaaagccaggtcacagtcccttgtttggatatgacttctggtaccagcctcgccacaagacgatgatcagttcgtcatggggagcccctgcagcgttcaggacaggtttcgatcttcaacatgtccaggatggcctgtatggaaggcacctgcatgtgtacgactggcctggcggtgagctcaagcagacacttgatctaggtgacactggactccttccccttgaggtgaggtttttacatgatccatcaaaggacactggctatgttggctgtgctttaacaagcaacatggtgagatttttcaagaccgcggatggatcgtggagccatgaggttgctatctctgtgaaaccactgaaggtccgcaactggattctgccggaaatgccaggattgataactgatttcgtcatctctcttgatgaccgttatctctactttgtaaattggcttcatggcgatattaggcagtacaacattgaggatcccgcaaagcctttcttggctggacaagtatgggttggtggtcttcttcagaagggcagtgatgtcgtctatgttactgatgatggtcaggaacagcagtacaatgtgcctcaagtcaagggtcatcgacttagaggtgggccacagatgattcagctgagcttggatggcaagaggatatacgtgacaaactcacttttcagccgatgggatgagcagtttttcggtgatgatcttgtcaagaagggctcccacatgttgcagatcgatgtcgacaccgagaaaggaggcctggctgtcaaccccaacttcttcgtcgattttggcaccgagcctgatggtcctgccctggcccacgagatgagatatcctggtggggactgcacctctgatatatggatctgaggtcaaggattcggcgtaattaacaggctgctggagaatccctgttgttgtatgcactgtaattaacatggtatccgtgcggtgttctgtcttgtactgcgactgttgccagtggaataaggcatggtttcatgagaactctagattaataaaagaagtcctgattctaaattttctgattgtcactgctctggtttcttta

SEQ ID NO: 115897 - DNA, 2097 bp, Zea Mays
accacgacacctcgctcccgccacgccgtggggcccatgttcacgcccacctcccctgtccgcatgctccgcctcctccgcacgaatcgcggcgcgcaatcgacaaacttcatgcctccacgtctcagccgggaacgctataattaggcctgccaccgcctgctcgcctcgcagaagccgcagccacgcccccacaccaagccgtatcgtcttctccctcttgtccggttcgggtggtccgcggtcggggtgagtgagtgagcagctttgcttctccatctccccgttcccttccctccccagccccccggcccggcggcggtacgtgaccctgacgccgcagcgctagctagctcgccggaacggcaggtggcggcgcgcgacctgagagcacagcagcaccggaccggctcaggcaggcgaccggcagaaaagatggcgggagcagcagctgtggagacggcggcggcggcggcagcggccaacggaaaagcgtgctgccacgccgccaaggggcccgggtacgccacgccgctggaggccatggagaagggccccagggagaagctcgtctacgtcacctgcgtctacaacggcactggaattaacaagccggattaccttgcgacggtggatttggatcccagctctcctacatactcccaggtgatccacaggctcccggtcacccacatcggcgacgagctgcatcactctggctggaactcctgcagctcctgccacggtgacccatcggccaagcgccgcttcctgatcctgccttccttgctgtcaggccgtgtgtatgtcgtcgacacagcgacagacccaagggcgccatccttgcataaggtggttgagtctgaggacattgctgagaatactgggcttgggttccctcacacgtctcattgccttgcgtctggcgacattatgatttcttgccttggggacaaggaggggaatgcagctggcaatggcttcctgctgttggattcagagtttaatgtcaaaggacgttgggaaaagccaggtcacagtcccttgtttggatatgacttctggtaccagcctcgccacaagacgatgatcagttcgtcatggggagcccctgcagcgttcaggacaggtttcgatcttcaacatgtccaggatggcctgtatggaaggcacctgcatgtgtacgactggcctggcggtgagctcaagcagacacttgatctaggtgacactggactccttccccttgaggtgaggtttttacatgatccatcaaaggacactggctatgttggctgtgctttaacaagcaacatggtgagatttttcaagaccgcggatggatcgtggagccatgaggttgctatctctgtgaaaccactgaaggtccgcaactggattctgccggaaatgccaggattgataactgatttcgtcatctctcttgatgaccgttatctctactttgtaaattggcttcatggcgatattaggcagtacaacattgaggatcccgcaaagcctttcttggctggacaagtatgggttggtggtcttcttcagaagggcagtgatgtcgtctatgttactgatgatggtcaggaacagcagtacaatgtgcctcaagtcaagggtcatcgacttagaggtgggccacagatgattcagctgagcttggatggcaagaggatatacgtgacaaactcacttttcagccgatgggatgagcagtttttcggtgatgatcttgtcaagaagggctcccacatgttgcagatcgatgtcgacaccgagaaaggaggcctggctgtcaaccccaacttcttcgtcgattttggcaccgagcctgatggtcctgccctggcccacgagatgagatatcctggtggggactgcacctctgatatatggatctgaggtcaaggattcggcgtaattaacaggctgctggagaatccctgttgttgtatgcactgtaattaacatggtatccgtgcggtgttctgtcttgtactgcgactgttgccagtggaataaggcatggtttcatgagaactctagattaataaaagaagtcctgattctaaattttctgat

SEQ ID NO: 115898 - DNA, 117 bp, Zea Mays
gttttgtcatgaaaacaacaataaaattgatttcctaattaattctatatcaaatctctactacttattaagtaagcaatagtagtctgccgttctgccctcccccgttccgcgcgc

SEQ ID NO: 115899 - DNA, 109 bp, Zea Mays
tttttttcttggtattgtccgtgtataatcgattgatttctacggtccaaacggggtccgagatccaatcatatatgtatccatgtatctaagctgtgcaccgggaagc

SEQ ID NO: 115900 - DNA, 1900 bp, Zea Mays
atggcgctccggaccttccctccccgcgtcctcctcctctccgtcgtcctcctcgctgcccccgccgccggcgccggcactggttcggagttcgacgacggcacctcgcccaagttccccggatgcgacaacacgctgcagaaggtgaaagtgacgtactgggtggacggcgacgagcggagcagccttacggggatcagcgcgaggttcggcgcggtcctgccggacgcggcgcccgacgacgagaagcagcgggccgccgtgcccagccccgagagcggctgcgccaagtcgtcgacgccgctcgcgggctccgtcgccgtggctgtgcgcggggagtgcacgttcatcgagaaggccaaggcggccgaggccggcggcgccgtggcgttgctcctcgtcaacgacgaggacgacctgcagaggatggtctgctccgacaaggactcgccgcccaacatcggcatccccgtcgtcatggtgtccaagtccgccggcgacaaggtgcagtcggccatcggggacgggtccaaggtcgacattctcatgtacgcgccgctgaagccgtccttcgatggcgccatacctttcctctggatgatggccgtcggcacggtggcctgcgcttccgtgtggactgtcgtcgtcgtcggagaagagcctaccaagcagggcgacgtctccctgggtggggaggagaaccccgacgccgaggtcgtggagctgcaagccaatacggcgctcgtgttcatcgtcacgtcctcgctcgtccttctcttcctcttcttcttcaactccaactggtccgcctggctcctggtttgcctcttctgcctcgggagtctccagggtatggaattcgtggtatcttctctcgttgtcagactatgccagcggtgtcgcgaggccaaagtgaagcttcctgctctaggaaacgtgaaggtggtcacgctagtggtcctgccgctggccttcatcttcgccgtcacctgggctgcacaccaggactcgccggttgcttgggttggtcagaacctcatgggcatctgcatgatgattctagtactgcaagtggtgcacatgccaaatataaaagttgcgtcggcgctccttgtctcggcctttttctacgacattttctgggtcttcatatcacccctcatattcaagaaaagcgtcatgatcacagttgctcgtggcagcgatgacgggccgagcctccccatggtactgaagatgccgaaggagttcgattcgtggaatgggtacgacatgattgggttcggggacattctcttccccggactgcttgttgctttcagtttcagatatgacagaacacacggcaaggacttgacagatggatacttcctctgcttaatgattggttatgccttcggattgtcatgcacatacgttggcttgtacctgatgaacagcgggcagccagctctgctctaccttgttccttcaacactaggagttatcgtcctgcttggagcgaggaggggggagctcggtcagctctggaacgccaaggtgtagcctgcctgggaggcccgtgcatatagctgatacgatgacactggttgcaggcttcaaatgggctttggtttagctagacatgcatctgatggttttttggtgaaattatgccaagcatcagcatgatccatggttaggaaatttctttgttattagagtacacaacacacaccacacatacgaaggctggttggtttgttactagcctgctgctgtagggcacactgcacgtcaaaatccctagcgtgatgcaaatttcagcaaaatttatagacagatatgcatcaataatacctactatatcaaagtagtttttattgagcctatcagaaaatatatgtttagttgtgtgttt

SEQ ID NO: 115901 - DNA, 1941 bp, Zea Mays
cttggctcccgcctccccgcgcgcggcaagccggcaccgcaatggcgctccggaccttccctccccgcgtcctcctcctctccgtcgtcctcctcgctgcccccgccgccggcgccggcactggttcggagttcgacgacggcacctcgcccaagttccccggatgcgacaacacgctgcagaaggtgaaagtgacgtactgggtggacggcgacgagcggagcagccttacggggatcagcgcgaggttcggcgcggtcctgccggacgcggcgcccgacgacgagaagcagcgggccgccgtgcccagccccgagagcggctgcgccaagtcgtcgacgccgctcgcgggctccgtcgccgtggctgtgcgcggggagtgcacgttcatcgagaaggccaaggcggccgaggccggcggcgccgtggcgttgctcctcgtcaacgacgaggacgacctgcagaggatggtctgctccgacaaggactcgccgcccaacatcggcatccccgtcgtcatggtgtccaagtccgccggcgacaaggtgcagtcggccatcggggacgggtccaaggtcgacattctcatgtacgcgccgctgaagccgtccttcgatggcgccatacctttcctctggatgatggccgtcggcacggtggcctgcgcttccgtgtggactgtcgtcgtcgtcggagaagagcctaccaagcagggcgacgtctccctgggtggggaggagaaccccgacgccgaggtcgtggagctgcaagccaatacggcgctcgtgttcatcgtcacgtcctcgctcgtccttctcttcctcttcttcttcaactccaactggtccgcctggctcctggtttgcctcttctgcctcgggagtctccagggtatggaattcgtggtatcttctctcgttgtcagactatgccagcggtgtcgcgaggccaaagtgaagcttcctgctctaggaaacgtgaaggtggtcacgctagtggtcctgccgctggccttcatcttcgccgtcacctgggctgcacaccaggactcgccggttgcttgggttggtcagaacctcatgggcatctgcatgatgattctagtactgcaagtggtgcacatgccaaatataaaagttgcgtcggcgctccttgtctcggcctttttctacgacattttctgggtcttcatatcacccctcatattcaagaaaagcgtcatgatcacagttgctcgtggcagcgatgacgggccgagcctccccatggtactgaagatgccgaaggagttcgattcgtggaatgggtacgacatgattgggttcggggacattctcttccccggactgcttgttgctttcagtttcagatatgacagaacacacggcaaggacttgacagatggatacttcctctgcttaatgattggttatgccttcggattgtcatgcacatacgttggcttgtacctgatgaacagcgggcagccagctctgctctaccttgttccttcaacactaggagttatcgtcctgcttggagcgaggaggggggagctcggtcagctctggaacgccaaggtgtagcctgcctgggaggcccgtgcatatagctgatacgatgacactggttgcaggcttcaaatgggctttggtttagctagacatgcatctgatggttttttggtgaaattatgccaagcatcagcatgatccatggttaggaaatttctttgttattagagtacacaacacacaccacacatacgaaggctggttggtttgttactagcctgctgctgtagggcacactgcacgtcaaaatccctagcgtgatgcaaatttcagcaaaatttatagacagatatgcatcaataatacctactatatcaaagtagtttttattgagcctatcagaaaatatatgtttagttgtgtgttt

SEQ ID NO: 115902 - DNA, 720 bp, Zea Mays
gtctctgcatggtatggcacagggatatgcatatgcaaggcatgagcagagtcacagagctgccacacacaagccattgcacctgtctcccagtttatataacctctaacacttgcttccttatgctgtttctctgaatccaaataaagcaccatcccccccattttctatccattgctcacttgaactagagggatggctaatggttgctccacgactaccacaagctccctgctcctcttcttccttctctcttacttgctcatcggtcatgctctctgcagccaaggccacaatggcagaacatcaggttcttcccttccttgtacaaacaccgagttgtttatttcctttctttttcttgcatgggacgagccgcttctttcttttagcatttgcttcctgttcacttccactgattatttgctcatttcaatctaatttgtggtgaaggtgctgattatgtggtgcaatatctccaccaggaattacctggtaaacatatagttttgcaggagaccgtcaaggtacccatctctctttcagatgtagcgatgtagcgttcttcagggttctaagtttcaaaggcttgcagtacctttttattcttttacacatgtattatgacaggaaaactttggaaggacaaaatgtcaaccacttgcctccaacatccatcactcctctagtattactggaaaaaaactttagaattgaaac

SEQ ID NO: 115903 - DNA, 1192 bp, Zea Mays
atggcgtttctctcgccagcagccgcctcgtcgaagaggctgagggtctattcgtccgccgctatcgacggtgccgtcacaggtagcagcaagcacgtggggacccacaacgacaacttccactgcgttgagatccttgatacattggatgttgttcttgatgttggggtgtctatgatcccagtcaacatcgccataatcatcaccagaagggcttcagtgagtcaacatcgccatgatcatcaccagaagggcttcagtgaggtttttgaacatggattcgacacaaaacttagcagcgttggacttgtctacaagcattttggtaaggagatcattgctaaggagcttggggttaatgaggatcatgaagatgttcaccgtttgtatctctcaatatataaaagttttgttgaggcactttacgcaattgacaatggaatcaatcaatatgacatagatcaaccaccaaagtatagtgttcgcttccatgttaaatcatggttaccagcaaggtctattatcctggagtgtttgttatcaagaggaaatattgatccaagtcgagaaatcatggttttggataggttctgcccgtgctatgatcaacaacatattgaaaatcttgaagaggagctgaaggttgatcctctgaccaagtatgtgttgtatcacgtgctcgcgatcatatcgaagatcgtgtctgtccgtacgtgctcgagaattggaacgatccgggtggccgggaggaggaaggcgagcaacgcggcggcgctggtagcggtgctgatcgtggccgtggcggcggccgcggccggcgccatcaagctctgcggcgtggacgagtccgcagtggacgcgtgcacgccctactgcaaggcgggcagcacgcaggcggcgccgggccagctgtgctgcgccaaggtcaagtccgcccgctggagctgcctctgcgactaccggagcgctctctccagcgacatcgacgccgcgcgcgtcatggacctcgccaccaagtgcaagtgcgactacccgccggcgtcctgcgacgacaactagccagagccacaccaccgtgtttcttgtttacgtgtcttgttgctgctttatcagtgctacattcttgtgcagtcgtgctcgttgggctatccgccagcagcatgcatgccacgttgtacgtgtttctttgctg

SEQ ID NO: 115904 - DNA, 494 bp, Zea Mays
cacaccacagatcacaagtagtactacaggctacgtactgagagcgctgcctatacgtcgccaataggccaagacatcgatacgacgatatggccggaaggaaggtgagcagcagcagtgccgtggccatggccataatggcggtcgcgctgctggtcatggcggccgaggccgggacgtgcaacgtcgacgctgacgcggtggtgaaccattgcaagtccgcctgctcgagctggtggtggggcggcggggcaaggccgtctcagggctgctgcaacgccctgagatacgccgacttcggctgcgtctgccgcaactactggggaatactcaggagcacgccctacgccggctgcgccatggccatcccttccaggtgcaacatccggggcgcgcccagctcgtgctagctcggagcgaggtgacctagcatgcatgcatgccagcagcttcggctccgacccgccggtcacaaactcacgaggtcacgatcg

SEQ ID NO: 115905 - DNA, 290 bp, Zea Mays
agacctgttcatacagaagaaacatatagaagcctaccaagttgtcaaattgccgatgttgcttgttcttctcacatcaaccctcctatacccctccaccatggagggtcagtagtgaggcatgttcccctatctcagaacaatgatggtgaggtaagataagatagtttaagattttcagttatcctctcaacaactaaagttgggcatgtcacctgtgtagtgttctactgttcttggtctgtattaatcgtagatgctctggcagtagatagttcactcttgactcc

SEQ ID NO: 115906 - DNA, 2842 bp, Zea Mays
aggaactcaaaccggtcggactccacgacgagtcgacgacgcacacaaaaaaaaaacagcaggcgaggcgggatttagaagctgcgcagcgcgcatccctcccccaatcccgacccgacccgaccccgtccccgtcgccagatctcgcgccccctccccggggctcgatcggatcagcggcggccggtgatacggggacggggagatctcgccgaggtttgggccgggccgggccgggctggtgggagcaggggagccatggcgtcggcgcaggcgccgtcctccgccgccgcgccgtcgcgcaaggaccatctcgaggccgggaagaagcggctcgagcagttccgcaagaaaaaagcggcgaagaaggccaatgcagctggtgcagagcaggcaaaagtgcctgctcctgatgtagagccaaaccaagcgagcacgtcttcggtgccatgggctgtatatgagaatggcccagagagtgcttccagcggtgcagaattcctgtcaaatgctccggtcaatgtatatacttctgttggtgttagtagtgttagaccccagcaagatgctgttactgatggaggaagtaagttctatgggaacttaagcttctctgatcttgttaatggtcatcatgagaactggagaggcgatgaagcccgtaaaagggatgagcacagccctgacaaggatgtgcaatcaacatctaaattaagtgcctttgggaacagcagtttaactttaccttctactgacaacatgccaagttggggaagaatttctttatcaagtcaagtacatgataccaagcaatctagttcatattcatccagcaccctttttggaaagtctgaaaatgcttactctcaggactactccacaaagagtgatacctctagtcagttgagagatacctccaaagactcttcccaagtggagcaatctctgtatgccagcactcgggattatggcaatgccttcaatagttcaaggactattgttactgtagagcatgatacaaatgttggaataactcggacatctgcagattccgcacctggtgttaattttgaaagacaggatccttttctgtcatctggttatccaactacatacactcgttcaaggccatcgtttcttgattcaattggagtacaaagagtccctccaacaactcaagcctcatatagggagcctgcaaaggctaatcaactatcccacaattcgaattatcagagttcatttgtgaagcaatcaaatcaacaacccacttcaagtaatgctgcagatatttcttttgcatcagaaagtcaggaatatagtcatgaaaaggggtcatatggcagctccaaccatcctgatttctcacttcctaaagaagaaagaagtatacaacatggtaaacaaacattccaaaattttgcaactcatgggaaagatgacgattttgcaacattagagcagctcattgaagatttaacaaaagagaagttttccttacaacgatctcttcagaaatctcaagagctagcagaaactttggccacagataactctgcactaactgacaagttcaaccaacaggcacatgtaatcagccagttgacatctgacatggagagattgcaggaagaaattcaagctcaattgctggctctggagtctgtcaggaccgagtatgctaatgcacaactagaatgcagtgctgcagatgagagggcaaaagtacttgcagctgaagtcattctactagaagataaggctttgagactgagatcaagtgagctaaaacttgaaaaggaagttgaaggtttgcattctgagatttctgcttacaggcgcaaagtttctagtctagaaaaggagcgccagcatcttcaatccactgttgaagctcttcaagaagaaaagaagctcctatattctaaattgaggaacattcctgtgaatgagagggcaactactgtagagaaaccttcagttgataaaaaagatgcatcaaccgtgacagaagatttagatactggggaaatcagctcttcagagacactgaccagcactgttgacatattggaagacgctggaacatctgttttgcgttccaacattgtgtctgattttccttcctcggaacaggtctcatctagcattccagatgatcagcttagaatgattgacaacatcaattctttgatgtcagagttagcagtggagagagaagaactgctgcgagcactgagaattgagtcatccaactgctccaagctgaaggaattgaacaaggacctaacacaaaagctggaggttcagacacagaggcttgaactattgacttctcaaaggatggctaacgagaatgccctggcgaaaccaattgacacacgccccatcaacgaggcaacaatgtatgcggatgaaggagacgaggttgttgaacgggtgcttggctggataatgaagctcttcccaggtgggccaaagcggcgaaccagcaagcttctgtaatgaaaatagagctcctagtataccagatatttcttccatttagggcctgtttagatgaaagggggttgcgctagcagcacaaggtatttagttcaaatttgaactaaatcttaactaatctgttccaaatccccgacatccaaacatgccttttatatatatacattttttgtttgcccggttttgctgatagcatggtgagaagctgtatattggagccattcgatgtaaccattcttttttttgttagaagataatgtaattccctggagtatggggcggcagctgtattggcaacgaaaagattaatcgcaaagaatatacccttttgtatcca

SEQ ID NO: 115907 - DNA, 3148 bp, Zea Mays
aggaactcaaaccggtcggactccacgacgagtcgacgacgcacacaaaaaaaaaacagcaggcgaggcgggatttagaagctgcgcagcgcgcatccctcccccaatcccgacccgacccgaccccgtccccgtcgccagatctcgcgccccctccccggggctcgatcggatcagcggcggccggtgatacggggacggggagatctcgccgaggtttgggccgggccgggccgggctggtgggagcaggggagccatggcgtcggcgcaggcgccgtcctccgccgccgcgccgtcgcgcaaggaccatctcgaggccgggaagaagcggctcgagcagttccgcaagaaaaaagcggcgaagaaggccaatgcagctggtgcagagcaggcaaaagtgcctgctcctgatgtagagccaaaccaagcgagcacgtcttcggtgccatgggctgtatatgagaatggcccagagagtgcttccagcggtgcagaattcctgtcaaatgctccggtcaatgtatatacttctgttggtgttagtagtgttagaccccagcaagatgctgttactgatggaggaagtaagttctatgggaacttaagcttctctgatcttgttaatggtcatcatgagaactggagaggcgatgaagcccgtaaaagggatgagcacagccctgacaaggatgtgcaatcaacatctaaattaagtgcctttgggaacagcagtttaactttaccttctactgacaacatgccaagttggggaagaatttctttatcaagtcaagtacatgataccaagcaatctagttcatattcatccagcaccctttttggaaagtctgaaaatgcttactctcaggactactccacaaagagtgatacctctagtcagttgagagatacctccaaagactcttcccaagtggagcaatctctgtatgccagcactcgggattatggcaatgccttcaatagttcaaggactattgttactgtagagcatgatacaaatgttggaataactcggacatctgcagattccgcacctggtgttaattttgaaagacaggatccttttctgtcatctggttatccaactacatacactcgttcaaggccatcgtttcttgattcaattggagtacaaagagtccctccaacaactcaagcctcatatagggagcctgcaaaggctaatcaactatcccacaattcgaattatcagagttcatttgtgaagcaatcaaatcaacaacccacttcaagtaatgctgcagatatttcttttgcatcagaaagtcaggaatatagtcatgaaaaggggtcatatggcagctccaaccatcctgatttctcacttcctaaagaagaaagaagtatacaacatggtaaacaaacattccaaaattttgcaactcatgggaaagatgacgattttgcaacattagagcagctcattgaagatttaacaaaagagaagttttccttacaacgatctcttcagaaatctcaagagctagcagaaactttggccacagataactctgcactaactgacaagttcaaccaacaggcacatgtaatcagccagttgacatctgacatggagagattgcaggaagaaattcaagctcaattgctggctctggagtctgtcaggaccgagtatgctaatgcacaactagaatgcagtgctgcagatgagagggcaaaagtacttgcagctgaagtcattctactagaagataaggctttgagactgagatcaagtgagctaaaacttgaaaaggaagttgaaggtttgcattctgagatttctgcttacaggcgcaaagtttctagtctagaaaaggagcgccagcatcttcaatccactgttgaagctcttcaagaagaaaagaagctcctatattctaaattgaggaacattcctgtgaatgagagggcaactactgtagagaaaccttcagttgataaaaaagatgcatcaaccgtgacagaagatttagatactggggaaatcagctcttcagagacactgaccagcactgttgacatattggaagacgctggaacatctgttttgcgttccaacattgtgtctgattttccttcctcggaacaggtctcatctagcattccagatgatcagcttagaatgattgacaacatcaattctttgatgtcagagttagcagtggagagagaagaactgctgcgagcactgagaattgagtcatccaactgctccaagctgaaggaattgaacaaggacctaacacaaaagctggaggttcagacacagaggcttgaactattgacttctcaaaggatggctaacgagaatgccctggcgaaaccaattgacacacgccccatcaacgaggcaacaatgtatgcggatgaaggagacgaggttgttgaacgggtgcttggctggataatgaagctcttcccaggtgggccaaagcggcgaaccagcaagcttctgtaatgaaaatagagctcctagtataccagatatttcttccatttagggtgtgtttggcatggctctgctccaccccagagcagctctactctaaaactctgggtggagcagctctgctccagagtttagattgtttctcataaccagtgacaatggcgggtaaataactcaaaactccatgactaggttgcttttttggagttttcagagcagcaaaagaggtactccaaaaaattgtactgcaactccaaaaactccatagagtttacaactctggagttagggtgtttggcatgctctggccagctcctccttggagttttgctctggagccatgccaaacaggcccttaaggcctgtttagatgaaagggggttgcgctagcagcacaaggtatttagttcaaatttgaactaaatcttaactaatctgttccaaatccccgacatccaaacatgccttttatatatatacattttttgtttgcccggttttgctgatagcatggtgagaagctgtatattggagccattcgatgtaaccattcttttttttgttagaagataatgtaattccctggagtatggggcggcagctgtattggcaacgaaaagattaatcgcaaagaatatacccttttgtatcc

SEQ ID NO: 115908 - DNA, 2840 bp, Zea Mays
aggaactcaaaccggtcggactccacgacgagtcgacgacgcacacaaaaaaaaaacagcaggcgaggcgggatttagaagctgcgcagcgcgcatccctcccccaatcccgacccgacccgaccccgtccccgtcgccagatctcgcgccccctccccggggctcgatcggatcagcggcggccggtgatacggggacggggagatctcgccgaggtttgggccgggccgggccgggctggtgggagcaggggagccatggcgtcggcgcaggcgccgtcctccgccgccgcgccgtcgcgcaaggaccatctcgaggccgggaagaagcggctcgagcagttccgcaagaaaaaagcggcgaagaaggccaatgcagctggtgcagagcaggcaaaagtgcctgctcctgatgtagagccaaaccaagcgagcacgtcttcggtgccatgggctgtatatgagaatggcccagagagtgcttccagcggtgcagaattcctgtcaaatgctccggtcaatgtatatacttctgttggtgttagtagtgttagaccccagcaagatgctgttactgatggaggaagtaagttctatgggaacttaagcttctctgatcttgttaatggtcatcatgagaactggagaggcgatgaagcccgtaaaagggatgagcacagccctgacaaggatgtgcaatcaacatctaaattaagtgcctttgggaacagcagtttaactttaccttctactgacaacatgccaagttggggaagaatttctttatcaagtcaagtacatgataccaagcaatctagttcatattcatccagcaccctttttggaaagtctgaaaatgcttactctcaggactactccacaaagagtgatacctctagtcagttgagagatacctccaaagactcttcccaagtggagcaatctctgtatgccagcactcgggattatggcaatgccttcaatagttcaaggactattgttactgtagagcatgatacaaatgttggaataactcggacatctgcagattccgcacctggtgttaattttgaaagacaggatccttttctgtcatctggttatccaactacatacactcgttcaaggccatcgtttcttgattcaattggagtacaaagagtccctccaacaactcaagcctcatatagggagcctgcaaaggctaatcaactatcccacaattcgaattatcagagttcatttgtgaagcaatcaaatcaacaacccacttcaagtaatgctgcagatatttcttttgcatcagaaagtcaggaatatagtcatgaaaaggggtcatatggcagctccaaccatcctgatttctcacttcctaaagaagaaagaagtatacaacatggtaaacaaacattccaaaattttgcaactcatgggaaagatgacgattttgcaacattagagcagctcattgaagatttaacaaaagagaagttttccttacaacgatctcttcagaaatctcaagagctagcagaaactttggccacagataactctgcactaactgacaagttcaaccaacaggcacatgtaatcagccagttgacatctgacatggagagattgcaggaagaaattcaagctcaattgctggctctggagtctgtcaggaccgagtatgctaatgcacaactagaatgcagtgctgcagatgagagggcaaaagtacttgcagctgaagtcattctactagaagataaggctttgagactgagatcaagtgagctaaaacttgaaaaggaagttgaaggtttgcattctgagatttctgcttacaggcgcaaagtttctagtctagaaaaggagcgccagcatcttcaatccactgttgaagctcttcaagaagaaaagaagctcctatattctaaattgaggaacattcctgtgaatgagagggcaactactgtagagaaaccttcagttgataaaaaagatgcatcaaccgtgacagaagatttagatactggggaaatcagctcttcagagacactgaccagcactgttgacatattggaagacgctggaacatctgttttgcgttccaacattgtgtctgattttccttcctcggaacaggtctcatctagcattccagatgatcagcttagaatgattgacaacatcaattctttgatgtcagagttagcagtggagagagaagaactgctgcgagcactgagaattgagtcatccaactgctccaagctgaaggaattgaacaaggacctaacacaaaagctggaggttcagacacagaggcttgaactattgacttctcaaaggatggctaacgagaatgccctggcgaaaccaattgacacacgccccatcaacgaggcaacaatgtatgcggatgaaggagacgaggttgttgaacgggtgcttggctggataatgaagctcttcccaggtgggccaaagcggcgaaccagcaagcttctgtaatgaaaatagagctcctagtataccagatatttcttccatttagggtgtgtttgatgaaagggggttgcgctagcagcacaaggtatttagttcaaatttgaactaaatcttaactaatctgttccaaatccccgacatccaaacatgccttttatatatatacattttttgtttgcccggttttgctgatagcatggtgagaagctgtatattggagccattcgatgtaaccattcttttttttgttagaagataatgtaattccctggagtatggggcggcagctgtattggcaacgaaaagattaatcgcaaagaatatacccttttgtatcc

SEQ ID NO: 115909 - DNA, 2427 bp, Zea Mays
agtcgtccccttctaacctccagatctggccactcccacatgccccagtctcctaaaccctacacatctctctcggccacggtaattgccatcgccatggccgggaggcgcccggcaccggtggccatcctccttctcctcgccgcggcattcgcccccatctcctccgccgttcgcccagtctccgacgcgcacagatccgctgccgtggagcttttcgccccctccgctgacggatccttcggcgatttggagagtacgtatgaggcggtgaggactttccagatactcgggctggagaactataagagtctgtctgggaaggcgtgcaagtttgccgcggagaacctggcttcccccggttccaccacgaaagatctgttccatgctgtccggatcagtggcgcgcttggatgcgctgttgatgccggcgtgtacgatggtgttgtggcgaggctcaaggcagtgattcaggatactaattccctgttggaattatactatcctgtgggaggtttgcttggcatcaaggaacaaggccataatgttgttctgtctgatgcagaaggtacattccatgccactaaggcacttagccaaagtgacgggagatggcgttatgacactgacagtgctgagtctagcacatttgctgctggtattgcactagaagcattagcaggtattgtttcactggcagatgcagcggttgacccatccatgatgggagtggttaaaaatgacgtcgtgaagctgtttgacaccatcaagagctacaatgatgggaccttctactttgatgaaaagcatgttgatgctactgaatacaagggccctataatcacatctgcttcagtggtgcggggtgtcacctcttttgcagctgttgtttctggaaaattgaatatccctgccgagaaaatacttggcctggcaaaattcttccttggtattgggctcccaggtagcgcaaaggattgctttaatcagattgagtctttgtcattcttggagaacaatagggtcttcgttccgttgatactatcactttcttccaaagtattttcattgacttcgaaagatcagctcaaggttgaagttacatcagtttttggatctgctgcaccttcactcaaagtgaatcttgtgcaagtgttgggatctgactctaaagtcatcaccagtgagaacaaggaacttcaatacgaccttgacaacaatgtccattacttggacattgctccattgaaaattgatgttgggaaatactcgatagtttttgagatttcacttcaggaaccagagcaggagactgtttatgctactggagggagaaacactgaaagtgtaattgtcacaggactgatcaaagttgacaaggcagaaataggaatctctgacaatgatgctggggccgtggagtctgtccaaaagttagatcttctgaaagatacaaaagtgtctctttctgcaaaccatctgcagaaactgtgtttatcttttcaactaaccacaccgcttgggcacacatttaaacctcaccaggtgttcttgaaattgaggcatgagagtaaggttgaacacttattcgtggtacctggctctgcaaggcagttcaaaattgttcttgacttcctaggtttggtggagaaattttactacctttctggaagatatgaccttgagcttaccgttggtgatgctgtaatggaaaattcatttctacgacctcttggccatttggagttggacctgccagatgccccagaaaaagccccacgtcctcctgcacaagctgttgacccattctcaaaatttgggccaaaggcagagatatcacatatattccgcgcaccagagaagaggccacccaaggagctctcgctagcgttcacgggtctcacgcttctgccgtttattggattcttgatagggctcgttcgtcttggagtgaacttgaagaacttcccgtccttgccaggaccggccgcatttgcctcacttttccatgctgggataggagcagtcctgatgctctacgttctcttctggatcaagttggaccttttcacaactctcaagtacctcggcttcctcggcatcttccttgtgtttgtgggccatagggctctatcctacctttcctcggtgtcgacaaaacagaagacggcatgagtggacagagttttttccgaccatccatttcttgagggggggccattgcaggcccttgggtgtcttatgagggagggctcggtttatttcagttggctttgcagaatactgataactagaaaaagtagtaggacctcaccttcgtgtattatgatgatgcacatacaattttctgagtagaatggatgttgaatcatagaactaatgaataatatgaacactcgccttcgccccaagtgctagtttggaaac

SEQ ID NO: 115910 - DNA, 1771 bp, Zea Mays
agtcgtccccttctaacctccagatctggccactcccacatgccccagtctcctaaaccctacacatctctctcggccacggtaattgccatcgccatggccgggaggcgcccggcaccggtggccatcctccttctcctcgccgcggcattcgcccccatctcctccgccgttcgcccagtctccgacgcgcacagatccgctgccgtggagcttttcgccccctccgctgacggatccttcggcgatttggagagtacgtatgaggcggtgaggactttccagatactcgggctggagaactataagagtctgtctgggaaggcgtgcaagtttgccgcggagaacctggcttcccccggttccaccacgaaagatctgttccatgctgtccggatcagtggcgcgcttggatgcgctgttgatgccggcgtgtacgatggtgttgtggcgaggctcaaggcagtgattcaggatactaattccctgttggaattatactatcctgtgggaggtttgcttggcatcaaggaacaaggccataatgttgttctgtctgatgcagaaggtacattccatgccactaaggcacttagccaaagtgacgggagatggcgttatgacactgacagtgctgagtctagcacatttgctgctggtattgcactagaagcattagcaggtattgtttcactggcagatgcagcggttgacccatccatgatgggagtggttaaaaatgacgtcgtgaagctgtttgacaccatcaagagctacaatgatgggaccttctactttgatgaaaagcatgttgatgctactgaatacaagggccctataatcacatctgcttcagtggtgcggggtgtcacctcttttgcagctgttgtttctggaaaattgaatatccctgccgagaaaatacttggcctggcaaaattcttccttggtattgggctcccaggtagcgcaaaggattgctttaatcagattgagtctttgtcattcttggagaacaatagggtcttcgttccgttgatactatcactttcttccaaagtattttcattgacttcgaaagatcagctcaaggttgaagttacatcagtttttggatctgctgcaccttcactcaaagtgaatcttgtgcaagtgttgggatctgactctaaagtcatcaccagtgagaacaaggaacttcaatacgaccttgacaacaatgtccattacttggacattgctccattgaaaattgatgttgggaaatactcgatagtttttgagatttcacttcaggaaccagagcaggagactgtttatgctactggagggagaaacactgaaagtgtaattgtcacaggactgatcaaagttgacaaggcagaaataggaatctctgacaatgatgctggggccgtggagtctgtccaaaagttagatcttctgaaagatacaaaagtgtctctttctgcaaaccatctgcagaaactgtgtttatcttttcaactaaccacaccgcttgggcacacatttaaacctcaccaggtgttcttgaaattgaggcatgagagtaaggttgaacacttattcgtggtacctggctctgcaaggcagttcaaaattgttcttgtgagtatctctacactggaattggcttcgttagttctttggatgctcataattcattgtggcaatgtagccaatactctagaccaggcactgaactatcttgagaagttgcacctatataccaacaaagtttttgaacctg

SEQ ID NO: 115911 - DNA, 117 bp, Zea Mays
tttttttataagttttattttgtattttatagtatttctctccttctattctatttattcaaagtaggtattaaatcctcaatttgaatattgatttatttatgtcaccaaatgcac

SEQ ID NO: 115912 - DNA, 141 bp, Zea Mays
atggactacatggtgtttgaggttgctgaattggatggagcaacaatgatttatcacactaacagtaaaatgaaaggaggtggggttcgaacccatgccctgatggaagaaggacgggagatactgggtgaagctatctaa

SEQ ID NO: 115913 - DNA, 398 bp, Zea Mays
taactttttgagtaccagtgatgtaaagggacacaagctctagcaatgtttctgcttctcatgtaggccgtgtaagacgtcgcaaacatccaactaaggctaccacagatgggaatagagctaatggacaaccattgcttgtcaatgatcagaacaaatataaatcaatgcttacccatacgtattctacagtatggatgattagaggctttgcctttattatttatatgggtcatctatatatctgggctatggtggttgtgattcaaatatacatggcaagagaacttttcaacttactcagaaaatccagtgaagagaaacaactgccagggttcagggtcctgaattggcacattttttcacggcaatgttgtacacttatgggcgctttctta

SEQ ID NO: 115914 - DNA, 1305 bp, Zea Mays
atggctcgacagctcgtctctgtcgtctatggcggcggcggcgcagcagcagcagcgggagaaggcggcgtcgcaggtgtggcaggcggtggtggggtggatcggcttccttgttcaggttctgcttcagatccttcggggcacgccgtcctgcgcccagctctttccttcgtcggcgtccggtacccgctcctctccgggcccacggcctcgaacccgtcgtcggaggtggccttcatgccgctccgctccgaggtcccagttgacgcggcacctgccccgacacctgtgcctgagcccgtgggccgcctcacgggcaccggtgttgtactacgttctcctgacgttgcaggacagcgtgcacaaggtcttctacgccatcgtcgaggccgctgcagttcgcgcagacaacaaccatcttggaggtatctaattccaatattgtatgtctcggttgaacttgtgaaggcgttgcaagcacatatcattaactgggatattcatatgtttgatgaggagatcggcaataccactcaggttgtcgcgctcatcgcctcgagcacccccggcgacgaggaggctgctgcgacgaccgcgccacgttcctggttggcaaggtacaaacttgtcatcgtggctagggacaaaacgggtgaaactgagtttgctatgtttggtcggataacacagcatgtcagcatctcgtgcggaaaatggctgcagcgaactctaaggtgggtggtggaggaggaggagagcgagggaggacgacgaggctgcctggcggaggcacgaggggaaggtgagcgtcacctgcaaggccacaatcttggtgagactgccaccacgagcgtgccccacgaccgccaccaggatctcaagctcgccatcgatgacttcgacgaggagttgatcgaccctgagctacgcttctcgttccagcgcaacaacaaggtttgtggagtggacttgactgacaaagtagtggacataattttccatgtatttgatgctaactgtgatggtaacctaagctcagaggagttcttgaggaagtgcttgttcagcatgatgagtgatcttccttctgtcttagaagcattcgtggacaggaaacacaataaagataggtctggggttgatagcagcggcaagtccagacactcatcaaatagaggaaaagatggccatgccaagagttccagggcagcacctcctgccgccaatgagtatgacgaagacgaggaggagcacacgaagaccttttgtggaagctatggcgacctttacattggcagcaactaa

SEQ ID NO: 115915 - DNA, 244 bp, Zea Mays
cttaggattatttaatccagattatataatctggggggtaaacaaacaggcccttaatctctgatgatggaccgtgctttgtttcctgaattaatacatgccaactgtttagttttgtagtatggaatgtggatttatttaagacaagttgtcaaatcttgtgtattcggtccgatgctgatatgttaattgtagtgtgtggctgtgctgtggacttgagagaaaatactggaaacataatttt

SEQ ID NO: 115916 - DNA, 1052 bp, Zea Mays
acaacagtaccacgcgacgttaaatacgggcacaactcgtgaacgacggcggcgcctagcggtgacatcgtcccctcgactcctcctccatccccgacgcggcggcgccagcctgcagattagcttattaccaccatgggtaaaagaaagcggtcgtcatgtcaacgagataaccataatgattctctagccagcaaaataatgagaactagaatcccagatcttcctgaggttgttgatgcaccaatgctgcctaccaaattcctctgtcttaagcacctgaccgttcgcttgtcatcaggaacaaccattacccaggcatttgactatttctctttggtttctttccttgatgcgtctccttccttggagacttttatattaaatgtgagtgggaaaggcatgatccatgaatcgatttctgcacatccacaattgaggcacacacctgagcaccaccatggccacctcaggagtgtgaagatatgtggtttcagctctgagaaaagcttatttgaactaacacgttatattcttgagaatgcggtgtcactgaaatttcttacactggacaccttttatgggtatcggtgtggtcagggtaagtgtacaagttgtttacccacgcctgatgtttttatggatgtttccaaagcgatctcaggtatcaagacatacatcgagaacaaagttccatccacagttaaactaactgttctggagccttgcagccggtgccatgttagaagagtaatttagacaccatcctagtcatgctacgtcacttccatttaatttaatttgagaagaaccatgcttgtttcctggattatttatagctgtgtcccgatgcacgcaaatttaatctctgatgatggaccgtgctttgtttcctgaattaatacatgccaactgtttagttttgtagtatggaatgtggatttatttaagacaagttgtcaaatcttgtgtattcggtccgatgctgatatgttaattgtagtgtgtggctgtgctgtggacttgagagaaaatactggaaacataatttt

SEQ ID NO: 115917 - DNA, 944 bp, Zea Mays
gtgaaatacgggcacaacagtaccacgcgacgttaaatacgggcacaactcgtgaacgacggcggcgcctagcggtgacatcgtcccctcgactcctcctccatccccgacgcggcggcgccagcctgcagattagcttattaccaccatgggtaaaagaaagcggtcgtcatgtcaacgagataaccataatgattctctagccagcaaaataatgagaactagaatcccagatcttcctgaggttgttgatgcaccaatgctgcctaccaaattcctctgtcttaagcacctgaccgttcgcttgtcatcaggaacaaccattacccaggcatttgactatttctctttggtttctttccttgatgcgtctccttccttggagacttttatattaaatgtgagtgggaaaggcatgatccatgaatcgatttctgcacatccacaattgaggcacacacctgagcaccaccatggccacctcaggagtgtgaagatatgtggtttcagctctgagaaaagcttatttgaactaacacgttatattcttgagaatgcggtgtcactgaaatttcttacactggacaccttttatgggtatcggtgtggtcagggtaagtgtacaagttgtttacccacgcctgatgtttttatggatgtttccaaagcgatctcaggtatcaagacatacatcgagaacaaagttccatccacagttaaactaactgttctggagccttgcagccggtgccatgttagaagagtaatttagacaccatcctagtcatgctacgtcacttccatttaatttaatttgagaagaaccatgcttgtttcctggattatttatagctgtgtcccgatgcacgcaaatttagggcctgtttgtttaccccaatagattatataatctgaattattttcggaggattatataatctgga

SEQ ID NO: 115918 - DNA, 771 bp, Zea Mays
atatatatatatatatatatatatatacactatttaaagatagaagttgatgatatgaatgggttacatttgtgattatctagtgcataagttatctgagatgcatggcgtgtttttgtgcaggttgttgatgcaccaatgctgcctaccaaattcctctgtcttaagcacctgaccgttcgcttgtcatcaggaacaaccattacccaggcatttgactatttctctttggtttctttccttgatgcgtctccttccttggagacttttatattaaatgtgagtgggaaaggcatgatccatgaatcgatttctgcacatccacaattgaggcacacacctgagcaccaccatggccacctcaggagtgtgaagatatgtggtttcagctctgagaaaagcttatttgaactaacacgttatattcttgagaatgcggtgtcactgaaatttcttacactggacaccttttatgggtatcggtgtggtcagggtaagtgtacaagttgtttacccacgcctgatgtttttatggatgtttccaaagcgatctcaggtatcaagacatacatcgagaacaaagttccatccacagttaaactaactgttctggagccttgcagccggtgccatgttagaagagtaatttagacaccatcctagtcatgctacgtcacttccatttaatttaatttgagaagaaccatgcttgtttcctggattatttatagctgtgtcccgatgcacgcaaatttagggcctgtttgttta

SEQ ID NO: 115919 - DNA, 773 bp, Zea Mays
gtgaaatacgggcacaacagtaccacgcgacgttaaatacgggcacaactcgtgaacgacggcggcgcctagcggtgacatcgtcccctcgactcctcctccatccccgacgcggcggcgccagcctgcaggttgttgatgcaccaatgctgcctaccaaattcctctgtcttaagcacctgaccgttcgcttgtcatcaggaacaaccattacccaggcatttgactatttctctttggtttctttccttgatgcgtctccttccttggagacttttatattaaatgtgagtgggaaaggcatgatccatgaatcgatttctgcacatccacaattgaggcacacacctgagcaccaccatggccacctcaggagtgtgaagatatgtggtttcagctctgagaaaagcttatttgaactaacacgttatattcttgagaatgcggtgtcactgaaatttcttacactggacaccttttatgggtatcggtgtggtcagggtaagtgtacaagttgtttacccacgcctgatgtttttatggatgtttccaaagcgatctcaggtatcaagacatacatcgagaacaaagttccatccacagttaaactaactgttctggagccttgcagccggtgccatgttagaagagtaatttagacaccatcctagtcatgctacgtcacttccatttaatttaatttgagaagaaccatgcttgtttcctggattatttatagctgtgtcccgatgcacgcaaatttagggcctgtt

SEQ ID NO: 115920 - DNA, 1704 bp, Zea Mays
gtgaaatacgggcacaacagtaccacgcgacgttaaatacgggcacaactcgtgaacgacggcggcgcctagcggtgacatcgtcccctcgactcctcctccatccccgacgcggcggcgccagcctgcagattagcttattaccaccatgggtaaaagaaagcggtcgtcatgtcaacgagataaccataatgattctctagccagcaaaataatgagaactagaatcccagatcttcctgaggacatttggtctcatgtacattccctaatgccaatgcgtgatgctggccgtgctgcttgcctatctcgtgcctttttacgttcctggagacgtcatcctaatcttatctttaataaggatacgattggcatgaaaaaaaattcatatggagagaatttccaccacaaaattagccgcattctcaggaatcactctggcattagtttgaaaacattcaagcttgactacagtggcatgtgtgggttcgatggaactagttatcttgacagttggcttcaggctgctcttaatccagggattgaagaagtcaccctctggttgttccatacaaggagaatatatgaattcccatgctcacttttatctgatggggttcgaaattcacttcggtaccttaaacttcgttgttgtgctctccgtcccacagttgaacttgcccccatgagaagcctaacaagtttacatttgtcctttgtgagcattaaatggaatgggttaaagcgcctcctttccaactcccttgctctggaggaattagagctagtatgttgtgacaagatcgtttgcctcaagataccttctgccctgcagcgtctcaacagccttaatatttttggatgctcggccctcaaagtgctagagagcaaagctccaaatctctctagtctttctctttcagattttggaggcgggctagtcttctcacttgtgaaaacattgcaaatgaagaaactaatcactgaaagtactgtctatgatgctcgtaccaggctgccatccattatgcccaatcttgaaactcttgtcataaactcatgtcagcaggttgttgatgcaccaatgctgcctaccaaattcctctgtcttaagcacctgaccgttcgcttgtcatcaggaacaaccattacccaggcatttgactatttctctttggtttctttccttgatgcgtctccttccttggagacttttatattaaatgtgagtgggaaaggcatgatccatgaatcgatttctgcacatccacaattgaggcacacacctgagcaccaccatggccacctcaggagtgtgaagatatgtggtttcagctctgagaaaagcttatttgaactaacacgttatattcttgagaatgcggtgtcactgaaatttcttacactggacaccttttatgggtatcggtgtggtcagggtaagtgtacaagttgtttacccacgcctgatgtttttatggatgtttccaaagcgatctcaggtatcaagacatacatcgagaacaaagttccatccacagttaaactaactgttctggagccttgcagccggtgccatgttagaagagtaatttagacaccatcctagtcatgctacgtcacttccatttaatttaatttgagaagaaccatgcttgtttcctggattatttatagctgtgtcccgatgcacgcaaatttagg

SEQ ID NO: 115921 - DNA, 1360 bp, Zea Mays
aggcgatcagggctaacgacgcgacgcgatcagtacgatcagataactgatcgttcgattagtcggcaattaaccacaactaatcgtccgatcaacgcatggacgttgaaattttggcccagtagcatttcggtccagcggctcagcccatattccacttatcccaattcccacgtgaacacaggcagctgcaacgcgtgaaatacgggcacaacagtaccacgcgacgttaaatacgggcacaactcgtgaacgacggcggcgcctagcggtgacatcgtcccctcgactcctcctccatccccgacgcggcggcgccagcctgcaggtacgtttccttcccagtctccatggctccaccagggcaccagtccatctcgatcttctccccagtctccagtggcccagtcccgttcatctctacagtctccctcccatcttgatctcgcgtcagttccacaaaaaaatctagatctcgcgtcgcatcagcgatgtatcctgttcccggcttccgggggggacggtgttctttcggggctacatgtacagaaccaatctcccctgtttaatttattttgttttggcttccataaccattgtttttgtgtggcagattagcttattaccaccatgggtaaaagaaagcggtcgtcatgtcaacgagataaccataatgattctctagccagcaaaataatgagaactagaatcccagatcttcctgaggttgttgatgcaccaatgctgcctaccaaattcctctgtcttaagcacctgaccgttcgcttgtcatcaggaacaaccattacccaggcatttgactatttctctttggtttctttccttgatgcgtctccttccttggagacttttatattaaatgtgagtgggaaaggcatgatccatgaatcgatttctgcacatccacaattgaggcacacacctgagcaccaccatggccacctcaggagtgtgaagatatgtggtttcagctctgagaaaagcttatttgaactaacacgttatattcttgagaatgcggtgtcactgaaatttcttacactggacaccttttatgggtatcggtgtggtcagggtaagtgtacaagttgtttacccacgcctgatgtttttatggatgtttccaaagcgatctcaggtatcaagacatacatcgagaacaaagttccatccacagttaaactaactgttctggagccttgcagccggtgccatgttagaagagtaatttagacaccatcctagtcatgctacgtcacttccatttaatttaatttgagaagaaccatgcttgtttcctggattatttatagctgtgtcccgatgcacgcaaatttag

SEQ ID NO: 115922 - DNA, 2440 bp, Zea Mays
cacggactgcagccagtccggcatcgccttcttcgtctccggatgtggcaaccgcctgctgctgctggctgctgccgtctccagatctcccaccgcctcgtcgtccttaccctgtccgttcccgcacgccactagcaaaagccacacccaacaaaaggtaaaccaccgcgtctccgcccgccgccgcccgcagatccatcccctcccggcctccctagcctttcccctcgagcacgtcagcgccctcgccctgctctgtcggccggccaagctcctcaccggcgccatgaacccgtatgatctccgcttcgctgacccctcatcctaccacgacaggcgcagcgacttgaccgtggctcctacgttcgctccgccggctcccgtggctgcggcgaacctgaacccttacgccgccgcctacccgctgcctgtgcccgttcccgtgcccgcggcccccgcgggcggcgactaccagcgctacgggcagggaggcagaggccgtggtggcggtggcagaggcggtggaggagggtacggaggtggcggcagaggaggaggtcgcgggagggacgggcttgactcgctcgccctccctaagccggactttcggagcctgataccgttcgagaaaaacttctacgtggagtgtccctccgtccaggcaatgtcggaggcggatgtggcgcagtaccgccgcctccgggatatcaccatcgagggccgggatgtgcccaagccggttagatacttccaggaagccaacttcccagattactgcatgcaagctattgccaaatctggatttgtggagccaacacctattcaatctcaaggttggcctatggctttgaagggtagggacctgattggtatcgctcaaacaggctcagggaaaacattatcttatctgttacctgggttggttcatgttggtgcccagcctcggctagaacaaggcgatggcccaattgtattaattctcgctcccacgagagaactggctgttcaaatacaggaagaatctacaaaatttggatcatattcaagaactagaagcacatgtgtctatggtggtgcacctaagggtccacaaatacgggaccttagaagaggagttgaaattgtcattgcaactcctggccggttgattgatatgctggaagctggtcacacaaacctacgtagagtgacataccttgtgttggatgaggcggaccggatgctagatatggggtttgagccccaaattcggaaaatagtagcacagatccgcccagacaggcaaaccttgtactggagtgccacatggcctagagaagttgaagccttagcaagacagtttctacaaaatccttacaaggtaatcataggctcacctgaacttaaagctaatcattccatacaacaaattgttgaagttatttcagatcatgagaagtatccaagactcagtaagctcttgtctgatctaatggatgggagccgtatcttgatattcttccaaacaaaaaaggattgcgataagatcacccggcagcttagaatggatgggtggccagcattatctatacatggtgataaagctcaagctgaacgggactatgttcttgcagagtttaagagcggcaagagccccataatggctgccacagatgtggcagcacgtggtcttgatgtgaaggacataaagtgtgtgataaattatgattttccaacaactcttgaagattatattcacaggataggtcgaactggccgtgctggtgctagcggaactgcatttacttttttcacacacgcaaatgcaaagttctcaaggaatctagtgaagattctgcgagaagctggccaagttgtgaatcctgccttagaatccatgtccaggtcttcgaactcaacgggaggaggcaattttcggtcgagaggcagaggtgggtttggtaaccggggccatatgtctggatcaaatacctttcctttaggaggaagaaggccatattgatgtgtgcaaaagaactgtgggagtatgggactatttgtatactactcggcattaagtgcattctttgggaaatttctgagaaatttcccctactaccaggattgataacaccatcgattttcgctacagtacctggagcttcttatatgaaagaacaacacatcaactatctagcaacagcatatgcattccattcagatatttcttttggaaggaccctgtcttgttttagtggagtccctgtgatcgtttaaagtcgtctgtatacttgtactgaacttcttgtggtgttactgttaggatttatggttgctctctattggtgtgcggtgttactgaacaaatttagttaagaagttaggcatttccatatttaatctgattctgaaataaactagcaaatttatgatgtacactttataatagtagctaatatat

SEQ ID NO: 115923 - DNA, 3642 bp, Zea Mays
cacggactgcagccagtccggcatcgccttcttcgtctccggatgtggcaaccgcctgctgctgctggctgctgccgtctccagatctcccaccgcctcgtcgtccttaccctgtccgttcccgcacgccactagcaaaagccacacccaacaaaaggtaaaccaccgcgtctccgcccgccgccgcccgcagatccatcccctcccggcctccctagcctttcccctcgagcacgtcagcgccctcgccctgctctgtcggccggccaagctcctcaccggcgccatgaacccgtatgatctccgcttcgctgacccctcatcctaccacgacaggcgcagcgacttgaccgtggctcctacgttcgctccgccggctcccgtggctgcggcgaacctgaacccttacgccgccgcctacccgctgcctgtgcccgttcccgtgcccgcggcccccgcgggcggcgactaccagcgctacgggcagggaggcagaggccgtggtggcggtggcagaggcggtggaggagggtacggaggtggcggcagaggaggaggtcgcgggagggacgggcttgactcgctcgccctccctaagccggactttcggagcctgataccgttcgagaaaaacttctacgtggagtgtccctccgtccaggcaatgtcggaggcggatgtggcgcagtaccgccgcctccgggatatcaccatcgagggccgggatgtgcccaagccggttagatacttccaggaagccaacttcccagattactgcatgcaagctattgccaaatctggatttgtggagccaacacctattcaatctcaaggttggcctatggctttgaagggtagggacctgattggtatcgctcaaacaggctcagggaaaacattatcttatctgttacctgggttggttcatgttggtgcccagcctcggctagaacaaggcgatggcccaattgtattaattctcgctcccacgagagaactggctgttcaaatacaggaagaatctacaaaatttggatcatattcaagaactagaagcacatgtgtctatggtggtgcacctaagggtccacaaatacgggaccttagaagaggagttgaaattgtcattgcaactcctggccggttgattgatatgctggaagctggtcacacaaacctacgtagagtgacataccttgtgttggatgaggcggaccggatgctagatatggggtttgagccccaaattcggaaaatagtagcacagatccgcccagacaggcaaaccttgtactggagtgccacatggcctagagaagttgaagccttagcaagacagtttctacaaaatccttacaaggtaatcataggctcacctgaacttaaagctaatcattccatacaacaaattgttgaagttatttcagatcatgagaagtatccaagactcagtaagctcttgtctgatctaatggatgggagccgtatcttgatattcttccaaacaaaaaaggattgcgataagatcacccggcagcttagaatggatgggtggccagcattatctatacatggtgataaagctcaagctgaacgggactatgttcttgcagagtttaagagcggcaagagccccataatggctgccacagatgtggcagcacgtggtcttggtatgatgatttatttgaatattaggattaggtagtagttccaagtgctcaagggtgataagtcggagggttgttgagctgcgattggttgagtgaactgaacttgtggattggtggtgtataccaaggtgccatcatgtcaaaggtagataatttccccccgtggtttacctcatttgagcgtgagcattggcagtgttacacaggcagttcaactttgagctatcatggtaatgttccctttccgaataagccttttagggagcctacatttggataaaatggaaatcctcaaaaagtagcatgcaaccgaatatgcatttcacactatagttgatttcttagcttgatttgaattccttgatccctgcatatctgaccattttggaacatttaggtattgtgttgctgccctcttcattcattctttgtccttgtaattgaattcttttcaatccaatagtctgcttttcttgcaagtatttttggcttacctttctacattttctttgtaaatccatgtttaatttgtttagaattaattggagcaataattcttttcagagatgtattgcaaaattttaggcataaaacatttgtatacaaatgacaatatcaatttcaaatatatttgtttgcacaaatgcacattcttcatgagtagcatgtccatggatctcctttgctttcccctagttttacatgaacctttagaaagtcgttctgctttctcaatcaagctcctcatcatcggtatcactgccaagtgtgaactggtcaaaaaggatggttgtaatcagcattcttttcagttgattcacgatagtgacctctgatgcagcaccttacacattacagcctacgttggactggcatgtcctacagaattttgtttgggttatggatattgatgctgttacattattggataagtggttacccaggcatgccagttgcagtcttccaacattttttgataaggctgagaggttaatcaccatcaattccacatccagcagtgattgatgcctggttcagtttttcagctccttcgacttgtgttttagaattcaaaagtgcagcactgtggactttttggtgcttgtctagaccatgtaccttctatggggatcgacaatgttgatgttccagcgtggtccagcatggtattcaggacaacacatcaattttgattaagtactgataatatttgttgattttgcagatgtgaaggacataaagtgtgtgataaattatgattttccaacaactcttgaagattatattcacaggataggtcgaactggccgtgctggtgctagcggaactgcatttacttttttcacacacgcaaatgcaaagttctcaaggaatctagtgaagattctgcgagaagctggccaagttgtgaatcctgccttagaatccatgtccaggtcttcgaactcaacgggaggaggcaattttcggtcgagaggcagaggtgggtttggtaaccggggccatatgtctggatcaaatacctttcctttaggaggaagaaggccatattgatgtgtgcaaaagaactgtgggagtatgggactatttgtatactactcggcattaagtgcattctttgggaaatttctgagaaatttcccctactaccaggattgataacaccatcgattttcgctacagtacctggagcttcttatatgaaagaacaacacatcaactatctagcaacagcatatgcattccattcagatatttcttttggaaggaccctgtcttgttttagtggagtccctgtgatcgtttaaagtcgtctgtatacttgtactgaacttcttgtggtgttactgttaggatttatggttgctctctattggtgtgcggtgttactgaacaaatttagttaagaagttaggcatttccatatttaatctgattctgaaataaactagcaaatttatgatgtaca

SEQ ID NO: 115924 - DNA, 2190 bp, Zea Mays
cacggactgcagccagtccggcatcgccttcttcgtctccggatgtggcaaccgcctgctgctgctggctgctgccgtctccagatctcccaccgcctcgtcgtccttaccctgtccgttcccgcacgccactagcaaaagccacacccaacaaaaggtaaaccaccgcgtctccgcccgccgccgcccgcagatccatcccctcccggcctccctagcctttcccctcgagcacgtcagcgccctcgccctgctctgtcggccggccaagctcctcaccggcgccatgaacccgtatgatctccgcttcgctgacccctcatcctaccacgacaggcgcagcgacttgaccgtggctcctacgttcgctccgccggctcccgtggctgcggcgaacctgaacccttacgccgccgcctacccgctgcctgtgcccgttcccgtgcccgcggcccccgcgggcggcgactaccagcgctacgggcagggaggcagaggccgtggtggcggtggcagaggcggtggaggagggtacggaggtggcggcagaggaggaggtcgcgggagggacgggcttgactcgctcgccctccctaagccggactttcggagcctgataccgttcgagaaaaacttctacgtggagtgtccctccgtccaggcaatgtcggaggcggatgtggcgcagtaccgccgcctccgggatatcaccatcgagggccgggatgtgcccaagccggttagatacttccaggaagccaacttcccagattactgcatgcaagctattgccaaatctggatttgtggagccaacacctattcaatctcaaggttggcctatggctttgaagggtagggacctgattggtatcgctcaaacaggctcagggaaaacattatcttatctgttacctgggttggttcatgttggtgcccagcctcggctagaacaaggcgatggcccaattgtattaattctcgctcccacgagagaactggctgttcaaatacaggaagaatctacaaaatttggatcatattcaagaactagaagcacatgtgtctatggtggtgcacctaagggtccacaaatacgggaccttagaagaggagttgaaattgtcattgcaactcctggccggttgattgatatgctggaagctggtcacacaaacctacgtagagtgacataccttgtgttggatgaggcggaccggatgctagatatggggtttgagccccaaattcggaaaatagtagcacagatccgcccagacaggcaaaccttgtactggagtgccacatggcctagagaagttgaagccttagcaagacagtttctacaaaatccttacaaggtaatcataggctcacctgaacttaaagctaatcattccatacaacaaattgttgaagttatttcagatcatgagaagtatccaagatgtgaaggacataaagtgtgtgataaattatgattttccaacaactcttgaagattatattcacaggataggtcgaactggccgtgctggtgctagcggaactgcatttacttttttcacacacgcaaatgcaaagttctcaaggaatctagtgaagattctgcgagaagctggccaagttgtgaatcctgccttagaatccatgtccaggtcttcgaactcaacgggaggaggcaattttcggtcgagaggcagaggtgggtttggtaaccggggccatatgtctggatcaaatacctttcctttaggaggaagaaggccatattgatgtgtgcaaaagaactgtgggagtatgggactatttgtatactactcggcattaagtgcattctttgggaaatttctgagaaatttcccctactaccaggattgataacaccatcgattttcgctacagtacctggagcttcttatatgaaagaacaacacatcaactatctagcaacagcatatgcattccattcagatatttcttttggaaggaccctgtcttgttttagtggagtccctgtgatcgtttaaagtcgtctgtatacttgtactgaacttcttgtggtgttactgttaggatttatggttgctctctattggtgtgcggtgttactgaacaaatttagttaagaagttaggcatttccatatttaatctgattctgaaataaactagcaaatttatgatgtaca

SEQ ID NO: 115925 - DNA, 1905 bp, Zea Mays
ccactgccttgttctttcttgctccgctccccacgcgtacgcgctctcgtggcgacgactgggtgatcgccgccgccgccgccgccaccacgcaccaccaggccttcaccggcgacaaacaccaccaacagacacaagtgcttcagtcattatagtgccagtaccattctgccagcgagttcctttgccacaaaaagataacactcggatatctcatggcaaaacctgggattttaggccgcagtgcacagagatcaaatgagggcatgcgaatcatattctcagcagttattggtgttatgctagggtacttgtttggcatttccttccctaccgttaatataacaaagcttcacttcccttccagcattatctcctatatcgaggacagaaactctggcatcacaacccaaacattattgaatcatgcatggacgtctgcagctactcataagaagaacaattcagcttctaactctgatgaaattcctaagatttatgttccaacaaaccctaaaggtgctgaaaggcttccaccgggcattgtagtgtctgaaacagacctttatctccggagattgtggggtgaacctagtgaggatcttactaccaaaccaagataccttgttacatttacagtgggatactctcaaaaggcaaacattgatgcagcggtgaaaaagttttcagataacttcacaattatgttgttccattatgatggtcggacaactgagtgggatgaatttgagtggtcaaaaagggccgtccatgtgagtgtcacaaagcaaaccaaatggtggtatgccaaacgatttctacatcctgacattgttgcccgctacgactacatatttatctgggatgaagatcttggtgtcgaacattttaatgcagaggcgtacattaagcttgttaggaagcatgggcttgagatctctcagcctggtttggagcccgataaaggtttgacatggcaaatgactaaacgaagaggtgatcaggaagtccacaaagtaactgaggagagacctggctggtgtagcgaccctcacctgccaccatgtgcagcgtttgttgaaattatggcaactgtattctcaagggatgcatggcgctgtgtatggcatatgattcagaacgacttggtccatggatggggccttgattttgctcttaggaaatgtgtggagccagcccatgagaaaattggagtggttgactcccagtggattgttcatcaagtcatcccttcgcttggtaaccagggcaaggcagagaatggaaaagcaccatgggaaggggttagagcacgctgtcgtaaagaatgggggatgttccaaacaaggttgactgatgctgagaaagcatattacttggagcacgggatcacaccaccaaaatcgacggtagcttagctgcacgcaccgacagtagcttagctgcactgcatgcctgcatacaggcacctcgcgagtcacgccaaggtttctgttttgtgaacctagcgccttcctgtccgataagcaactgactctgtagagatgcagcaccacagccagatttgtacagaatcgatgtacgtttttactcttcttaatcttctttacttgttttcaaccgtagcgacgagagtagctcttgtgtaagtaaccgatttagcatgaatccggtggctcttttttttttgatatattgcccaaatgcaatatcgatatggtcatttcgtttcattgttttaataacaagcaaatggttgctttgggacagcccttgtgccttcagtgcctcattttcatgctctagccagttatcagaatgacagccctgaaacatcttgctgcatagccagatgcaaacagttatccacatatggtgtggtgtgattagttgcttgcattaccc

SEQ ID NO: 115926 - DNA, 1908 bp, Zea Mays
ccactgccttgttctttcttgctccgctccccacgcgtacgcgctctcgtggcgacgactgggtgatcgccgccgccgccgccgccaccacgcaccaccaggccttcaccggcgacaaacaccaccaacagacacaagtgcttcagtcattatagtgccagtaccattctgccagcgagttcctttgccacaaaaagataacactcggatatctcatggcaaaacctgggattttaggccgcagcagtgcacagagatcaaatgagggcatgcgaatcatattctcagcagttattggtgttatgctagggtacttgtttggcatttccttccctaccgttaatataacaaagcttcacttcccttccagcattatctcctatatcgaggacagaaactctggcatcacaacccaaacattattgaatcatgcatggacgtctgcagctactcataagaagaacaattcagcttctaactctgatgaaattcctaagatttatgttccaacaaaccctaaaggtgctgaaaggcttccaccgggcattgtagtgtctgaaacagacctttatctccggagattgtggggtgaacctagtgaggatcttactaccaaaccaagataccttgttacatttacagtgggatactctcaaaaggcaaacattgatgcagcggtgaaaaagttttcagataacttcacaattatgttgttccattatgatggtcggacaactgagtgggatgaatttgagtggtcaaaaagggccgtccatgtgagtgtcacaaagcaaaccaaatggtggtatgccaaacgatttctacatcctgacattgttgcccgctacgactacatatttatctgggatgaagatcttggtgtcgaacattttaatgcagaggcgtacattaagcttgttaggaagcatgggcttgagatctctcagcctggtttggagcccgataaaggtttgacatggcaaatgactaaacgaagaggtgatcaggaagtccacaaagtaactgaggagagacctggctggtgtagcgaccctcacctgccaccatgtgcagcgtttgttgaaattatggcaactgtattctcaagggatgcatggcgctgtgtatggcatatgattcagaacgacttggtccatggatggggccttgattttgctcttaggaaatgtgtggagccagcccatgagaaaattggagtggttgactcccagtggattgttcatcaagtcatcccttcgcttggtaaccagggcaaggcagagaatggaaaagcaccatgggaaggggttagagcacgctgtcgtaaagaatgggggatgttccaaacaaggttgactgatgctgagaaagcatattacttggagcacgggatcacaccaccaaaatcgacggtagcttagctgcacgcaccgacagtagcttagctgcactgcatgcctgcatacaggcacctcgcgagtcacgccaaggtttctgttttgtgaacctagcgccttcctgtccgataagcaactgactctgtagagatgcagcaccacagccagatttgtacagaatcgatgtacgtttttactcttcttaatcttctttacttgttttcaaccgtagcgacgagagtagctcttgtgtaagtaaccgatttagcatgaatccggtggctcttttttttttgatatattgcccaaatgcaatatcgatatggtcatttcgtttcattgttttaataacaagcaaatggttgctttgggacagcccttgtgccttcagtgcctcattttcatgctctagccagttatcagaatgacagccctgaaacatcttgctgcatagccagatgcaaacagttatccacatatggtgtggtgtgattagttgcttgcattaccc

SEQ ID NO: 115927 - DNA, 880 bp, Zea Mays
ccactgccttgttctttcttgctccgctccccacgcgtacgcgctctcgtggcgacgactgggtgatcgccgccgccgccgccgccaccacgcaccaccaggccttcaccggcgacaaacaccaccaacagacacaagtgcttcagtcattatagtgccagtaccattctgccagcgagttcctttgccacaaaaagataacactcggatatctcatggcaaaacctgggattttaggccgcagcagtgcacagagatcaaatgagggcatgcgaatcatattctcagcagttattggtgttatgctagggtacttgtttggcatttccttccctaccgttaatataacaaagcttcacttcccttccagcattatctcctatatcgaggacagaaactctggcatcacaacccaaacattattgaatcatgcatggacgtctgcagctactcataagaagaacaattcagcttctaactctgatgaaattcctaagatttatgttccaacaaaccctaaaggtgctgaaaggcttccaccgggcattgtagtgtctgaaacagacctttatctccggagattgtggggtgaacctagtgaggatcttactaccaaaccaagataccttgttacatttacagtgggatactctcaaaaggcaaacattgatgcagcggtgaaaaagttttcagataacttcacaattatgttgttccattatgatggtcggacaactgagtgggatgaatttgagtggtcaaaaagggccgtccatgtgagtgtcacaaagcaaaccaaatggtgagttgttcttttgtgtgtttgcaatgatcaggcccccattagaatgcaggatgccgcccgccctccattcttgtg

SEQ ID NO: 115928 - DNA, 615 bp, Zea Mays
atgacgtcctccgaagccccctggtgcccgttcctgaagcgacgcgcgcgatcgacgattgctcaggtacaatcctccacgtgcaggccttgcttgcgtgtttacacagctcgcaggctcgttggccagtgctgcccacggcaggcatggtggctgggcctctcccacgcgtccctagtcccgtctccggccgagcccacaccggtggccagcgcccgcgcaggcgagtccgtggccaagctcatggccggcgcggcagcgcggcctggagccgctgagcgcctcggcgtgcagacccccgcgcgccctcgtccagccatgctcttccctgctcggtccggcatggaggttgggagcagccgctgcgctcggggccgcgctgtagagctgctccttgcacgtccgccctcagctttccagccacgctcgctcgtccggcctcctctgctcttccccggtgagcccctgcagatctcgcccgccagcgagcttcctcaatgcgcgcagccccaccttcgcacgactccctcggctcggtcgagcagggccatggccatggccatcctctcctacccttcctccattctatcccgaggtggaagaaagccgaaatag

SEQ ID NO: 115929 - DNA, 1516 bp, Zea Mays
aactcaatagtactccatgagatggggggaagggaccggatcttagctggactttcccaggatagatcagcatgaatgcatgattgggaaaggcatggcactgcgaatcctgcctgtcatgtttctgtatcaggacccgcctgttcctaatccccaggactatcctgtgcccctccagtccgatcctccatgtgcacaacacactcccatagtcccatgggaaggaaggaaagggaaagggaaaacggccccaatcattcatttcgcatacacttccatcgcccaataatccatcagttacatgatacgtatgaattattggttcataacatatatggtgaggtgtccagtataatgcaggaacaggaatcctagctcactcaagcttccatgcgtacagaaacaggcagaaatcagagtactcattggtggcggacggcagcggctcgggcttgaagatgaacagcgcgttcctcacccccgtgccaaagatccagtcgtgcgcgtcccagtacacctgcaccttgagctggttgatggagatgcactcgttgcccctgaacttccactgcaggtgcctgacgaggacgttgacgtagccgtcgatcttgatgaccatgtcgacgtcgacgccgccgccgccgaggttgctgctgctgcactcgatgctgatgtcgtgcagcttgcccctgtcgtggaacctggccttggtgaggaaccgcttcttgctaaagacgtgctccttcttgcacaccagtgcggcgtcccgcagcgacggccgggacccggtgcgccggaacgcctccttcttgaggttgccgaggaggaggaccacctcctcgtccgacaccacggcgacgtagtagtcggacagcggctcgggctcgtcggagtacctcgcgctcctgaggtcccagaccacgtccacggccctgccgtcgacgtggaactgcttggcgccgtacttgcgccaaaagtgccacggctgcatctccaccttgcaggcggtgctgcagcccttgttggaggacgaggccgcgccaccgtcggcgtcgccccactccctgccgccgccgctcttgtccttgccgccgcccgccgacccttcgatcgacacggtcagcccgtgggtgagcaggttcctgcaccacgtcaccgtcaccaggcggtcgtggccggcgattcccgcgcggtagaccagcgtcgccgcgctctgcccggacctggtggtggccgcagcggacgccgggacgtccggaagcttctcgcccgccgagaaacacgaagggaccgagaacaagtcctgcatcatgtcgatgtgttgtggctggcttttgagtgagatcgacacgacaggccgggtgactgaaggaggaagaagaagatggctttagggagggatagggacgacatgtaataggccatgcaaagttatggaggtgggcgagaggatgaggcgaggcgaccatgggttagcaaaccgagctggaaagtggggaggccaagtaagtgagct

SEQ ID NO: 115930 - DNA, 544 bp, Zea Mays
gataatgaggacaggcctcgagagaaaaaacaatcaagctcagcctcagggtcatcccaagatgctaaaaaatcaaattcaactaaccaaaggacaacacgtggaagtggtggaagagcatcagatgaagcttctcgtgggaaaaataagttcttcttgacgaaatggtttggttttggttcaaaatagtcttttttctcatttctattagttttattaacaatttaaataatatgtcatggatttaagaagcatcattattttaaggaacaattggatctataccattaaaagatccaaactttagatatataccatggaccccacatgtcattgactcatgtggacccacatgtaagtgagatagtaatggtatggatcaaagtggtgatcttttaatggtatggatccaaatttcccttattttaaggaagtaccatgtgaaaaaaaacttctatagattctgttcatgtgaaaacccgtttgtgtttgtaactgtgtaaactgggcatttggtcagataattttacttttccatgtttac

SEQ ID NO: 115931 - DNA, 1153 bp, Zea Mays
atggaggtgcgcggggcgccggacctgaccgacttcatgaacgactggttcttcggcaaggtcggcgcgcagcacagcagcggcgtcggctacgacctgactcgcgagagcagcaagacgccggcatcgtctgcacagggtaaaagaaggagcggaagagcggcggcagcgcgagcaatcaaacgcaggattggctagaggaggcgaagaggatggtcgggccgtcggggccggatcgccggggcgaaagggcgtcgggtcgccgtccaggcagctgcccaggttcgctggcggatctgggacgaagcccacgccgagctcgaccgtcgggacccgatgtcgcgctcagccagaaggcactggcaacctggcgatatcggcaacgagatcatgcaacgcgcgtccatcacctcgtcccctatgcgccccgaccccttcgcctcctccgccccctcctcctcatcccctccctacctccaaaccctcgccgcaagtgccgcttccgcgacgcccctactcccgattctcctcatggtcgcgccacctccatctcgcccatctctgccgttcactctcgccaccgctgccacacctccgcgtcctccgcccccgctttcgccgccgatggatccagcgacggtgtcgcccgccttagctccttccttcgccgccagcgcgccgtggtcgccgtcctagcagcaggggaccgtaccgcgtcgaggcccaccaagctcgtgctctctgacgcctccaaaagcgtgagctcgattgtggcggcaatatgctacgcgtggatgctaccaagcaagggggatggccaggctgcagtgccggtggtgaacatgcgccggagcaggatggcttggtgcaggcaggcggcttggctcctgtatcacgttggggtcgatgcatcggcgctgctcttcaccgatgaggttgacatggatgggctaataatggaccagcgagttagcttgcttgtggtggggcaagatgttttgaaatcaaaagctgaggtggcttcagtttgtacaaccctgactcatacctattgcgaggatgcgtatagcttgcttcagaacttggacataaagaaacttctgctcgcaggtttcctgttagatacgagcaacctttcctagaagtgctcaga

SEQ ID NO: 115932 - DNA, 1606 bp, Zea Mays
ccaaattcacgcgagctccaatctgtgtgggtctccgtcgtcgtctctctcctcccggccgccggcgcgatgaggcggttgctcggccacctacacccccatgcccagagcctcttcgcttccctgcctcgcaaaccgtccatcgccaccaagctccccttcctcctctcccgccgcctcctttccgatgccgcctcgcctcctgccccctcgctgccgcctcctcccccgccctctgccgacgtcacgaacacagagttgaagaagaggttggagacttactatggggtggatgaagaggctgaattaccatctgtcgctaaggctgttcttgagcggaatctcacgggtgcccatagtgagactgatgatgaccttattgaggagctgcgtagtaagccactccctgaagtccatgaccgggactttgagtctgattttgaggagatgcatgatactgatgaggagctgaatgacctgtacaatacaagggagtatgttgagaagaagatcaagagtgatgagttctttaacatggatgacacaaagtgggatgccatgatcaaggaggccacagacaagggtcacttaactaacatgaaggagtgcgaggaaatcctcgaggacatgctctactgggacaagctacttcctgatgagatcaagcaaaaggtggagaccaaatttaatgagttgggagacatgtgtgagaggggagagatggaacctgagcaagcatatgagatgttcaaagaatttgaggataagatggtcgctgagtgcactgaattaattgaatcaaagatgccaactgacgctgatgaactgactgaatcaggaggtaagaaagttgagttagatgatctacctggcgagggacctgttctaaggtgggaatcacggattgtatttgttcctagtggagatgcatatcatcccaaaaacagaaaagtcaagctcagtgtgactgtgaaggaattgggactttcacgacatgctttccgtcggttgcgtgaggttgttggaaagaggtataattctgggaaagatgagctcacaataatcagtgaaaggtttgaacaccgggaagagaacagaaaagactgcttgaggacactgtatactctaataaaagacgcaatgaaagctgacaaacttgttgaggatgccaggaattcttatgttaaaggaagacttaaggctaatccacaatttatggagcgattgaagaggaagacagataagttgatggcagctgcataaggtgttacagagctccttgttttaacagctcctctctttccctcatcaacatgggtcattcttagtcataaatatatgttgagcatctcgaataacaatgtcaacacacatccccagcctatgcctttttggaaatcttttgctgctttcctaaattgaagatgcttaatttccatagtttgctgaggaaagtagctactgaggtgtaaattttggagtcaatatgtcgcttcttctgaagtcacagaatcatgctggcaggactggaatctaatctcaaccttgtgatctgtacaattgattcatttaaagggtaatttctgccttgtttagataacttaaa

SEQ ID NO: 115933 - DNA, 1531 bp, Zea Mays
ccaaattcacgcgagctccaatctgtgtgggtctccgtcgtcgtctctctcctcccggccgccggcgcgatgaggcggttgctcggccacctacacccccatgcccagagcctcttcgcttccctgcctcgcaaaccgtccatcgccaccaagctccccttcctcctctcccgccgcctcctttccgatgccgcctcgcctcctgccccctcgctgccgcctcctcccccgccctctgccgacgtcacgaacacagagttgaagaagaggttggagacttactatggggtggatgaagaggctgaattaccatctgtcgctaaggctgttcttgagcggaatctcacgggtgcccatagtgagactgatgatgaccttattgaggagctgcgtagtaagccactccctgaagtccatgaccgggactttgagtctgattttgaggagatgcatgatactgatgaggagctgaatgacctgtacaatacaagggagtatgttgagaagaagatcaagagtgatgagttctttaacatggatgacacaaagtgggatgccatgatcaaggaggccacagacaagggtcacttaactaacatgaaggagtgcgaggaaatcctcgaggacatgctctactgggacaagctacttcctgatgagatcaagcaaaaggtggagaccaaatttaatgagttgggagacatgtgtgagaggggagagatggaacctgagcaagcatatgagatgttcaaagaatttgaggataagatggtcgctgagtgcactgaattaattgaatcaaagatgccaactgacgctgatgaactgactgaatcaggaggtaagaaagttgagttagatgatctacctggcgagggacctgttctaaggtgggaatcacggattgtatttgttcctagtggagatgcatatcatcccaaaaacagaaaagtcaagctcagtgtgactgtgaaggaattgggactttcacgacatgctttccgtcggttgcgtgaggttgttggaaagaggtataattctgggaaagatgagctcacaataatcagtgaaaggtttgaacaccgggaagagaacagaaaagactgcttgaggacactgtatactctaataaaagacgcaatgaaagctgacaaacttgttgaggatgccaggaattcttatgttaaaggaagacttaaggctaatccacaatttatggagcgattgaagaggaagacagataagttgatggcagctgcataagggtcattcttagtcataaatatatgttgagcatctcgaataacaatgtcaacacacatccccagcctatgcctttttggaaatcttttgctgctttcctaaattgaagatgcttaatttccatagtttgctgaggaaagtagctactgaggtgtaaattttggagtcaatatgtcgcttcttctgaagtcacagaatcatgctggcaggactggaatctaatctcaaccttgtgatctgtacaattgattcatttaaagggtaattt

SEQ ID NO: 115934 - DNA, 1578 bp, Zea Mays
accgccatctgggcccaacgacaaaccctaaacccttttcctccaaattcacgcgagctccaatctgtgtgggtctccgtcgtcgtctctctcctcccggccgccggcgcgatgaggcggttgctcggccacctacacccccatgcccagagcctcttcgcttccctgcctcgcaaaccgtccatcgccaccaagctccccttcctcctctcccgccgcctcctttccgatgccgcctcgcctcctgccccctcgctgccgcctcctcccccgccctctgccgacgtcacgaacacagagttgaagaagaggttggagacttactatggggtggatgaagaggctgaattaccatctgtcgctaaggctgttcttgagcggaatctcacgggtgcccatagtgagactgatgatgaccttattgaggagctgcgtagtaagccactccctgaagtccatgaccgggactttgagtctgattttgaggagatgcatgatactgatgaggagctgaatgacctgtacaatacaagggagtatgttgagaagaagatcaagagtgatgagttctttaacatggatgacacaaagtgggatgccatgatcaaggaggccacagacaagggtcacttaactaacatgaaggagtgcgaggaaatcctcgaggacatgctctactgggacaagctacttcctgatgagatcaagcaaaaggtggagaccaaatttaatgagttgggagacatgtgtgagaggggagagatggaacctgagcaagcatatgagatgttcaaagaatttgaggataagatggtcgctgagtgcactgaattaattgaatcaaagatgccaactgacgctgatgaactgactgaatcaggaggtaagaaagttgagttagatgatctacctggcgagggacctgttctaaggtgggaatcacggattgtatttgttcctagtggagatgcatatcatcccaaaaacagaaaagtcaagctcagtgtgactgtgaaggaattgggactttcacgacatgctttccgtcggttgcgtgaggttgttggaaagaggtataattctgggaaagatgagctcacaataatcagtgaaaggtttgaacaccgggaagagaacagaaaagactgcttgaggacactgtatactctaataaaagacgcaatgaaagctgacaaacttgttgaggatgccaggaattcttatgttaaaggaagacttaaggctaatccacaatttatggagcgattgaagaggaagacagataagttgatggcagctgcataaggtgttacagagctccttgttttaacagctcctctctttccctcatcaacatggtgattattctgtattttcaattttattgttggctgtcgcacggggagaataatatgttgtatgcacttagctttgccttctttaatgtcttggcttcttttgtagggtcattcttagtcataaatatatgttgagcatctcgaataacaatgtcaacacacatccccagcctatgcctttttggaaatcttttgctgctttcctaaattgaagatgctt

SEQ ID NO: 115935 - DNA, 1656 bp, Zea Mays
tcaacgattcgaacagcgcgccctgcgcagcgcgcccgccggcggcgggtcgagccagagcgcgcaggtcggcctgacagtgtacctgaacgggagccatcggccgaagttgagctggacgtagaacttgccctggaggtgcatctccacgaggccgccgccggtggtgacgttcttccacacctcggcgtcctcctgcgtcatcaccacctcactgaccaccaggtgcacgctccggagcgccgagtcgccgggcttctggtacagcggcggccacaccgcctgcgtcccgatcagcctcccctggaagtagaggtccagctgcatgtagcgcagggcgacgtccaccttggcgttcgggttgtagatggccgccagcacgtagaggtcggagttgagcgccttccccaggtgcggcggcgggagctcgtcgatgtacccggcgttgagcgtggcggtgctcacgtggatccggggccccttggggtggtacaggaggtacaccaccaggatggcgagcccgatgcagaccaccagaagccagaacaggatgcagcacagggttaagcagaccgccagcagcttcttcgccttctccttcctcctgatgagcgtcggcgacgctccagctggcctcttcgtccctgacgacgacgacgaggactgcttcggcggctgatagacatatggcccctcgggctgctgaggcagacgtggctccggctccggttgcggatgctgaggcacatcatgcgcttgcgtcgccggcggctctggacccccactcccatccagacccagtcccaccggctcgttctgcagcgtgctgacgcgctcgatggtcttcttggtcttcaggccaccgcgccggggcagtgccggtgccggtgctcctccggacgagggtgtcggctcgttctgcagcgtgctgacgcgctcgatggtcttattggtcttcaggccaccgcgccggggcagtgccagtgctccccccgaggagggtagtaccggctcgtcctgcagcgtgcttacgcgctcgatggtcttattggtcttcagcccaccccacccccaccgggcctgcaccggtggcgctcctcccgacgactcggggatcccaccagatgtcgatgcagctgttccgggactggggaggctgcccaccggtggcagcgcccctcccgctgctgcggagtgacctgttgcctgcggcggcgtagcttctcccggtcccggcacggcacggcccctgcgccgcgacgatgctgctgacgccgcaggcggttcctcccggccgcctgcgcgcgggtactctccgtacacctgcggctgctgatcggccgccggctctcgtctcctctgtgacacaggcgtgtaggtcggcccgacgcgctgtgtgcgcgcctggggccgggcagtgtccccggcaccgtcgtcatggcttggcggctgctccgccgcttcaaaactgccttccatataggtaacacgacgcctgggccggtccccggcggcgtcgctctgcgctttagcatagcgaatgcgtccagtctccggctgggacggcgccacatcggctccacgagcaccgctggagctgggaggatcaccgcttcctgtctgcgcatgcggtatcacggccggctgcttgctcat

SEQ ID NO: 115936 - DNA, 215 bp, Zea Mays
atccatatgtacaacaatttatcagtgtctccgaatgcacatcggtggtttctctagtgacgatgataccctcgatgttatcattgtatttgtcatcaaccagtgttagaaagcaattaccattggttcaaaaatccctctccctttatcatacgacacacatgtcactggctcgatctctggttccattcgactttctttacaaaataaaataa

SEQ ID NO: 115937 - DNA, 2255 bp, Zea Mays
ccttcgccagttcaccccccacagaccacaactgtcgcgtcgccggctcgccgctcgccctatcccccaccgccaccggccacgcttccgtactgagccgctgagggggccagtcaggcgcgccgaccgccgaaactgccatgaagctgacctgcttgtccgccgccgccggcggcggcggcggctaccactcgccagcgagccatctcctggagctggagggggtccgcttcctcctcgactgccccatcgacctctccgctctcgcggccttcgcgccggtgcccctcgccggtgacgcaggaggtctcatccgcgcggtgccgcgctactggttgccagcggccgtgaaagaaggcggcgtggacgccgtgctcgtgtcttccgctacggggatgctcggactccccttcctcaccgggctccccggattcaccaacacgaaggtatatgtgacagaggtagcagcaaggatcggaaagccaatgatggaggagctggtggagatgcatcgtgagtttgtgaggtactatgggccagatacggatgcatcacccaagtggatggaaggggaggaactcaatgaactcatgtcaatgtcgcaaaaggcagtgattgaaggcagggaaaatgatttgacttctctggtgcctttatacagtccaggaaacgttgaagaatgcatgcacaaagtacagtctgttaaatatggagaggaggtttgcttcaatggcatatttatgctgaaagcttctagttcaggccttgaacttggcaattctacctggacaatacaaagtccaagagctagcattacctacctaccaagttcagtatttgtgtcggctcatgcattagattttgattacagctctctgaaggaaaatgatgtgattttgttttcggatttctcatccttgaatgacacggacgaggataatgagaaactgaatgagcattcaatggatgaaacggactcttctctatgtcgctactcagtgtttagggatgacggcgctgatgcagatgaaagggtgccattcgtgtgcaacaatgatgatatcacagaggagattgagagaatcagctttatatgctcatgtatttttggtgcagtaaaatctggaggctctgttctaataccaattggccgccttggtgttattcttttacttttggagcttatatcagaaatgctacattcttccagcctgaaggtgcccatatttgtgatttctgaaacagcagaagaaatatttgcttttaccaataccttgcctgaatggctatgcaagtcacgtcaagaaaagttattcgctggtgaagcattgtttggccatgtcgagcttttgaaggagggcaaattatttttgttcccgcatctacattcaaagggtttgctggcagcatggaaggagccttgtattgtgctatgtccacactggagccttagactcggcccagctgttcatttgcttcgtcgctggcatgcagacaaacggtgccttcttgttgtggagcaaggaaatggtgctgagttgagtcttaagcctttcatgcccttggcaattcaagtccttgagtgttctttcctttcgggcgtaagggcggggaaaattgatccattactgggagtgctcaaaccgaagtttgttatgcttccagaaggtcttaagtcgcggtgttcaataaagggggtgccatggtcattcttgtattactccaagggcaagaccatcgagctctcaaatttacgtgaagatattgaggtgcatcttgcaactgatgttgccttccgattgcagcctagacaactgaacgaaaccactgcagtggcgagattgagaacaaagctgcttgtaagcaatggacggtaccagctggcctctgcagaaaagcaaccagatcaatcaaagcgtcacttgctacactgtagcactattgaccctggtcgcttgctgtcagctttgcgagagaaggggatggtatgttcatttgctgcagatgatagccccactgctagtgaatcctcagttctggtcactagtcctggagatgctttggtgaggataacgcccgacacgactgttatatactgcgacgacgagagaacatccaatcaaatttatgatgcgcttagcagtgtttgtaaagggatctgactgcatcatgtgtaattgttgttcgttatggggtgtttggtttttagggactaatttttagtactccattttaatctataaattgctaaatgc

SEQ ID NO: 115938 - DNA, 2360 bp, Zea Mays
ccttcgccagttcaccccccacagaccacaactgtcgcgtcgccggctcgccgctcgccctatcccccaccgccaccggccacgcttccgtactgagccgctgagggggccagtcaggcgcgccgaccgccgaaactgccatgaagctgacctgcttgtccgccgccgccggcggcggcggcggctaccactcgccagcgagccatctcctggagctggagggggtccgcttcctcctcgactgccccatcgacctctccgctctcgcggccttcgcgccggtgcccctcgccggtgacgcaggaggtctcatccgcgcggtgccgcgctactggttgccagcggccgtgaaagaaggcggcgtggacgccgtgctcgtgtcttccgctacggggatgctcggactccccttcctcaccgggctccccggattcaccaacacgaaggtatatgtgacagaggtagcagcaaggatcggaaagccaatgatggaggagctggtggagatgcatcgtgagtttgtgaggtactatgggccagatacggatgcatcacccaagtggatggaaggggaggaactcaatgaactcatgtcaatgtcgcaaaaggcagtgattgaaggcagggaaaatgatttgacttctctggtgcctttatacaggtccgctatggaatcacaatcctgctgggtcctggcttgcacatctgtggcttctcttccagtcttcccgcagggcaatctatatgtctgaaagcttgagataaatccaggaaacgttgaagaatgcatgcacaaagtacagtctgttaaatatggagaggaggtttgcttcaatggcatatttatgctgaaagcttctagttcaggccttgaacttggcaattctacctggacaatacaaagtccaagagctagcattacctacctaccaagttcagtatttgtgtcggctcatgcattagattttgattacagctctctgaaggaaaatgatgtgattttgttttcggatttctcatccttgaatgacacggacgaggataatgagaaactgaatgagcattcaatggatgaaacggactcttctctatgtcgctactcagtgtttagggatgacggcgctgatgcagatgaaagggtgccattcgtgtgcaacaatgatgatatcacagaggagattgagagaatcagctttatatgctcatgtatttttggtgcagtaaaatctggaggctctgttctaataccaattggccgccttggtgttattcttttacttttggagcttatatcagaaatgctacattcttccagcctgaaggtgcccatatttgtgatttctgaaacagcagaagaaatatttgcttttaccaataccttgcctgaatggctatgcaagtcacgtcaagaaaagttattcgctggtgaagcattgtttggccatgtcgagcttttgaaggagggcaaattatttttgttcccgcatctacattcaaagggtttgctggcagcatggaaggagccttgtattgtgctatgtccacactggagccttagactcggcccagctgttcatttgcttcgtcgctggcatgcagacaaacggtgccttcttgttgtggagcaaggaaatggtgctgagttgagtcttaagcctttcatgcccttggcaattcaagtccttgagtgttctttcctttcgggcgtaagggcggggaaaattgatccattactgggagtgctcaaaccgaagtttgttatgcttccagaaggtcttaagtcgcggtgttcaataaagggggtgccatggtcattcttgtattactccaagggcaagaccatcgagctctcaaatttacgtgaagatattgaggtgcatcttgcaactgatgttgccttccgattgcagcctagacaactgaacgaaaccactgcagtggcgagattgagaacaaagctgcttgtaagcaatggacggtaccagctggcctctgcagaaaagcaaccagatcaatcaaagcgtcacttgctacactgtagcactattgaccctggtcgcttgctgtcagctttgcgagagaaggggatggtatgttcatttgctgcagatgatagccccactgctagtgaatcctcagttctggtcactagtcctggagatgctttggtgaggataacgcccgacacgactgttatatactgcgacgacgagagaacatccaatcaaatttatgatgcgcttagcagtgtttgtaaagggatctgactgcatcatgtgtaattgttgttcgttatggggtgtttggtttttagggactaatttttagtactccattttaatctataaattgctaaatgc

SEQ ID NO: 115939 - DNA, 2250 bp, Zea Mays
ccttcgccagttcaccccccacagaccacaactgtcgcgtcgccggctcgccgctcgccctatcccccaccgccaccggccacgcttccgtactgagccgctgagggggccagtcaggcgcgccgaccgccgaaactgccatgaagctgacctgcttgtccgccgccgccggcggcggcggcggctaccactcgccagcgagccatctcctggagctggagggggtccgcttcctcctcgactgccccatcgacctctccgctctcgcggccttcgcgccggtgcccctcgccggtgacgcaggaggtctcatccgcgcggtgccgcgctactggttgccagcggccgtgaaagaaggcggcgtggacgccgtgctcgtgtcttccgctacggggatgctcggactccccttcctcaccgggctccccggattcaccaacacgaaggtatatgtgacagaggtagcagcaaggatcggaaagccaatgatggaggagctggtggagatgcatcgtgagtttgtgaggtactatgggccagatacggatgcatcacccaagtggatggaaggggaggaactcaatgaactcatgtcaatgtcgcaaaaggcagtgattgaaggcagggaaaatgatttgacttctctggtgcctttatacaggaaacgttgaagaatgcatgcacaaagtacagtctgttaaatatggagaggaggtttgcttcaatggcatatttatgctgaaagcttctagttcaggccttgaacttggcaattctacctggacaatacaaagtccaagagctagcattacctacctaccaagttcagtatttgtgtcggctcatgcattagattttgattacagctctctgaaggaaaatgatgtgattttgttttcggatttctcatccttgaatgacacggacgaggataatgagaaactgaatgagcattcaatggatgaaacggactcttctctatgtcgctactcagtgtttagggatgacggcgctgatgcagatgaaagggtgccattcgtgtgcaacaatgatgatatcacagaggagattgagagaatcagctttatatgctcatgtatttttggtgcagtaaaatctggaggctctgttctaataccaattggccgccttggtgttattcttttacttttggagcttatatcagaaatgctacattcttccagcctgaaggtgcccatatttgtgatttctgaaacagcagaagaaatatttgcttttaccaataccttgcctgaatggctatgcaagtcacgtcaagaaaagttattcgctggtgaagcattgtttggccatgtcgagcttttgaaggagggcaaattatttttgttcccgcatctacattcaaagggtttgctggcagcatggaaggagccttgtattgtgctatgtccacactggagccttagactcggcccagctgttcatttgcttcgtcgctggcatgcagacaaacggtgccttcttgttgtggagcaaggaaatggtgctgagttgagtcttaagcctttcatgcccttggcaattcaagtccttgagtgttctttcctttcgggcgtaagggcggggaaaattgatccattactgggagtgctcaaaccgaagtttgttatgcttccagaaggtcttaagtcgcggtgttcaataaagggggtgccatggtcattcttgtattactccaagggcaagaccatcgagctctcaaatttacgtgaagatattgaggtgcatcttgcaactgatgttgccttccgattgcagcctagacaactgaacgaaaccactgcagtggcgagattgagaacaaagctgcttgtaagcaatggacggtaccagctggcctctgcagaaaagcaaccagatcaatcaaagcgtcacttgctacactgtagcactattgaccctggtcgcttgctgtcagctttgcgagagaaggggatggtatgttcatttgctgcagatgatagccccactgctagtgaatcctcagttctggtcactagtcctggagatgctttggtgaggataacgcccgacacgactgttatatactgcgacgacgagagaacatccaatcaaatttatgatgcgcttagcagtgtttgtaaagggatctgactgcatcatgtgtaattgttgttcgttatggggtgtttggtttttagggactaatttttagtactccattttaatctataaattgctaaatgc

SEQ ID NO: 115940 - DNA, 2355 bp, Zea Mays
ccttcgccagttcaccccccacagaccacaactgtcgcgtcgccggctcgccgctcgccctatcccccaccgccaccggccacgcttccgtactgagccgctgagggggccagtcaggcgcgccgaccgccgaaactgccatgaagctgacctgcttgtccgccgccgccggcggcggcggcggctaccactcgccagcgagccatctcctggagctggagggggtccgcttcctcctcgactgccccatcgacctctccgctctcgcggccttcgcgccggtgcccctcgccggtgacgcaggaggtctcatccgcgcggtgccgcgctactggttgccagcggccgtgaaagaaggcggcgtggacgccgtgctcgtgtcttccgctacggggatgctcggactccccttcctcaccgggctccccggattcaccaacacgaaggtatatgtgacagaggtagcagcaaggatcggaaagccaatgatggaggagctggtggagatgcatcgtgagtttgtgaggtactatgggccagatacggatgcatcacccaagtggatggaaggggaggaactcaatgaactcatgtcaatgtcgcaaaaggcagtgattgaaggcagggaaaatgatttgacttctctggtgcctttatacaggtccgctatggaatcacaatcctgctgggtcctggcttgcacatctgtggcttctcttccagtcttcccgcagggcaatctatatgtctgaaagcttgagataaatccaggaaacgttgaagaatgcatgcacaaagtacagtctgttaaatatggagaggaggtttgcttcaatggcatatttatgctgaaagcttctagttcaggccttgaacttggcaattctacctggacaatacaaagtccaagagctagcattacctacctaccaagttcagtatttgtgtcggctcatgcattagattttgattacagctctctgaaggaaaatgatgtgattttgttttcggatttctcatccttgaatgacacggacgaggataatgagaaactgaatgagcattcaatggatgaaacggactcttctctatgtcgctactcagtgtttagggatgacggcgctgatgcagatgaaagggtgccattcgtgtgcaacaatgatgatatcacagaggagattgagagaatcagctttatatgctcatgtatttttggtgcagtaaaatctggaggctctgttctaataccaattggccgccttggtgttattcttttacttttggagcttatatcagaaatgctacattcttccagcctgaaggtgcccatatttgtgatttctgaaacagcagaagaaatatttgcttttaccaataccttgcctgaatggctatgcaagtcacgtcaagaaaagttattcgctggtgaagcattgtttggccatgtcgagcttttgaaggagggcaaattatttttgttcccgcatctacattcaaagggtttgctcatggaaggagccttgtattgtgctatgtccacactggagccttagactcggcccagctgttcatttgcttcgtcgctggcatgcagacaaacggtgccttcttgttgtggagcaaggaaatggtgctgagttgagtcttaagcctttcatgcccttggcaattcaagtccttgagtgttctttcctttcgggcgtaagggcggggaaaattgatccattactgggagtgctcaaaccgaagtttgttatgcttccagaaggtcttaagtcgcggtgttcaataaagggggtgccatggtcattcttgtattactccaagggcaagaccatcgagctctcaaatttacgtgaagatattgaggtgcatcttgcaactgatgttgccttccgattgcagcctagacaactgaacgaaaccactgcagtggcgagattgagaacaaagctgcttgtaagcaatggacggtaccagctggcctctgcagaaaagcaaccagatcaatcaaagcgtcacttgctacactgtagcactattgaccctggtcgcttgctgtcagctttgcgagagaaggggatggtatgttcatttgctgcagatgatagccccactgctagtgaatcctcagttctggtcactagtcctggagatgctttggtgaggataacgcccgacacgactgttatatactgcgacgacgagagaacatccaatcaaatttatgatgcgcttagcagtgtttgtaaagggatctgactgcatcatgtgtaattgttgttcgttatggggtgtttggtttttagggactaatttttagtactccattttaatctataaattgctaaatgc

SEQ ID NO: 115941 - DNA, 1951 bp, Zea Mays
ccgtgaacgaattaatgggcaatcgtggcttttcgcttcttcgtgcgttgcctgcctatatatgcagcgtgatggggggcatgtccctccggcctgggccgttactagcttagctcatatacgtacgtacgcaggaaggctgcaagagagaggagcaatataatggctggttcttcgatggacactgaagctgcaggcaaggagctcaagcagggcagcggcggcggcggcggctacaccatgccggctactgctcatgcggtggacacagactcgtggcagcaggtggggctgctcctggtgatcggcttcaactgcgcctacgtgctcagcttctccaacctcatgatggtgcccctgggctgggcgtggggcgtcgcctgcctgctgctcgtcggcgccgccgcgtggtacgccaactggctcctcgccggcctccacttcgtcgacggccagaggttcatccgctacagggacctcatgggcttcatattcgggaggaacatgtactacatcacctggttcctgcagttcgcaactctacttctgtgcaacatgggcttcattttgctaggagcaagagcgctcaaggcaatcaacacggagtttacccacaccccagccaggctgcagtggttcatcacggccacgggaatcgtttacttcgccttcgcctacttcgtgccgacgatttctgccatgaggaactggctcgccacgtcggcggcgctgacgttagcttacgacgtcgctctgctggctatcttgatcagagatgggaaatcgaacaagcagaaggactatgacgtccatgccggatcccaagccgagaaggtgttcaacgcgttgggcgccgtcgctgccatcctcgtctgcaacacgtccgggctgctcccggagatacagtcgacggtgcgggagccggcggttcgcggcatgaggcgggcgctgctgctgcagtacaccgccggcgccgcggggtactacggcatcagcgtggcggggtactgggcgtacgggtcagcggtgtcggagtacctccccaacgagctcggcggcccgaggtgggccgccgtcctcatcaacgccaccgccttcctgcagagcattgtgtcccaacacctgttcacggtgccgatccacgaggcgatggacacgcggctgcagcggctggacgaaggcatgttctcccgctacaacctcacgcgccgcgtctgcgcgcgggggctcgtcttcggcttcaacgtcttcgtcaccgcgctgttcccgttcatgggggacttcgtcaacctcgtcggctccttagcgctcgtcccgctcaccttcacgttccccagcatggccgtcctcaagatcaaaggcaagagcggtgggagatgtaacagactttggcattggggcatcatagttctgtcctcggctctctgcgttgctaccaccgccgccgccgttcgtttgatcttcaacaatgctaggatctaccacttcttcgccgacatgtagcgagcgagtagtagtgggattgacatgtgtatcgtcaccacgaggtgatagtatggccacttcgttctcaattttttgcttggttcaagagtggaagggtacggtggtcacttagctcatgtttgataagggcactacatgattaataagcatgcatcatgtacgtagtcatcctatcaaaatttagaaaaatgagcttattgtgatcgatggaccacctccctctaaccaaacatctctgttttccgtgaaagcttaaaaggcaactcgtgaatgtgttcttttagacacctcatgcctattatttcttggaagtatagaataatgttgagagttgtaaacatacatgcatgtcgcatctagcccttttgtctatcacacgtgtgctacctgtagactaattgcattatagtgtgactcttgggactcagactcatgattatatata

SEQ ID NO: 115942 - DNA, 186 bp, Zea Mays
atggaggatgagcttgcaaggaagtggaagaaattaagtttatatgaagtagccatcaaacttcaggaggaagagctacaagttcatgagatagctcttaagaaaaaggctcgtagaaagaaggatacaatggaaccatcttcaggacacaagagaaagggcaaatatctgcgctacatgaaatag

SEQ ID NO: 115943 - DNA, 467 bp, Zea Mays
gcagacaagagtgcagctttctcatatacttcctttacatattacagttcggtggatacagttacaacagttacagaaatgattacaactgcaagagcaaaaaccgcagctaccgtggtaaacaggtacagaattactgagttgccatgacaggtgaggggcaacaaattgtacaatagttttatttcacacacattactactagcgtacacaagatgtttctttcccggcatagtggaataggacgtactgtatttgagcggcatgccaatgcaacatctcatcttggagatttttgtcaaaccagttttcattgggtgcagaacactcatgtttccacctcattgcatgagtttccacctcattgcagtaatccacttctctttccccaacccatggctatgatgtacaaaatcacgcagccagcaacggtcccaaaagtagtttcccaaaattttctgtttgct

SEQ ID NO: 115944 - DNA, 213 bp, Zea Mays
atggtcagggtggagatctggagcaccaggcttgcgctagggctctggggtgctgccgtgctaggaggagatcagtggcggagacaaccacgaatccaagaccgggcacagacacaaagtggagaagggagggcgtggtcaggcctcactgcctcaggcggccgtcggccggacgtggccagtgcccggtggccgggcgggcgcagaggctag

SEQ ID NO: 115945 - DNA, 165 bp, Zea Mays
atgggtcatgtgcatttgatacgaacacaatatgaatatcctatctccagatgtgtgtttgcaagtgccatactttcatttaataaatggtattccagagtgtactctctgtgcatattcatcgtattcagagccaaagaactgcttcaagaaaaattcttcata

SEQ ID NO: 115946 - DNA, 772 bp, Zea Mays
gacccagcctcttagctaaagcactgacccgatgcgcgctcggttccttcctggacatgcagcggcggcgcaagtggcggcggaagcgcgcggagcagcgcgtgtacatggagctgagcgaggccatggactgcctggaccacatctgcacggagggatgcacggaggtcggcccggcggggcgggcgccggcgccggcgccgtgcgcgcgctacgccacgtgccggggcctgcagctgctcatccgccacttctcccagtgccaccgcaagagctgcgcgcggtgccagcgcatgtggcagctgctccgcctccactccgcgctctgcgaccgtaccgaccgctgcaacaccccgctctgcatgaggtttaagcagcaggagcaggataaggcggctgccaagggcggcgatgatggcgacaaatgggggcttctggtgaagaaggtgaagactgccagggtcttctcttctctggccaacaggaagcagatgagcaccaccaccacccagtgctgaggagcagcctgggatgcttaggggtcaaagttagattagtgagagagaatgaagcgagcagtttttttttgggtctgttttgagatgtcagatctcttttgagatatgtacatgtacatgcctactttgtcaccctacgttggtatagctcttttatcgaggtgggagttggtcagccggaagtctatgtaaaaagtgcgcatgtatcattatataataatagggaaatatgagaagtattttagtcttatgat

SEQ ID NO: 115947 - DNA, 1446 bp, Zea Mays
aattggcctggctacccagacaagagcacgcaacgcaagcaactgcgacgtctcccgcccccgccgcgccccggaccttttccgcagatattttttttatccccccacgcccccggctcgttcccttccattccaccacctctcgccagacaacgagatgtgcgaggcaccgcggctcggcaaccgcgccggcgccggcgacccggccgccgccgacgtcgacgtcgtcacgacgggcgggcgccggaggatccccgcgcattcctctgtcctggcctcggcgtcgccggtgctcggcagcatcctggagcgtcgcctgcggaaggacagggagagcggcaagcccgggcggtccgtcgtccggatccgcggcgtcaccgacgacgccgccgcggccttcgtccgcctcctctacgccggcaggtgcggcgaggatgaggatgacgacatggaggagcacgcggtgcaggtgctggtgctggcgcacgcgtaccaggtgccgtggctgaagcgggcgtgcgagggcgccatcggcgcgcgcctcaccgcggactcggtggtggacgtgctgcagctggccggcctctgcgacgcgccgcgcctgcacctgcgctgcgccaggctgctggccaaggagttcgcggccgtggagcgcaccgaggcctggcgcttcctgcaggagaacgacccctggcaggagctccacgtcctgcagcgcctgcacgaggccgacatgcggcggcgcaagtggcggcggaagcgcgcggagcagcgcgtgtacatggagctgagcgaggccatggactgcctggaccacatctgcacggagggatgcacggaggtcggcccggcggggcgggcgccggcgccggcgccgtgcgcgcgctacgccacgtgccggggcctgcagctgctcatccgccacttctcccagtgccaccgcaagagctgcgcgcggtgccagcgcatgtggcagctgctccgcctccactccgcgctctgcgaccgtaccgaccgctgcaacaccccgctctgcatgaggtttaagcagcaggagcaggataaggcggctgccaagggcggcgatgatggcgacaaatgggggcttctggtgaagaaggtgaagactgccagggtcttctcttctctggccaacaggaagcagatgagcaccaccaccacccagtgctgaggagcagcctgggatgcttaggggtcaaagttagattagtgagagagaatgaagcgagcagtttttttttgggtctgttttgagatgtcagatctcttttgagatatgtacatgtacatgcctactttgtcaccctacgttggtatagctcttttatcgaggtgggagttggtcagccggaagtctatgtaaaaagtgcgcatgtatcattatataataatagggaaatatgagaagtattttagtcttatgat

SEQ ID NO: 115948 - DNA, 1297 bp, Zea Mays
aattggcctggctacccagacaagagcacgcaacgcaagcaactgcgacgtctcccgcccccgccgcgccccggaccttttccgcagatattttttttatccccccacgcccccggctcgttcccttccattccaccacctctcgccagacaacgagatgtgcgaggcaccgcggctcggcaaccgcgccggcgccggcgacccggccgccgccgacgtcgacgtcgtcacgacgggcgggcgccggaggatccccgcgcattcctctgtcctggtgcggcgaggatgaggatgacgacatggaggagcacgcggtgcaggtgctggtgctggcgcacgcgtaccaggtgccgtggctgaagcgggcgtgcgagggcgccatcggcgcgcgcctcaccgcggactcggtggtggacgtgctgcagctggccggcctctgcgacgcgccgcgcctgcacctgcgctgcgccaggctgctggccaaggagttcgcggccgtggagcgcaccgaggcctggcgcttcctgcaggagaacgacccctggcaggagctccacgtcctgcagcgcctgcacgaggccgacatgcggcggcgcaagtggcggcggaagcgcgcggagcagcgcgtgtacatggagctgagcgaggccatggactgcctggaccacatctgcacggagggatgcacggaggtcggcccggcggggcgggcgccggcgccggcgccgtgcgcgcgctacgccacgtgccggggcctgcagctgctcatccgccacttctcccagtgccaccgcaagagctgcgcgcggtgccagcgcatgtggcagctgctccgcctccactccgcgctctgcgaccgtaccgaccgctgcaacaccccgctctgcatgaggtttaagcagcaggagcaggataaggcggctgccaagggcggcgatgatggcgacaaatgggggcttctggtgaagaaggtgaagactgccagggtcttctcttctctggccaacaggaagcagatgagcaccaccaccacccagtgctgaggagcagcctgggatgcttaggggtcaaagttagattagtgagagagaatgaagcgagcagtttttttttgggtctgttttgagatgtcagatctcttttgagatatgtacatgtacatgcctactttgtcaccctacgttggtatagctcttttatcgaggtgggagttggtcagccggaagtctatgtaaaaagtgcgcatgtatcattatataataatagggaaatatgagaagtattttagtcttatgat

SEQ ID NO: 115949 - DNA, 1371 bp, Zea Mays
cagacaagagcacgcaacgcaagcaactgcgacgtctcccgcccccgccgcgccccggaccttttccgcagatattttttttatccccccacgcccccggctcgttcccttccattccaccacctctcgccagacaacgagatgtgcgaggcaccgcggctcggcaaccgcgccggaggatccccgcgcattcctctgtcctggcctcggcgtcgccggtgctcggcagcatcctggagcgtcgcctgcggaaggacagggagagcggcaagcccgggcggtccgtcgtccggatccgcggcgtcaccgacgacgccgccgcggccttcgtccgcctcctctacgccggcaggtgcggcgaggatgaggatgacgacatggaggagcacgcggtgcaggtgctggtgctggcgcacgcgtaccaggtgccgtggctgaagcgggcgtgcgagggcgccatcggcgcgcgcctcaccgcggactcggtggtggacgtgctgcagctggccggcctctgcgacgcgccgcgcctgcacctgcgctgcgccaggctgctggccaaggagttcgcggccgtggagcgcaccgaggcctggcgcttcctgcaggagaacgacccctggcaggagctccacgtcctgcagcgcctgcacgaggccgacatgcggcggcgcaagtggcggcggaagcgcgcggagcagcgcgtgtacatggagctgagcgaggccatggactgcctggaccacatctgcacggagggatgcacggaggtcggcccggcggggcgggcgccggcgccggcgccgtgcgcgcgctacgccacgtgccggggcctgcagctgctcatccgccacttctcccagtgccaccgcaagagctgcgcgcggtgccagcgcatgtggcagctgctccgcctccactccgcgctctgcgaccgtaccgaccgctgcaacaccccgctctgcatgaggtttaagcagcaggagcaggataaggcggctgccaagggcggcgatgatggcgacaaatgggggcttctggtgaagaaggtgaagactgccagggtcttctcttctctggccaacaggaagcagatgagcaccaccaccacccagtgctgaggagcagcctgggatgcttaggggtcaaagttagattagtgagagagaatgaagcgagcagtttttttttgggtctgttttgagatgtcagatctcttttgagatatgtacatgtacatgcctactttgtcaccctacgttggtatagctcttttatcgaggtgggagttggtcagccggaagtctatgtaaaaagtgcgcatgtatcattatataataatagggaaatatgagaagtattttagtctta

SEQ ID NO: 115950 - DNA, 821 bp, Zea Mays
aattggcctggctacccagacaagagcacgcaacgcaagcaactgcgacgtctcccgcccccgccgcgccccggaccttttccgcagatattttttttatccccccacgcccccggctcgttcccttccattccaccacctctcgccagacaacgagatgtgcgaggcaccgcggctcggcaaccgcgccggcgccggcgacccggccgccgccgacgtcgacgtcgtcacgacgggcgggcgccggaggatccccgcgcattcctctgtcctggcctcggcgtcgccggtgctcggcagcatcctggagcgtcgcctgcggaaggacagggagagcggcaagcccgggcggtccgtcgtccggatccgcggcgtcaccgacgacgccgccgcggccttcgtccgcctcctctacgccggcaggtgcggcgaggatgaggatgacgacatggaggagcacgcggtgcaggtgctggtgctggcgcacgcgtaccaggtgccgtggctgaagcgggcgtgcgagggcgccatcggcgcgcgcctcaccgcggactcggtggtggacgtgctgcagctggccggcctctgcgacgcgccgcgcctgcacctgcgctgcgccaggctgctggccaaggagttcgcggccgtggagcgcaccgaggcctggcgcttcctgcaggagaacgacccctggcaggagctccacgtcctgcagcgcctgcacgaggccgacatggtacgcacgcttttttttcttcttccatggattgctaccggaccggaccggaccggaccacggtcggtcgatgtaaatctgactg

SEQ ID NO: 115951 - DNA, 2481 bp, Zea Mays
atggagggtgggggagggagtggaatgggtgggttcccggaagccacgggtaaccttctcgatgccgcagctcaggagttccaccctacggtctgtgccccctatcctctacagccgcttccgcaacagctatactgcccccacccatatccagccatgccggtgcctccgccgccgcaaatagccatgttacagccagtgcctccgatggcgatggccatggcgccgcagccggggtacaccttgccaacgacgacgccggtggtcaatggcccgtcgagccgcgtcgtggtgctgggccttgtcccgccgcacgcgcaggaggccgacgtggcgcaggcgatggcgccattcggcgcgatccgctcggtcgacgcgtgcgcggtggcgtccgagggcgtggccaccgtccatttcttcgacatccgcgccgccgagctcgccttgacctgtgtccgcgagcagcacatgcgccagcagagccgcctcgggcagctctacgcggcggccgccgtagccccggcgtgggctcctgcaccgacgccccaggcctgggactggccccaccccaacgacgacggccgcggcctcgtcctcgggcacgccgtgtgggcccacttcgccaccggcgccgacgacggcgacaaccgcggctccctggtggtcctgagccccctgcccggcgtctcggtcgctgacctccgccaagtcttccaggccttcggggacttgaaggatgtgagggagtcggcgcagcggcccagccacaagttcgtggacttcttcgacacgcgcgacgccgcgcgcgcgctcgccgagctcaacggccaggagcttttcggccgccgcctcgtcgtcgagttcacgcgcccttccggccccgggccccgcaggcgcgggtacgcaccccaccagcaccggcccaccgcgccgactccgccgaggcttcaagcgacgtggcgaccgtcccaaccgacgtcgtctcagccgccggcatcctcgtcgtcgtccggttccgtaagggcgagggaaggagtggtgcttctgaggaggagctcctgtaagtctagcgcgggcagcgaccagtcgtccaagggaggcaatgccggaacgagccatgagcgcaagaccaagggcggcaagatcgtggtggcggcggcggcggcatcctcgtcgaccccgacagcgtccgggaagcaaacccagaaaggcgtcgggagcagcggcggcgggagctggaaaggacgaaagagcgggtgggaggcgcgcttcctgttcaaggagcccgaggccggcggcggcgccgacacgcaagcaacgccggcttcggagatggatacgaggaccaccgtcatgatcaggaacataccgaacaagtacagccagaagctgctgctcaacatgctggacaaccactgcatccaatccaacgagtggatcgtggcgagcggcgaggagcagcccttctccgcctacgatttcgtctacctccccatagatttcaacaacaagtgtaatgtgggctacggcttcgtcaacctgacatcgccggaggctgccgtgcggctgtacaaggcgttccacaagcagccatgggaggtgtacaactcgcgcaagatctgccaagtgacatacgcgcgcgtacaaggcctggaagcgctgaaggagcacttcaagaactccaagttcccgtgcgacagcgacgagtacctgcccgtggcgttctcgccggcgcgcgacggcaaggagcttacggatccagtgcccatcgtgggccgctcgcccgcggcgtcgtccgcgtcgtcgcctcccaagagccgggcggctagcgtggaccggcttgggcaggagctgatgccggcgccgtcgtcatccgcggacggcgcgtcgtcgaccactacgtccacccacgcgccgtccgaacacgacgaggaggaggaggagggagacatcaggctcgcaggcgagctgcggcggcttggctacgacgactagctggctccgatcctagctgcagctaggcgggcgacgcctagctcagcaacgatcggcatggcgtggcgtcgcttcgagaagcgcggaggcagtagtgacttcggccaagcttttcacagatccgtagcgctcgctcctgcacgcgcaggcgaagcaagtgaagtggactgggacttgactttggagaagcaaaagtgagctgatgttcgttggttcgtagacgctgcgcacagcaggtgtggagtcgtgttcttttggattttggtttgaagtttcctactacttgtttctttgaaacttggagctatagctagcttaggcttagctaggactgctgggaggggaaagggcatgcaggggactatcaattcgtggttcgtcatgcgctcgttctttacattaaaataagattgttattagtacagctttacaatacttctgcatattcggagagagactctgatctcatatcatcacgagttgcta

SEQ ID NO: 115952 - DNA, 1107 bp, Zea Mays
atggcgcaggtcgctaagacgcttctccttgtggccctggtggtcgtgtcggcggtggagctgtgccgcgccatcgagttcgacgagcgggacctggcatcggacgaggcgctgtgggacctgtacgagcggtggcagacgcaccaccgggtgcaccgacaccacggcgagaagggccgccggttcgggaccttcaaggagaacgcgcgcttcatccacgcgcacaacaagcgcggcgaccgaccctaccgcctccgcctgaaccgcttcggcgacatgggccgtgaggaattccgttccgggttcgccgactcccgcatcaacgacctccgccgggagcccaccgcggcgccggccgtgccggggttcatgtacgacgacgccaccgacctgccgcggtccgtggactggcggcagaagggcgcggtgacggccgtcaagaaccagggccgctgcggcagctgctgggccttctccacagtggtggccgtggagggcatcaacgccatacggacggggagcctggtgtcgctgtcggagcaggagctgatcgactgcgacacggacgagaacgggtgccagggcgggctcatggagaacgccttcgagttcatcaagtcccacggcggcatcaccaccgagtccgcgtacccgtaccacgcctccaacggcacctgcgacggcgcgcgggcccggcgcgggcgggtcgtggcgatcgacggccaccaggctgtgccggccggcagcgaggacgcgctggccaaggcggtggcgcaccaaccggtgtccgtggccatcgacgcggggggccaggcgctgcagttctactcggagggcgtgttcacgggcgactgcggcacggacctggaccacggcgtggcggcggtcggctacggcgtcagcgacgacggcacgccctactggatcgtcaagaactcgtggggcccttcctggggagagggcggctacatccggatgcagcgcggcaccggcaacggcggcctctgcggcatcgccatggaggcgtcctttcccatcaagacctcgcccaacccgtcgcgcaagccccgccgcgcgctcatcaccagggacgcctcttcccagtga

SEQ ID NO: 115953 - DNA, 257 bp, Zea Mays
attgagagcatctccaacaatgcctcaaactagtgccttaaattgaaatatgtggctctatacaggaaaaactactccaacagtgccctatttcataaatttttatcaaaaaactatagggcaccctctcaagtgactcaaatatactacaccgtagtgggctgccctataatctagatttggggctttactgttggagcgaagtgttttgttggtgccctaaattttataaaatatacttattttcaaattatagg

SEQ ID NO: 115954 - DNA, 1029 bp, Zea Mays
ggcacaccggcagcgaccagccagtgatcgaccgaggcagatactgactaggagcagagagcagcggagatggtgaagattccgagccccaggaggctgttcaggagccggtccaggagcaccaccatcatcggcggcggcggcgcggacatctgcgccatggtcgccgagcacgagaggatcgagtgggaggtgcggcccggcgggatgctggtgcagaagcggcgctcgacggaggacgacgcggcggcggccgtggagtacatcctggtgagagtctccaccaccgggtggcagtggcacgacgtctccatcgacgccaccgcaaccttcggcgacctgaaggtgatgctgtcgctggcgaccgggctgtggcccagggagcagaggctgctgtacaggggcaaggagagggacgactgcgagcacctgcacatggtgggggtccaggacaaggacaaggtgctgctcctggaggacccggccgtcaaggagaggaagctcaggtcaaccaccttggcgcagctcatgggcgtgccctgtcactccttcatccaagtgtagagagaaacccccggggaatatttcttgccatttttctcccgtctcgtcgtcgtcgttctccaatttgcctgcgtgagcgaagggtttcagtccagtctaaccgcgtttgttcagagcctgctgagttccatctcagggcttgaattcggccaatcgaatcaagacagtcgcaaacgataggatataaagatgatggatacatggcgtaaattactgtgaacgggtacgtaatgtcatcccagtgccagtgtgcgtgagccagtagttctttggttccttgctctgtatatattctctctttttttttcttcctgagatcagcaaaacagttcggaattcaatagatgctgctgtaaatcccttgtcttttttccacggaatgcagcccccttttctagtacgtacgtacgtaccagtatccccgccgttttttctttctctccatcagcttggcatggagtactg

SEQ ID NO: 115955 - DNA, 94 bp, Zea Mays
aggaagttgttagggggtgccaacacatgaactggggtacatttatgactactctttcagaagctttaattgatcatttgcagccaattgaggt

SEQ ID NO: 115956 - DNA, 462 bp, Zea Mays
ccagttggacaccacaaaatttaatatgaatgaacctaattcggcagcgacgtctgtgttgggacgaaggcgaagacgtcacccttcgctcgatgccttcgccgtcctcgctgcaccaacggagacaagacaacgggcagacccttcgtcccatacgtcaccggacgaagacctgtgacgagttcgtttcatcttgcgacctcgtccagcatggaggcccacgtgtgatccggcccattgtaacaggccttgcgtggccgctgcgtattacaggcctaatttgtaaaggtctccctgtaattacggtatgtaaccccgctttatgggaatattccggggataacctaggtgtctgagggcacatgcgtccttaacactggacgttgggcactcagatacctataaataccccgcacagtgcccttgagaggctagattaacagagctattgccatctcgagc

SEQ ID NO: 115957 - DNA, 905 bp, Zea Mays
caaaaaaaagaaagagaaagaaaaggatccaagacctgaccagactcgacgacggcctggctaggtgtgtgcaccatactttacagtaatggccgataaggttacttctggcccagcccacaccagccctgcagcccatcttagatgtgcgctgtggctccaactgcgagcccttttatcccttatccaacctgatccaccacaccaccattcccgagcacactagtctctcttccctgcgcttgctcgctccttcttgcccccatggcgctgctcgccgtccagggcatggccatgtccaccgccgccgcggccctcccatctcacaaccacggcgccgtctcatcctacgtctccacctcctcctacgcgctcgcagcctccgccgccttcccccgcgcccgggctgcgttcgccgtcggcgccgtcttgtcggccaccgtcactccagttcttgacgtctactgcgggagaggggacaagaaaacgaaaaggggcaaaaggttcaaccattcatatggcaatgcgaggccgcgcaacaagaagaagggaactgggcctgcgcggctctttgcccctcctgctcctccaaggaaggatcagttcgatgatggggagatcatttcaatcgagattgacgaggacatcctggaataggttgtccgagttctgccttgctttatatttgccctgagcttaattggcctagtttgtaccaaatcaaatactacatattttaagtaattatttcctcgcctataattatcgatgggtaggctgccacactttcatttggctagtaatgttcctactactgactgggttctttattttcctttccagctgctgagttctttactctcttcaaaatgaaactgtgtcgaaataagttttttttagaagat

SEQ ID NO: 115958 - DNA, 891 bp, Zea Mays
caaaaaaaagaaagagaaagaaaaggatccaagacctgaccagactcgacgacggcctggctaggtgtgtgcaccatactttacagtaatggccgataaggttacttctggcccagcccacaccagccctgcagcccatcttagatgtgcgctgtggctccaactgcgagcccttttatcccttatccaacctgatccaccacaccaccattcccgagcacactagtctctcttccctgcgcttgctcgctccttcttgcccccatggcgctgctcgccgtccagggcatggccatgtccaccgccgccgcggccctcccatctcacaaccacggcgccgtctcatcctacgtctccacctcctcctacgcgctcgcagcctccgccgccttcccccgcgcccgggctgcgttcgccgtcggcgccgtcttgtcggccaccgtcactccagttcttgacgtctactgcgggagaggggacaagaaaacgaaaaggggcaaaaggttcaaccattcatatggcaatgtgagtgctccagcacaatttacatcgcatttttggttttttccccctgttctgttttatttagctgtctgatcatgtctaggcgaggccgcgcaacaagaagaagggaactgggcctgcgcggctctttgcccctcctgctcctccaaggaaggatcagttcgatgatggggagatcatttcaatcgagattgacgaggacatcctggaataggttgtccgagttctgccttgctttatatttgccctgagcttaattggcctagtttgtaccaaatcaaatactacatattttaagtaattatttcctcgcctataattatcgatgggtaggctgccacactttcatttggctagtaatgttcc

SEQ ID NO: 115959 - DNA, 1626 bp, Zea Mays
cttaaaacaatttaacaattgggcaagagtggaaatttggagacagcagaacggcaccataactgctcctaatctaagcaccatgagtgccctctatcagtgtaggcttttttttcctcagcctttgtctccttccctcccccaaactttattccaaagcttttgcacttcttgtcaagcaaaccaagcaaaaacaatttgcaagttgccaagacatctcctgcactccttgcttatataaaaacccaaggggacgcaggagggacaaagggcccccctttcacagtttccctcccccaaaactactttcccacaaacccagaccagagcagcttgcgtctatcgtttcttttcttgttggccttctccttgccttgcttttgcttgctcgttgcttcttgagctcgagcccgccccttctgcgccttgcccaagtctctgtgtgttttttataggcttgagagcttggaatagcggggggtggaggaagcggaagaggagcttcgttttgtgttctagagggagtcatgttccatggcggcaggcctctgtccctccgggggtctctcaaggcgcttgaagctgatatccaccatgccaacaccctggcgcatgctatacacagggcgtatgggggtgcctgcgtgcagatgaggctgtcctacagctccatggctccaatctttctcaaccttatccaatggatggactgcagctgctccctgtcatacacgctccctagctaccttggcctgctcgaggttctcgtctacaaggtttatgtcgatgaagatgcctccatatccaccatagaaaggagggcgagcctgaaggaattctacactatcatataccctttcttgcaacaactggaggacaacttgatggacaaggactgcaaggacaaagggtggtctgctgctgccgccgccggcggcggcggcggtcggaagcttgttgccgaagatgacagggaggatgagtgtggcatttgcctggagacctgcaccaagatggtccttccgaattgcaaccatgccatgtgcatcaactgttaccgagactggtacacaaggtcccagtcatgcccgttctgccgcgggagcctgaagagggtccggtccagagacctgtgggtgctcaccggcgacgacgacgtgatcgacacggtgacgctggagaaggagaacgtgaagcacttcctcagcttcatcgacagcctgcccctgatcgtccccgacaacatgctgctggtctactacgactacctagtctagcaaggctcctccccccaccccccactctgaagctctggaagaggaagggggtctgggaagaagacgcggcgtacaagcgacaagggttacccgcagccgaccatcctctgcggatcgagttggcaaagcgaagccgttgccgaccaacagacgatactctcgtgggcatgccacgccgttgcgctggctttattgcatggtggcgttgctcgctgtaatggttgtaaataaagaaggaaaatgtctcgggttttatatataatatactagcttgacatttctcgtctggcgaattgccggactgttcagaatgaagaaatcagggggcctctacttctctgctctatat

SEQ ID NO: 115960 - DNA, 1750 bp, Zea Mays
cttaaaacaatttaacaattgggcaagagtggaaatttggagacagcagaacggcaccataactgctcctaatctaagcaccatgagtgccctctatcagtgtaggcttttttttcctcagcctttgtctccttccctcccccaaactttattccaaagcttttgcacttcttgtcaagcaaaccaagcaaaaacaatttgcaagttgccaagacatctcctgcactccttgcttatataaaaacccaaggggacgcaggagggacaaagggcccccctttcacagtttccctcccccaaaactactttcccacaaacccagaccagagcagcttgcgtctatcgtttcttttcttgttggccttctccttgccttgcttttgcttgctcgttgcttcttgagctcgagcccgccccttctgcgccttgcccaagtctctgtgtgttttttataggcttgagagcttggaatagcggggggtggaggaagcggaagaggagcttcgttttgtgttctagagggagtcatgttccatggcggcaggcctctgtccctccgggggtctctcaaggcgcttgaagctgatatccaccatgccaacaccctggcgcatgctatacacagggcgtatgggggtgcctgcgtgcagatgaggctgtcctacagctccatggctccaatctttctcaaccttatccaatggatggactgcagctgctccctgtcatacacgctccctagctaccttggcctgctcgaggttctcgtctacaaggtttatgtcgatgaagatgcctccatatccaccatagaaaggagggcgagcctgaaggaattctacagtatgcttactatccaccatagaaactagtgattaagaagctttttttttctgttcaagatttttttttgttgatgctgctgctgctgctgcagcagtggtttaatatagttttgggaccccatggaatgcagctatcatataccctttcttgcaacaactggaggacaacttgatggacaaggactgcaaggacaaagggtggtctgctgctgccgccgccggcggcggcggcggtcggaagcttgttgccgaagatgacagggaggatgagtgtggcatttgcctggagacctgcaccaagatggtccttccgaattgcaaccatgccatgtgcatcaactgttaccgagactggtacacaaggtcccagtcatgcccgttctgccgcgggagcctgaagagggtccggtccagagacctgtgggtgctcaccggcgacgacgacgtgatcgacacggtgacgctggagaaggagaacgtgaagcacttcctcagcttcatcgacagcctgcccctgatcgtccccgacaacatgctgctggtctactacgactacctagtctagcaaggctcctccccccaccccccactctgaagctctggaagaggaagggggtctgggaagaagacgcggcgtacaagcgacaagggttacccgcagccgaccatcctctgcggatcgagttggcaaagcgaagccgttgccgaccaacagacgatactctcgtgggcatgccacgccgttgcgctggctttattgcatggtggcgttgctcgctgtaatggttgtaaataaagaaggaaaatgtctcgggttttatatataatatactagcttgacatttctcgtctggcgaattgccggactgttcagaatgaagaaatcagggggcctctacttctct

SEQ ID NO: 115961 - DNA, 2075 bp, Zea Mays
gaaaactcagtaatgctagttaacctctccagtatctccttctcggatattgaatcacacacggcaacgccgcaacgcgcagcggactcgggtcctcgcactcgcaatcaagcatgggggccgccgttgggaagccagctttcggtgtcgccgtcgcgccgaagacgcaggcggaggagcggctcgccctcgcggagcacgccctgctccagtggactcgctcacccggcgccgactcgggcatctgggacgccggggcgagctacaccaacagaggcctcctggcggcggtcgacgaggtgctcctcctggcggcggagaaccctttcccgctcccggaggccgcctccgcgcgccgccgcctggacagcgccgtcggcgccgccgcgtcgcgcatggtggaggagttcctgcgcgtcagggtctggaacgcctccctgctgcgcggcgccgtccacaggctctcgctcgcctccactaaccaatcacggctgatcttccccagcgcccgcgaaaggaacagctcggcgggcaccggcggggtggtcgacgcgtccgacgggagccggtcgagggcgagctcgagcgtgcctcacgaggtcgcggccctcttggacaccgaggtctgggacgacctcgatctcatctgccccgcaggcgtgtccgtccttcacgagatcgcgcttcgggtcgttcgtgccggatgcaccgaggtactcttccgggcgttcgccaacgctccctgcgatgtgctagacagtttcttgtcaattcttcgggtcgaatgctcgcagcagacgactgaggccgtgatcaagcggtggacgacggtgacggagatcatagggaaggccatggtcgccatgcggaggcagctgtacgcgcagaacccaggcgccttcgacggtttcagggacgaatacttgctggccatcgcggagaaccgcatcctgatcctgctcgacttcgccaacggattcaccagcatcacgtcgcacgagaagctcgtgtacatgctcggcatgtacgaggctctcaccgacgccgctcccagcctcctgctcctcctcagcggcgcgcgcaaggaggccatctcggagcggacacaaggtatcctcacgaaactggccggcgcggtgaggatcatggtcagcggcgccatagccaagatccaaggcgactcactgttcccgcacacgccgagcgccgcaggtggcgtccacccgctgacacgcgacgccatgacctgcgtcgagctgctggcgaggcaccgcaccacgctcgatctgatcctcgcgggcgccgacgagcgcggctccctcgccggcgtcgtctcggacctgatcgcgggcctggaacgcaacctccagaggagattcgctgtcgcctgcgcggacgcagggggctcgcggcacctcttcctggcgaacaacatcagcttcgtgctgagccgcgtcgcggacaacgacggcgtggcttccctgctcggggacgcgtgggcggcgcggcgccggagccgggtcgagcagcacgtagcgagctacgccgcgtcgtcgtggggccccgtcgtcgctctcctggacacgaccgcgtgtggcagaggcaagtcggcgaaagttctggcggagttcaacgcggcgtttaacagatcgcgcgacagcgagatgtgccgcgaggtcccggaccccgtgctccgagcggtgctgcggaacgccgtgtcggagatggtggtccctgcttactgcgcgttcctgcagaagcaacccaagcttgggaaatctgccaggtacacggcagatgatctggtcgagttgctatcggagttgttcgaaggggaatccacggatggcatcaaaatctagctttcaactttgccaaactgagaacgcttgacttctgtaacactacaaaaaaaagttccatttcttcattgatagcagcagtggtagcagtcagacttctttttttagcatgcacggataatctgaatattccattgtaataaaaaaaagaaaaggggacaatctggacatgaaaatgtgccagaaagcatcgacatttccttgttaacagaa

SEQ ID NO: 115962 - DNA, 1938 bp, Zea Mays
gaatcacacacggcaacgccgcaacgcgcagcggactcgggtcctcgcactcgcaatcaagcatgggggccgccgttgggaagccagctttcggtgtcgccgtcgcgccgaagacgcaggcggaggagcggctcgccctcgcggagcacgccctgctccagtggactcgctcacccggcgccgactcgggcatctgggacgccggggcgagctacaccaacagaggcctcctggcggcggtcgacgaggtgctcctcctggcggcggagaaccctttcccgctcccggaggccgcctccgcgcgccgccgcctggacagcgccgtcggcgccgccgcgtcgcgcatggtggaggagttcctgcgcgtcaggcgcccgcgaaaggaacagctcggcgggcaccggcggggtggtcgacgcgtccgacgggagccggtcgagggcgagctcgagcgtgcctcacgaggtcgcggccctcttggacaccgaggtctgggacgacctcgatctcatctgccccgcaggcgtgtccgtccttcacgagatcgcgcttcgggtcgttcgtgccggatgcaccgaggtactcttccgggcgttcgccaacgctccctgcgatgtgctagacagtttcttgtcaattcttcgggtcgaatgctcgcagcagacgactgaggccgtgatcaagcggtggacgacggtgacggagatcatagggaaggccatggtcgccatgcggaggcagctgtacgcgcagaacccaggcgccttcgacggtttcagggacgaatacttgctggccatcgcggagaaccgcatcctgatcctgctcgacttcgccaacggattcaccagcatcacgtcgcacgagaagctcgtgtacatgctcggcatgtacgaggctctcaccgacgccgctcccagcctcctgctcctcctcagcggcgcgcgcaaggaggccatctcggagcggacacaaggtatcctcacgaaactggccggcgcggtgaggatcatggtcagcggcgccatagccaagatccaaggcgactcactgttcccgcacacgccgagcgccgcaggtggcgtccacccgctgacacgcgacgccatgacctgcgtcgagctgctggcgaggcaccgcaccacgctcgatctgatcctcgcgggcgccgacgagcgcggctccctcgccggcgtcgtctcggacctgatcgcgggcctggaacgcaacctccagaggagattcgctgtcgcctgcgcggacgcagggggctcgcggcacctcttcctggcgaacaacatcagcttcgtgctgagccgcgtcgcggacaacgacggcgtggcttccctgctcggggacgcgtgggcggcgcggcgccggagccgggtcgagcagcacgtagcgagctacgccgcgtcgtcgtggggccccgtcgtcgctctcctggacacgaccgcgtgtggcagaggcaagtcggcgaaagttctggcggagttcaacgcggcgtttaacagatcgcgcgacagcgagatgtgccgcgaggtcccggaccccgtgctccgagcggtgctgcggaacgccgtgtcggagatggtggtccctgcttactgcgcgttcctgcagaagcaacccaagcttgggaaatctgccaggtacacggcagatgatctggtcgagttgctatcggagttgttcgaaggggaatccacggatggcatcaaaatctagctttcaactttgccaaactgagaacgcttgacttctgtaacactacaaaaaaaagttccatttcttcattgatagcagcagtggtagcagtcagacttctttttttagcatgcacggataatctgaatattccattgtaataaaaaaaagaaaaggggacaatctggacatgaaaatgtgccagaaagcatcgacatttccttgttaaca

SEQ ID NO: 115963 - DNA, 312 bp, Zea Mays
tgggttactgctaattaacagttaggcacaaagcgagcctttttgtcacttttgcgatgattaagcaaacaagcaccatgccggtggtgttggtgcaaaagcccctacctaacctgcatttcttactttgagcagatggaagctagtgaaaacaacaacaacaacaacaacaacaacaacaacaacaacaacaacaacaacaacaacaacaacaacaacaacaacaacaacaacaacaataataataataataataataataataataataataataataataataataataataataataaatcaaaagat

SEQ ID NO: 115964 - DNA, 770 bp, Zea Mays
ccagagagcggaagagatttccatcccttcacatttctcattccctccctcgttatcccgcattcgtctatggcggctgcactgggcgccgtgctccggcggctgcatacggcggcggcgcagccccctcgcctgacgaaattcgcgctgcacccgcccaaattcgttgaaatcgaattcgctgatggtagctcatttcacctgtcagcagaatttctcagagtatacagcccagcagctgatagcaaaatccgatcagtgggcggtgaaaaggttatatttggacgacgacatgttgggataatgtcagctgaatcagtaggaaactacggagtccggatactctttgatgacttgcacaagacagggatcttcacatgggattacttgcaccatctcggttcaaacaaattcagtctgatgagaaattacatcagaactttgagaaagcatggtcttagtcgcgatccccagagaaggaaatgatggagcaacagtctctagacagcctcgcttcttggcgcatggatcgatccatcaggcttgcctgccatgtaacaaagagatgctcaattgaatatttgagatgtgaacgcataacacaaggatatccattaactagtgatcaacagtgactgtgatgggaaagactgaataaaagtactaaaacgttcatttactggagttgattgactatttggaacgaactggacaagacaccctcaattctcatatgtacgtatgcagttttctttcctctgtgtgaaggg

SEQ ID NO: 115965 - DNA, 727 bp, Zea Mays
ccagagagcggaagagatttccatcccttcacatttctcattccctccctcgttatcccgcattcgtctatggcggctgcactgggcgccgtgctccggcggctgcatacggcggcggcgcagccccctcgcctgacgaaattcgcgctgcacccgcccaaattccagaatttctcagagtatacagcccagcagctgatagcaaaatccgatcagtgggcggtgaaaaggttatatttggacgacgacatgttgggataatgtcagctgaatcagtaggaaactacggagtccggatactctttgatgacttgcacaagacagggatcttcacatgggattacttgcaccatctcggttcaaacaaattcagtctgatgagaaattacatcagaactttgagaaagcatggtcttagtcgcgatccccagagaaggaaatgatggagcaacagtctctagacagcctcgcttcttggcgcatggatcgatccatcaggcttgcctgccatgtaacaaagagatgctcaattgaatatttgagatgtgaacgcataacacaaggatatccattaactagtgatcaacagtgactgtgatgggaaagactgaataaaagtactaaaacgttcatttactggagttgattgactatttggaacgaactggacaagacaccctcaattctcatatgtacgtatgcagttttctttcctctgtgtgaaggg

SEQ ID NO: 115966 - DNA, 1678 bp, Zea Mays
atgggcacatctgagcaaccatgcacgagcacgcccaactcgttcaccaccacctcctcctcctatgtcacctcccagcagattcatcatctgccacagcacgactccgtggtctgcaccgaaccggggctgggcttcccctactactatgtcactgaccgtcagcaggacgcagcgttcgacggcgacgaggtagagctcggcttccaggcttccaaggccaccagggtcgactactacagctcgccttaccagctgtcatggccgctggctcgcgccgcggccgccgagtcgtcgcgcgtcaggaagaagaggttctgggacgttctcgagagctgcaagcagaaggtcgaggccatggaggccatggagtcgccgctggtggcgttccaggaagccgaggacgggggcgccgtagtaggggatggcggcggcggcggcggcggccgagggagcgggggcggcgcggacgggatgcggctcgtgcagctgctggtcgcgtgcgccgaggccgtggcgtgccgcgaccgcgcgcaggccgcggcgctgctgcgggagctccaggccggcgcgcccgtgcacggcacggcgttccagcgcgtcgcgtcctgcttcgtgcagggcctggcggaccgcctggcgctggctcacccgccggcgctgggcccggccagcatggcgttctgcatcccgccgtcgtgcgcgggccgcgacggcggcgcgcgcgccgaggcgctcgcgctggcctacgacctgtgcccgtacctgcgcttcgcgcacttcgtggccaacgcctccatcctggaggccttcgagggggagaccaacgtccacgtgctggacctgggcatgacgctgggcctggaccgcgcccaccagtggcgcgccctcctcgacggcctcgccgcccgcgcgggcgccgccgccaggccggcgcgcgtgcgcgtcaccgccgtcggcgcccctgcggacgccatgagagccgtcggccgggagctcctggcgtacgcggaggggctcgggatgtgcctcgagttcagggcggtcgaccgcagcctcgagagcctgcacatcgacgacctcgggatcgccgctgacgaggccgtggccatcaacagcgtcctggagctgcactgcgtggtgaaggagagccgcggggcgctcaactccgtgctccagaccatccgcaagttgtcgcccaaggcgttcgtcctcgtcgagcaggacgccggccacaacgggcccttcttcctgggccggttcatggaggcgctccactactacgcggccgtgttcgacgcgctggacgcggcgctcccgcgctacgacgcgcgccgcgcgcgcgtggagcagttccactttggcgcggagatccggaacgtggtcggctgcgagggcgcggcgcgcgtggagcggcacgagcgcgctgaccagtggcgccgccgcatgagccgcgccgggttccagtccatgccgatcaggatggcggccagggcgcgggagtggctggaggagaacgccggcggcggcgggtacacggttgctgaggagaagggatgcctcgtcctcggctggaagggcaagcccgtcattgccgcctcctgctggaagtgctagtctgctgcgctcgccacgttccgctgcgccggcagacggagaggtatacgtataccaccca

SEQ ID NO: 115967 - DNA, 2041 bp, Zea Mays
gaccattgcgtgatagattgtaccggtctcggtctccgtgtctcactctcaagttgcagctgccagcagccagtcatttcgttggcaaccagggcagaactaaatatccgtggataagagctgcactgtgtgctgctgagatatcaagaacgtaacgtacggtggaagacaaggccccgttctcgattagcccaagccaaagagtcagagagagagagagagagtcgtactggtcgtcacctgtcgaagattttcggtgtctcctgagccacagctgctgctgctgctggaaccatggagatggaggccgtggagtcgcacggaggcgccgggcgccggacgcccaagagggatcgcggcatctcctgggcctgcgtcttcatcctggcgagtaactgcttccagttcatcgcctacttcgccgtgtcgacgaacctggtgaactacctcaaggaccgcctgcaccagggcagcaaagccgccgcgaacggcgtcaccaactggatgggcacgagcgccatcacgccgctcgtcgccgccttcctcgccgacgccttcctcggcagatactggaccatcgcgctcttcctggtcatctccgtcctggcctacgtggtgctcacggtgagcgcggcggcggcgctggagagcgcggccttctacgcggggctgtacctgctggcgctgggcggggcgctgcagccggtgctgtcgtcgttcggcgccgaccagttcgacgaggaggagcgcgggcgccagagctccttcttcaactggttctacctctccatcaacgtcggctcgctggtcggcggcaccgtgctggtgtgggtgcagtccagcgtcagctgggggctcgggtacggcatcccggcgctcttcagcgcgctggccgtcgcggcgttcctggccggcaccgccacgtaccgccgccaccagccgccggcaggcagcccgctcaccagggtcgcgcaggtcgtcgtcgccgcgtgcaggaagtgcggcgtccaggtgccggaagacgcgtccacgctgcacgagtgcgaggacgtcggcggcatgtccgcgatacaggggagccgccggctcgcgcacaccgatcagttcaggttcctggacaaggcagcgtcggtggagccatcggacgacaagtcgcgtccggcgagcgcgtggcgtctgtgcacggtgacgcaggtggaggagctcaagtgcgtgctccggctgctgccggtgtgggcgagcgggatcgtgttcgcggcggcgtacacgcagatgaccaccaccttcgtcctgcagggcgacacgctggacccgtacgtgggcggcttccgcgtgcccgccgccgtgctctccgtcttcgacacgctcagcgtcatgctgtgggtgccgctctacgaccgcctggtggtcccactggcgcggcgcgccacgggccacgaccgcgggttcacgcagctggcgcgcatgggcgtgggcctcgtcgtgctcaccgccgccatgctcgccgcgggggcgctggaggtggcgcggcgccgcgtcatcgcgcgccacgacatgtacgacaccaacacgggcgccggcggggacggcgagtacctgccgctgtccatcttctggcaggtgccgcagtacgtggtggtgggtgcgtcggaggtgttcacgttcataggccagatggagttcttctacgaccaggcgcccgacgcgatgcggagcctctgctcggggctctccatgacgtccttcgcgctcgggaactacgtcagctccgcgctcgtcaccgtggtggcgcgcgccaccgcgcggggcgggcgggatggctggatccccgacgacatcaaccgggcgcaccttgacaacttcttctggctgctggccatgctctgcgccggaaacttcggcgtctacctgctcatcgcacgatggtacacatacaagaagactgtggactagtatagtgtatgtatctataaagaccatccctgaacgatctcgtgaaatgtactgccgatctcaatcaattcaaagacacttcacttgg

SEQ ID NO: 115968 - DNA, 2380 bp, Zea Mays
gaccattgcgtgatagattgtaccggtctcggtctccgtgtctcactctcaagttgcagctgccagcagccagtcatttcgttggcaaccagggcagaactaaatatccgtggataagagctgcactgtgtgctgctgagatatcaagaacgtaacgtacggtggaagacaaggccccgttctcgattagcccaagccaaaggtccgttccgtttacatcagtttttttttcttcaaaatatatgtgtgaacgaacaatagtttgcagtacacgaccgaaacacaatatttcatcgattccttccttgtcttctcacctctgacgattctgtttctgaaatctgcttcctgcaaaatggttccatggtcacggaattcgccatggtcagagtcagagagagagagagagagtcgtactggtcgtcacctgtcgaagattttcggtgtctcctgagccacagctgctgctgctgctggaaccatggagatggaggccgtggagtcgcacggaggcgccgggcgccggacgcccaagagggatcgcggcatctcctgggcctgcgtcttcatcctgggtaataatggcatgtctcacatacacatctgttcgtagctttatatatggcctcgctcgccctcaaaccgtctggctgtggcctctgcactgcatgcacccgtacatgcattcatggcggcgatggcgggactcggccggacatcacaccagcgagtaactgcttccagttcatcgcctacttcgccgtgtcgacgaacctggtgaactacctcaaggaccgcctgcaccagggcagcaaagccgccgcgaacggcgtcaccaactggatgggcacgagcgccatcacgccgctcgtcgccgccttcctcgccgacgccttcctcggcagatactggaccatcgcgctcttcctggtcatctccgtcctggcctacgtggtgctcacggtgagcgcggcggcggcgctggagagcgcggccttctacgcggggctgtacctgctggcgctgggcggggcgctgcagccggtgctgtcgtcgttcggcgccgaccagttcgacgaggaggagcgcgggcgccagagctccttcttcaactggttctacctctccatcaacgtcggctcgctggtcggcggcaccgtgctggtgtgggtgcagtccagcgtcagctgggggctcgggtacggcatcccggcgctcttcagcgcgctggccgtcgcggcgttcctggccggcaccgccacgtaccgccgccaccagccgccggcaggcagcccgctcaccagggtcgcgcaggtcgtcgtcgccgcgtgcaggaagtgcggcgtccaggtgccggaagacgcgtccacgctgcacgagtgcgaggacgtcggcggcatgtccgcgatacaggggagccgccggctcgcgcacaccgatcagttcaggttcctggacaaggcagcgtcggtggagccatcggacgacaagtcgcgtccggcgagcgcgtggcgtctgtgcacggtgacgcaggtggaggagctcaagtgcgtgctccggctgctgccggtgtgggcgagcgggatcgtgttcgcggcggcgtacacgcagatgaccaccaccttcgtcctgcagggcgacacgctggacccgtacgtgggcggcttccgcgtgcccgccgccgtgctctccgtcttcgacacgctcagcgtcatgctgtgggtgccgctctacgaccgcctggtggtcccactggcgcggcgcgccacgggccacgaccgcgggttcacgcagctggcgcgcatgggcgtgggcctcgtcgtgctcaccgccgccatgctcgccgcgggggcgctggaggtggcgcggcgccgcgtcatcgcgcgccacgacatgtacgacaccaacacgggcgccggcggggacggcgagtacctgccgctgtccatcttctggcaggtgccgcagtacgtggtggtgggtgcgtcggaggtgttcacgttcataggccagatggagttcttctacgaccaggcgcccgacgcgatgcggagcctctgctcggggctctccatgacgtccttcgcgctcgggaactacgtcagctccgcgctcgtcaccgtggtggcgcgcgccaccgcgcggggcgggcgggatggctggatccccgacgacatcaaccgggcgcaccttgacaacttcttctggctgctggccatgctctgcgccggaaacttcggcgtctacctgctcatcgcacgatggtacacatacaagaagactgtggactagtatagtgtatgtatctataaagaccatccctgaacgatctcgtgaaatgtactgccgatctcaatcaattcaaagacacttcacttgg

SEQ ID NO: 115969 - DNA, 2144 bp, Zea Mays
ctgctcaagtcaacctatcagcagctgcgattaaaagaacgaccgaccgtatcatctctaagtcaagggaaacttatgattcagtggctgcagtgcccctagataaagtcagttttgctaatgtcattgcaccattggcagaattagatgcgctgcaattccctctggttcaagcttgtgttcttcctaggatggtatcaccatctgaggatgttcgcaaggcaagtgctgaagcagagaagctattggattcccactttgtgctttgcaggcagcgtgaagatgtttatcgtgtcataaaagcatttacagtgaaaggcgagagaataggtcctgaagcaacaagatttcttcagtttttggtgaaagagtttgagcgcaatggagtaaaactatctcaaagcaagagaaaagaaatggagaaattgaaatctcatatagatgcattaaacttgaagtatctccaaaatttgaatgatttcaccaaattccttcttttaggtgaagatgaactagctggaatgccctttgagttccttaaggatctggaaaaggctgatgggaagtttaaggttccgttgactagttaccatgttactccagttcttgagcactgcaaggttggctctaccaggaagcagattgctgttgcttatggacaaaaaggtgggaaggataatgtagccatcctagaaaatttggtccagctaagacacaagtttgctaaattgctggggtacaccaactatgctgattttgctattgagcccagaatgccaaagacttcgaggaagatcttagagtttttggaagagatgtctgaacaattaagtgatgtggctaatagagagctcaacatactcaaagacctcaagatcaaggaggaaggaaatgctcagtttggaatggaagatttgttgtactacatcaaaagagctgaagaattcaaggttgatcttgacgttggtgaaattaaacaatacttccctgttggcctggtcatatctggaatgctgaagatatttcaggatctatttgcactacgattcgacgaaattaaggatgttgatgtttggcatgatacagttcgtgtgttttctgtttgggatgcaagttcaagtgatcttttgggttacttttttcttgatatcttttccagggaaggaaagtatgcccacacttgtgttgtgacccttcagaatggatgcttatgttctaatggtacacgtaaggttccggctgctgtgatattatctcagtgtccaaaagagtttgatggtaattcagcattgctgcggttccctgaagttgtgaggctattccatgaatttagccatgtggtccatcacgtatccaacagagccaccttttcaagattttcaggccttcgactggagggtgactttgctgaaattccaagcctgctactcgagaattggtgctatgagagtatttctctgaaaatgatgtccggcttccatcaggacattacgaaatccataagtagtgaagcttgccaatctctgaaaagaaggcgtgatttgtttgctggcctgaaaatgaaacaagagatacttttgtgccttgttgatcagataatacattcaagtgagaatgtggacattgatgacttaatcaaggatcttcaccccaaggtaatgttgggtatacctttattggaagggaccagtccagcttcaagttttcctcgtattgcctttggctatgatgctgtgtgctacagttacatatggagtgaggtgtttgctgctgatctttttgtatcaaaatttaaagatgacttgctcaatcagcatgctggattgcggttcagaaataaggtgttggctccaggaggctcaaaagatcccctggagataataacggactacctaggaagagaaccatcactccaaccttttattcagagcagaacaaggaacagtctgtgagggatcatttatgatgtaaccgttgagttttttctttcttttttcctttttgaatttagctatagaaggcctgctgactgtctcgagttatttttttcgtaacggactgacaagtctgatctttgtgccattctgttttccgacgtcatttgtttgaccatttagttaagctggaatacaaaagatgtcgct

SEQ ID NO: 115970 - DNA, 1535 bp, Zea Mays
tgccgtgaatccaccgtcttctccgcctacaatctctcagcaaaaccaccaaagccagctgctcatttgggggaagaccttctttgagtgaggtccaacccttgggggccatttcaaccttcgtcctccgcaataaaagttgggcaatcctatgtcagtcacttctcttctagcccaacccattccatcgctgtttgctccttctcccgcgccttcgagagctcgccgaaaccgaacctcccggcggcgtttcttaggcgctgtctgattcctgtatatttattttggcaatgctttcagctgcaacaaaactaaccatggatggcactagctttgacctgacagagcacgaaggttcaaatttgtctccttttctactcaaactttttaatgagtgggatgatcgcaagacaaggggcttgtttcaccatgacatcagttcctgtgaaacaaaggtgctacctggagtacataattttgtggcaacattaattgaaggacgtgaccaaaagaagcggccaactgagttcacaatgaaccaagttctccagccatttgttagtgagaagttcaatttcacaaaagtcagcccgttggaggtgatctttagattcaatgacactgagaaagattctgcacaatattttgatggtgttcctgatactgtttcagcttcttctagtgccatcttgattaatgtgagcccaattggctactgccatgtgctattgactcccaagatccaggactgtttgccgcaaaggattgatcaagagagcttcttaatagccatgtatgttgcaagagaagcaaggactcccttcttcagagttggttataacagcctgggcggctttgcaactatcaaccaccttcacttccaggcatactacctgaaagtacagtatccagttgaaaaggcaatcacggagaagctcaagaccctagggaatagcgtgagcatttttcacctggtggattacccagtcaatggctttgtgttcgaaggtggtgcgagcctggaagatttgtcagatgtggtctccaaagtctgcatcttcctgcaagagaacaacagacctttcaatgtcctcatctctgaatctggcaagagaattttccttctaccacagtgctatgcggagaagcagctcctcggaaaggcgagccaagagttcctggacatgagaatcaatccagcaatctgggagctcagtggccatctggtactgaagcggaggaaggactacgaggaggcctctgaagcaaacatatgcaggtttttggttgaagcagctctttctgaaacagaatttcaggagctgaacctatgcgtgctcgacttcctgaccagctctcttggttgaaactcggatgtaggttcctatagatagtaacagttctgaggttccagttaaaacagttgtgctggtactgttactttatgatggtatatcatgtagtagtatttctgatttgactcgtcacctctgcgatgaaataatatgtcttctccggcttcaatttcgtaaaga

SEQ ID NO: 115971 - DNA, 1524 bp, Zea Mays
atgacgcgccgcagcgacgcgcgcctgaggagggtcgtcatggagccggcttcgcctccaaccgctgcaagtcgcgcggatgagggcggaggcgagagttttgcagtttctactgctgtcttcgctccgaaatccaaccgaaatctcagaggtcagaggaaagtaggaaacctcgttcgggaacctgctttgagtgagactccaatccttgggcgccattgccgcctgttttttgtgctcggaaaggcgctgtctgattcctgtatatttattttggcaatgctttcagctgcaacaaaactaaccatggatggcactagctttgacctgacagagcacgaaggttcaaatttgtctccttttctactcaaactttttaatgagtgggatgatcgcaagacaaggggcttgtttcaccatgacatcagttcctgtgaaacaaaggtgctacctggagtacataattttgtggcaacattaattgaaggacgtgaccaaaagaagcggccaactgagttcacaatgaaccaagttctccagccatttgttagtgagaagttcaatttcacaaaagtcagcccgttggaggtgatctttagattcaatgacactgagaaagattctgcacaatattttgatggtgttcctgatactgtttcagcttcttctagtgccatcttgattaatgtgagcccaattggctactgccatgtgctattgactcccaagatccaggactgtttgccgcaaaggattgatcaagagagcttcttaatagccatgtatgttgcaagagaagcaaggactcccttcttcagagttggttataacagcctgggcggctttgcaactatcaaccaccttcacttccaggcatactacctgaaagtacagtatccagttgaaaaggcaatcacggagaagctcaagaccctagggaatagcgtgagcatttttcacctggtggattacccagtcaatggctttgtgttcgaaggtggtgcgagcctggaagatttgtcagatgtggtctccaaagtctgcatcttcctgcaagagaacaacagacctttcaatgtcctcatctctgaatctggcaagagaattttccttctaccacagtgctatgcggagaagcagctcctcggaaaggcgagccaagagttcctggacatgagaatcaatccagcaatctgggagctcagtggccatctggtactgaagcggaggaaggactacgaggaggcctctgaagcaaacatatgcaggtttttggttgaagcagctctttctgaaacagaatttcaggagctgaacctatgcgtgctcgacttcctgaccagctctcttggttgaaactcggatgtaggttcctatagatagtaacagttctgaggttccagttaaaacagttgtgctggtactgttactttatgatggtatatcatgtagtagtatttctgatttgactcgtcacctctgcgatgaaataatatgtcttctccggcttcaatttcgtaaaga

SEQ ID NO: 115972 - DNA, 1481 bp, Zea Mays
atgacgcgccgcagcgacgcgcgcctgaggagggtcgtcatggagccggcttcgcctccaaccgctgcaagtcgcgcggatgagggcggaggcgagagttttgcagtttctactgctgtcttcgctccgaaatccaaccgaaatctcagaggtcagaggaaagtaggaaacctcgttcgggaacctgctttgagtgagactccaatccttgggcgccattgccgcctgttttttgtgctcggaaagctgcaacaaaactaaccatggatggcactagctttgacctgacagagcacgaaggttcaaatttgtctccttttctactcaaactttttaatgagtgggatgatcgcaagacaaggggcttgtttcaccatgacatcagttcctgtgaaacaaaggtgctacctggagtacataattttgtggcaacattaattgaaggacgtgaccaaaagaagcggccaactgagttcacaatgaaccaagttctccagccatttgttagtgagaagttcaatttcacaaaagtcagcccgttggaggtgatctttagattcaatgacactgagaaagattctgcacaatattttgatggtgttcctgatactgtttcagcttcttctagtgccatcttgattaatgtgagcccaattggctactgccatgtgctattgactcccaagatccaggactgtttgccgcaaaggattgatcaagagagcttcttaatagccatgtatgttgcaagagaagcaaggactcccttcttcagagttggttataacagcctgggcggctttgcaactatcaaccaccttcacttccaggcatactacctgaaagtacagtatccagttgaaaaggcaatcacggagaagctcaagaccctagggaatagcgtgagcatttttcacctggtggattacccagtcaatggctttgtgttcgaaggtggtgcgagcctggaagatttgtcagatgtggtctccaaagtctgcatcttcctgcaagagaacaacagacctttcaatgtcctcatctctgaatctggcaagagaattttccttctaccacagtgctatgcggagaagcagctcctcggaaaggcgagccaagagttcctggacatgagaatcaatccagcaatctgggagctcagtggccatctggtactgaagcggaggaaggactacgaggaggcctctgaagcaaacatatgcaggtttttggttgaagcagctctttctgaaacagaatttcaggagctgaacctatgcgtgctcgacttcctgaccagctctcttggttgaaactcggatgtaggttcctatagatagtaacagttctgaggttccagttaaaacagttgtgctggtactgttactttatgatggtatatcatgtagtagtatttctgatttgactcgtcacctctgcgatgaaataatatgtcttctccggcttcaatttcgtaaaga

SEQ ID NO: 115973 - DNA, 112 bp, Zea Mays
gcacatgagagagagagagagagagagagagagagagagagagagagagagagagagagagagagagagagagagagagagagagagagagagagagagagagagagagaga

SEQ ID NO: 115974 - DNA, 342 bp, Zea Mays
atgagattgtacaagtatgacacaacaagctccttccgcttgtcttcatcagaacgggccttctcaattagcttcttaagggctcttctctcggtgagtgctgccctagaagatgtaattcccaatttaagagcagacatatggaatacctcaagctccccactgtcactggaaccatttgttttattatttctctggagcaatttgatcagctcatcaccagcttccttctctgatctatctaatgtaaaaacaatttcctccagctcaccaacaatctccacaatcttacagccaatatcttcagttactatgctttcagtgcgccttagactctcctga

SEQ ID NO: 115975 - DNA, 1556 bp, Zea Mays
tttcggttttcggaaaggcggcctatatgctgccgacctaggtgacgtgagggcgaccgttcctggccgtcccgctgcgaatccggctgtagctacggcgaacctgctgggggctgggcagcgcttgtcagcagcactcaccagccgttcatccaactactttctagctagaacgcgataaagaagaaaaatcatcgatggtacaatgttcttgtttttcttaaaatgaaaaaaaggaagaaagcgtgaaaaaaaggaacgatactactaaaataaatataccaaaagaatgccttttacctcaagctcgacgaacagtcgctgacatgcgggcacgggtcagctatagtctacctgtttgacgtgtgttcgacgatcttccggatgcgcccactgcaggaatggcggcgagcggaggagcgatggggagctacacgcaggcgggcagcgacgccgcgctgggccccggccacggccacggccacgcgcagctcagctcgcagtggagcttctccaggcaggacctgccgcagatctcggagatggggatgataccggccgacatcggggagagcatcgtgggcgccggcgggtgcaacagctccagcgacgccgcgcagtcctcctcctacctctccaggaccttctccgtcggctcctgggacgacaccaactccatcatgttctcgtctgccccctgcaagaagcccaaggtggaccccgccgccggcgccgacgacatggtcaccaacttcagcaccattgacccgcagttcggcctgtccaactcgtccctggagctgcccggcatggacgactacctgcagctgcagcaggactccgtcgcctgcagagtgcgtgcgaggcgtggctgcgcgactcacccacggagcattgccgagagggaaagaaggacgaggatcagcaagaggctgaagaagctgcaagacctcgtgcccaacatggacaagcaaacgaatacgtcggacatgttggaccttgctgtggagtacatcaaagagctcaaggaccaagttgagaagctaaaacacgaccaagcaaactgctgttgcctaggcaacaagagctgctgctgatgctggagaagcagacggaggagggtttttacgccgtaacaatgtgactgttaaaccagagctgttgcttcaggagaccaggccgcgggcagaagtgcgtgacatgtggagcggcttccatgactcagcttcctcttttcttggttgttccacggactagcgaccggggtgccaacggcttgaagactaggagataacaagtaggacgatgttgtaatttagttaccgcgacgcggtggctctggctttcgtgtaaagaagtcctccctttcaacgcgactgggattgttgttgctggtaaaattgttgtaggaatatcatctgtgctccatttttcatcgagctcatctttttttttgtgtgtcactggattttgacaagaccgtaactcagaaaccgagcactgaccgagcgttcatgccaccccatacgaagtccaagagaattttagtatgacaa

SEQ ID NO: 115976 - DNA, 1513 bp, Zea Mays
attctgaaggtgtttctggaatgtgtagcttggttcttgtattatttcctgaaatatatttttcatctaaatgagtcatttcttgatcataaaaacacagctatacggacgcttcccaaaattacatgtgtatgcgtatggagctgcaccatgtgtggattatgtggtagcagatgcctgctcactatttgttaccagtatagtccataatgatgaattctctgcacggttatccatgaattcagtaattagattgcgtagctcagctgtgaaagctctttcaaagggtacttcccccaattcagctaaagttggtaaactagttggtggaatcatgagtgcccaaacagatgataaagacgcactagatcattgtgcttccgctgatgctctgcagacggttagtgaggctgagctaagtaatgatcaagcgcatggaaggaatccagtgcatacaattaaaggtggtttatttctctttgggcaagcaatatcttgcttgataaatactccaaagcatcgagttaactccacagcagcaattaactatgagttgggcagatctagaattactactgttagtgacggaaggaaatccgtggttgcttcctgtggttttatggatgtttcgcaccgtggagaaggtaatccgcacataaacagtcactttctagaagatggtttgtttgaatgtggtgggggacacatatcacctcattcaaatgatggtcctggactcacgtctgcttctgatggttgcatcattacgataagctcatctgaagggcagtcaccagaggtttatcttcctggtcttgttgttcatgttgttccagtaaagaaaggtgcttctccattgcagaatacaattgtaacacgccaaaagaacaagagttacaaagcgctaattgctcgtcgaagagattttatggaccttgttgtgacacatcacatgttccttgatcatctcccttggaggtgccactatgccatgcaaaaggtcatagaaacacgaaaacgggatcagctcgccagtgatctgtccaccgcagaggaagctgtataattctattagtgcatttcttctttgttgtacatacgttaagaaattgagatcacatggattatgggtcaatgcgggttgatggttacatataacattattgtctgtatcagtagagctttaggagagtttaggacgatcgaaacaggacgtttgcccatctgatgaggattatctgaatctcagcattgttgtacgcagcctttgacataggctggctctctgtgagatcaacccagatgccgttgttgtttatggaaccagtgtggtagatggcagagcctatggtaaattggtaatctccaagtagtgttgtaagttggtacctatccgcagccacgcatgtgcctgttgatgaagtttccttgacactctgctggtccgaagtctgaaagaattccagcctttttcttccaatgaaagtcatgctagcagtatgcatttgaattc

SEQ ID NO: 115977 - DNA, 2871 bp, Zea Mays
gccggcctcgtgcgcccccgcctcgtcgcctccgctagccacctgcccgcttccgccctctctgcctcgcagcagcagcggcatggccgccggcgtgctgtctaccgtccggtggtccaccgcttgcgcggtgctgctcaacgccatcgccgcctccacgggcgccgccgtcgcggccgtcgcgttcggccgctgcggcgggggcgccataggcccggccgccgccgccgcgtccgccgcgttggcagctaggctccttgcttccgcggtggcgggattcgcgcagggcgctgccgcctccgctatcgccgccggtgctatcggggcccacgtcgacagcgagcgcgaccttcgccaactctctcggctacgatacaagagatggctttggtggacaagatttggaatgatcattacagtgctacaatttgtgttggcaatttatttgatgtgtatcatcttaagggatgtcttggctggagggtctccaacacagtgcttttcaggtcaaaatcaaaagagtgatgggaggcgcatcttgttaatagcttttcttgtcactatgtgggtgtcaactatagttcagtgtgctactggttctgatgtactaaggtggagatcattttatgcatcccatgattttgcgtggagggctcactaccgggaggtgtttgatcatggaatccgtgaggtcttatgctgcctagggcgtgttaaatattcgagtgtgttggaagatgatgatatatgtattgtggcaaagttattgggtgatcttatggcttatcgcgcatctggaactggccatcttgaactcgtagcaggactttcactactgcagaaatccaagtcatccacaattatttcaaaagaactagtggaggctcctcaaaatctcatccaagaggctcttctctttcatccatttgctgaagctgcctatacaggcccactgcttgattttggaaggaatcctcttatgtttccctgtgtgtggctcaataggcaaggtgttttgaccccatggactcgtgctagacgaccagttcttgaaggcgataactggtggagagggcatgcagctgctttcctaaaatatgccaatgtggccccagaagtccttcgaaaaggtcgtgttaaccagacaaaacgcgagaccgcctattttgttgttgtcttacactatttgagtacagtagtcattgctgtccgtggaactgagacaccagaagatgttataacagatggcttgtgtaaggaatgttcccttaatatagatgatctggatgggttgatcaattctgatcatctgtctcctcaagtgaagaatgctgttctctcatctccacactatggacatgcaggaattgttgaatcagctcgagagctgtacacagaacttgagggtcatcccatacatgaagataagtcaggtacaatgaaaactggattcttatcttctcttcttggggatggttgtgagtgccatggatacaatattcaaattgttggacattctttaggaggttctgtagctgcacttcttggtattaagctatacggacgcttcccaaaattacatgtgtatgcgtatggagctgcaccatgtgtggattatgtggtagcagatgcctgctcactatttgttaccagtatagtccataatgatgaattctctgcacggttatccatgaattcagtaattagattgcgtagctcagctgtgaaagctctttcaaagggtacttcccccaattcagctaaagttggtaaactagttggtggaatcatgagtgcccaaacagatgataaagacgcactagatcattgtgcttccgctgatgctctgcagacggttagtgaggctgagctaagtaatgatcaagcgcatggaaggaatccagtgcatacaattaaaggtggtttatttctctttgggcaagcaatatcttgcttgataaatactccaaagcatcgagttaactccacagcagcaattaactatgagttgggcagatctagaattactactgttagtgacggaaggaaatccgtggttgcttcctgtggttttatggatgtttcgcaccgtggagaaggtaatccgcacataaacagtcactttctagaagatggtttgtttgaatgtggtgggggacacatatcacctcattcaaatgatggtcctggactcacgtctgcttctgatggttgcatcattacgataagctcatctgaagggcagtcaccagaggtttatcttcctggtcttgttgttcatgttgttccagtaaagaaaggtgcttctccattgcagaatacaattgtaacacgccaaaagaacaagagttacaaagcgctaattgctcgtcgaagagattttatggaccttgttgtgacacatcacatgttccttgatcatctcccttggaggtgccactatgccatgcaaaaggtcatagaaacacgaaaacgggatcagctcgccagtgatctgtccaccgcagaggaagctgtataattctattagtgcatttcttctttgttgtacatacgttaagaaattgagatcacatggattatgggtcaatgcgggttgatggttacatataacattattgtctgtatcagtagagctttaggagagtttaggacgatcgaaacaggacgtttgcccatctgatgaggattatctgaatctcagcattgttgtacgcagcctttgacataggctggctctctgtgagatcaacccagatgccgttgttgtttatggaaccagtgtggtagatggcagagcctatggtaaattggtaatctccaagtagtgttgtaagttggtacctatccgcagccacgcatgtgcctgtt

SEQ ID NO: 115978 - DNA, 915 bp, Zea Mays
atggcagagttcaagatcggtaggctggatggccagccacctagggtcagaaatgtgcccattgccgtcaccccggaaggattctggtgctgcccatcacaggccgcgcttcataagacaacgaagagcccaaaccagcagggcaggcctagagggggagcatcccctgcaccatcgaaggcatcctcggttcagagggtgccaaccatttctttagagaagagagcacaatccactcctactaggtccagaaccaattcagatgagcaagtgtgccctccagcaaatgttgttgctgcccctgatccatcaaaggcagtacctgcaccggcacccgagaaacggccaaagcagcctaagatatcagtcgggtttgggcagctcggcacgagtggtctgaaggttgtgctgcatggcatggaaggggtagctgtgaagatgattgttcacaagagcattcttgctgaaaatagtacctttttgccgatagaatctcgaggcagtctccggtgtcatgcattgaagtgccagattaacacgacttcagagatctcaccactgccaaagccacctccctgggaggcaactccaaaaccaccaccagatgaagctgcaccaagcaaaaccaccacttttggaagcaagagcagcaaaacccccaccagttgcagcggcggcaaaaccaatacctgcagaagcagttggtgtggtgctgaaaagcccccacctgatacaacaccagcaaatccagcattacctgaagataaagaagtaaaacaaccagatgcatgttcatttgggaggggtaagatgcagaagccttttgagaaggccgcatttgctctgaaggtcggggagatcaacgacgtggttgatacagagagcggggtgcgcatcatcaagaggattggctga

SEQ ID NO: 115979 - DNA, 2341 bp, Zea Mays
tggaggccagctgctcgctgaaacgccgcggatgaaacagatgtccgtccgtcggtttgcgtgctaggctactgtgccgcttgacagaagcgggcactcacctctctctctctccccgcacacgttgctgtcggcagcctcaccaatctcggcgccagactgggaccgcgaagggactggtggtcgccggttcctcccgctactccggctgcttttcctcctctctccgtcgccttccccttccgggctgcccatatttcattcggtgccaacaagtgccaagtgctcgtgtccggatgcgccagcgccgcctggtcaacagatttttgccctgcgctgtcactccaccacgctgcttgtactgaaagctttttcccagaataaaggctggggaggaggaagcggcggcggcggcgctctcagaagagagggtgagatgaagactcggagctcagcgagaggggagccgaggcgtctcggaaatgcggctcttctggcgctcatgctctgctccgtcgtcgcgctctccctcatccgggggagattcgccccaattgtcactaccgcaggagatgccatcaaatccgaggacgacgctgcggcggctgcgctcagtgtcagcaaggcggccgtcaacgttgacaccggcgacagcgccgacgaggccgccgccgaagctgctgctgaggagaaagagaaggaggaagtccagccgaagcccgctgacagttccggctccggttccggtggcagcgcagccaagccggtgtgctacgagacgagccgccgctccgacacctgcgaggcagctggcgacgtgcgcgtcgtggggagcacccagacggtgtacgtggactcgctggaccgggagtggaagaccaagccgtactgccggaagcacgacaacttcgcgctcgcccacgtcaaggagtggtccctgaagccgctcccctccggcgcggcgccgcagtgcacggtcaacagctcggccaccgcgttcgtgctgtccacgggcgggttcaccggcaacccgttccacgactacacggacgtgctcatcccggccttcatcacggcgcacccgctccgcggcgaggtccagttcctggtgagcagctacaagtcgtggtggatgaaccgctacatccagatcttccagcagatgagccggcacgaggtggtggacatcgacgcggacgacgaggtccggtgctaccgcagcgtggtggtgggggcgacgttccaccgggagctgggcgtggacgcgtccaaatcgccgccggggtactccacggccgacttccgcaagatgctgcgcgacgcgttcgggctggagcgtgccacggccacgcccagcggcgaccggtgggacatccggcgccgcccccggctgctcatcatctcgcgccgcccgtcccgcgggcgcgccttcatgaacgagcgcgccatggcggacatggcggccagcctggggttcgacgtgcggatcggggagccagacaccagcaccgacacgtccaagttcgcgcggctggtgaactcgtgcgacgtgatggtgggcgtccacggcgccgggctcaccaacatggtgttcctgcctgccggcgccgtggtggtgcaggtggtgccgtacgggcggctggagtggctggcgcggaacacgttcgcggagccgtcggcggggatggaggtccactacctggagtacgtggtgcagctggacgagacgacgctgagcgagcagtacccgagcgatcacccggtgctgagggaccccatggccatccacaagcaggggtggaacgcgctcaagaccacgtacctggacaagcagaacgtgcggccgcacctgggccgcctcaagaacaccttcctccaggcgctcaagatgctgccgcacggccgggacgattgataagtcaaattagttgattcacctggatctcagcctcagttatttagagggagtaaatgtataggttaatggtagctactacttttttcggcttatttgttttttttttgcctttatttgtttgtacgagtaagaggatgcaccagcgtagctgtgaatggcttcacagttctcagagacgaactagtagtgttaaccgttgatattttattattatatatgttgctttggtagcatggaacgtgattgcagtgatgtgctttgactaaggccctgtttgggtccgctagtttattagaaactggtttttaaaagttaaaagttcttcaaacaggtcaatttttttattcactttcctaaaatatagtttcagttttttattcaaaaacagaccagtttcttcagctaaaactagtttataagaaa

SEQ ID NO: 115980 - DNA, 108 bp, Zea Mays
atggagcaaacaatgttgttgagtgggatccaggtttctgactatgcaatgtcattcatcaagggtaaatcactcaagccatttggcatagcgcactaccttttctag

SEQ ID NO: 115981 - DNA, 1083 bp, Zea Mays
atataatagggtagacgcccaactcgaacctgagtacctgagaaatggcggccgtctcctccacctcaaccgccgcctcctacttctccccgcagccgcagctgccgatctccaccgccgaccctgccgccagcaaaagtaggttgatgcggcagccacggcggagcagcagcttcgtgatggtggaggcgtcctctgccagcggcagcgacggcggggtggccaggacgaagagcctcacggaggacgacctggaggagctcaagggctgcctcgacctcggcttcggattcgcgtacagcgagatacccgagctctgcgggacgctgcccgcgctcgaactctgctactccatgacccggaggttcctcgacgagcagaaggcgccggggcaggatgaggagttggagcctgcgtcgccgccgctccccaattggaggatctctggcccggaaggacatcgatgatagacactgcaggattctacctaccttttggggtgacgatccagaagaagtgaaggcgaggttgaagtattgggctcaagctgttgcatgcactgtcaagctctgcagctaaactaaaggtcggatagaggctgaagaatctggttatatggttttgggatacagggagcggaagggggtgcttctgctctctggcatggaagcgacatgagtgatctcatctgcttctacaaaaaaacttgggaagggggaggaaccatgatacggaacagcgacagacctcgattcagaatttgagatccatggtctgagcttctacgaaagggttcggaagccttgccattcctcagggtgggtggtccgcatagtgcagcgtttccaaatgcatgacctgctggttctttttgctgtttccttgtaatgatcaataggtgctctaattgtcgcactcttgtaataatgtactgaatcgaattttgagttttggccttttgggtactgatccaagggttgattagttccaacattggtttattttgtgctactctgatattgccatgtgcattatgctgttctacacgttcgtagaagttaatagcgcgtttggtttcagtaa

SEQ ID NO: 115982 - DNA, 1037 bp, Zea Mays
atataatagggtagacgcccaactcgaacctgagtacctgagaaatggcggccgtctcctccacctcaaccgccgcctcctacttctccccgcagccgcagctgccgatctccaccgccgaccctgccgccagcaaaagtaggttgatgcggcagccacggcggagcagcagcttcgtgatggtggaggcgtcctctgccagcggcagcgacggcggggtggccaggacgaagagcctcacggaggacgacctggaggagctcaagggctgcctcgacctcggcttcggattcgcgtacagcgagatacccgagctctgcgggacgctgcccgcgctcgaactctgctactccatgacccggaggttcctcgacgagcagaaggcgccggggcaggatgaggagttggagcctgcgtcgccgccgctccccaattggaggatctctggcccgggtgacgatccagaagaagtgaaggcgaggttgaagtattgggctcaagctgttgcatgcactgtcaagctctgcagctaaactaaaggtcggatagaggctgaagaatctggttatatggttttgggatacagggagcggaagggggtgcttctgctctctggcatggaagcgacatgagtgatctcatctgcttctacaaaaaaacttgggaagggggaggaaccatgatacggaacagcgacagacctcgattcagaatttgagatccatggtctgagcttctacgaaagggttcggaagccttgccattcctcagggtgggtggtccgcatagtgcagcgtttccaaatgcatgacctgctggttctttttgctgtttccttgtaatgatcaataggtgctctaattgtcgcactcttgtaataatgtactgaatcgaattttgagttttggccttttgggtactgatccaagggttgattagttccaacattggtttattttgtgctactctgatattgccatgtgcattatgctgttctacacgttcgtagaagttaatagcgcgtttggtttcagtaa

SEQ ID NO: 115983 - DNA, 1533 bp, Zea Mays
attaattcacaaaagctgagaagacggggggtcacacatcatacttcttttgccattgcaatggaaaacaactacgcatgcccaccacccagcaagggaaacctgatcacagtcttgagcatcgatggtggtggggtcaagggcgtcatccctgctaccttccttgcattccttgagtctaaactccaggagcttgatgggagcagcgcgcgcatagctaactactttgatgtcatcgctggcacaagcacaggtggtcttattgctgcaatgctggcagctccgtcgctgagcaatgccaagcaaccatgctatgaggccaaggacatcgtgccattctacctcgagcacagtcctcgcatcttcccatgcagaactgggattttgggctggttcttcaagatcctacaaacagttaaggtgatgatcgggccaaaatatgacgggaagtacctgcacaaagtgaccagtgatctgctgggtggtaccagagtggaagagacgctgacaaatgtcgtcattcctactttcgatgtcaagtgcgtaaagccaacaatattcagcacattcaaggcaagatctagtgccttgatgaatgctcgtcttgctgatgtgtgcattggcacgtccgcagcaccgacggtcctccctgcgcactactttgaaaccgtggatcaccgcactggcgcatcgcgtagcttcaacgttatcgacgggggcctcgccgcaaacaatccgactctggtggcgatgggtgagataacagaacagatgaggcagaagagcaaggagttccccgagaccaagcccctggactaccacaggtatctggtagtgtcactaggcacaggccttccagagcaggacatcaagttcgacgcgtgccgtgtcgccaagtggggcatcttcggatggctcggccgccgggagaacaccgtgcccttgctgcagatgttcatgcacgcgagctcagacatgacggacagctacgtcgccgaccttttcaaagcgatcgggtgctcggaccaactgctgctgcgtgttcaggaccgcaacatacccatagcggctgtggcagctgacctctcgacggagaagaatctgcgagggctggttaagattgcagagaaccttctgcataagccactaggcgaggacgattataagaccgacgaccgcgtcgagacgacgccgagagatggccgtgccatactaacctatgctggtatgctcgcacggtttgcaaagctcctttctgatgagaggaagcttaggcttcagaacatgggacactgtatgccggtcatagcaaatcgtgaagcttgagaggtcttccgaaacacatattgatacatccatcttataggagttagagagttcgttcgtgtaggctatctgcaagctgttgtgtgtgtattgcaagttgtgacgacgacgtgagtgtgtacgtaaatggataaggcgatatggtttgctttggagccctgtacgtaaatggagaaaatgtgatgccctggcgtctggttgtctagc

SEQ ID NO: 115984 - DNA, 1682 bp, Zea Mays
attaattcacaaaagctgagaagacggggggtcacacatcatacttcttttgccattgcaatggaaaacaactacgcatgcccaccacccagcaagggaaacctgatcacagtcttgagcatcgatggtggtggggtcaagggcgtcatccctgctaccttccttgcattccttgagtctaaactccaggagcttgatgggagcagcgcgcgcatagctaactactttgatgtcatcgctggcacaagcacaggtggtcttattgctgcaatgctggcagctccgtcgctgagcaatgccaagcaaccatgctatgaggccaaggacatcgtgccattctacctcgagcacagtcctcgcatcttcccatgcaggtttgtatggctagctgtttaacgaatatctgtacgatttcccatctgagactgctcagttttatctatctctaaattgtttatgtacaaggtaaccagaatttcgcgttttgtctcagtatgtatgtattactatatctataaaactacatggaaaaaaaaatacttcaccttgttattcgttctgatgctgcaagaccagaactgggattttgggctggttcttcaagatcctacaaacagttaaggtgatgatcgggccaaaatatgacgggaagtacctgcacaaagtgaccagtgatctgctgggtggtaccagagtggaagagacgctgacaaatgtcgtcattcctactttcgatgtcaagtgcgtaaagccaacaatattcagcacattcaaggcaagatctagtgccttgatgaatgctcgtcttgctgatgtgtgcattggcacgtccgcagcaccgacggtcctccctgcgcactactttgaaaccgtggatcaccgcactggcgcatcgcgtagcttcaacgttatcgacgggggcctcgccgcaaacaatccgactctggtggcgatgggtgagataacagaacagatgaggcagaagagcaaggagttccccgagaccaagcccctggactaccacaggtatctggtagtgtcactaggcacaggccttccagagcaggacatcaagttcgacgcgtgccgtgtcgccaagtggggcatcttcggatggctcggccgccgggagaacaccgtgcccttgctgcagatgttcatgcacgcgagctcagacatgacggacagctacgtcgccgaccttttcaaagcgatcgggtgctcggaccaactgctgctgcgtgttcaggaccgcaacatacccatagcggctgtggcagctgacctctcgacggagaagaatctgcgagggctggttaagattgcagagaaccttctgcataagccactaggcgaggacgattataagaccgacgaccgcgtcgagacgacgccgagagatggccgtgccatactaacctatgctggtatgctcgcacggtttgcaaagctcctttctgatgagaggaagcttaggcttcagaacatgggacactgtatgccggtcatagcaaatcgtgaagcttgagaggtcttccgaaacacatattgatacatccatcttataggagttagagagttcgttcgtgtaggctatctgcaagctgttgtgtgtgtattgcaagttgtgacgacgacgtgagtgtgtacgtaaatggataaggcgatatggtttgctttgg

SEQ ID NO: 115985 - DNA, 844 bp, Zea Mays
cccgcaaacacggagctacagcccgagagccaggctgctcggccatggcggcaaacacactctaaactaccctgccccggtgcccccgctccacgacgccgcggcaccgcacccgcacgtagtccggacggcgagcacttgagctgagtcggccgcgcttcggctttctcgcccgagttactcggtgccgcgtcttccctctttcggcggcgtgatctgcgtctcggcgctaagatagctgtcgtctcccggctcccgcacttgcacaagaccttgagctgatcggccggccttctgcgcgacggtgtatctccgcttctctttttgataatttcccgcaagtcccctcacttcggatttgactgaaggagttggttttcctcctctcgcgctgaagtaggttcagtcaaaagtcagaccggcctgtgagcggaattttcctggcttggatccgaaagcctgtgcattggctacgacaactggtggaaagcggttggtcatcaaatcgccgctgctaaagtttctgctccctgaactcagttggatcatagagttttggttcagtgtaccatcctgaattctgccgtgaattgttggatgtgttgtttgatcccaattgcattaaaaaaaaacttctattttgggctgggggctacaactacaagagagcaacaacaagaaggctcgatcagctcgttctttttgttgaccatctctgtctggcgagtgcttgaggaagaaaacgacttgctcagctcgccttttcgttgttgatccgatcaaagactagggaaatgggggtaatgtcacgacgggttctgccggcctgcagcagcctttgcta

SEQ ID NO: 115986 - DNA, 2005 bp, Zea Mays
gccacagtagactgaacactggcacacagcgccctcggatctgccgctctcgtctcgctcgctcgcgtgcattggccgacaagggacgccacgccggcgtggctgctcacgtgttctcagttcttaccctgcgctctcgccgcccggggcaactggcgagcgagtgtggctgccgcttcctctccgagtcaggcgccatttaataattcaattctacccccaagcccacgcttccgaattcaccgactcctcctccacgccgcgtcgagatcgctcaggccttcgcttccagcaactccaccactcagcccacccgccggagcaatggggagcacggggcgcgagccggaggtgacccgcgccgacttccccgacggcttcgtcttcggcgtcgctacctccgcgtaccagattgaaggagcgagaagggagggaggcaaaggagacagcatatgggatgtatttacagatgacaaagaacatgtcttagacagaagcaatggagaaattgcagttgatcactaccatcgatacaaggaagacattgagctcatggcaagtctaggttttagcgcatacagattttctatatcttgggcgcgtatatttcctgatggcttggggggaaatgtcaatgatcaaggagtcgccttctataatgacctcatcaattttatgatttcgaaaggtattgagccttacgcaactctatatcattgggatcttccaaacaatcttcagaagactctggggggctggatttctgacaagattgtggagtactttgcattgtatgcagaagcttgctttgcaaattttggagacagggtaaagcattggataacgatcaatgaacctctccaaactgcaatcaatggttatgggattggaatttttgcacctggaggatgccaaggtgaaactgctagatgttacttggctgcccatcaccaaatcttggctcatgctgctgctgttgatgtttatagaagaaaattcaaggttgcacaaggtggtgaagtagggttggttgttgattgtgaatgggcagagccattttctgaaaatgtggaagaccaaattgctgcacagcggaggcttgactttcaacttggatggtacctagatccaatatattttggtgattacccagaaagcatgcgtcagcgactgggcagtgatcttccaaccttttcagagaaagataaagagttcatgaggaacaaaattgattttgttggagtaaatcattatacttcaagactcattgctcatctccaaaatccaaatgatgtttatttctaccaagtgcaacaaatggagcgaatagaaaaatggaatagtggtgaaaaaattggtgaaagggctgcatctgaatggcttttcatagttccttggggccttcataagtcacttaattatatagcgaagaagtacaataatccagcaatttatgttactgagaatggcatggatgaagaggacgatcaatccgcaacgcttgaccaggtcctaaacgacacgacgagggtcggttacttcaaagggtacctcaattcagttgcgcaagcgatcaaggacggagctgatgtccgcgggtactttgcgtggtcgttcctggacaacttcgagtgggcaatgggctacaccaagaggttcggcatagtctacgtggactacaagaacgggctgtccaggcacccgaaagcatcggcgctgtggttctcgcgcttgctcaggggcgaggctggcactggcacaagctgagcgaactgcacgcaggaagcaagcacagaacgtcgttattacaatataaatattccacacaactagacgtttttctcctgttgttgtatcgtactactgtacagtaagcgccaataagctagcctcagatgtgtgctgcctgcctatacctctagtgactgccattgatccagcactagctgaaatgtacccggcctccaagaatcagcaccagaatatatgctttgaattgaactca

SEQ ID NO: 115987 - DNA, 2185 bp, Zea Mays
acctccctcctccacgtctccaccacgaggcacgcaacaattagaacacatctcgccgccgccgaggacgacggcgatgatgtggcgttcgcgagctcgtgcgctgctcctactccgctcgaccattacccggccaccgccaccacctccacaaccatatcccactcgaaccctaacccgagtcccacctccccgcttcctgtcctcctccccggatcccatccccgattcctcctccgccgccgccgcggatcccttccctgaagccttctcctccccgaccaaggcttctcaagatgccgctgaggccggagaggacaacctgagctcgatgtgggaggaagctggccacgccgacgacatctttgcctcccctggcagcgccgacgccgtagccgacgatgaggaggtcgcccgcgtctgcgccgccgtggagtccacccccgaggacgagatcgcgtccaccctcgctgacatgaccgtggacttcaacgagccactcctagccgcagtcctccttgctgctgaacaatgctcctgtaagaagctgatttccctgttcaactatgccgcgaagaataaccccgcttccaagagcctctcgaatcttgaggttctcgtgagcaagctagctgattctgctgagatagacaaggcagacgcttacttgctttgggattcgattaaggaaataggctctgtgtcaggatcagtgagtacaccgttgttgaatgaaatgattgccatattttggaaggttgagaagtcgaaagcagcgttggaggtgttctccaagttcgatgagtttggttgcactccggacagtgacagctattatcttgtgattgaagcagcacgaaagaagtccttgttccgctctgcttgtgaagtctgtgagaagatgattggctctgcctgcttccctaatggtgagaaggttggcaggattttgatttacctttgtgaggggaagaaggtgaagatggcacactcattatatcttgcagtgaaggaaaaaaagattccagtcccaaaactagccttggatttccttgttggtgctttggcaaggaatgatgagaccattggtactgctctggagctgctggaagagtaccaaggggagtcgcttaagcatgcaggcaagtcctttgccacagttgtacatgctttgtgtaggctaaacaaaatggaggatgcaaataatttgttgatgaggatggtgcagcttgaagagtacaaaggggaatctcttaagaatgcaggcaagacatttgccacagttatacatggtttgtgtaggaaaaagaaattggaggatgcaaaagcattgttgatgaggatggtaaatgttgggccagctcctggtaatgcagtgtttaattttgtcatcacagcattgtcaaaacagggagaaatggaggatgcaaaaggtttgatgagaatgatggagagccaagggatcagccctgatatctatacttacagtgtgctcatgagtggctacgcgaaaggaggcatgattgatgaagcccatgatctacttcgtgaagctaagaaaattcatccgaagctaaacagggttgcttatcacatacttatccgtggatactgcaagatggaggacttcgagaaggccaatgagtgcctaaaggagatgaagaaagatgggttgcagccaaatgtggatgagtatgacaaactgattcagtcattgtgtctcaaggctatggactggagaagagctgagaaactcctggaggaaatggaggatagtggtttatgcctaaggggtataagtcgcagcctcataactgcagttaaggagttggaaggggaggaaatgcagtcaaaggcgagccaagaagcatagtttctctaggatactcaaatccatatgtctgctaattaacttttggatagaacctttctttttgagcttttcagctctggtgagcttgcaagaaacatcatctttgtacctgtttttgtttgttgttatttactacaataattttgcatttatatttaaatgctagactgacaaagaagaatatttagttttggtctggacttctggagcttctgtttaggatttccatgcgccattctacatgtcgataatttattttcatgtcttatttaagaacacgaatgaattttggctgccagtggaattcaagtt

SEQ ID NO: 115988 - DNA, 907 bp, Zea Mays
attcatcaagccggccctagaatggttaaaccctagtagagagaaaggaagagaagggggcggagaagcacgtacgtcgtacatcgcccaccgccctttgcctcgcctcgcctcgcctcgcctgcatatctaacagccggagccggagccggagccggcgccgacaatcgttccaactgatatggctacgacgccgccaggattcacgggcaacctgaagaaagcacttgcaggtctgagaagaatcagtttagatgggttgcgatggcgcgtatttgatgctaagggtcaggtgctcgggcgattggcttcccaaatagctgttgtgcttcaaggaaggaaaatgacagataagatttactattggcatacagggtatgttggccatttgaaggaaaggaggctcaaggaccagatggagaaagacccaactgaagtgattcgcaaagctgtgctgcgcatgcttccccgcaacaaactgcgtgatgatagggatcgcaagctgaggatattttctggaaacgaacatccattccatgaccgccctctggaaccttttgtgatgccgccacggcaagtacgcgagatgcgcccccgtgcaaggcgtgcaatgataagggctcagaaaaaacagcaggcaaacagagccaaagaggaggaagatgctaagaatgccgcagcggaggtcactgcataggctcctgatgtggatttgcatgctgccaatttttttgcttggtagcatttcgagtggaataggcactaaaagctgggaatgtgccaacttcgttctgaatttattttgtattctattacaatttgtaactggaaccctgcctgtcacagctgcttgaaggttagaaagttgaaatatcacttttgcatcatattaagtaagctgaaataa

SEQ ID NO: 115989 - DNA, 991 bp, Zea Mays
attcatcaagccggccctagaatggttaaaccctagtagagagaaaggaagagaagggggcggagaagcacgtacgtcgtacatcgcccaccgccctttgcctcgcctcgcctcgcctcgcctgcatatctaacagccggagccggagccggagccggcgccgacaatcgttccaactgatatggctacgacgccgccaggattcacgggcaacctgaagaaagcacttgcaggtctgagaagaatcagtttagatgggttgcgatggcgcgtatttgatgctaagggtcaggtgctcgggcgattggcttcccaaatagctgttgtgcttcaaggcaaggataaacctacctatgcaccacatgtagaaaatggagacatgtgcattgtacttaatgcaaaggatatcagtgttacaggaaggaaaatgacagataagatttactattggcatacagggtatgttggccatttgaaggaaaggaggctcaaggaccagatggagaaagacccaactgaagtgattcgcaaagctgtgctgcgcatgcttccccgcaacaaactgcgtgatgatagggatcgcaagctgaggatattttctggaaacgaacatccattccatgaccgccctctggaaccttttgtgatgccgccacggcaagtacgcgagatgcgcccccgtgcaaggcgtgcaatgataagggctcagaaaaaacagcaggcaaacagagccaaagaggaggaagatgctaagaatgccgcagcggaggtcactgcataggctcctgatgtggatttgcatgctgccaatttttttgcttggtagcatttcgagtggaataggcactaaaagctgggaatgtgccaacttcgttctgaatttattttgtattctattacaatttgtaactggaaccctgcctgtcacagctgcttgaaggttagaaagttgaaatatcacttttgcatcatattaagtaagctgaaataa

SEQ ID NO: 115990 - DNA, 699 bp, Zea Mays
attcatcaagccggccctagaatggttaaaccctagtagagagaaaggaagagaagggggcggagaagcacgtacgtcgtacatcgcccaccgccctttgcctcgcctcgcctcgcctcgcctgcatatctaacagccggagccggagccggagccggcgccgacaatcgttccaactgatatggctacgacgccgccaggattcacgggcaacctgaaggtgagttattgaaagatccccgtccgccaccgcacggttcaggctctttgccagttccggcgcactgctagggcggcatcgacacatcaacaccacccatggctaccatccctatccccaagcgtcgtcgcaggtccctgcccgggcgcgttgcgtctccatcccagggcttccgccactcgagaaactctttgctactgcgcccccatccgctcccttcaatcgggggcatgaatgatttgccgccgagctgtgctgatccgggggcccgacgtctgtggcactcagtcctcctatttgcgcttagtagtaggttcagttctctgcagacaatagctgaaacactactgtacatggatcttgggttaatttgactgcgaatgttatgattttattcggcatcagttgattggattgattgtagcttgaacctttgatcctgattatccaccattttatctcccctggttgtgaataaa

SEQ ID NO: 115991 - DNA, 1155 bp, Zea Mays
atgactttagcaaaggcgtatgtcatccttgcaaaagaacatgataatcttcagcttgcatgggagcttagttcgcagataaggaattgtcaaagattgctctctgaaggggtagttagtgggagagcaatcactaaagatgaagcccatcctataataagccggctagcattgttaatatacaaggctcaggactctcactatgatctcagcacaacaatagtgacattgaagaaccatgccctggcactagaggagcgtgcaaaggcagcaattgttcagagtgctgagtttggccagttagcagcagaatccttcccgaagaatctgcactgtctaactgtgaaactgaccgaggagtggcttcggaaccctaagcataggagtcgctcagaggagaaccggaattccacacgattggtggataataataatctgtatcatttctgtatattctctgataatgtgctggccacttcagttgttgtcaattctacagtctccaatgcaaatcaccctcaacagcttgtgtttcatgtggtcaccgacagaatccattttggcgcaatgtcaacattattcctcataaatgacttcaaaggttgtactgttgaagtccgatgcatagatgagttctcgtggttgaatgcttcttcatctcctcttgttaggcaactatctgaggatttgactcagctgttctccatagagctgcatggtaatgtcattggagcagtggaaacttgtttagagtcgtttcatcggtatcacaagtatctaaatttttcgcatcctactatcagctccaagattgatccacatacttgtggatgggcttttggaatgaacatctttgacttgatagcttggaggaaggcaaacgccacatcattgtatcattattggcaagagcaaaattctgacctattgctctggagaacaggaactcttcctgcaggtcttttgacattttatggcctgatggagcccctagactgcagatggcatgtcttgggtctcgggtatgatgtagacatagatgatcgtatgattgagagtgctgctgttgtgcactataatggaaacatgaaaccctggctgaagttggctattcgccgttacaagtatatatgggagcggaaatgcaaattgtga

SEQ ID NO: 115992 - DNA, 444 bp, Zea Mays
atgaggtcggctggcaggacgaagctggacggcggcgcgaagcagagatgtcgtggattagagccgaggttggcagatctgttcgcttctgcagctgcaatctgcaatctgctcggcgagatgtggcagtccgcctggcgtgaacctgccggggcagtggcggagccaggatacttcatagactgccgggctgcgactgcgctgcttgctggctgctggtcacgtgtggcccctggccccatgcgcctgcttgttgcgctgcttgcttgcccggccgcctgcgctgcgcctgcttgctgcactgcttgcttgcccggccccctgcgcctgcttgcccggccgcccgcatgtggcccctgcgccggcagaagtgacggccggctgcccctgctcggtgcctcagctcctggtccgcgcgagaagcccgcagccaccacacagtag

SEQ ID NO: 115993 - DNA, 2514 bp, Zea Mays
gatacgatggttagaccttagtggaaaaccgttcccatagctcagtgttgtgcacctttgccactggttcattttttttctccgctcgaagccctcctatctcgatcgattttctctctgctctgacggctcttgggaaaccctagccgtcgggcgccctgggcaagcccaccggaggacgccggagccgaaggggagtcgcaaacgcagagatccggctacaacgtggctttcccgaccggttgtggcggcgatttcgcatcacatagatccgctcgtggccttcccttctgcgcggtcggtggatcctctggagctccgctggcgccccgagcagggctctctcggcgtggagggcggaggcaagggacgggtgtggcagcggcttcggccagcccacggctcccagcccctggcgggcagcactcagtccctggcggcgagctcgtattcccagaccttgcctccactttctggtggttctagcagcaattcgatttctggtgagaaatttcactccgaagatggttcaactctttttgcaagtgccggcagaatgcggcagtgttaatacagttgtcgtggaagggaggagatctctttttcacaatgttgagtccataatcaagtcattgacaaaatcagcaggcaggtatgaagctcggctgtggctctgtgccactgtctcgttggtccattcgctcagtgactgtggccagagggacctgtttcttgatctcttagagaggaagaattccaggcgtgatgtcgctgctcgcttgctgcgtatgattttcgataagaaacccagaatggttgggtctattctagcaagaaaaggccatatactggaggatttcttccgaggaaatccaaacaggataatgcagtggtttggccactttgctgttactggggaatccacacatagaaagggagctaaggcactttcgcagtttgcgtttgtaaatcgtgacaggtgctgggaagaacttgagtggaaaggcaagcatgggcaatctccggctgtagttgctaccaagcctcactattttcgtgatcttgatgttctcgagacagtggagaatttcttagagtatgtcccagatttctggtcttctgatgagcttgctaattctatcaaagatggtgaaatactgcaaatcgatgaagaatattttgtagatcaatttttatacttaatgtatgaggagaattccaaagatgcatggcatgtggttgaagattttttgatggacgagcagttctcttctctttgccagcatcttcttatccatctggatgaggaaaggcttcttggtttcttaaattctttaggcaagctcatcaatcctactatgcagtgcaaggaattgacattcccgtgttgttggcttgaagttcttttatcaggacattatgatcacatatctcttgatgatcttgtctttttgaactgtgtcattgccaagggtagacaactttggcggctcatgaacgatgaagaacaacacgaagaatgggggcaaatggaagaacttttgaagggcggaaaccatttgactgatgctgatcattttgctctcatgaaggaacttgtggagacagaattacctggtgtgcttaagtgggtaggcattcagtcctggataattttctgtgaattgtcgaaagaatgcaaatcaggagattcttgtgaatcttttttctctcataacaaaatagaatttcacaaggctgatgattactcattggttcggaattatgggttctcaatttcacatatgcctgatattgatgttgaagatctaactagaagcagccataaaaggagaaagaggaataggagaaagcgccataggtacgagtctgatgaggacaagtttgatgaactgcttgaacttggatcatctgatggaaagaatggtgttgagtcacagcgtggaagctggcgcctttcaactgatggtttctctgcttcttgggacatttcagacataccagatcacctttctacttgttatttcacaatttgggtaaagtgggcttgctttagatgattgtctacacagtatgtgtagtatatcaatctgggtgccttttcagctacagaatctatgagcatggagctcaggcaggcatatttctgcactaattctgcaacattttggtgatgggttctgatgatgcattctgggattgctgaacgctgcatgagatccaggacaactctctttagttgggatgctgaaggttgacacctgttgaagaattttggttgcataggcattgaatatggtccaggcatttccttgaaacccatttggactttggagttagttgtagagaactcaggtattgactaagctaagcaaaaacgagtttgtaattgtgttgtctagtgctagcgacattttgccaactacacctgttgtaaatataccagattgttgctgtgaatttgattggaattgggttgaattggaatttaattcttgggctgacctgtttggc

SEQ ID NO: 115994 - DNA, 627 bp, Zea Mays
gagccaggggcgcggtagagagagcagaggcgcggccgagtctgctcctagtcaacggccaccaggacgaactcgagcagggcggccatctggggacagggaagaagggcgcgcagcaggggcacccgacggtcagccatgggagagggagcttggctgcggcgcggcacttggaggagagctcgaggtggtgctaagggagacgagcgggagttggccggcggacaatactcaagttgagctccacggcgaggaaatccactccagggagccgagcgcgagaggcagacggccgagcggaaggaagatccaagctgggggccgaacagggctagagaagagagaaaggagaaggctggagcggaagaggaaggaagccgcggcagagagctcgccgctcacgcggccgtgacgagcagagcacggcgggccagggcgagcagagagagcagaggagatccggccgacggcgtcgttgggcgagcaggagccagggaggaagaagaacgcagagagcagggagacgcgcggctggagagaggtggagggaggagagagatccaggcgccgagttggaggaggaagaaggagcttgggcgagccgagggagaagctgggagctgcggc

SEQ ID NO: 115995 - DNA, 1173 bp, Zea Mays
tttctgcttattactatggtacttgagctccagtggcataatattgtacctcttaactagacctccttagaccaacaaggacatcacagcacaaatcatctctgctagtatagcaggtgatatggttcttgcttctgcttactcgcatgagttgccacgatatggtcttgaagttggtctgaccaactatgcagctgcctactgcactggccttctgttggctcgccgtgtgctcaagacccgtggtttagataaggaatatgagggcaatgttgaggccactggtgaggacttctctgttgagccagctgatgagaggaggcctttccgtgctctcttggatgttggccttattaggactacaactgggaaccgtgtctttggtgccctcaagggagctttggatggtggactggatattcctcacagcgagaagaggtttgctggtttcaagaaggatgacaagcagctggatgctgatatccatcgcaagtacatctatggtggccatgttgctgactacatgaggaacctcgctgaagaggagccagagaagtaccagtctcacttcagtgagtacattaagaagggaattgaggctgatgacatggaagctctgtacaagaaggtccatgctgccatccgtgctgatccttctgtggtcaagtcaaccaagcagccaccaaaggagcacaagaggtacaaccccaagaaactgacatacgagcagaggaaggccagtctcattgaaaggctcaaccaactcaactcctcgggcggcgcagatgacgacgatgaggatgacgagtaaagtttggtcccatcgaagtagtgctatcttatgcggcgatcagtatttgtgctatggcatttatcgctacctgtagtcgtgcaacatgcatttttgtttaagtttgtcgatgcgaacaaagttgtttctgttagtttggagctggagttctgaatatttacttttataatattaaaattggaccgagttgaacaaagtttattttagtttgggcacacaagattagagagctagcgagaaactatggcatacgcggtcggttaggaatagtgtcaattgaaaaaaagcttatttaacatcaagttgaaatggtttgggaatgaaatatctcaatggagttgtcaagttgaaatggtttggga

SEQ ID NO: 115996 - DNA, 898 bp, Zea Mays
cttcccttctgtcgctgctcccacctctagcccgacaggtgaagccgccgccgctgcagtgtccatagccaccgcaggagactgagatggggggttttgtcaagacccacaagaccaatgcgtacttcaagcgtttccaggtgaagttcaagagaaggcgcgctggcaagacagactacagggccaggataaggctgattaaccaagacaaaaacaagtacaatacacccaaatacagatttgttgtgcgatttaccaacaaggacatcacagcacaaatcatctctgctagtatagcaggtgatatggttcttgcttctgcttactcgcatgagttgccacgatatggtcttgaagttggtctgaccaactatgcagctgcctactgcactggccttctgttggctcgccgtgtgctcaagacccgtggtttagataaggaatatgagggcaatgttgaggccagtctcattgaaaggctcaaccaactcaactcctcgggcggcgcagatgacgacgatgaggatgacgagtaaagtttggtcccatcgaagtagtgctatcttatgcggcgatcagtatttgtgctatggcatttatcgctacctgtagtcgtgcaacatgcatttttgtttaagtttgtcgatgcgaacaaagttgtttctgttagtttggagctggagttctgaatatttacttttataatattaaaattggaccgagttgaacaaagtttattttagtttgggcacacaagattagagagctagcgagaaactatggcatacgcggtcggttaggaatagtgtcaattgaaaaaaagcttatttaacatcaagttgaaatggtttgggaatgaaatatctcaatggagttgtcaagttgaaatggtttggga

SEQ ID NO: 115997 - DNA, 1357 bp, Zea Mays
cttcccttctgtcgctgctcccacctctagcccgacaggtgaagccgccgccgctgcagtgtccatagccaccgcaggagactgagatggggggttttgtcaagacccacaagaccaatgcgtacttcaagcgtttccaggtgaagttcaagagaaggcgcgctggcaagacagactacagggccaggataaggctgattaaccaagacaaaaacaagtacaatacacccaaatacagatttgttgtgcgatttaccaacaaggacatcacagcacaaatcatctctgctagtatagcaggtgatatggttcttgcttctgcttactcgcatgagttgccacgatatggtcttgaagttggtctgaccaactatgcagctgcctactgcactggccttctgttggctcgccgtgtgctcaagacccgtggtttagataaggaatatgagggcaatgttgaggccactggtgaggacttctctgttgagccagctgatgagaggaggcctttccgtgctctcttggatgttggccttattaggactacaactgggaaccgtgtctttggtgccctcaagggagctttggatggtggactggatattcctcacagcgagaagaggtttgctggtttcaagaaggatgacaagcagctggatgctgatatccatcgcaagtacatctatggtggccatgttgctgactacatgaggaacctcgctgaagaggagccagagaagtaccagtctcacttcagtgagtacattaagaagggaattgaggctgatgacatggaagctctgtacaagaaggtccatgctgccatccgtgctgatccttctgtggtcaagtcaaccaagcagccaccaaaggagcacaagaggtacaaccccaagaaactgacatacgagcagaggaaggccagtctcattgaaaggctcaaccaactcaactcctcgggcggcgcagatgacgacgatgaggatgacgagtaaagtttggtcccatcgaagtagtgctatcttatgcggcgatcagtatttgtgctatggcatttatcgctacctgtagtcgtgcaacatgcatttttgtttaagtttgtcgatgcgaacaaagttgtttctgttagtttggagctggagttctgaatatttacttttataatattaaaattggaccgagttgaacaaagtttattttagtttgggcacacaagattagagagctagcgagaaactatggcatacgcggtcggttaggaatagtgtcaattgaaaaaaagcttatttaacatcaagttgaaatggtttgggaatgaaatatctcaatggagttgtcaagttgaaatggtttggga

SEQ ID NO: 115998 - DNA, 2357 bp, Zea Mays
tttttttctttattggtaagaaattcatattttgttttccgcacaggaggatcctggtgagagtctttctgactgtgagaaggataatgatgaatttatggaggaagattccaaaattacagatgaagaggatgaagatagctttgttgtgcctgatggctatctctcagacaacgaggggatacaaattgaaagcctattggacgataaagaagaggaggccaatagctccccaaatggtcagtgtacagaagttgaagagttcaggtctctgctccgccaacaaagagtcctgaacactttgactgagcaagctctccggaagagccaacctcttattatatgcaacctaaatcacgaaaaagctgaattactgactgctgaagacctcaagggaacggaaaagattgagcagctatgcttgcaagttctttcaatgcgcatctgtccaggaggtgcaattgttgatgtgcctctaactgacagctcatctgcaactgttgaggaaattaaccaacccaatgtgaagaatggctctcctgaggctgcatctgctataccagaaacagacctgccagaatttgtacaggtgataagatcatgtcgagatggtatccacaaggtggtggaattactgcagcacaagtttccaaatgttccaaagactcaactgaatcgtaaagtgagggagatatctgacttcattgacaatcattggaaggtaaagaaagagattcttgacaagctagggttggattcgtcaccagtgaaacccaagaagaataaaagcatagctatgtacttctcgaagagatgtttacctccggaagaggctgtcaatgctctggctgcttctcctgagttgcggttgaaatctagaaatggtggccgcgaagctccccagatcaatctgttcccctcagagcagtaaagtttctaataaaggtcccctgaaagttggattaggggtcaatgaagctacgaacccagatgagcagaaagctcagctatccatgtaaaggctaggaagtgcaactcggttttgcatcgtcaccaatggaagatggtcttagtgcaacatgggtttttgtcaacatctggattatgttttcagtgctggacatgtaattttagcctgaaagtaggtttttattcaattatttggccttgatgtgattaacatgtatgtgtcctgttgttagcgcaaggaattgctacaaagttggccatctgccgcttgtgtgttgttaacattattctgattctggcaaggcaaataagcaaacatgtcttgtgactgctcaattgacagctttgggcagaaattaatttttgcaacctgtttgcatcaaatctgatgaatgcacatgttaatagtagcaaaggtaacaaaagcaataatatatatttgctttggtatttatttattttggttgaacagtcataacagtacaccgtagtacaaaagaatgacagcaatagtacaataatagaatagacatcaaagaatctcattttgaaggagcccaggccagcagtggatgggatcagacatggtacgattgccagttcttggcctggaggtcgtcgtcgtcgtcatcctcgtcgaggcggagggagaaggcaagcgcgagcgcggcccactcgaggacgaagatggcggtgccgagccctccgaccatcttgaggatgacggcgccgtcctcgtcgcggacgtaggactggagctcggcgaggaagtcggaggtgcgggtgaacgcgagcagcgcgatggcgccctggaagatggcggtgagcgcggctcccgcggtgtgcgcgttgtgccactgcgcgggcgtggcgggcgccgtgaaggagcccgagcagccggccgcggagaagacggcggtgagggcgtggaggaagagcaggagcaggccgcacggggacggcagcaggcgcagcgacagcgtgaggaagatgcagctggaggaggcgcccaggaggacgtagttgcagaggaggaacgccttgcgtgtgtgcgacttggccgccatcgtcgccgccgccgtactcgctcggaagctgttgggttgggtcttggaagcctgccgaggaagcgggatgccgctggcttgcggggctttgcgggcgaggggtcgaggtcgagagagggaggtttggagtggggtgggagcggcggagtggcgggtacttatgcggggtggcgcggaggatttggccgttgaggctgggggcgcggcggtggcgcggcggtggtgaggactgaggagtgaccgagtgagtccgacagggcaacgggcaacggctagtctggtggtggggctcgtgggggcccgcccgctcgctcgcatgag

SEQ ID NO: 115999 - DNA, 2907 bp, Zea Mays
atggaaagcggcgccatggtactcggtgttgttcgtcccgaggagtcccctgaccgcaacggcggtgggccacgggacgatttgggcccatcgcagatgcaggtcgatggtcccgttgttctcaaccaatccgctgagctcgtctcggatgattcgatggccgtcgatgacgtcccagttcaacaaccatcaggccagccggtggaggcaacacaacagtctcctgcgacgctgattgatactatcatggaggtgcagaagcagctgaagcggaagagggcttctaatagcccagtgattgatgccgccgataaggacgctcttgttgctgggtgccggcaggagctcgaggggctcttccagtattacaaggaggtttctgaccgcaagatgcagcttgacggcgggaacctgtccttcaacgggatggttggctgtttgcttgaggagagcagtctcgggctgactaggttggtggacgaaatatatcaacagctgaagggattggagggtgtgtctgtggcttcagtccgcagctctgtgctgctcgctggccagaggatgatgtacgggaattcttcactggacgctgatgtgttagaagatgaatcggagtcggctctttggtgctgggagataagagatctgcgattgttgcctgtgaaagtacgcagcattctgagtacacggagatctgtcagaaagaaaatccatgagagaatcactgccatatattcgactttgtcggttcttgaaaattcaggagcttacatccaagtaaatgatctaaaaaaagcatcattgaaattaaacaaatcactgaacctggaagggatcagatcaatggtggaaagagcgacacaaaagaacacagaacggggtgtgaaagatgctgtatcagcagttaaggaattgatgcaagagacagataaaaatgaccaaaatgttagaaggcttgaggatactagtgtctctgagccgcagaatgggaactcacttggtaatgagaaagagattcagaaagcacaaaaacaagtggagaaggaaataaagcgccaggagaaagaagaagctcagatgagaaaacttcaaaagaaacagcaagaagaggccctaagagaacagaagagacatgaaaaggaggaggctgaagccaagaagcaacaaaagaagcaggaagatgaagctctgaaagaacagaagagacgtgaaaaggaggaggctgaagctaagaaacaacaaaagaagcaggaagaggaagttctgaaagaacagaagcgtcgtgaaaaggaagaagctgaaatgaagaaacaacagaaaaaacagcaagatgaagctgagaaagaacagaagcgccttgagaaggaagctgcacaactcaagaagcaactggtcattcaaaaacaagcttctatgatggaacgctttttcaaaagtaagaaagacaatggaaaacatcaaaaacctggagagaacaactcagctgaagatccatgcaatgacaacaaagagacaataccagcaaccacatcaaaaattgattcttcattgtatcaacaagagggatgggttttagatgatcttcggaggttgcaggtcactggttggaagaagctatctagctacaataggtcctccagatggggtacaagatgcaagcccaagatggaggcatttaaagagctgaagcttcagaaatcctcagatgatatggttgatgaaatactttccactccaaatgaagatggtggccgcaatccaattcaggagaacgaacatgataagcttgaaagtgatattgacatgatacaggctagtgaaatgcaatgccatggtgctagtaaccctaaacctctgcaaacgagattaattagaatgaagcttctgcaatttgacaaaagtaacaggccagcatattatggatcctggaggaagaaaagtgctgctattagtccaaggtgtccatttaagatggatcctgatcttgactacgaggttgatagtgatgatgaatgggaagaggaggatcctggtgagagtctttctgactgtgagaaggataatgatgaatttatggaggaagattccaaaattacagatgaagaggatgaagatagctttgttgtgcctgatggctatctctcagacaacgaggggatacaaattgaaagcctattggacgataaagaagaggaggccaatagctccccaaatggtcagtgtacagaagttgaagagttcaggtctctgctccgccaacaaagagtcctgaacactttgactgagcaagctctccggaagagccaacctcttattatatgcaacctaaatcacgaaaaagctgaattactgactgctgaagacctcaagggaacggaaaagattgagcagctatgcttgcaagttctttcaatgcgcatctgtccaggaggtgcaattgttgatgtgcctctaactgacagctcatctgcaactgttgaggaaattaaccaacccaatgtgaagaatggctctcctgaggctgcatctgctataccagaaacagacctgccagaatttgtacaggtgataagatcatgtcgagatggtatccacaaggtggtggaattactgcagcacaagtttccaaatgttccaaagactcaactgaatcgtaaagtgagggagatatctgacttcattgacaatcattggaaggtaaagaaagagattcttgacaagctagggttggattcgtcaccagtgaaacccaagaagaataaaagcatagctatgtacttctcgaagagatgtttacctccggaagaggctgtcaatgctctggctgcttctcctgagttgcggttgaaatctagaaatggtggccgcgaagctccccagatcaatctgttcccctcagagcagtaa

SEQ ID NO: 116000 - DNA, 632 bp, Zea Mays
ccggcagctcccctatctcatccactactattttaaacgtcactgtgtgtcgtctacagtcagatattcggtggacaaagtccatgttagcctgctgacattacacccattatctttatttctttattagagcaaaggcagttgaagaatgataagcatatgtactgccttacaaatgaattgattgctcatctattcaatacaaaatgaatttatttgcttgacaccgacagaaaggagagcttcctccaggcagaacagcagtcagcaactcaggtgctgggcgccctttccccgacctagagattgagagcgagctaaacgagctgcggaggaaagccaaggaatattaggttcattccttgtcgattcagcaggcctgacggaatctcatttccaagaaaatatagtgcagctgcagattgctccattgcgcgtttcgaaagttgaaacacaagtgcgcattgactgtttgttaaagagtatggaatcggctaatttctcggcattttccccctcgagtgacatttgtacagctatccataaaattgttgtaaatcactactctctctagagcctttttttcatactatatataaagtcaaagttcgaagttcccacgccgtggtttt

SEQ ID NO: 116001 - DNA, 1428 bp, Zea Mays
cgctacggcccaagagacgcgcaatgggaatccgactcgagatcgctttccattcccatcgcttctcatctcttctccacacgaactcgccctctcgactctcgagagatagagcgaggcaccaagaagggaaaaaaaaagagggacaggaaaaaaaatcattctcgtttcgctctccgctagaccccgcccgaatcaatggagattagggctccgccgacgagcctgaggctcgcgccgccgcccgccgccgccagcttccgccgaaccccgcttaggacctccttccttcgcggcagcgtgtcacttaaagttgtgcaagtacggcagtcaaatgtcaacagatttaagtgcaatagcatacgaagtaacctctttgataggctaacaagggttgtcaggtcctacgcaaatgcagttctaagttcgtttgaagaccctgagaagattctagaccaggcagttctggagatgaatgatgacttgacaaagatgcggcaggccactgcacaggtcttggcatctcaaaagcggcttgagaataaatataaagctgcagaacaagcttctgctgattggtatcggagggctcaacttgctcttcaaaagggtgacgaggatcttgctcgtgaagcccttaagcggcgtaaatcatatgctgacaatgcaagctccttaagatcccagcttgatcagcagaagggtgtagttgaaaatctgatttcaaatacccggcttcttgagagcaagatagcagaggccaagcagaaaaaggataccctaaaagctcgtgctcaatcagcaaagactgctacaaaagtgagtgaaatgttgggcaacgtgaatacaagtagcgccctttctgcatttgagaaaatggaggaaaaagttatggcgatggaatcccaagcagaggcactcggccagttagcaactgatgatttagaaggaaagtttgcactgcttgagacttcatctgttgatgatgatctttcacaactgaaaaaggaattgtctggaagctctttgaaaggagagcttcctccaggcagaacagcagtcagcaactcaggtgctgggcgccctttccccgacctagagattgagagcgagctaaacgagctgcggaggaaagccaaggaatattaggttcattccttgtcgattcagcaggcctgacggaatctcatttccaagaaaatatagtgcagctgcagattgctccattgcgcgtttcgaaagttgaaacacaagtgcgcattgactgtttgttaaagagtatggaatcggctaatttctcggcattttccccctcgagtgacatttgtacagctatccataaaattgttgtaaatcactactctctctagagcctttttttcatactatatataaagtcaaagttcgaagttcccacgccgtggtttt

SEQ ID NO: 116002 - DNA, 687 bp, Zea Mays
atggcgctcccgctctcgcccccacagccaccacaggagcctccgccggctcctcccctcctcgatccggggcggcgatttggcgcagtggcgcggggttggcgcagtggcgcggccgatttggcgcagtgtcgcggacctaatcgagcgtccatccgcgcgtccaaggaggatttggcgcaggggcaggcgttgcgggcgcagggacgtggcggcggatttggatgggttcacgggatggcgaagagatggggtcgtgggattggggacggttgtgccgcgcatgaagatgagggttgggtgaaggcaggccacacggtgggctgcacgctgggacactccattatcacaaacaaggggctgtcgttagctatttgctacagattctgggataaaaacaatacgaggagacaaaaggtggagatcaagaaggcaaaaccaaagaaaccctctaaccaaccaccttgttcgcttgatagtgaacctaggggccgtccatatgcagacaattatgatggatttggcagctcttatagttatggtggtagttttggtccctatagatcatatgtaagttttggcgctaggcctgacgactacagtaatgcttatggtcctggtgattatgatagtggctatggtactcatggtggaggattagtaggatacctggagaaccctccctag

SEQ ID NO: 116003 - DNA, 186 bp, Zea Mays
atgtttagggccgggtctttctcctctccaagaatatatgcggctggttttctctggaaaaaaaaggaacgaataatatgtgcagttggtaggtcactggcgatgtgggggagtgtgaaccttgggaggtggggagcacccggaatgattgatctggtagttggaagccgagttgtcaacggatga

SEQ ID NO: 116004 - DNA, 1829 bp, Zea Mays
acaataaacgcactcaattttctcagattttcactacacagatcgtgatggtccagggctccaggcttcagtcagattcagagttcagaattcagaatctatagagatactctactagtcagttccgagcggccgcactggacctgaacagcgagcaatggaaaattgggccgaaccatatcgaggcccgaccgtatctgcatcttgcatacagagaaggcccatctacgccgcggaccgcaggccgcttgttcacggctcgaaagaccaggggaagccggaaaccgcacggccggcctgcctctagtcgtcgtcgtcgtcgtcgtggtggtgcttgcggcagctccggagtccaggcagcacgctagtcggggggcgcgggggaggagatatggatcggtcgtatctccccgtggcggcggcggccgtcgccctggtcctcgtgtgctgctccggcctctgccgcggcgagcggctcggggcgagggagtgcgaggacctggggttcaccggcctcgctctctgctccgactgcaacgcgctctccgagttcgtcaaggaccaagagctggtggaggattgccataaatgttgcaccgaggattcagatgattctatcagcaagctcacattttctggtgcaattattgaggtgtgcatgaggaaactggtattttatccagaagttgttggcttcctcgaagaagataaagacgacttcccatatgtggaaacccgttattcttatggttcgccaccaaagctcataatgcttgacaacaagggtgaacagaaggagaccataaggcaagtcctacttaattctagagtaaacctccaactatctgatttacattcttacacttgtattactgcaaatagtataagaactgcctggctgaatctttttcatatcctgtcttagttcattacatacacttatatatgttgtctgcttccaatcatccttgctcgtgcagtaatgtcatgtagttcatgtaatactctgatgactgacacgataggtaaagaaatgattgatttgtttgtgcgtgcatgcttcaaaacatagttttattgatagaaacaatgcttaagtgtacttctactggaatgattcataaagttgcagtagtatagtcaataaactaggtaatttgctgaagtggcctgaatttaaccttggcgcatcattcatctttaagggacaggtttaactattgtactgaataaattgccacctttctatatgcgcgccaattgcctaacgtagctaatgtctggtagaaacagtgttctcaattgttcattggaccatttactgaaaatctgaaacgggctgaaattggcaggattgataactggaagcgagagcacattcggcagtttctcaaggagaaagtgaagccagtgaaattagacagctgagttcttgcgataagtgcctgaatatttccagtttgacgttccaatagaacctacgtaacctgtaccttgctaccaaaatcgtagctgatgtatgagattggcgttctcatatttacacctcaaaatgatcgtacgagaagcctgtgtgtgcggcatactttgtaacctgtttgttactcttacagtcaggtagtaagtatctggcactatgatccgtgaagagtagttgatgtgcgagttgtttcctggctaatttctggagttgttttgagttagtctctttttatgtgaccgaatttataaaaaaagtagcatgaatacttctgaaaccaaatatattttatgtacatctaactatactaatttggtgtcataaatcttacaaaaataaaaaagaataa

SEQ ID NO: 116005 - DNA, 1284 bp, Zea Mays
acaataaacgcactcaattttctcagattttcactacacagatcgtgatggtccagggctccaggcttcagtcagattcagagttcagaattcagaatctatagagatactctactagtcagttccgagcggccgcactggacctgaacagcgagcaatggaaaattgggccgaaccatatcgaggcccgaccgtatctgcatcttgcatacagagaaggcccatctacgccgcggaccgcaggccgcttgttcacggctcgaaagaccaggggaagccggaaaccgcacggccggcctgcctctagtcgtcgtcgtcgtcgtcgtggtggtgcttgcggcagctccggagtccaggcagcacgctagtcggggggcgcgggggaggagatatggatcggtcgtatctccccgtggcggcggcggccgtcgccctggtcctcgtgtgctgctccggcctctgccgcggcgagcggctcggggcgagggagtgcgaggacctggggttcaccggcctcgctctctgctccgactgcaacgcgctctccgagttcgtcaaggaccaagagctggtggaggattgccataaatgttgcaccgaggattcagatgattctatcagcaagctcacattttctggtgcaattattgaggtgtgcatgaggaaactggtattttatccagaagttgttggcttcctcgaagaagataaagacgacttcccatatgtggaaacccgttattcttatggttcgccaccaaagctcataatgcttgacaacaagggtgaacagaaggagaccataaggattgataactggaagcgagagcacattcggcagtttctcaaggagaaagtgaagccagtgaaattagacagctgagttcttgcgataagtgcctgaatatttccagtttgacgttccaatagaacctacgtaacctgtaccttgctaccaaaatcgtagctgatgtatgagattggcgttctcatatttacacctcaaaatgatcgtacgagaagcctgtgtgtgcggcatactttgtaacctgtttgttactcttacagtcaggtagtaagtatctggcactatgatccgtgaagagtagttgatgtgcgagttgtttcctggctaatttctggagttgttttgagttagtctctttttatgtgaccgaatttataaaaaaagtagcatgaatacttctgaaaccaaatatattttatgtacatctaactatactaatttggtgtcataaatcttacaaaaataaaaaagaataa

SEQ ID NO: 116006 - DNA, 879 bp, Zea Mays
agttttagctggggagaccaacttcttagtttttaagaaaactgagaaactaatttttagaaaccggataaaaaaaaataacatgtttggagtccttccagcgtctaaaaaccagtttaaactaggtggatccaaacagggccaaattagacggtgccgcaacctaaaccgcacgcgaaatcagcgcaagaaacctagcggtcgcctccagatcccgcccgggatcgaatcaagaaatgagcggaaagattgatactgcactcgacgagaccaatcacagcaataaggctgtccgcagatcgcggggcgtgaaggcacgggggcgaggatcaccaaggatgggttaccgtggcgtggcgtggcgtggcttaacttaccctcttgatgagctcgacgttgagctcgtcggcggtgaggagcatgtcagcgctggggttgcggtagaacatgaactcgcgctccccgtcggcgcgcagggtgacgaaggcgagcgcggtgcgcgcgccggagtcgaagacgacgccgccgtcgtcgacgccgttgtcgcggaggatggcggcgagcatgcggccgaactcgtcgtcgccgagcttgccgacaaaggcggccccgccgccgaggcgcgagaccgcgatggcgacgttggcgggcgcgcccccgggcgccttgaggaaggccggcgcctccgccagcgagacccccgccacggtgggcacgaagtctatcaacatctcgccgaaactcaccaccagctctcgcccggccgccattgcgcctcgcggttgccgcctaaacaaacacaacgcacggacgcagaggtgggggagaggagagagcagaggaggtgggcgcgtgtggggaatttcttgtgaggtggcg

SEQ ID NO: 116007 - DNA, 218 bp, Zea Mays
atggcgtggacggcaaagaaaaatagacaatccgataacagctaacacagtcaaaacctcattgtcaatacaagagtttggtcattcttatttcttgttgcagcaaataggtctcaagggaaaagcaaaatcaccgaaacaatcatataactcttttaagcatgcaccagctcctgaaggtgtgctaatcagggctcagtggtggtccttcgtctcaa

SEQ ID NO: 116008 - DNA, 93 bp, Zea Mays
cgtcgtgtcttgtggttcgtctttgctagcggtcgttccgtagagatgggttttggacagtggcggacccagcagctatgcttagggtgtgtc

SEQ ID NO: 116009 - DNA, 101 bp, Zea Mays
ctgtatttacttatgaatctgaaatcagttccgcggcgtacacactgtagttccttttgtattaagtgtagtgatgaggtaatgcattgcacttgtactac

SEQ ID NO: 116010 - DNA, 2291 bp, Zea Mays
gaggaactgaatagagccttattacaacagtcctcacgtagcgacttctgtaaggagtacttggctatttgcacaataccgcgcaagtgagaaccacacttcacggaacggaacggggaaacgcaaacaactaacagaactcaaatggagatgctgtttggaatgcccttggcggtgatgccggcggcgtcgcccttcgtgtcggaggtgttggggtagagcagcgtgtaggggaactcggccgggccgttgcggttcttgaggcgagggtccgcgttcatggtgacgacgcgtttctcgatctcggtcagccgcgcgccgaaccgcttgaacgcctcctgcgccttggcgtccgacgtccactccttggtgtcgcgctggccgaggtacacctcgtcggaggagtggctggacaggatctccagcagcgagatgccgacgagggcctggaactggctggtgatggtgcgcacgaacaccttctccggcttgcgctccagctccgcgtactcgtcgctgcccggcgccggcatcggcttccggctgacggacgggcggttcgggaggtacccggcgtacgggtactgcccgaagttgacggccgcgtggagcgccgacgcgatccagatgatggtggtgcaggccttgaccagctcggccaccgtctgcatcttgggccaccagggcgcgtccttgaggtcggcgtgcccgacctcgcgcgcctccttccaccacgcctgcagctccacgtccgcccgcagcacgccgtcgttggggtagtagacggcgaggtactccgtcacccactgctcgatggcgtgccagatggccagcccgtccgacgcgtacgggtagtcctccaccagcagccgtaccttgtacgggctcgacgggtctgcgaccgccatgcctctgcagatatcgcacattattagtgattgcaatccaatgtaaatattgggtattggcgtcagcgtcactgcgcaatgctaacctcttgattaggtcgtcagggagagcctgctctgtgaagttccagtccttgtagatgacggaggacatctcgaacgcgtactggcgcgggaagacggtggtctcgaagatgccgccggcgttgacgagcatctggcgcgcgttggagttgatgttcatggtgtcacggtagtgcggcaggaggagcttgtgcacggggtgcgtcacgctgagctgccggttggtggcgatcacgaacggctccatcacggcgtgggtgttgagccagtggctgatgagctggtgccagcagtagtcgttcacgttggcgtaggccttggccaggtgccacacccacgcctccgcgccggtggtcgacttgggcgtgtacacggtgctcttggcggtggtcaggccgtcccggagctcgggcaggctcagctcgatggccaccggcaccagcgtgccgtcgccgcgcaggaacagcacggtcctggtggcgtagatgaagttgccctccaggctgttcaccctgaccaggaacggcatgaagttgtcgtggtggtccaggatgtagagccggttgccgtgcagcgcctgctgcaccgtcaggccctcgagcttgttctcgaggtccgcctccctgatggtgctggtgtggtcgccgtacttgctcgggtcaagactgctcctcggagggaactcctgaaaacacgggcagaattaaactcgaggaacttcagtgcacagctgagctgaggttgagaactgatcgtgttccctcaccgtgagacgcttgacgagcatggggttcacgccggcgagaatctcccgtccaaactcctcatctgtcatccaacctgtcttgtcctctgcatagccacaacagaacagtcgagacggcatcggtaaccagactccgaggagttaaagacaaattccggatttgcacgaagagacgagacgatcgaccgacctttgatgatctgcggcatggggagcttgaggaggtagtcgccgccgaccgggaggacatccttgacgagctcgagtgggaactgcttccgcaggtcctcgagggctggtattttgggcagctggatcccgccctcgtacagcttcatgatgtccttgaaggagtcgaactcgccgggcgacaggtcgacgtaggtgcggattgccgggatgacggcgttcaccagcgccttgatggcgtagccgtagaagtccgacttcttgatgtggccgaagcgctcgtcgcgcggcacgtagacgtcgccgtcgaccagcgtgagcctgctctcgctgttggggtctgt

SEQ ID NO: 116011 - DNA, 2475 bp, Zea Mays
atgcatgtggaggatggaagggagcagcgagatttggagcgtggatggcgggcgcggttcccgtggattttgggcgaggttgggcacgtcggagtggtggcgagaaaaggaaggaaggagcgtgcagtcggcgggattggaggcgaggttgggcgcgtcgaagcagttgcgaggaaggcgtgcacggcgtggttggagacaggggctcgggtgggggcaggcatggcgcggctttggttctcgccaaggtcgatgctcgcctccgccgtcgacgcggaagcgggaataggagaggagctggaggacgcaacctccacagtgggctcaccgcagcttttcgccattccgacgccgaggagagaggaggggcttaaggcgaacttccactccagtgctgcaaacgtaaagatgcgggttgggggactgccggactggggagtgggacgagacgaccagacaaatccagaatcgcagtcgcgttctgctcctggaggcccccgcctggccgcctgcgccttcgccatggaatcgcgcggcaagcggatcctcccctttctgttggtcattatcgccgctgcggcggctccgtccgccatgccccgtgacgagagagaggtggtggtagtttccggtgcgccggacggggttgtgtgggtggcccagctctcggatctccacttcagcgtgcaccacccggagcgcgcctacgacttccggcggtatgtcggcccggcgctggccatggtcaaccccgacctcgtgctgatcactggagaccttactgatggtaaaagcaaagatctgttaacaatgaagcaaaacgaggtcgaatgggtagaatatgaaagtacaatgaaggaaataattgaaaatagcaagcttccaagaagaattttctatgatatgagaggaaaccatgatagctttggtgtaccagcatctggtgaggactatgacttttatagtaagtatagcatcaacgccaaactaagacgacaggggcgtgtccaaagcattactttggagaatagtggtcggaagcatctgtttgttggctttgatagcacaatggagattggtcttagaggtccaaccaatctatttggacatccaactgacaagcagatgattgaattggatcaagcattatcacagtggaatactgactttgacaaggttccagtgacaaaaatcgcatttgggcacttcccgttgtctttctcagcattaacagagtcaggaaaaagtatcaaggatgtttttctaaagcaatcattggcagcatatttgtgtggtcatcttcatacaaggttcgggaagaacttgaaacgatactaccatcgggcagtccaggaaccatcattatcagagcattactaccaacataacatgcaccaaggagatgcattccagggtaataaggaaaactgttctgaagaagcttctcatgttgaagagttctgggaatgggagatgggtgattggagaaagagcagaagcatgaggatactagcaattgatgatggttatgtttcctataccgatatagatttcagattaggttcaaagagcataatcatactacctacctttccccttgattcaagattcatgcagagagcctctgcttttcgtgattttaaatgtcatgtcatgggggcatcatcttttgataccgtgagagctcttgtattctctaaacatgagatagtatctgtttctgtaaaaatatacgactcaaggccaggaactcttgaaatagtcttcgactctgaaatgaaaagagtggattccaatgaaactcgaggaaatatgtatttgataccatggaactggagggcatttgaagattcctctcccagccgatattggctccaaattgaagtgatggatataacaggtgacacaagtgtcagccagttgaggccattctctgttaacggcttgctggcaagagtgaactggacatggaaagagttttttgtgattgtttttataccttggttattcggtcaccctattactgaagatggtagcctgacttacatgacacataaaggctggattctaaaaggacccagtagtagcaacgaagtagtccatgctgggattccagatgtcatggtcattgttctacctcacctttgctttgtgttagtacccaccattgtgattttagctgccatggctgctgagagaacagcatatcgagagcattatctttctcgatcaggaaagaagaaagatgactaccgtaagagcaggagacagatagaacatgaaaacttttggaacggtcgctggattagcaaatttctgtgtcttctctgcgtggtggttctatgcaaacattggaagctttgcagagcgctcgtgaaggcttatgctatgaaccccttgctccatgcgccagtacttttcttcttcgttcctttactcatggtgtttgccatctacaagacacggtccatttag

SEQ ID NO: 116012 - DNA, 1645 bp, Zea Mays
cgccataggaaggggaggaggcctccaaaagtttctgtggagcgacgaggacgaggacgccgtggtgagtgagtgagtggtgaacgagctcccttttcgttctccgcctcgctctcgtctcagaggctttgcagtttgcactccagactgatttcacttcagcccagagcaggaggcagttgatggaatgcgtggagctgctggattctcccgatctcttcttcctggacggcggcgatgcgcatgcgaccgacttctcactggagaaccatctcgagtcaagtagctcggcaggtgccaaaaacaaagctgcgccgggtcatagtcatattcatagtcatagtcatagccggcgtgctcagcttcatcggagtaacgcgcctgttccaccgccgctgcctggaacctcttattatggcgcgcggaggaaggcgaaggccgcctgtcgccgtgtccccgaaggcgtcctggattcctgggacaggttgttcttggagggataccagtctgacctccgtgtctccacagacggcggcgctgagatttcgtcgcattcctgcgttctcggcgtcaaatcccctgtcctgagagctatgctggaggaagctagactgagagatgggtttcggtgtatccgtgtctctggcgcgccttcggaagcagtccgtgtcttcatcagatttctctactcttcacggtttgagcaggaacagatgaaggagcacgctctgcatttgcttgtgctctcccacgtcttctcggtgccgtctctgaagacggtctgcgtcgaccaactcgagaggggcttcctcgctactgacaacgtggtagacatgctgcagcttgccaggctgtgtgacgcgccccgcctcgcgctcgcctgtgcccggatggtcatcggggatttcaagaccatctctctgacggatgggtggaaagtgatgagacggaccaatccaagtatggaacaggagctgctcgagtctcttgtcgaagctgatacgagaaggcaggaaagagctaaaaggatggaagaaaagaaagtgtatctgcaactgtacgaagcaatggaggcgctggtccacatctgccgggacggatgcaggacgatcgggcctcgagatcaagcgctcaagggcagcctagcagccgcctgcaagtttcgcgcctgcaagggcattgagctgctcgtgcgccacttctcggcctgcggagtccgggtgcccggcggctgtgccaactgcaggcggatgtggcagctcctcgagctgcattcccgcatgtgcttcctcccggacacctgcaaggttcctctctgcaggcattttaaggagaagatgcggaatctggggaggaaggaagagaccaaatggaaccttttggtgtgcaaggtgctggagcgcggaggaaccatgggttttatgcccggaaggagaaaaaatttcatcaaccctaaggccagctgggtgttgccacgtggctcctcttgtatttgaaacactcaaacctcgcaggggtacttttatgttagacgagaaggggaccaggaggagcaggaacaaaaaagaaaaacgtcagaacagctgttgcgtgaatcgtgatgatactttaaaaaggaaaaagcatctaattttgaccatccatc

SEQ ID NO: 116013 - DNA, 1660 bp, Zea Mays
cgccataggaaggggaggaggcctccaaaagtttctgtggagcgacgaggacgaggacgccgtggtgagtgagtgagtggtgaacgagctcccttttcgttctccgcctcgctctcgtctcagaggctttgcagtttgcactccagactgatttcacttcagcccagagcaggaggcagttgatggaatgcgtggagctgctggattctcccgatctcttcttcctggacggcggcgatgcgcatgcgaccgacttctcactggagaaccatctcgagtcaagtagctcggcaggtgccaaaaacaaagctgcgccgggtcatagtcatattcatagtcatagtcatagccggcgtgctcagcttcatcggagtaacgcgcctgttccaccgccgctgcctggaacctcttattatggcgcgcggaggaaggcgaaggccgcctgtcgccgtgtccccgaaggcgtcctggattcctgggacaggttgttcttggagggataccagtctgacctccgtgtctccacagacggcggcgctgagatttcgtcgcattcctgcgttctcgtgagtttcagctctggcgtcaaatcccctgtcctgagagctatgctggaggaagctagactgagagatgggtttcggtgtatccgtgtctctggcgcgccttcggaagcagtccgtgtcttcatcagatttctctactcttcacggtttgagcaggaacagatgaaggagcacgctctgcatttgcttgtgctctcccacgtcttctcggtgccgtctctgaagacggtctgcgtcgaccaactcgagaggggcttcctcgctactgacaacgtggtagacatgctgcagcttgccaggctgtgtgacgcgccccgcctcgcgctcgcctgtgcccggatggtcatcggggatttcaagaccatctctctgacggatgggtggaaagtgatgagacggaccaatccaagtatggaacaggagctgctcgagtctcttgtcgaagctgatacgagaaggcaggaaagagctaaaaggatggaagaaaagaaagtgtatctgcaactgtacgaagcaatggaggcgctggtccacatctgccgggacggatgcaggacgatcgggcctcgagatcaagcgctcaagggcagcctagcagccgcctgcaagtttcgcgcctgcaagggcattgagctgctcgtgcgccacttctcggcctgcggagtccgggtgcccggcggctgtgccaactgcaggcggatgtggcagctcctcgagctgcattcccgcatgtgcttcctcccggacacctgcaaggttcctctctgcaggcattttaaggagaagatgcggaatctggggaggaaggaagagaccaaatggaaccttttggtgtgcaaggtgctggagcgcggaggaaccatgggttttatgcccggaaggagaaaaaatttcatcaaccctaaggccagctgggtgttgccacgtggctcctcttgtatttgaaacactcaaacctcgcaggggtacttttatgttagacgagaaggggaccaggaggagcaggaacaaaaaagaaaaacgtcagaacagctgttgcgtgaatcgtgatgatactttaaaaaggaaaaagcatctaattttgaccatccatc

SEQ ID NO: 116014 - DNA, 1887 bp, Zea Mays
gccggccgggaaacgaggcctttgcccgctcttcactctcctccgctcgccgcctcctctttctcctcttctcctctcctctctcacgagggcccaagacctcaccgctaaggtcccggtctccgcggggctctccgtcgcactttctcgtgcctcggggaccccgatccgccaccgcgcgaccgatcgtcccggatgcacgggccgtacccgacggctgctgctgctgctgcttcttcttcggacgacatggcggcgaacggcatgaaggtggcgctgcaccggcaggtctcggggggctcgatgaagcagaacgcggagctccggcgccaggcgtcgctcgagtccccgcggacggggcgggccaccagccggttcctgttcgggcggcagtcgtccatggacccgaaccggaggcgcggccggagccagagccccgtgcgcgcgccggaggacctgggcgtgccggacaacctggacgccaccatgcagctgctcttcttcgcgtgccagggcgacgcgctggggatcgagggcctgctgcgcagcggcgtcgacgtcaacagcatcaacctcgacggccgcaccgcgctgcacatcgccgcgtgcgagggccaccgcgacgtcgtcagggtgttgatcagctggaaggccaacatcgacgcgcgcgaccgctggggaagcacggcagtagctgatgccaagttctacggccactccagggtctacgatctcttgaaattccatggcgcaaaggttccgagaaccaagaggacgccgatgatggtgtcggccccagccgagataccggagtacgagctgaaccccggagaggtccagttccggcgaggctgtgacgttacaccgggtgtgtaccacatcgcgaaatggaatggcacaaaggtttccgtaaaaatacttgacagagacggttgctccgatcaagaagccgcaaactctttcaggcatgaactgactgtactggagaaggtccgacaccctaacgtcgttcagttcgtcggagccgtcactcagagcatacctatgatgattgtgtctgaactccatgaagagaaagacttatcagtctgtatccagaagaaaggaaagttaaagcctcagaaggtgctaagatacggccttgatattgccaggggcatgacctacctccaccagtgcaagccggaccccatcatccactgcgacctaaagccaaagtgccagacatatcttcctggatagcggaggccagctgaagatcgcggggttcggagtgacaaggatgtccaaggtcgggaccgacaaggtgaggttgatctaccatggcgctctcgtcgacagcttcagctaccacaccgcgcctgagctgtacaggaacgacgcgttcgactcgagtgtggactcctactccttcggcttcatcctctacgagatggtcgaagggtcggtaagagcgccggaggattcagggcactcgatccggttcgagggactgcggccatccctcaagggcaggctcaagggctatcctcccgacttcaaagcgctggtggaggaatgctggcacccgcaagccatggcgcggccgacgttctcggagatcatcatccggctcgacaagatctacgcccacttcgacaagcatgggagctggaaggactcgctcaagctttggaaatgatcgatggcatggcctgcactgcacgccgccttctttgtgtacatacataccgcgctgcaaacgcgtctctttcccggggaagattgagtactggttgtaccttgtataaggtggagactggagaatcatgtggcatggtgattggttttttgttttttgctacgaattgtaacagattgtgagtaaaattgggcagaacaacacgt

SEQ ID NO: 116015 - DNA, 2170 bp, Zea Mays
gccggccgggaaacgaggcctttgcccgctcttcactctcctccgctcgccgcctcctctttctcctcttctcctctcctctctcacgagggcccaagacctcaccgctaaggtcccggtctccgcggggctctccgtcgcactttctcgtgcctcggggaccccgatccgccaccgcgcgaccgatcgtcccggatgcacgggccgtacccgacggctgctgctgctgctgcttcttcttcggacgacatggcggcgaacggcatgaaggtggcgctgcaccggcaggtctcggggggctcgatgaagcagaacgcggagctccggcgccaggcgtcgctcgagtccccgcggacggggcgggccaccagccggttcctgttcgggcggcagtcgtccatggacccgaaccggaggcgcggccggagccagagccccgtgcgcgcgccggaggacctgggcgtgccggacaacctggacgccaccatgcagctgctcttcttcgcgtgccagggcgacgcgctggggatcgagggcctgctgcgcagcggcgtcgacgtcaacagcatcaacctcgacggccgcaccgcgctgcacatcgccgcgtgcgagggccaccgcgacgtcgtcagggtgttgatcagctggaaggccaacatcgacgcgcgcgaccgctggggaagcacggcagtagctgatgccaagttctacggccactccagggtctacgatctcttgaaattccatggcgcaaaggttccgagaaccaagaggacgccgatgatggtgtcggccccagccgagataccggagtacgagctgaaccccggagaggtccagttccggcgaggctgtgacgttacaccgggtgtgtaccacatcgcgaaatggaatggcacaaaggtttccgtaaaaatacttgacagagacggttgctccgatcaagaagccgcaaactctttcaggcatgaactgactgtactggagaaggtccgacaccctaacgtcgttcagttcgtcggagccgtcactcagagcatacctatgatgattgtgtctgaactccatgaagagaaagacttatcagtctgtatccagaagaaaggaaagttaaagcctcagaaggtgctaagatacggccttgatattgccaggggcatgacctacctccaccagtgcaagccggaccccatcatccactgcgacctaaagccaaagtaagatgaggagatgaagcagctcccatgcactcccagagacgacgtgctgtttctcttgtgcattctcttcgggtttcaagtctttgtctttcccggttgtcccgtatgtactttactatttgaatcttggtaaggtgccagacatatcttcctggatagcggaggccagctgaagatcgcggggttcggagtgacaaggatgtccaaggtcgggaccgacaaggtgaggttgatctaccatggcgctctcgtcgacagcttcagtaagtagctaggagacccttccatggatccatctccccggcgaagggacggtctagatgacgaacgaccttgctatcccggcctgtgtttaatctatctaggctaccacaccgcgcctgagctgtacaggaacgacgcgttcgactcgagtgtggactcctactccttcggcttcatcctctacgagatggtcgaagggtcggtaagagcgccggaggattcagggcactcgatccggttcgagggactgcggccatccctcaagggcaggctcaagggctatcctcccgacttcaaagcgctggtggaggaatgctggcacccgcaagccatggcgcggccgacgttctcggagatcatcatccggctcgacaagatctacgcccacttcgacaagcatgggagctggaaggactcgctcaagctttggtccgtatcccggcggcttaagcgaattgttaagcgtcgctccgtcaggagcagaatccacaatgagccgtgaaaatgttcggccaaaaaatagagagggagagagagatctttgcgtccggtgatcgaatattttatcctttttttcttctcaaccttcgaaatcaaacacactgagaatgtgctctgcgttgtttgtcccgttgttttttacaggaaatgatcgatggcatggcctgcactgcacgccgccttct

SEQ ID NO: 116016 - DNA, 1924 bp, Zea Mays
gccggccgggaaacgaggcctttgcccgctcttcactctcctccgctcgccgcctcctctttctcctcttctcctctcctctctcacgagggcccaagacctcaccgctaaggtcccggtctccgcggggctctccgtcgcactttctcgtgcctcggggaccccgatccgccaccgcgcgaccgatcgtcccggatgcacgggccgtacccgacggctgctgctgctgctgcttcttcttcggacgacatggcggcgaacggcatgaaggtggcgctgcaccggcaggtctcggggggctcgatgaagcagaacgcggagctccggcgccaggcgtcgctcgagtccccgcggacggggcgggccaccagccggttcctgttcgggcggcagtcgtccatggacccgaaccggaggcgcggccggagccagagccccgtgcgcgcgccggaggacctgggcgtgccggacaacctggacgccaccatgcagctgctcttcttcgcgtgccagggcgacgcgctggggatcgagggcctgctgcgcagcggcgtcgacgtcaacagcatcaacctcgacggccgcaccgcgctgcacatcgccgcgtgcgagggccaccgcgacgtcgtcagggtgttgatcagctggaaggccaacatcgacgcgcgcgaccgctggggaagcacggcagtagctgatgccaagttctacggccactccagggtctacgatctcttgaaattccatggcgcaaaggttccgagaaccaagaggacgccgatgatggtgtcggccccagccgagataccggagtacgagctgaaccccggagaggtccagttccggcgaggctgtgacgttacaccgggtgtgtaccacatcgcgaaatggaatggcacaaaggtttccgtaaaaatacttgacagagacggttgctccgatcaagaagccgcaaactctttcaggcatgaactgactgtactggagaaggtccgacaccctaacgtcgttcagttcgtcggagccgtcactcagagcatacctatgatgattgtgtctgaactccatgaagagaaagacttatcagtctgtatccagaagaaaggaaagttaaagcctcagaaggtgctaagatacggccttgatattgccaggggcatgacctacctccaccagtgcaagccggaccccatcatccactgcgacctaaagccaaaacatatcttcctggatagcggaggccagctgaagatcgcggggttcggagtgacaaggatgtccaaggtcgggaccgacaaggtgaggttgatctaccatggcgctctcgtcgacagcttcagctaccacaccgcgcctgagctgtacaggaacgacgcgttcgactcgagtgtggactcctactccttcggcttcatcctctacgagatggtcgaagggtcggtaagagcgccggaggattcagggcactcgatccggttcgagggactgcggccatccctcaagggcaggctcaagggctatcctcccgacttcaaagcgctggtggaggaatgctggcacccgcaagccatggcgcggccgacgttctcggagatcatcatccggctcgacaagatctacgcccacttcgacaagcatgggagctggaaggactcgctcaagctttggtccgtatcccggcggcttaagcgaattgttaagcgtcgctccgtcaggagcagaatccacaatgagccgtgaaaatgttcggccaaaaaatagagagggagagagagatctttgcgtccggtgatcgaatattttatcctttttttcttctcaaccttcgaaatcaaacacactgagaatgtgctctgcgttgtttgtcccgttgttttttacaggaaatgatcgatggcatggcctgcactgcacgccgccttct

SEQ ID NO: 116017 - DNA, 1395 bp, Zea Mays
ctccaaggctccaactggaatccaaggcgcgggccgtctctcccgcagtcccgctgtccgcctgttccaacgcgctccgcgcacgcgcgcacacctacctaccccctgcgcttgcacaaaatccttcttgatccgcacaggaaggtcccggcagaagaacttggcgggcgaaaggcgaaaccgacgtgctcccgggcgggcggcgacagcggcatggagcgagagcggcaggcagtggcgaggaacaggaaggtggtgctgcgcgggtacatcgaccgcgcgcccagggaggaagacatggagctcgtcgacggcggcgccgtggagctgcgcgtccccgagggcggcggcggccccgcggtgctggtgaagaacctctacctatcctgcgacccttacatgcgcggcaggatgcgggacttccgcaactcctacatcccgcccttcaaacctggatcaggtttggcgtggggagggtggtcgactccactcatccaggattcagtgctggtgacgttgtttccgggatgactggatgggaggactacagtctgatcaccaagcctgaacagctcaggaagatccagcaaagcgacataccactctcctatcatctgggccttcttggcatgcctggctttacagcttatgttggattctatgagatctgttcaccaaagaaaggggagtttgtttttgtttctgctgcatcgggagcagttgggcaaattgttggtcaacttgcgaagctccatggttgctatgttgttggaagcgctgggacagatcagaaggttgagctcttaaaggaaaaattcggatttgatgcggctttcaattataaggaagagcctgacttgactgctgccctgaaaaggcacttccctgaaggcatagacatctacttcgagaacgtaggcgggccgatgcttgatgctgtactactcaacatgcgagtacatggccgcattgcggtatgtggcatggtttcccagcacggggtgactgctcctgccggaatccacaacctgttctccttgataagcaagaggatagagatgaaggggttcatccagagcgattacgtgcacctgttcccgcagttcgtcgatgacatcaccaggcattacagagacgggaagatcgtgtatgtggaagacatgagcgttgggctggagagtgggccggcttccttcgtcggtctgttcagcggtaaaaatgttggcaagcaggtcgtctgtgtgtcgcgggattgaaaggcctggattttgttccctactggccagtacccttaaataaaatcaggaaaacattattttcaactccgagaaggaccccactagccagtaccacggtcgtaaatctcaaggtcatgtttattttttctcctgtatt

SEQ ID NO: 116018 - DNA, 1424 bp, Zea Mays
ctccaaggctccaactggaatccaaggcgcgggccgtctctcccgcagtcccgctgtccgcctgttccaacgcgctccgcgcacgcgcgcacacctacctaccccctgcgcttgcacaaaatccttcttgatccgcacaggaaggtcccggcagaagaacttggcgggcgaaaggcgaaaccgacgtgctcccgggcgggcggcgacagcggcatggagcgagagcggcaggcagtggcgaggaacaggaaggtggtgctgcgcgggtacatcgaccgcgcgcccagggaggaagacatggagctcgtcgacggcggcgccgtggagctgcgcgtccccgagggcggcggcggccccgcggtgctggtgaagaacctctacctatcctgcgacccttacatgcgcggcaggatgcgggacttccgcaactcctacatcccgcccttcaaacctggatcacctattgaagggtttggcgtggggagggtggtcgactccactcatccaggattcagtgctggtgacgttgtttccgggatgactggatgggaggactacagtctgatcaccaagcctgaacagctcaggaagatccagcaaagcgacataccactctcctatcatctgggccttcttggcatgcctggctttacagcttatgttggattctatgagatctgttcaccaaagaaaggggagtttgtttttgtttctgctgcatcgggagcagttgggcaaattgttggtcaacttgcgaagctccatggttgctatgttgttggaagcgctgggacagatcagaagtgtccgcaatatgtttcaggttgagctcttaaaggaaaaattcggatttgatgcggctttcaattataaggaagagcctgacttgactgctgccctgaaaaggcacttccctgaaggcatagacatctacttcgagaacgtaggcgggccgatgcttgatgctgtactactcaacatgcgagtacatggccgcattgcggtatgtggcatggtttcccagcacggggtgactgctcctgccggaatccacaacctgttctccttgataagcaagaggatagagatgaaggggttcatccagagcgattacgtgcacctgttcccgcagttcgtcgatgacatcaccaggcattacagagacgggaagatcgtgtatgtggaagacatgagcgttgggctggagagtgggccggcttccttcgtcggtctgttcagcggtaaaaatgttggcaagcaggtcgtctgtgtgtcgcgggattgaaaggcctggattttgttccctactggccagtacccttaaataaaatcaggaaaacattattttcaactccgagaaggaccccactagccagtaccacggtcgtaaatctcaaggtcatgtttattttttctcctgtatt

SEQ ID NO: 116019 - DNA, 1405 bp, Zea Mays
ctccaaggctccaactggaatccaaggcgcgggccgtctctcccgcagtcccgctgtccgcctgttccaacgcgctccgcgcacgcgcgcacacctacctaccccctgcgcttgcacaaaatccttcttgatccgcacaggaaggtcccggcagaagaacttggcgggcgaaaggcgaaaccgacgtgctcccgggcgggcggcgacagcggcatggagcgagagcggcaggcagtggcgaggaacaggaaggtggtgctgcgcgggtacatcgaccgcgcgcccagggaggaagacatggagctcgtcgacggcggcgccgtggagctgcgcgtccccgagggcggcggcggccccgcggtgctggtgaagaacctctacctatcctgcgacccttacatgcgcggcaggatgcgggacttccgcaactcctacatcccgcccttcaaacctggatcacctattgaagggtttggcgtggggagggtggtcgactccactcatccaggattcagtgctggtgacgttgtttccgggatgactggatgggaggactacagtctgatcaccaagcctgaacagctcaggaagatccagcaaagcgacataccactctcctatcatctgggccttcttggcatgcctggctttacagcttatgttggattctatgagatctgttcaccaaagaaaggggagtttgtttttgtttctgctgcatcgggagcagttgggcaaattgttggtcaacttgcgaagctccatggttgctatgttgttggaagcgctgggacagatcagaaggttgagctcttaaaggaaaaattcggatttgatgcggctttcaattataaggaagagcctgacttgactgctgccctgaaaaggcacttccctgaaggcatagacatctacttcgagaacgtaggcgggccgatgcttgatgctgtactactcaacatgcgagtacatggccgcattgcggtatgtggcatggtttcccagcacggggtgactgctcctgccggaatccacaacctgttctccttgataagcaagaggatagagatgaaggggttcatccagagcgattacgtgcacctgttcccgcagttcgtcgatgacatcaccaggcattacagagacgggaagatcgtgtatgtggaagacatgagcgttgggctggagagtgggccggcttccttcgtcggtctgttcagcggtaaaaatgttggcaagcaggtcgtctgtgtgtcgcgggattgaaaggcctggattttgttccctactggccagtacccttaaataaaatcaggaaaacattattttcaactccgagaaggaccccactagccagtaccacggtcgtaaatctcaaggtcatgtttattttttctcctgtatt

SEQ ID NO: 116020 - DNA, 1551 bp, Zea Mays
ctaattatcacctgtaagccagctgaaccacatctcgtcgtgcacatccggagcccgggaacacacacacacattgtcatggccatgcccaagcccgtcctgagcctgctcgtgcacctacacgccgccgtcctgttccttcccgccccggccggcggcgcggtctacaacgtgctgcgctacggcgcgcgccccgacggcgtgacggacgcggcggggcccttcctccgcgcgtgggcggacgcctgccgctcgcccctcccggccgccgtgtacgtgccgccagggaggtacctggtgcggagcgccacgttcaccggcccgtgccacacccgcgccgtgacgttcgccgtcgccggcacggtcgtcgcccccgcggcctacggcgcgcgcggctcgtcggggaggtggatcacgttcgagaacatggacggcctcgtcgtcgccggcggcggcacgctggacggccgcggcagggcactctgggcctgcagacagcgcgggcagcgcgactgtccgacccccacgtccactctgacgatcgccaactccaaggacgtggtggtggccgggctccggtcggtggacagcgagctgttccacgtggtggtgctgcagtgccacggcgtgacggtgcgcggggtgacggtggaggcgccggcggacagccccaacaccgacggcatccacctgcacatgtccacccacgtgtcggtgtacgacgccaggatcagcaccggcgacgactgcatctccatcggccccggcaactctcacctctggatcgagcgcgtcgcctgcggccccggccacggcatcagcatcgggagcctgggcaagcagcagggcacggaggtggaggcggtgcagaacgtgacggtgaagacgacgtggttcaccggcaccatgaacgggctgcggatcaagacgtggggcggctccaagcgcggcttcgtcacgggcgtcaccttcgccgactccaccatgtccggcgtggacaaccccatcatcatcgaccagaactactgccccaccagcagcggctgccccggcgccggccggagctccagcatcaggatcagcgacgtgcggtacgtgggcatccggggctcgtcggccacgccggtggccgtcaacttcgactgcagccggagctacccctgcagtggcatcagcctgcaggacgtggcgctgacgtaccagaaccgggccgccgccaagtcctactgccggaacgtgcaggggaccgcgctcggcctcgtgctgccgccgagctgcctctgatcagacgatcgaccttgcaacttacattgccggccggacgcagcagttagctgcatgcgttgtcacgtgtatatagatgcatatgtcgagtgtattatgtacggagtatgtggggagtgcttactgcttagactaggagaacattacgagcttcttctgacagtagatggttatatagtcgatatctgttggttcttttctttaacccttcgcctttttcgcagcacgattattgtatgagcaagttttttaaataatttttatttt

SEQ ID NO: 116021 - DNA, 3122 bp, Zea Mays
cccctcatttactgtgctgaaattgcttctccggtctgccgcctgcccgccactctcacacatagcttcccttctcgctcgaaatcaccactcaattcgatcgcaagctgccgaatcctgaaccctatgaagatctccgagctctctcccgagtaccggcagccgccgccgccgccgcaatccgccctccttaccgacctcaacagggtcgtcgccgacgtcgaggcgctcgacgcctccgattcctcttccccggagaagctcgcagccgatctccgctgcctcctcaccaacctcgcatccgctgcttcctcctcctcctcgggtctcaatggggcgttcaggctcaaggtatggaacctcgccttccgcctctggaacgcgtgcgtcgaccgcgccaaccacttcgctgcgaggggtgccgaggccgcggtcgcggagacggagatccgacaggcggcgccggagctcctcctcgtagctggcctcccggaaggcgtccccaacgccgctgcgaaggcggcgtcccttttccaccgcaccggcctgttctggcttgacctcggccgcgccgacctcgcttccgcctgcttcgagaaggccacgccgctggtctgcgccgctgacacggaggaggatcgggacatcctgttggacctcaacctcgcgcgtgcccgcgcggcgtcgagcgaggggaaacaagccctcgccgtcgcgttgctaagccggtccaagcccctcgccgcggcgtcttccgtgggggtgaaagccctcgccgaggggtaccttctcctcggcaaggctgctctcgccactaaatccccggatcccgccatcgacgcgtcgagcctcctaaccgaagcgcttgatctctgtgagagggccgcggcctccccctgctgcaccactccgacgagcccgagatccagtcctgcaaccccaaatctccaagtgatcaaggatcaatgcctccgctgcctcgccgcagagcgtctccaagccaacgactatgagggcaccctgcgctgtatcatggtctcgagagcctcaccagggctggggaaggagcactctagcattgcgttcatggcgctccgtgcgtgtctcagcagtgggaaattgttggaagccgagagggagctcgataggctcatggccaacgctgaagcgccggagtttgtgtgtgtgtcggcagccgagctgtacgtagccagtgtggggctggacgctgcccttaaggtgcttgttgcacttgctgcacggtgtcgcgccagtgcttcagctgttgcagtgagggtgttgaaaacggtggttcagggtgcaggcggcgaggctgggcatgcaagagcgatcgctgaactcgtgtcagatgagagggtggttgcacttttcaatggccctgctaacgcccatgagcgtggcacgatgcatgcactgctatggacatgtggcactgtgcatttccatgcaaagaattacgagattagtgcggatttgattgagaggtcgatgctttatgtttcccgtgacgaggaaagcagatcccgccgtgcaaactgcttccgagttgaacccagtatccactgtgcctttctgaagtttaagattcttctgcagaagaaggaggaggaggatgctatcaagctgatgaaggccatgatgggctatgttgacttcaaccctcagttcctgatactctcgattcatgaagctattggttgcaagtctttctgcctctactctgctggaaaaccaatgccaatgagtgaggccaccgtcctccgcaacctgataactctcctccttcgtgagccaggatctgaggctgagattcttaagtactcaagacgtgccaagctacggatgggtgagcttggtttggaagcctttttcggaaaggaaactgtgctaaaagaggacaagtatgattattgctctgaattctttgagcttgcagctgaatttttcagctcaggtaatggtgaagatggtgctaaccttctcttgatttgcaaatcattgatcatgagtgtcagtagtatgctcctggctgacgacctaaacaagtctcaattatcagattctgaccttaaaaggggcattgagatgctcagaagagctgggaagctattacccttgactttgtcttcagctctggtgacctctgatcaattggagaacaacttgccctttcttcatacattcagcttctaccagcttctcagtagactggacactaacgcacaccctcagcagctccaattagccaagaactttgcggcatctaaagcatgtacaccaggtcatcttctcatacttggagacatggcttctaaaggtaaccaaccaaatctcgaggctgctgagtttctcctgaaggccagcatcagtactgcccttgcctctcactcaccaaactatggggtaatcagtgctgcccttagaaagctagtatgccttgctggtctccatgatttcagtggtagcatgagtgatgcagcctatgacgtatttcgacaagcttaccagattgtggttggacttaaagatggtgaatatccatttgaggaagggaggtggcttagtataactgcatggaacaagtcatatttacctgtgcggcttggacaacattctgttgctagaaaatggatgaagatgggtctagatcttgctcggcattttgacaggatgaagctgtatatatcagggatggaggaatgctttgagaactttcggaaattaactggtaaagaacctgatgaatgtagccagcaagatggggaaccaagtactggcatgtctggtactggtagtatgtctcagcctgtcctagtttagaaatttgtgggtggtggaggttcatagctagagaaaaatagaacatctgtttgaaccatacatacctatattcttcattgattgatgtgcactcaaatgctcttccattttctgatgagaattttgcgcacgttccgtgatttgtagagaactatgtgatgattttgttggccgtataatgtcctagaatatagtatgcccatgtgcaaggagaagtcaatatttgtcttatattgggtgactcttctataagtatgatgatctttgtatcggcagtaagg

SEQ ID NO: 116022 - DNA, 1495 bp, Zea Mays
cccctcatttactgtgctgaaattgcttctccggtctgccgcctgcccgccactctcacacatagcttcccttctcgctcgaaatcaccactcaattcgatcgcaagctgccgaatcctgaaccctatgaagatctccgagctctctcccgagtaccggcagccgccgccgccgccgcaatccgccctccttaccgacctcaacagggtcgtcgccgacgtcgaggcgctcgacgcctccgattcctcttccccggagaagctcgcagccgatctccgctgcctcctcaccaacctcgcatccgctgcttcctcctcctcctcgggtctcaatggggcgttcaggctcaaggtatggaacctcgccttccgcctctggaacgcgtgcgtcgaccgcgccaaccacttcgctgcgaggggtgccgaggccgcggtcgcggagacggagatccgacaggcggcgccggagctcctcctcgtagctggcctcccggaaggcgtccccaacgccgctgcgaaggcggcgtcccttttccaccgcaccggcctgttctggcttgacctcggccgcgccgacctcgcttccgcctgcttcgagaaggccacgccgctggtctgcgccgctgacacggaggaggatcgggacatcctgttggacctcaacctcgcgcgtgcccgcgcggcgtcgagcgaggggaaacaagccctcgccgtcgcgttgctaagccggtccaagcccctcgccgcggcgtcttccgtgggggtgaaagccctcgccgaggggtaccttctcctcggcaaggctgctctcgccactaaatccccggatcccgccatcgacgcgtcgagcctcctaaccgaagcgcttgatctctgtgagagggccgcggcctccccctgctgcaccactccgacgagcccgagatccagtcctgcaaccccaaatctccaagtgatcaaggatcaatgcctccgctgcctcgccgcagagcgtctccaagccaacgactatgagggcaccctgcgctgtatcatggtctcgagagcctcaccagggctggggaaggagcactctagcattgcgttcatggcgctccgtgcgtgtctcagcagtgggaaattgttggaagccgagagggagctcgataggctcatggccaacgctgaagcgccggagtttgtgtgtgtgtcggcagccgagctgtacgtagccagtgtggggctggacgctgcccttaaggtgcttgttgcacttgctgcacggtgtcgcgccagtgcttcagctgttgcagtgagggtgttgaaaacggtggttcagggtgcaggcggcgaggctgggcatgcaagagcgatcgctgaactcgtgtcagatgagagggtggttgcacttttcaatggccctgctaacgcccatgagcgtggcacgatgcatgcactgctatggacatggtttgtattctcttgcactactgaacttatgtacggtactttgtaag

SEQ ID NO: 116023 - DNA, 448 bp, Zea Mays
tctctttttgttggttttgttttcgtttctgaacaacactatgtactttgaacattttattcagttggcctattagctcagctggttagagcgtggtgctaataacgccaaggtcacaggttcgagacctgtatgggccatttttttatttctgtgggattttgattattcgagacctgcatgggccattttttttatttctgtgggattttgattaaatttctagcatgttatgggccttctttgctattgctatgttttatatggggttctggtttaatttctagcatgtttgtgagagataaacaacttttatttgcataacaggtccgaccataactatacctgtggccactgagctatcgtgtataataaaatagtggggcctgtttaccattgttttgaaattgtgtcatattggtcagagatgaatcagttaacaatttac

SEQ ID NO: 116024 - DNA, 1218 bp, Zea Mays
acccaaccctgccttctcttcttccttattcccagtttcccacagcttgcgcggtctcactctctctcggcgacgactacgccaaggcccaagtgtgccgaggtattttttaggctcaggtcgctaccgccctacggccccggtcttcttccggcccttcgccggcgacgagaaccagcagcagacggatggcttcgtcggtgccggcgccatcggggtcggtgatcaccgtggcgtcgtcttcttcctcagcagccgcggccgcggtgtgcggcacgggctccccatgcgctgcgtgcaagttcctgcgtcgcaagtgccagccggactgcgtgttcgcgccctacttcccaccggacaacccgcagaagttcgtgcacgtgcaccgcgtcttcggcgcgagcaacgtgaccaagctgctgaacgagctccaccccttccagcgcgaggacgccgtgaactccctcgcctacgaggccgacatgcgcctccgcgaccccgtctacggctgcgtcggcgtcatctccatcctccagcacaacctacgacagctccagcaggacctcgcccgcgccaagtacgaactctccaagtaccaggcggcagcggcagcttctgcgtccacggcgccgacagggccgcaagcgatggcagagttcatcggcaacgcgatgccgaacggcgcgcacaacttcatcaacattggacactcggcggcgctcgggtccctcggaggctccgcctccgtgttcgggcaggagcagttcggcaacgcgcagatgctgtccaggagctatgacggcggcgagcccatcgcgaggctggggatcaacggcggcggctacgagttcggctactcgaccgcgatgggcgggtctggcgctgtctccggcctcgggacgctcggcatcagcccgttcttgaagtctggtaccgccggcggcgacgagaagcccaacggcggtcagtaggcggatcgatccatccactcccatcaatcttgtcaggttactgaattgaaacgagaaaaaaaatccataaagttctgaagactaagtggatcgagcctgcgcgcgcgagggttgtcgtaaaatgtccaccgctattaggagggctaatgatgaattccccgtcgattgtagctacatgcatgaaggagtacacacgcatgcctatgttgtttgaattaatcaaattgcttgtttgttagtaattata

SEQ ID NO: 116025 - DNA, 1215 bp, Zea Mays
caaccctgccttctcttcttccttattcccagtttcccacagcttgcgcggtctcactctctctcggcgacgactacgccaaggcccaagtgtgccgaggtattttttaggctcaggtcgctaccgccctacggccccggtcttcttccggcccttcgccggcgacgagaaccagcagggcagcagacggatggcttcgtcggtgccggcgccatcggggtcggtgatcaccgtggcgtcgtcttcttcctcagcagccgcggccgcggtgtgcggcacgggctccccatgcgctgcgtgcaagttcctgcgtcgcaagtgccagccggactgcgtgttcgcgccctacttcccaccggacaacccgcagaagttcgtgcacgtgcaccgcgtcttcggcgcgagcaacgtgaccaagctgctgaacgagctccaccccttccagcgcgaggacgccgtgaactccctcgcctacgaggccgacatgcgcctccgcgaccccgtctacggctgcgtcggcgtcatctccatcctccagcacaacctacgacagctccagcaggacctcgcccgcgccaagtacgaactctccaagtaccaggcggcagcggcagcttctgcgtccacggcgccgacagggccgcaagcgatggcagagttcatcggcaacgcgatgccgaacggcgcgcacaacttcatcaacattggacactcggcggcgctcgggtccctcggaggctccgcctccgtgttcgggcaggagcagttcggcaacgcgcagatgctgtccaggagctatgacggcggcgagcccatcgcgaggctggggatcaacggcggcggctacgagttcggctactcgaccgcgatgggcgggtctggcgctgtctccggcctcgggacgctcggcatcagcccgttcttgaagtctggtaccgccggcggcgacgagaagcccaacggcggtcagtaggcggatcgatccatccactcccatcaatcttgtcaggttactgaattgaaacgagaaaaaaaatccataaagttctgaagactaagtggatcgagcctgcgcgcgcgagggttgtcgtaaaatgtccaccgctattaggagggctaatgatgaattccccgtcgattgtagctacatgcatgaaggagtacacacgcatgcctatgttgtttgaattaatcaaattgcttgtttgttagtaa

SEQ ID NO: 116026 - DNA, 1554 bp, Zea Mays
agcttgcgcggtctcactctctctcggcgacgactacgccaaggcccaagtgtgccgaggtattttttaggctcaggtcgctaccgccctacggccccggtcttcttccggcccttcgccggcgacgagaaccagcagggcagcagacggatggcttcgtcggtgccggcgccatcggggtcggtgatcaccgtggcgtcgtcttcttcctcagcagccgcggccgcggtgtgcggcacgggctccccatgcgctgcgtgcaagttcctgcgtcgcaagtgccagccggactgcgtgttcgcgccctacttcccaccggacaacccgcagaagttcgtgcacgtgcaccgcgtcttcggcgcgagcaacgtgaccaagctgctgaacgagctccaccccttccagcgcgaggacgccgtgaactccctcgcctacgaggccgacatgcgcctccgcgaccccgtctacggctgcgtcggcgtcatctccatcctccagcacaacctacgacagctccagcaggacctcgcccgcgccaagtacgaactctccaagtaccaggcggcagcggcagcttctgcgtccacggcgccgacagggccgcaagcgatggcagagttcatcggcaacgcgatgccgaacggcgcgcacaacttcatcaacattggacactcggcggcgctcgggtccctcggaggctccgcctccgtgttcgggcaggagcagttcggcaacgcgcagatgctgtccaggagctatgacggcggcgagcccatcgcgaggctggggatcaacggcggcggctacgagttcggctactcgaccgcgatgggcgggtctggcgctgtctccggcctcgggacgctcggcatcagcccgttcttgaagtctggtaccgccggcggcgacgagaagcccaacggcggtcagtaggcggatcgatccatccactcccatcaatcttgtcaggtttggtttgttttggttttgcatgctgcctgcacgcgcggtgttttattttgccttccctttttctgattaattcgcggagtttggtggactacggttagtcggtttattttctaggtagaggaacaattatgcatgactaataataattaagggtttcatttcatggttaaatataccatttgcatgatgctagttggagctaacgtccttgttcaaacaaagtatcgtagaattgtttggatctacatattaaattgatggctaggtgcatgcatatgtacttgaacagcagggcttttccgaacttctgatcagcagaatccagcatctgcttttgtcaaactgttttgcttttagatcgagggtacttgttagtatccatgcacagcacacggtgtggccgtatggtgaacaaatctattttcagatttgcgctcagctcatcgtgtgtggtgtacctaattaagcttccgtttttttgtattctttcttttttataaggacgctcctgttaaatcgtttgaaacagaagcaacatcattgattattagcaaatcctgaagaatgcatgcaagttcttct

SEQ ID NO: 116027 - DNA, 315 bp, Zea Mays
atgctccctgctcggcctccccggcgtgctgctccctcgccttggtatccctgcgagctccttctccctcgcccggtttccagctcaggcctcgccggatgccaccgtcgcttttctgacctcgcctcgacactcaatcgctgcagcacgccatgccatgctgcactgtcatcgttcgctatcctcatcctcgccaattttcctcgttgtttctcggctacaaccgtgtcagctcctacgcgtcgtgcgcgttttgtgttcgggtcgagccccaggattttgaggaaaaggaagcttcagtacatcggccggtga

SEQ ID NO: 116028 - DNA, 1251 bp, Zea Mays
gacgggggctccccgtcgcagatcgccttcttcagctcctcagcagacggcttctctactccgggcacaagggagagtcgccccaagaagagctccaggatggtgacgccgatgccccagacatccgccttcatggcgccgacggcccagcacaagctttaggcgcgaaccgctcggggctgtagcacatcttagtgccgccggtgatgggcacctagagccggcctcgccggaggggccgcgtagaaccctggaaaggttgaagtcgctcatcttgatttccccgcgggagttggcgaggatgttgtcctgctttacgtccaggtgcgccacgccgttgtagtggagctggagtaggccccggacgcactggaaggccacctcggcgacggctgcctccgggattcgtagccccccgcgccggcgccggcgcaggagactgccgagagatccagcgtccatgtactcgagcacgagcgcggccttgccgccgggctcgcggagcagggcagcaggccgtataagtcgatgacgtgcgtcgccccagcagcgattttgagcacctcggcctccttctctacgacgagcgggtcctggtcgaacgatatcttgatcgcgaagaccgcgctggtgcggcagtggtgtgccttgcagacgctggctatgccgccagcgccgagctcgcagatccaatcgaggtccgacagccgcagcttctctgacgcctccggcacggaggccgtcatcctggcccggtcctggtggcacatctcgtgaggccgcgtcgggatggccatctgacgcgccgtggttcactggaaggagacgagacgagacgagcaggaagcgagatggaatggaactatgggaagaagaagcgggggccgcaggccgggattaagagaaagctgcgatcaccttggccctacatcaccctcttcttcaggcaggtgtagtgtaaagtatgctgatgatgggaaggatgccaatcactgcattcgagtatttcctgaagaatgaggttcaaggcaagattttccttgtgaccctcccaaggaatggttggctaagttcttttctagctttctcttttctgcagcaatttgttcttttcagtaaccattcttgatttatttgtattgagaaccacacattttactagtagatgcaatgataaaaggagataggacgacgtgatttttattagggttttttaaattagtgcactcagttttggttaaactgatggtg

SEQ ID NO: 116029 - DNA, 1191 bp, Zea Mays
gacgggggctccccgtcgcagatcgccttcttcagctcctcagcagacggcttctctactccgggcacaagggagagtcgccccaagaagagctccaggatggtgacgccgatgccccagacatccgccttcatggcgccgacggcccagcacaagctttaggcgcgaaccgctcggggctgtagcacatcttagtgccgccggtgatgggcacctagagccggcctcgccggaggggccgcgtagaaccctggaaaggttgaagtcgctcatcttgatttccccgcgggagttggcgaggatgttgtcctgctttacgtccaggtgcgccacgccgttgtagtggagctggagtaggccccggacgcactggaaggccacctcggcgacggctgcctccgggattcgtagccccccgcgccggcgccggcgcaggagactgccgagagatccagcgtccatgtactcgagcacgagcgcggccttgccgccgggctcgcggagcagggcagcaggccgtataagtcgatgacgtgcgtcgccccagcagcgattttgagcacctcggcctccttctctacgacgagcgggtcctggtcgaacgatatcttgatcgcgaagaccgcgctggtgcggcagtggtgtgccttgcagacgctggctatgccgccagcgccgagctcgcagatccaatcgaggtccgacagccgcagcttctctgacgcctccggcacggaggccgtcatcctggcccggtcctggtggcacatctcgtgaggccgcgtcgggatggccatctgacgcgccgtggttcactggaaggagacgagacgagacgagcaggaagcgagatggaatggaactatgggaagaagaagcgggggccgcaggccgggattaagagaaagctgcgatcaccttggccctacatcaccctcttcttcaggcaggtgtagtgtaaagtatgctgatgatgggaaggatgccaatcactgcattcgagtatttcctgaagaatgaggttcaaggcaagattttccttgtgaccctcccaaggaatggttggctaagttcttttctagctttctcttttctgcagcaatttgttcttttcagtaaccattcttgatttatttgtattgagaaccacacattttactagtagatgcaatgataaaaggagataggacg

SEQ ID NO: 116030 - DNA, 433 bp, Zea Mays
agcaaaagtggatatatcctctgagaaggaagttgattgtgcacaacaggagactaatgatttgaaatataaactttagtccaaggaagctaaaattgaaaagatgaaatatgagcatttgacaagggaggctgctttgaccaagaatgagcttcttgaagaggagtacaagaaaaagttagatgaggcaaataaggaactatctctggagaatgatctagcaggcatgtgagttcttgttgctaagttgaaaagaggggctttagatatatctgatttgagtgttgatgatggaactaaagtttaagggcgtagcgatcgcaacactgttgcctcataattggtgttaatgaaaaataacatggtgctgcacggaacctctactttctcttgtaagaaggattgttatgtcgacataatttgatttgcatgt

SEQ ID NO: 116031 - DNA, 498 bp, Zea Mays
gccgagtggctgcctgcgttcccggatctgctcacctatgtgagcatgcaagtgtgggttgagccttcggcgaccaaggacatgatggacaaggtgaagcaggtatgacaacggaggaagaccgagaagtccctgctcagcttgcaacgaaggttggctacgacaagcgcagaagaattgaagaataatggctgtcagaagacatatgcgagcgctggaaaaagtggtgatacatcatctgctaatgcatccatgatgaatatgcagcagattattacgaaattaacaactcagtgtagtgagaaggcttttgagttagagttaaagttagctgataatcgtgtcctccaggagcagctactacagaaggtcctttctctctatttttattttcaatttattttcttcaatatgacttggagacttgttctcaaatgctatgagttaagaacaaagcaacacaaaatgttaaatgttaatatccttcgtccttcaaag

SEQ ID NO: 116032 - DNA, 534 bp, Zea Mays
ttttgcttaagtgattaaccaatttagtaacatgtatttaacgttttagcttgtttggtttagatatggtggtccctcagtaattttgtaattttttgtgttatctttatccgaaaactaagttggtatgtagtgacaggtaagcaatactgtggtggtttggacctcagttattggccggatgaagggcggaggccattatcagatcctcgtccacctttgggctactgctgataagaggacgagtgtcatacacctatccaattccccccttcaatgtggtcagtgttgaatcatctacgtcatacagtgaacaagggcatactgatgagagaagggatgacatggattttctcattcgagcatcaggttttgtgtgctgattatggtgtggtcgttggtgagactgcgacgtcctctgtaatcatctctctgacaagttagattatgtgctgaaatttctgttatctttgctggattatattgttgtgaaaggggcatagtacgatgaattggggactgaaagagcataac

SEQ ID NO: 116033 - DNA, 2205 bp, Zea Mays
atgccgccgaaatcgaaggcgtccgccgccgcggagccggtggccgtcgaggacctcttcgcctcgctccaccgccacatcgaggcaggtgctttcaaacaggccgccaaggtcgccgaccaaggtcaagcactccatctcctcccccccagcgcggtccgagtctcgtgccctaacccccgttccaatctgattcccactggttccgcagttctcaaggcagcgccgggagatgaggacgcggcctactgctgctacaggcaaaacaaactgcatgaggctcttgagcttttaagaggccaagaagaaacttcagctgttctccagctggaatcccagatcttttaccgactaggaagaatgaatgattgcatgagtagctatgagaagcttaaaaaatttaaaattgactcaatggatctgaagataaatatcattgctgctctagttgctgctggaagggcttctgaggtacaggcagctatgaaggcgcttaaggttgatcttaccacgagagcactcagggatactcgtagttttgagctcgcatacaattctgcttgctccttgatagaaaacaagaagtactctgaagccaaggagcaattggacttggctaaaagaattgggaaagaagagcttatggtggaagactacggcgaggcggatattgaatatgaattagctcctgtttctgctcagcttgcttatgtgcagcagctacaaggacaatctcaagaagctatgcaaacatatgttaatatgataaatgggcagtcagctgatttatcatcacttgctgtggcaacaacaaatcttatttcaataaaaggtacaaaagataccgcagatagcttgaagaagctcgatcggcttattggaacaactacagctccaaaccagttgcatcttgttgaaaaccttgactacaagttatccccatggcagaaagaagctctgtattctgcacgtgttcttttactgctccatgcaaataaaactgaacaggcacatgagttggtcagggggctgcttggtatgtttccagatagtgtattccctgttttacttcaagccgctgttcatgttaaagaaaagaagattcacaaagctgaagatgttcttagccagtacgctgagaagcgtcctgagaattctaaagggctcctccttgcacttgcccagattgctgctaatgccaaccattttcagcttgctgctgactcactatccagaatacctgacattcagcacatgcctgcaacagttgctacattagtggcccttaaagagcgcctaggtgactccaatgctgcagcttctgtacttgattctgctatcaactggtggaagaattccatgaccgaggataacaaattagatatattaacacgggaggctgctgcatttaagctcagccatggacgtgatgaagaggcttgtttgttgtatgaggaacttgtgaagagccatggaagcatagaagctttggctgggttagtaatgacttcagcgcgcactaacttggagaaggcagaacaatacgagaagaaactgaagccattgccaggcctcaaaggagttaatgttgagagcttggagaagacatctggtgcaaggcatgtggaagggccccaagacatgaaggtagatgttcccgaggaagtgaagaagcaaaaggcaaagaagaggaagcggaagcctagatacccgaaaggcttcgatccagcaaacccggggccgccaccagatcccgagagatggctgccaaggagagagcggtccagttaccgtccaaagaggaaggataagagggctcaggtcagaggtgctcaaggagctgtgtctagggaaacatcggccaccaatgtcggtgcttcctcaaaaggaagccaaaccaccaattcatcaaagacaccggcggtaaatgctgaacagccaaaaactagcaacaaatctaggaagaagaagtccaggcattagatgagaattttatgttacattaccgtacaaaagaatatgttcgtttatcttctggatgacttgcaattttggactggattgcattcaattgcagatttgctttgcttttacactaacgtttgaagcgactgagactattgattttttttttgccaagatgtgattgatgggttgctccagtaacattctattttttatgagttaatagttcttttgattcca

SEQ ID NO: 116034 - DNA, 345 bp, Zea Mays
atggaccggaggccgccggcgaggaggagaccaggcgatccccaccgcaggggcgcagcaatgcacggcgccgtcgagcagcagaagcagcaccgcgggcggcggccgcagggaacggtgccgccgccgcccgcgggctacttcaccgcggagctgctgctggcgttcgtgttcgtggccgtgtcgctggcgttcctcccgctcgtgctgccgccgctctcgccgccgccgttcctgctgctgctggtgcccgtgggcctgctggccgtgctcctcgcgctcgccttcgtgccgctcgacgcgcacagccacctcgtcgtcgtcggctccggctcgtcccgctga

SEQ ID NO: 116035 - DNA, 1746 bp, Zea Mays
ggaaaagccggcgcgctcagagcaggcaaacaaaaccccactgccggcccgcgtccggggttccgggcgaaccacttcactgcagcccgcccggagccgcgccgcgagaggagggagggaatcagtgaatggcggatggcagcggggaatcggagtcgacggcgctggagttcacgccgacgtggatcgtggcggcggtctgctccctcatcgtggtcatctccctcgcagccgagaggtgcctgcattacctcggcaagacgttcaaggggaagaaccagaaggcgctcttcgaggctctcctcaaggtcaaagaagagctgatgcttctggggttcatctcgctgctgctgacggtgttccaaggagtgatgcagaggacgtgcattcctccggggtggaccatctacatgctcccatgccgtagcgccaaggagcaggccgagctgagccccacggaggcgcacggccatgctgccggaatcttaggcctcacccgccggcgtttgcttgccgagggcgggcctaggacccagcgttgccagaagaagattcgtcaatggaaacactgggaggatgagattcagaagggtgctacagacaatgggcctaggaaggtgacctatgtgcatcaatctgaatttatcagggaacattccaagggcattggcagagataccacaatgttgagctggctgcattcttttctcaagcagttttatgggtcggttactaaatcagactacactacaatgcgacttggcttcatcacgacacattgtaggtcaaacccaaaatttgatttccacaggtacatgatgcgagctttggaggctgactttaagaaggtggttggcataagctggtacttgtggatatttgttgtggtattcatgttgctgaacatcaatggttggcacacatacttttggatctctttcattccccttctgcttctgttggccgttggcaccaagctagagcatgtcataactcagttggctcaagaggtcgccgagaagcactccgcagtagagggcgacttggtggtcaatccgtcggatgaccatttctggtttggccggccaaagatcgtcctgtacctgatccacttcatcctcttccagaacgcgtttgagatcgcattcttcttctggattctgactacctacggtttcaactcctgcatcatggaccacgtccccttcattgtgccgaggctcgttgtcggggccatcatccagctcctctgtagctacagcaccctgcctctgtacgcgattgtcacgcagatggggactttcttcaagaaggagatcttcgatgagcacgtgcagcagagccttctgggctgggcgcagaaggccaagaagaggaaagcgctcaggaacaatggcaatggcagcaatggcgccgcggccgggtcgtcacatccatctgcgactgcgaggctcgaactgatgagacgagctgtcgctcttgaagaaggcagtgccggtggcaacgggagtgaggctagtgcggccgagctacacgacacgggcccgaagctctgaacgctgtagaaaacgcccggcagagcgtcagaagatgcagtgtttctgtacgcgagccatatgtcactatgtcgtgtggctgtttagccaggtggtgtagtgtgatactgcgtatcatgatttgtatgcttttctggattgagcttgaagcgtgttatggagtggggagctttgtgtagtgttgtgctca

SEQ ID NO: 116036 - DNA, 1863 bp, Zea Mays
ggaaaagccggcgcgctcagagcaggcaaacaaaaccccactgccggcccgcgtccggggttccgggcgaaccacttcactgcagcccgcccggagccgcgccgcgagaggagggagggaatcagtgaatggcggatggcagcggggaatcggagtcgacggcgctggagttcacgccgacgtggatcgtggcggcggtctgctccctcatcgtggtcatctccctcgcagccgagaggtgcctgcattacctcggcaagacgttcaaggggaagaaccagaaggcgctcttcgaggctctcctcaaggtcaaagaagagctgatgcttctggggttcatctcgctgctgctgacggtgttccaaggagtgatgcagaggacgtgcattcctccggggtggaccatctacatgctcccatgccgtagcgccaaggagcaggccgagctgagccccacggaggcgcacggccatgctgccggaatcttaggcctcacccgccggcgtttgcttgccgagggcgggcctaggacccagcgttgccagaagaagggagaagttcctttgttgtcagttgaagcactgcatcagttgcatatcttcattttcattctggccattgcacacgtgattttctgtgtcctgactatgcttctaggaagcgtgaggattcgtcaatggaaacactgggaggatgagattcagaagggtgctacagacaatgggcctaggaaggtgacctatgtgcatcaatctgaatttatcagggaacattccaagggcattggcagagataccacaatgttgagctggctgcattcttttctcaagcagttttatgggtcggttactaaatcagactacactacaatgcgacttggcttcatcacgacacattgtaggtcaaacccaaaatttgatttccacaggtacatgatgcgagctttggaggctgactttaagaaggtggttggcataagctggtacttgtggatatttgttgtggtattcatgttgctgaacatcaatggttggcacacatacttttggatctctttcattccccttctgcttctgttggccgttggcaccaagctagagcatgtcataactcagttggctcaagaggtcgccgagaagcactccgcagtagagggcgacttggtggtcaatccgtcggatgaccatttctggtttggccggccaaagatcgtcctgtacctgatccacttcatcctcttccagaacgcgtttgagatcgcattcttcttctggattctgactacctacggtttcaactcctgcatcatggaccacgtccccttcattgtgccgaggctcgttgtcggggccatcatccagctcctctgtagctacagcaccctgcctctgtacgcgattgtcacgcagatggggactttcttcaagaaggagatcttcgatgagcacgtgcagcagagccttctgggctgggcgcagaaggccaagaagaggaaagcgctcaggaacaatggcaatggcagcaatggcgccgcggccgggtcgtcacatccatctgcgactgcgaggctcgaactgatgagacgagctgtcgctcttgaagaaggcagtgccggtggcaacgggagtgaggctagtgcggccgagctacacgacacgggcccgaagctctgaacgctgtagaaaacgcccggcagagcgtcagaagatgcagtgtttctgtacgcgagccatatgtcactatgtcgtgtggctgtttagccaggtggtgtagtgtgatactgcgtatcatgatttgtatgcttttctggattgagcttgaagcgtgttatggagtggggagctttgtgtagtgttgtgctca

SEQ ID NO: 116037 - DNA, 2132 bp, Zea Mays
ggaaaagccggcgcgctcagagcaggcaaacaaaaccccactgccggcccgcgtccggggttccgggcgaaccacttcactgcagcccgcccggagccgcgccgcgagaggagggagggaatcagtgaatggcggatggcagcggggaatcggagtcgacggcgctggagttcacgccgacgtggatcgtggcggcggtctgctccctcatcgtggtcatctccctcgcagccgagaggtgcctgcattacctcggcaaggtaaccgattttccttgcgtgcgttcctgagcaccgaaacgcctcgctcctcgtctccctcctgaatttaatgccgcaccttggtggcgtccactgtccactggcgacggctggcagacgttcaaggggaagaaccagaaggcgctcttcgaggctctcctcaaggtcaaagaagagctgatgcttctggggttcatctcgctgctgctgacggtgttccaaggagtgatgcagaggacgtgcattcctccggggtggaccatctacatgctcccatgccgtagcgccaaggagcaggccgagctgagccccacggaggcgcacggccatgctgccggaatcttaggcctcacccgccggcgtttgcttgccgagggcgggcctaggacccagcgttgccagaagaagggagaagttcctttgttgtcagttgaagcactgcatcagttgcatatcttcattttcattctggccattgcacacgtgattttctgtgtcctgactatgcttctaggaagcgtgaggattcgtcaatggaaacactgggaggatgagattcagaagggtgctacagacaatgggcctaggaaggtgacctatgtgcatcaatctgaatttatcagggaacattccaagggcattggcagagataccacaatgttgagctggctgcattcttttctcaagcagttttatgggtcggttactaaatcagactacactacaatgcgacttggcttcatcacgacacattgtaggtcaaacccaaaatttgatttccacaggtacatgatgcgagctttggaggctgactttaagaaggtggttggcataagctggtacttgtggatatttgttgtggtattcatgttgctgaacatcaatggttggcacacatacttttggatctctttcattccccttctgcttctgttggccgttggcaccaagctagagcatgtcataactcagttggctcaagaggtcgccgagaagcactccgcagtagagggcgacttggtggtcaatccgtcggatgaccatttctggtttggccggccaaagatcgtcctgtacctgatccacttcatcctcttccagaacgcgtttgagatcgcattcttcttctggattctgactacctacggtttcaactcctgcatcatggaccacgtccccttcattgtgccgaggctcgttgtcgggtaaatctgcagaccttctggctcctggccccatttcgcacagtcgaagtgccatcaatatgtttcagactcatggtgttagccttgcagggccatcatccagctcctctgtagctacagcaccctgcctctgtacgcgattgtcacgcaggtgcgtgccgttatactttgcatgagtggttgaaacatactgatggtttaaactgttcttttcttgtttgcaaagatggggactttcttcaagaaggagatcttcgatgagcacgtgcagcagagccttctgggctgggcgcagaaggccaagaagaggaaagcgctcaggaacaatggcaatggcagcaatggcgccgcggccgggtcgtcacatccatctgcgactgcgaggctcgaactgatgagacgagctgtcgctcttgaagaaggcagtgccggtggcaacgggagtgaggctagtgcggccgagctacacgacacgggcccgaagctctgaacgctgtagaaaacgcccggcagagcgtcagaagatgcagtgtttctgtacgcgagccatatgtcactatgtcgtgtggctgtttagccaggtggtgtagtgtgatactgcgtatcatgatttgtatgcttttctggattgagcttgaagcgtgttatggagtggggagctttgtgt

SEQ ID NO: 116038 - DNA, 1962 bp, Zea Mays
cacttgcacttgcgaccgcgcgcgagcagcagcgacgtcccctttttcctagaggaagcagccacagcccactgagctcgctcgcgcgcgctagctacctacgcacatatctagcagctactacctagccagcagcagctacagccgcgctcgccgaggccggggcacagagggtactacaaagatatgcggaggcagcagccgaggccggggcagcagcggcggtagacgacgacgacgcacacagacgcgcgcggtcgatcggctatcatgagcggaggcggcggcggcaggcacgagaacgggcacggcggcgcggcggctgcaggtggaagcggaggaagcagcgacgcgcacgaggacgacctggtgatgccgggcttccggttccaccccacggaggaggagctcatcgagttctacctccgccggaaggtggagggcaagcgcttcaacgtggagctcatcaccttcctcgacctctaccgctacgacccatgggagctcccagcaatggccgcgattggggagaaggagtggtacttctacgtgccgagggaccgcaagtaccgcaacggcgacaggcccaaccgggtgacggcgtcgggctactggaaggccacgggcgccgaccgcaccatcaaggcggacaacagccgccccatcgggctcaagaagacgctcgtcttctactccggcaaggcgcccaagggcgtccgcagcagctggatcatgaacgagtaccgcctcccgcccgacgacaccgaccgctaccacaagaccgaaatatccctctgccgcgtgtacaagcgcaccggcatcgacgacggcggccacgggcatcccgcctcggcgcgctcgacgccctcccgcggcgtcgtcacggcgccgcagcaagacaacaagcagcaggcgtcgtcgtcgtcgacgcccacgccgcccacgaccccgtccaagatgatgcagttcctccacggcgagtgcacgtcgtcgcagcccgcggccatctgcaggaacagtcaccacgccgcggcggcggcgcacagcaataacaaggcggcggcggcgggggcgcagcggcagtcgcagctcctccccacgaagccgtactgcagcggctaccagcagctgtccacagcgagctctgctggctctgccgtgggggcggccgtcgaccaccaccatcaccagcagcagcagcagcaggcgggaacgggagccgcggcggtgtcgacgtcgtcgtcgtcgtccagaaacgcgagctacgcgctcgccgccgcgtccacgtactcgctgctcagcctggtgaacgccgcctccatgggcgggtccgggtccgccgcggccatcgacgagctcagtacgctggtcgggcacgtccacggcgcgccgccgtacttcaaccaccaggccgccgccgcaggcggccacggccacggccacggcttcgtcctccccctgccgacgacgccgtcgtcgcagcagccaatggcggcgctcgggacgctacccctgtccctggccgccatatctgacaagatctgggactggaacccggtcggccccgacgcgacggctagagactacggcagcgccaccggcggattcaagtgacggctaatgagagcggcgcccggccgcatgcacgccgcagcttcgcgcgcacggggggtggatctgtggcggcgcgcgcgcgcgtgcattacgatcctaaatggtacacagctactacagagcccatgcagatcttatttctctccctcgcggtaaatttgttcacggtaaattctgaggaattaaaccatcagtgtagacaactatatatataccctttttaatcaggccctaggtcataccaacttgtactaccagtagtatgatcaggatagtagtacgtaagctgtatgtaattcaccatcatacctgaattgcgtagaataacctctcgccttttattggatc

SEQ ID NO: 116039 - DNA, 1200 bp, Zea Mays
ggcgatactgcagtctccgcgtccattccggccgggcgtccagacgtccaccctttctcgcttctcagaccatcgtcaccatccctcccctcggcctcgcgttcgcagcggtcagcgcctccgagatggagctccacctctgcctccgtctccacgtgcgcctcactcctgccgcgaagccaccgccggcgcccgcggtgcttccagttccagcctcccgccgccttcggatgggtggaagctacggggttgctcttaggcggcacacaaggcgttcgaatcgggcaatccacacttccctagccgacggcgagcagggtgtcgctgtcgacgctgtgaaggagaggagcgtctcggtgatcctgttgtctggaggccagggaaagagaatgggggcaagtatgccaaagcagtatctacctctactgggactaccaattgcattgcacagtttaaaaacattctgtcaactgaaggaagtcaaagaagtcgtggtggtgtgtgatccagactacattgatgtatttgaaggttctattaagaacttgcaactacctcttaaatttgcacgcccgggaaaagagagacaggactccgtttttaatggacttcaggaaattgatggggattcggaactagtttgtgtccatgattctgcaaggcccttagtttcttctgaagatgtaaaaaaggtcttagaagatgctgcagtacatggagcagctgttcttggtgtgcctgttaaagctacaataaaggaggccaatagtgattcttttgtcataaaaactcttgaccggaaaactctatgggaaatgcaaactccacaggtcatgaagccaaatttactcaaagatggttttgagcttgttaaacgggataaccatgaagtcactgatgatgtatccattgtagaatatctaaaacaccctgtctatatcacggaaggctcctatacaaacattaaggtcactactcctgaagacttgctactggctgagcgcctgatgaatgagaaatagagctgacatgcaaaattaactgtttgcttgattttatagacatacgattttgtagcagtacagcattcacccgcacttctacaggttttgaaaaccctcatgcacgagataactgactgctttgtaaactttctgtcattctttctagatatatcaataaaaaatggaacaattgtat

SEQ ID NO: 116040 - DNA, 1468 bp, Zea Mays
aaaacacatcttagttttcctttttcattcgtacatagttcagttttattccaagcttgaaacttgtttatgacttttctagacctctagaagtattaactcaaaattttgaattgtatttgtccagttcttgaatctttagttttatgtgacacaggtcacattccctccttgaaggaaggaaactcacaggagacgatatttaatccaccttggcggcatgagccagtcgcaataggttcaaggtttggagaagcatttcaagagccagcttcatttcttgccatacgacctctgtttgaggacgagagatacatggtaacatataacccaacaaaggataaagtatatgctttgctcaaggaccaggcaaaatcagacgacattattaaagctgctttccatgctcatgtgctattgcattttattaatgcatcacatgctcggagactgaagcagaagcagaagcaggcaaaccctgaccgatcagagtatctgtactctagaaacatggatttcctggcacacatcgctgaatcttgcaaaatagtttcctcatcatatggaacattcaagaagaaagctagggaacagggttggataatgtcagaatctctgctcaaccctggcaaggctcgattatgtgcagcaaaaccacaatgaatgtactgtttcagtttagtatcgatgagatgataccaatctcatgtttgtaagaccaacttttctaacgagacgggatggctaagttcttaggagctgaactaacatatgttggtgcctagcactaggcgtgaacctttgatctgaagcttgccaaattccaggaagaggaagagttttacgatttgtaagttccatctctttcgtgtctatgcgttgtagggtgcacttctagtttctgatcgtttttgtgtttgaaattatgggcatataaacaggaagaatgcctgaacatgtaataaaacatgcagtggataagtggtgcgctggttcgcgactcgcgagtaaagggctcaacgagggtgacttcaaacttctaactgcagagactagagcttgtatttatgtttgctgcggtatcagatttggtgtagccattcctgatgtaacctgtttcccttccgtgttggtcggctgcggggcttcttgtttggaagtctttggagttgctacgttttttacccgccacttggccgacttgtggcacttgagtgttcatctccttggcttctagaccccgttagagcatcaccagcagctgcgggagatgctcttagcaagttccagtttatcagtgaagagtcaatcactgatgtcgtccatagctccttcaaaccttgtacatacatgatcggtaataactgcaagccttctttctgttgatatggcgtgctggtgtggacctgtagtatggtatccactgctgtgttattgtgtatgctcttttttacaaaaaaaagaagaa

SEQ ID NO: 116041 - DNA, 2491 bp, Zea Mays
gtctcctccccatcttggcattgttcgcgtcgtccgccttctctctctctctaacccactgccagccacctctgcgaccgtcgcgaccactcgccaagtaaattttcttccgcccacctgactacgcctcgacctcggcctcggcgccgcctccgtccgccggacgcggcagccatggcgccagcggtggggctcaagcgctccgccacgcagaccatcactctgccgccgcccgacacgcggctggctgtgcgcgatgtcatgcgctccacgatcccgtcgcagcccgccgtggcgccggcgtccacggagaggcaggcgcccgccgcggcgttgcaggggttcctgtgcctggaggaggtggacgggaggcggtggagctacgtggtggacggtggggccgcgaaggggaggagcaggggcggggccgtccccgctggggccgccgtcagggccgtgccgctgcagtcgccgcttccgcctgccgaggaaataatggcattcataagatcatatgtggtgcctgaagggtttccagacagtgttactccttcatatgtaccttacatgacctggagggctctgaagcatttctttggtggagcgatgggagtgtttacgacaagaaccttgctgagttctgttggagtctctcaaagcaaggtaacaccaggtgccattgctatcaactggatcctcaaggatggtgctgggcgtgtcgggaaaatgctttttgcacgtcaaggaaagaagtttgactatgacctaaagcagttgcggttttctagtgatctcttgttggaaataggagctgggatagaattaactactgctgcattccctcagtttttcttgcctatggcttgcgtagccaatgttgtaaagaacgtcgctgctgttacatcaacttcaactcgcactccaatctataaggcctatgctagaggagaaaatattggagatgtcactgctaaaggcgaatctgttgggaacattgcagatctgctcggtactggtttgagtatctttatctcaaaaaggaatccctcactggtgacttcgtttgccttcctttcctgtggatatctcctgagttcatatcaagaggtgaggtctgttgtgctgaataccctaaacagggcaaggtttaccgtcgcagtggattccttcattaaaactggtcacattccctccttgaaggaaggaaactcacaggagacgatatttaatccaccttggcggcatgagccagtcgcaataggttcaaggtttggagaagcatttcaagagccagcttcatttcttgccatacgacctctgtttgaggacgagagatacatggtaacatataacccaacaaaggataaagtatatgctttgctcaaggaccaggcaaaatcagacgacattattaaagctgctttccatgctcatgtgctattgcattttattaatgcatcacatgctcggagactgaagcagaagcagaagcaggcaaaccctgaccgatcagagtatctgtactctagaaacatggatttcctggcacacatcgctgaatcttgcaaaatagtttcctcatcatatggaacattcaagaagaaagctagggaacagggttggataatgtcagaatctctgctcaaccctggcaaggctcgattatgtgcagcaaaaccacaatgaatgtactgtttcagtttagtatcgatgagatgataccaatctcatgtttgtaagaccaacttttctaacgagacgggatggctaagttcttaggagctgaactaacatatgttggtgcctagcactaggcgtgaacctttgatctgaagcttgccaaattccaggaagaggaagagttttacgatttgtaagttccatctctttcgtgtctatgcgttgtagggtgcacttctagtttctgatcgtttttgtgtttgaaattatgggcatataaacaggaagaatgcctgaacatgtaataaaacatgcagtggataagtggtgcgctggttcgcgactcgcgagtaaagggctcaacgagggtgacttcaaacttctaactgcagagactagagcttgtatttatgtttgctgcggtatcagatttggtgtagccattcctgatgtaacctgtttcccttccgtgttggtcggctgcggggcttcttgtttggaagtctttggagttgctacgttttttacccgccacttggccgacttgtggcacttgagtgttcatctccttggcttctagaccccgttagagcatcaccagcagctgcgggagatgctcttagcaagttccagtttatcagtgaagagtcaatcactgatgtcgtccatagctccttcaaaccttgtacatacatgatcggtaataactgcaagccttctttctgttgatatggcgtgctggtgtggacctgtagtatggtatccactgctgtgttattgtgtatgctcttttttacaaaaaaaagaagaa

SEQ ID NO: 116042 - DNA, 2400 bp, Zea Mays
gtctcctccccatcttggcattgttcgcgtcgtccgccttctctctctctctaacccactgccagccacctctgcgaccgtcgcgaccactcgccaagtaaattttcttccgcccacctgactacgcctcgacctcggcctcggcgccgcctccgtccgccggacgcggcagccatggcgccagcggtggggctcaagcgctccgccacgcagaccatcactctgccgccgcccgacacgcggctggctgtgcgcgatgtcatgcgctccacgatcccgtcgcagcccgccgtggcgccggcgtccacggagaggcaggcgcccgccgcggcgttgcaggggttcctgtgcctggaggaggtggacgggaggcggtggagctacgtggtggacggtggggccgcgaaggggaggagcaggggcggggccgtccccgctggggccgccgtcagggccgtgccgctgcagtcgccgcttccgcctgccgaggaaataatggcattcataagatcatatgtggtgcctgaagggtttccagacagtgttactccttcatatgtaccttacatgacctggagggctctgaagcatttctttggtggagcgatgggagtgtttacgacaagaaccttgctgagttctgttggagtctctcaaagcaaggtaacaccaggtgccattgctatcaactggatcctcaaggatggtgctgggcgtgtcgggaaaatgctttttgcacgtcaaggaaagaagtttgactatgacctaaagcagttgcggttttctagtgatctcttgttggaaataggagctgggatagaattaactactgctgcattccctcagtttttcttgcctatggcttgcgtagccaatgttgtaaagaacgtcgctgctgttacatcaacttcaactcgcactccaatctataaggcctatgctagaggagaaaatattggagatgtcactgctaaaggcgaatctgttgggaacattgcagatctgctcggtactggtttgagtatctttatctcaaaaaggaatccctcactggtgacttcgtttgccttcctttcctgtggatatctcctgagttcatatcaagaggtgaggtctgttgtgctgaataccctaaacagggcaaggtttaccgtcgcagtggattccttcattaaaactggtcacattccctccttgaaggaaggaaactcacaggagacgatatttaatccaccttggcggcatgagccagtcgcaataggttcaaggtttggagaagcatttcaagagccagcttcatttcttgccatacgacctctgtttgaggacgagagatacatggtaacatataacccaacaaaggataaagtatatgctttgctcaaggaccaggcaaaatcagacgacattattaaagctgctttccatgctcatgtgctattgcattttattaatgcatcacatgctcggagactgaagcagaagcagaagcaggcaaaccctgaccgatcagagtatctgtactctagaaacatggatttcctggcacacatcgctgaatcttgcaaaatagtttcctcatcatatggaacattcaagaagaaagctagggaacagggttggataatgtcagaatctctgctcaaccctggcaaggctcgattatgtgcagcaaaaccacaatgaatgtactgtttcagtttagtatcgatgagatgataccaatctcatgtttgtaagaccaacttttctaacgagacgggatggctaagttcttaggagctgaactaacatatgttggtgcctagcactaggcgtgaacctttgatctgaagcttgccaaattccaggaagaggaagagttttacgatttgaagaatgcctgaacatgtaataaaacatgcagtggataagtggtgcgctggttcgcgactcgcgagtaaagggctcaacgagggtgacttcaaacttctaactgcagagactagagcttgtatttatgtttgctgcggtatcagatttggtgtagccattcctgatgtaacctgtttcccttccgtgttggtcggctgcggggcttcttgtttggaagtctttggagttgctacgttttttacccgccacttggccgacttgtggcacttgagtgttcatctccttggcttctagaccccgttagagcatcaccagcagctgcgggagatgctcttagcaagttccagtttatcagtgaagagtcaatcactgatgtcgtccatagctccttcaaaccttgtacatacatgatcggtaataactgcaagccttctttctgttgatatggcgtgctggtgtggacctgtagtatggtatccactgctgtgttattgtgtatgctcttttttacaaaaaaaagaagaa

SEQ ID NO: 116043 - DNA, 357 bp, Zea Mays
ctttggtaagaaaagagaaaacattcaaactttatcccaagtatggccgttcaaaattatcagaatcacaactactttttcctagtttttcttattaatagaaaagccattggtttaaagcaaatgtgcaatgtgtaacaccaaacttacaggactgagcaatatacagcctaataaaagctataagtagttgattaagtcacacatgaatattcaaacttacaaaggcttagatgttattacatgtaccaaattcattaacttgattagcgtaaacacaattaaaaacatctcttccttgataccagaccagacatcagttaactctaatgtccatgaacgtgccccctacagaag

SEQ ID NO: 116044 - DNA, 1877 bp, Zea Mays
cctccctcctttgggcttgtctctgcctctctctctcctcccttctcccacccacccctctctcttgctgtgggtgtgctgtggagaggagaaaggaagtagagcaagaacaagaactaataacaccaacaagagctgctgccaactcctgcacagcctgggctctcatcactgattgcccacctattaccttcctcttttgcgatttagaatcacccatatatctacctgctctcggtcctctgtgaactctctcgtcttctaggtttcccaggcctcaagataggcctctggaccaaagcttgaaagcagctgctgttcttgcctctttttttaattcttcatttcgtggttcctggatttttgggttcttaggtttcttgtatcttcccccaaccttgcaaaatcttgtggtgaagtttcttgcgttcgctgtttcgggaccatggacgaaaggattccgccgccgtccctcttgcaatactcgcagtcccctgctcattcttccccccatcccctcaattctatgaggtattcttcctctgaaagagaaagatatctggctgagttgcttgcagagaggcagaaattggccccatttgtgcaagttcttcctttctgtaccaggctcttgaaccaagagattttgcgcgcatcttctatggcgcctaaccataactttgttgatcctgagagaattgagcatggtagcccattaaggttacctggccacccagtgaatggtcagccgatggatctggagggctggtcagggattcaaacagaggcttctcagcatatgggggttctacaagcatcatcaatgggctggaatggtgctcctgtacttgctgccactcctgttgtcaagaaagtcatgaggctggatgttccagtagacaagtatcctaactacaactttgttggtcgtttattggggccgcgaggtaactccctgaaaagggttgaagcttcaacccaatgtagagtttacattcgaggacggggttctgtgaaagactctgttaagagtttccagcagatatggttgatgtgcgtcttaatcaagctgtgtccatcctagaggatcttcttaaaccaattgacgagtccatggactactacaagaagcagcagctgagggagctggcgattctaaatggcacactgagagaggaaagcccaagccctcacctcagccctagtgtgtcccccttcaactccaccgggatgaagcgcgcaaaaacagggcggtaatctctgttccgaaagccttcatccccccaaatcaatcatggttcaatgcccaattattacacaagctactgctggagatgattggtgatgcatatgctgggatcatcagtgatggcctatgcctgtcatgatctgtgcgctttatcgacaagcacacaaacatgcctgtgctgtgcttggacgaatggtctccgggcttgttgtttgactctactattatttattctttgtgcttctgactgcctaagtattattaacattattggtttgggaaagttaacaaggcccggttggccagtcgctgtagaaagcttggggagaggaggggggggggggggggtgtcaatgtgacggacaataataaggtttcgttggtgtacctgagatagttgtaatatgtcatgtgctgatgcttttgtgtggtgctagtacaagacaaccagacagctatagttgaggcaatgattattttgcgttcataaaatgcatatcggtgtgctttcttcatggttcatgtaccggaaccagtgtaaaatagttcctccgtcccaaaatgttttagctcttgatttttatgtctgtatttataatatataacacatacatcaagtctttcgtga

SEQ ID NO: 116045 - DNA, 1950 bp, Zea Mays
agccctccctcctttgggcttgtctctgcctctctctctcctcccttctcccacccacccctctctcttgctgtgggtgtgctgtggagaggagaaaggaagtagagcaagaacaagaactaataacaccaacaagagctgctgccaactcctgcacagcctgggctctcatcactgattgcccacctattaccttcctcttttgcgatttagaatcacccatatatctacctgctctcggtcctctgtgaactctctcgtcttctaggtttcccaggcctcaagataggcctctggaccaaagcttgaaagcagctgctgttcttgcctctttttttaattcttcatttcgtggttcctggatttttgggttcttaggtttcttgtatcttcccccaaccttgcaaaatcttgtggtgaagtttcttgcgttcgctgtttcgggaccatggacgaaaggattccgccgccgtccctcttgcaatactcgcagtcccctgctcattcttccccccatcccctcaattctatgaggtattcttcctctgaaagagaaagatatctggctgagttgcttgcagagaggcagaaattggccccatttgtgcaagttcttcctttctgtaccaggctcttgaaccaagagattttgcgcgcatcttctatggcgcctaaccataactttgttgatcctgagagaattgagcatggtagcccattaaggttacctggccacccagtgaatggtcagccgatggatctggagggctggtcagggattcaaacagaggcttctcagcatatgggggttctacaagcatcatcaatgggctggaatggtgctcctgtacttgctgccactcctgttgtcaagaaagtcatgaggctggatgttccagtagacaagtatcctaactacaactttgttggtcgtttattggggccgcgaggtaactccctgaaaagggttgaagcttcaacccaatgtagagtttacattcgaggacggggttctgtgaaagactctgttaaggaagacaagctgagggataaacctgggtatgaacaccttaatgaacaactgcatgtgcttgtggaagcagagtttccagcagatatggttgatgtgcgtcttaatcaagctgtgtccatcctagaggatcttcttaaaccaattgacgagtccatggactactacaagaagcagcagctgagggagctggcgattctaaatggcacactgagagaggaaagcccaagccctcacctcagccctagtgtgtcccccttcaactccaccgggatgaagcgcgcaaaaacagggcggtaatctctgttccgaaagccttcatccccccaaatcaatcatggttcaatgcccaattattacacaagctactgctggagatgattggtgatgcatatgctgggatcatcagtgatggcctatgcctgtcatgatctgtgcgctttatcgacaagcacacaaacatgcctgtgctgtgcttggacgaatggtctccgggcttgttgtttgactctactattatttattctttgtgcttctgactgcctaagtattattaacattattggtttgggaaagttaacaaggcccggttggccagtcgctgtagaaagcttggggagaggaggggggggggggggggtgtcaatgtgacggacaataataaggtttcgttggtgtacctgagatagttgtaatatgtcatgtgctgatgcttttgtgtggtgctagtacaagacaaccagacagctatagttgaggcaatgattattttgcgttcataaaatgcatatcggtgtgctttcttcatggttcatgtaccggaaccagtgtaaaatagttcctccgtcccaaaatgttttagctcttgatttttatgtctgtatttataatatataacacatacatcaagtctttcgtga

SEQ ID NO: 116046 - DNA, 1926 bp, Zea Mays
agccctccctcctttgggcttgtctctgcctctctctctcctcccttctcccacccacccctctctcttgctgtgggtgtgctgtggagaggagaaaggaagtagagcaagaacaagaactaataacaccaacaagagctgctgccaactcctgcacagcctgggctctcatcactgattgcccacctattaccttcctcttttgcgatttagaatcacccatatatctacctgctctcggtcctctgtgaactctctcgtcttctaggtttcccaggcctcaagataggcctctggaccaaagcttgaaagcagctgctgttcttgcctctttttttaattcttcatttcgtggttcctggatttttgggttcttaggtttcttgtatcttcccccaaccttgcaaaatcttgtggtgaagtttcttgcgttcgctgtttcgggaccatggacgaaaggattccgccgccgtccctcttgcaatactcgcagtcccctgctcattcttccccccatcccctcaattctatgagatatctggctgagttgcttgcagagaggcagaaattggccccatttgtgcaagttcttcctttctgtaccaggctcttgaaccaagagattttgcgcgcatcttctatggcgcctaaccataactttgttgatcctgagagaattgagcatggtagcccattaaggttacctggccacccagtgaatggtcagccgatggatctggagggctggtcagggattcaaacagaggcttctcagcatatgggggttctacaagcatcatcaatgggctggaatggtgctcctgtacttgctgccactcctgttgtcaagaaagtcatgaggctggatgttccagtagacaagtatcctaactacaactttgttggtcgtttattggggccgcgaggtaactccctgaaaagggttgaagcttcaacccaatgtagagtttacattcgaggacggggttctgtgaaagactctgttaaggaagacaagctgagggataaacctgggtatgaacaccttaatgaacaactgcatgtgcttgtggaagcagagtttccagcagatatggttgatgtgcgtcttaatcaagctgtgtccatcctagaggatcttcttaaaccaattgacgagtccatggactactacaagaagcagcagctgagggagctggcgattctaaatggcacactgagagaggaaagcccaagccctcacctcagccctagtgtgtcccccttcaactccaccgggatgaagcgcgcaaaaacagggcggtaatctctgttccgaaagccttcatccccccaaatcaatcatggttcaatgcccaattattacacaagctactgctggagatgattggtgatgcatatgctgggatcatcagtgatggcctatgcctgtcatgatctgtgcgctttatcgacaagcacacaaacatgcctgtgctgtgcttggacgaatggtctccgggcttgttgtttgactctactattatttattctttgtgcttctgactgcctaagtattattaacattattggtttgggaaagttaacaaggcccggttggccagtcgctgtagaaagcttggggagaggaggggggggggggggggtgtcaatgtgacggacaataataaggtttcgttggtgtacctgagatagttgtaatatgtcatgtgctgatgcttttgtgtggtgctagtacaagacaaccagacagctatagttgaggcaatgattattttgcgttcataaaatgcatatcggtgtgctttcttcatggttcatgtaccggaaccagtgtaaaatagttcctccgtcccaaaatgttttagctcttgatttttatgtctgtatttataatatataacacatacatcaagtctttcgtga

SEQ ID NO: 116047 - DNA, 969 bp, Zea Mays
agccctccctcctttgggcttgtctctgcctctctctctcctcccttctcccacccacccctctctcttgctgtgggtgtgctgtggagaggagaaaggaagtagagcaagaacaagaactaataacaccaacaagagctgctgccaactcctgcacagcctgggctctcatcactgattgcccacctattaccttcctcttttgcgatttagaatcacccatatatctacctgctctcggtcctctgtgaactctctcgtcttctaggtttcccaggcctcaagataggcctctggaccaaagcttgaaagcagctgctgttcttgcctctttttttaattcttcatttcgtggttcctggatttttgggttcttaggtttcttgtatcttcccccaaccttgcaaaatcttgtggtgaagtttcttgcgttcgctgtttcgggaccatggacgaaaggattccgccgccgtccctcttgcaatactcgcagtcccctgctcattcttccccccatcccctcaattctatgaggtattcttcctctgaaagagaaaggtgagtgttgttcttgatttttttttatttcttttgtcactattgttctccctgttgttcttggtgagttttgttttgtttttgatcctgccctttcggaatccttctgaggagcacgagatttgatgctgcggtggagatttccgcttaattctaaacttccggatgccatgtttccccttgatcaatgctgccgattgttatggaggagtgatctgtaatcgtagggacttcttttgtgatggctcgctgatagatttgttactgctgtcctaaacggagctgtatggttgactcgctgctaatgggtgtaaactttgtgtgtaacaaatcgctcattggcgatagtcacatgtaaattttaatttgatggatcgttctgtatatatcatatcaaagtttccttttaca

SEQ ID NO: 116048 - DNA, 1515 bp, Zea Mays
gctactccccttctttaaaaggaaaccacgctgcacccgaggcttctccatgcagttgctctatctttttcctcaccccggcccgttccatcaccctcacggcaagccctgatcacatcatcctgcttgtctctccccaacctagctccatctctctttcatctactcttccatcgatcgatccatcgtactgcgtgaggatggggaggggaaagattgagatcaagaggatcgagaacaccaccagccgccaggtgaccttctgcaagcgcaggaatgggctgctgaagaaggcctacgagctctccatcctctgcgacgctgagatcgctttgatcgtcttctctacccgaggccgcctatatgaatattccagtaacagcgtaaggtcgacgatcgagaggtacaagaaagcctctgccagcacttctggaacagctccagtgacagatgtcaactctcttcaatactttcagcaagaagcggcaaaactgcgccagcagatacaaaccttgcagaattcaaacaggcacctgatgggtgaatctactggcaatatgactgcaaaggagctaaagggccttgaaagcaggcttgaaagaggcattgggaggatccggtccaaaaagcatgagctgctgctcgcggagatcgaatatatgcagaagagggaagcagatctgcacaatgaaaacatgttcctgcgggccaaggttgcggaggctgagcgagctctggagcaggaggcggcagaagaccagacgatgatggtgccggcggcggtccgcggggctacgacggagctgaaagcgttgccggcgtcgttcgacgcgagtggctactaccagtaccagcagcatcagcatgtggtggccgccgcctccgctgcctcctcgtcgcagtacgcggagcagccccagggtcagcaggagtaccaccaccagactgccctccacctcggctaccacgttaagatcgattccgccgccgacaaaggcttcctctaggcgctcgcgcgcatgcatgcgtgaagcgtctcatctcataatctgacgtacggacgatgggtgccggacagctaaggtaaggcacattgtcatcgcctgaccatggagtggagtggttgttgctatatgtgcttctatatagagagaaaataaggggtagatccgcgagtacctatgtacgcaagctgtatcaaacaatattgtcatgagatatatagattgactatatatgtagtatggtgtggatggatgaatctaaagtcttaaaagacgctcggttttgggtgcctctccgtgttcggtgggctacacgccatccatcacacggcgcgcgtccttcgtgggtccatgcacacggacgcaaaaccttgctttcgacagatgcgaaatttctagacacaccaccacacatgtccacacccctctcctcttggacttctctctcccatgacgtccctcttggcctcccgagcgccaccaccgtgagtctttcgctcctgtctccctc

SEQ ID NO: 116049 - DNA, 734 bp, Zea Mays
aaggtcagcccatgccgggtgccatctctccttcctcgaggtcgaggacgaaagccagtcacgtgcattgagcttgaagccttcatccgagagagttgagctgttgagaaccatctcagtctcaggagagaggaccggagcctcgaggcccaagagaagagagcttaacgatgaggcgcgcggagccggtcggcgagcaggcggacgcggagcggcgcatgagcgggtacaagggcgtgcggcggcgccggtgggggaagtgggtgtcggagatccgggtgcccggctcgcgggagcgcctgtggctcggctcctacgccacgcccgaggccgccgccgtcgcgcacgacacggccgtctacttcctccgcggcggcggcggcgcgggcgacgtcgcggcgctcaacttccccgagcgcgcggcggccgcgtacggcgcagggggccgcctgtcgccccggtccgtgcagcgcgtggcgtccgacgccggcatggccgccgacgcgcagctcgtcgcggcgcgggaggacacccgcgcgcttcgcgccggcattggcggtggcgccagcgcgcgcccgcgcgatcgggatgctggtgacgcctgcgcgggccgtgcgcacaacgctagccttcacagtacgggcgccggaagggagcagcctgtctccggggagattagcgtggatgacatggatattttgctgtagtttattgatagcaaaaaaaaaacacat

SEQ ID NO: 116050 - DNA, 291 bp, Zea Mays
cttttggcaaggcttcataaaagagtacgtagtcatcatcagtgttaccactgaacttctacggtgaactcctatgttcagtgctccgaattaatgcaataaaaaacaaaattaataaggcgtctttgaggtgatatatgtatgagtacatgatgaactgcacagtccaaatactcagctggcttcaagaagagatcaacagtggcttccctactccctgcatgcaaccacaggttttatgttgtcatcagtcgtaaccgtgcaccagctgtaaaatatttagacccaagc

SEQ ID NO: 116051 - DNA, 1092 bp, Zea Mays
acaataaagctgcaaaccaaaatatttgattatttgcatgtttccttccaggttcatgcagacaacccagacggtctctttagaattctttcgtcaacctttcgaatcgaaactactataagaggaatgcaggactgaggatcaaacctttatcgatccaatgacaatagaggggaggcatttctgaatcgattctactgtaagaggaatgcaagaggatcaaaccttaattgatccagtgacaatctgagaggaggcgctgacactatcagaagatgtgtacattacaagcagggaggtggagccagcatttttctgaatgataggcgtctttgttcatttgttcattcttttttttacaaaaaaaaagagtatgtaacatgagttatacaactaggctgttcttcgagaaacaacctgtaactgtctgtcatatacttgacgaatgagaagcgttttcgtacctgttttagcctgaacggttcagttgtaagatctcgaattaaactgcctgatttgcagagtctagaaaaaaaatgttcctgatagttgcctagagagggagggggacggggttgaatagacgacagtacttgattcacttagaacaaaatgaacaattgtcaaaatataaaactaagatcttttcttgcagatgtgttgctttcaaataatgcagaataaacttatatggtgtttgaatgcactagagctaatagttggcggctatctaaaaagttgtagtcattttcctaatctttccaaaaagttatgaatcactctttttggtggtttaaatcttcggttatagatatttgaagtatggattctgaatctgtctaaatctagatagatacatctttttcgtgttgattgaccttgataggtacgttagacataccgcataaaggatgtgacgttcgagctaaaccacaagacgatgagttggtggacttatccagaagacaatggactgatcaagggtacgttcatcaagcgggtgtcgtctaaccaaaacactaatctaatgttggattccaggttgcaggagttgtttggaaataatcgctgcatttactcttgattaccttt

SEQ ID NO: 116052 - DNA, 1589 bp, Zea Mays
agcaccagtttggctcgtctcggcctcggcgcgtgcccccgacccgttgctgaccccgctccccggtgatctgatgtcggcggcggcacgcgcgccaccgccgccgcgcgcactctacgcgccgtcgagaagagtccctttcggtgccgtgatcctatccgcgccgcgacccggggctagggttcgcgcggcgcggcctcgcgaggggaatgttcataaccattgcctgctgacatcgtctagtctgaattcaagttctttgctatgtcctccatgcaattgtgctcaaatggctttggccgacacaagaattgcttaccagcctgaagtcgacaagcatgctggagttctggcctatgaactggttcaagggaatcttgttcagtggaattcatttatggacaaatcaatacctgatccaccaacagctgttcttcttcatggcatccttgggagcaggaaaaactggggatcttttgcgaagagattggctcaggaattcccaatgtggcagttcctcttggttgatttgcgctgccatggcgactcaacatcaattaagaagagtggaccacacactgttgcctcaactgctcttgatgttctaaagctgataatgcagctcaggctaacccctcgggttttggttggtcacagctttggtggaaaagtggccttgagtatggtagaacaagctgcaaaaccacttgctcgtcctgttagagtatgggttcttgatgctactcctggcaaagttcgggccgggggagatggtgaagatcaccctgctgaacttattgaatttctcagaagaatgcctgagcaggtttcttcaaaacaggaggttgttgatgctcttgttaaaggacaattttctatggacgttgcacggtgggtggctacaaatctacgtcgaaccagtccattgggtcagcgaccatcttcaagcttctcatggacttttgatctaaatggcatctctgagatgtacaagtcttatgaggatactaacttatggaggattgtagagaatgtaccaaggggtgttcatattaattttctaaaagctgaacgaagtttgcatagatgggctctcgaagacctccaaagaatttatactgcggaggaattagctgcagatgagggtggaggagttgaaatgcacgtgcttgaagacgctggacactgggttcatgcagacaacccagacggtctctttagaattctttcgtcaacctttcgaatcgaaactactataagaggaatgcaggactgaggatcaaacctttatcgatccaatgacaatagaggggaggcatttctgaatcgattctactgtaagaggaatgcaagaggatcaaaccttaattgatccagtgacaatctgagaggaggcgctgacactatcagaagatgtgtacattacaagcagggaggtggagccagcatttttctgaatgataggcgtctttgttcatttgttcattcttttttttacaaaaaaaaagagtatgtaacatgagttatacaactaggctgttcttcgagaaacaacctgtaactgtctgtcatatacttgacgaatgaga

SEQ ID NO: 116053 - DNA, 762 bp, Zea Mays
agcaccagtttggctcgtctcggcctcggcgcgtgcccccgacccgttgctgaccccgctccccggtgatctgatgtcggcggcggcacgcgcgccaccgccgccgcgcgcactctacgcgccgtcgagaagagtccctttcggtgccgtgatcctatccgcgccgcgacccggggctagggttcgcgcggcgcggcctcgcgaggggaatgttcataaccattgcctgctgacatcgtctagtctgaattcaagttctttgctatgtcctccatgcaattgtgctcaaatggctttggccgacacaagaattgcttaccagcctgaagtcgacaagcatgctggagttctggcctatgaactggttcaagggaatcttgttcagtggaattcatttatggacaaatcaatacctgatccaccaacagctgttcttcttcatggcatccttgggagcaggaaaaactggggtaaatgaggagtcctcaatgtgtctgtaatttgtcttaatatttgtattggcccattttgtattttgttataggtttgaagttgagtaacatacttgatttttttatattttggttgtgaaccacatgactaacaaagtaacaaacaaattgtctgtgaaggatcttttgcgaagagattggctcaggaattcccaatgtggcaggtcattatatctatcattctgatggtggcctgaattactctacaatgcatatcatatatgaaaaatgattgacatttatggtttct

SEQ ID NO: 116054 - DNA, 1050 bp, Zea Mays
gtatttgctccagtagccaggcttgattctgtgaggttgcttattgcacttgcagcacatgagagttgggaagtacatcatatggatgtgaaatcagcattcttaaatggtgaattgggtgaagaggtgacaatgaaatctcttggtttcagaaagagcatttcagaacctgctatttatctcagaagaaacatcaagtcacagttggtggttggcgtgtatgtggatgatttgataatcactggaacaaattgtgaggacatcaagctgttcaaggaagagatggcagctgttttcaagatgacagatctggggttactgaaatattatctgggaattgaagtaaggcaaaataaggagggaatatctctcagccaaggagcctatgcagaaaaaattctggagaagaatggaatgagagaatgcaacccgtgtcagactcccatggagacacggttgaagctgagcaaactgagcactgaacccctagtggatgtcacggtatactgaagcatagtaggaagcttgaggtatttggtcaacactcgacctgaccttgcgtttgctgtgggatatgtcagccggtttctggaagaaccccacaaagatcacatgatggctgtgaaacacattctgaggtatgtgaagggaaccaagaattggggtttgtggtttggaagaaaagaagagcactactggagtggttttcttcctgaacaatagtccagttacttggacttcgatgaaacaaaaggtggtggctcaatcaacctacaaggagtatcactgaaagctccaatgctaaaagtggacaacaaatcagctattgccctcattaagaacccagtgctacatggtcagagcaagcacatagaagtgaagtatcattttgttcgggagtgtgctgagaatgggcagatcaaagtggacttcatcaggagcgaagaacagctgggggacttcctgacgaaaccgcttgggaagaccaaatttcaagagttgcgctctaaggtcggactggtggatgtagacagattgcaccacaaggct

SEQ ID NO: 116055 - DNA, 93 bp, Zea Mays
atgtcgaaaactgttgatagcagtgcgacattcaggaagtccagcgacgacacctccaaagatggaacagtggtccagcgagtaattcgtgag

SEQ ID NO: 116056 - DNA, 1563 bp, Zea Mays
atggcgttgccggcgggcacggtggtggtggcctacaacgccgccatctcccggtgcgcccgcgcggggctgtacgcgcgcgcgctggcgctgttccgcgagatgcgcgggcggggcctgcgcgccgacgagtacaccctcccgccgctcctcaactccgcggcgcagctgcggggtccgcccgaggcggtggccgcgctgcacgcgctcctcctccgcgcgggcctcgcgccccacctccacgtcgccaacgcgctcgtcgacgcctacgccaggctgccccacgcgggcgccgccgcggcgcgggccgtgttcgacgaaatgccgcgccgggacgtcgtcacctggacctcgctcctcacggggctcgcgcgcgctggcgcccacggcgcggccgtccgcgcgtaccacggcatggtcgcctcgggggtccagcccgacgagttcgccgtcccggcggccctcagctcgtgcgcggcctccaccgcgctcgacctgggccggtcggtgcacgccgccgcggtccgcctcgggctccggccgttccgctccgtcgagaactcgctcgtgtccatgtacgccaagaccggcgcgctgcgcgacgcgcgggcggtgttcgacgcgatgccggcgcggtgcacgatcacgtggacggccctcatcgtcgggtacgcgcagaacggccgtggcagacagtcgctcgaggtctacgccgatatggtccggtccgggtgcaggccggactacgtgaccttcatcggtctgctcttcgcgtgcagccacgccggtcttgtcgacgccggccgggctcacttccgttccatggtgcccgtctacggcatcgctcccggaccggatcactacgcgtgcatggtcgacttgttaggccgggcggggaggctggacgaggccatggacctgctgaaccggagctccacggagctggacgccacggtgtggaagtcgctgctgggcgcgtgtcgggtgcaccagaacgcggagctcgccgagcgcgcggccgagatggtgtggaggctggacccggcggacgccgtgccgtacgtcatgctgtccaacctctactcccgggcgaggagatggggcgacgtcgcgaggatccgcgcgctgatgaaggcgagaggggtcaccaaggagcccgggtgcagctgggtgggcgtgaacggcatcacgcacctgttccacgtcgaggaccgcgatcacccgcgggcggcagagatctaccgcaaagtggaggagatgaccgaaaggatccgggtcgagggttacgtgccggacacggactgggcgctgcaggacgaggtgccggagtggaggcagagggggctggcgtaccatagtgagaggcttgccgtggccttcgggctgctcgctgtgccagcggccgcacccatccgcgtgttcaagaacctccgggtatgtggcgactgccacactgcgatcaagatggtcgccaaggtgtacggcagagagattattttgagggatgcgaactgcttccaccacatgaaagacggagagtgttcttgtggtgattactggtag

SEQ ID NO: 116057 - DNA, 2886 bp, Zea Mays
ccactccgtccgtcctctccccttcgtcgcgctggtcgctgccgcctccccctcgtgttcacactcctctaggcaccctcaggccccacggtcttcgtcctcgcctcggcgtctcagcctcgcgacccgcgtggagctcacggcggcgaccgccattgtagttcccggaggtcaatggaggagtcagtgccaatgtcagtaatcagcagtatttcaaacttccgcacgctgtctaccagcagtgtggtagaaactgagctagttaagagatactgccggaagatcaatgaaatcctgggtcttttgaagctggtcctggatgaagttatcccccagattagtctagatgataggatgcttgagggactagctgctactatcaatgatgcgataaagctagttggaagctgggatttgatgatgagcaaaatctatttcgttatgctggtggagtcccttattaccaagatgcaaaactatgtgcttgaagtgtgccaagttgtcaattctgaagtgacaccaccagaaaccaatcgtatttcagtgtacttggagaaaataaagcaatttcaatgtgacaaaattatgggtatcatcaaggaggcttccagggatattgccggaaaatttacaccaaagtcagagacattgacaaagatccaggtctctttgagcttatccacaaatcaagagttactgatggaggctgttgcccttgccaagattagaacaagagtcgatgctgaggatagttcagaactagatggtatcaaccatatctctgaattagtcaaccatatgcttgagaaacacgtggaagaaaaacagatgcatagtattaatggagtgccaatacctgctgatttttgttgccccctttcccttgaactaatgtcagatccagtgattgtggcttctggtcaaacatatgaacgggttttcatcagaaaatggcttgacttgggttacaatgtctgccccaagacacgtcaaactttgggacacagtaatttgattcctaactacactgtcaaacagttgattgaaaattggtctgaggtacatggtgtagtgctaccagaccctgtgaaactcttgagtttgaacttttcagtttccctcaagccgattaatggtagaacaagtgataaatctcctttctctgaaaactcttcaagggaaaataagtttggctcaccagatcatatatcatcagatgacagttgtcatcctaacttgctgcatgagaattttgattcagatgatcaaatctccaaggcttcatcttctgaagacacagatgattcagaaacgggtcctccgaagttactagttgcatctactgaagcaaacaaattgatgtgcaatgcatctattgatggttctgatgccattaagcaatcgagaaaggatggtttccatgcttctgatgttgagccacgtctccaaagaaacagtatcagcggtgatattggcacaagcgcttcttccagcagcaaccatctcgaagttgttgagaaggataaggaggaacaggtctcaagtaacagcattgcatcagagactacaagaaatggccgaacggtcacctgctcaaaaccaaattttcagccaaggttgggtggtgttcgttctcgaaatcatttagtctggcagcaacgatcagataaagctgtttcattggattcaagatctgattttgctattgttgataataaagttcgtaaacttattgaggatctaaaaaatgagcgtactgatcccgagagggcagcaataggagagctgctggtcctttcaaggcataacatggagagtagaatttccattgcaaaccacggtgctatacccttcttggtgaatcttctttactctgcagaccccagcatgcaggaaaatgctgtaacagtgatcctgaatttgtcgttagatgacaacaacaagatcaccatcgcaagcgcggacgccatcaagcctctcatccacgtccttgagacgggtaacccagaggcaagagcaaactcagctgcaactctcttcagcctttcagtaaacgaagagaacaaggccaaaatcggacgatctggagcaatcaaacccctggtcgacctgctgcgagatggcagtgcacaggggaagaaggatgcagcaacggctctcttcaacctatcgatatttcacgagaacaaggcccgggttgttgaggccggggctgtaaagcccctggtggagctgatggacccagcagctgggatggttgacaaggccgtcgccgttttggcaatccttgccacggtgcaggagggaaggaacggtattgctcaggcaggtggcatcccggtgctggtcgaggtcgttgagctgggctcggcacgggcgaaggagaacgctgctgctgctctgctgcagctctgcacgaacaacagcaggttctgcagcctggtgctccaggaaggcgccatgcctcctttggtggctctgtcgcaatcgggcacggcgcgtgcacgagagaaggcacaggtccttctgagctattttcgcaaccagcgtcaagtcggcaaggtcaccaggcgctaaattcagacactgttgtggccggggccgggtgtaaatgtagaatgcacaagcaattcagtagcagtagcatcatggtatgacgatgagagattgcatgctactttaattataggcaattcagtacaacaataggggcagttttgcaaagggtgttggtgtctttttacatctaatttaacatcgtcggtggttgttaacgtaatatgggtagacgccagctttggtttcaaaaaagaggtccgattttgcaaagtctggaaaagaggtttatttttacaattggcttgcaaaatgagggcagatttgcaa

SEQ ID NO: 116058 - DNA, 2478 bp, Zea Mays
cgggccgtcgggcgggcagagcgcctgcagcggtggacccacgccacgctgacgcgggcgcgcgtccgtccaagaaacctgacgtaagcagtgacagaattggcgccgcctctcggcgtccacgtgtcgtggtcaacctgtcagagtggggctccgtgtgtgcgctaccgcaggggcccggcgcacgggccacacgtgtcgcggtcgaccgcggctataaatgcccggctccgcactcggaacaagtttcaagctctcctcccctcttcctaccattagcagtagccacagccagaacaccagcagacagcagcatcagcagggaggaacacgatgagcggcgccggtccggatctgcagctgccaccggggttccggttccacccgacggacgaggagctggtgatgcactacctctgccgccgctgcgccggcctgcccatcgccgtccccatcatcgccgagatcgacctctacaagttcgacccatggcagctcccaaggatggcgctgtacggcgagaaggagtggtacttcttctccccgcgggaccgcaagtacccgaacgggtccaggcccaaccgcgccgccggggctgggtactggaaggccaccggcgctgacaagcccgtgggcacgcccaagccgctggccatcaagaaggcgctcgtcttctacgccggcaaggcgcccaagggcgagaagaccaactggatcatgcacgagtaccgcctcgccgacgtcgaccgctcggcgcgcaagaagaacagcctcagggtaagaacaagcgctccgccgccgtccgtccgtccgttggcgtcgtcaccgtccaaatcaaacaaaaagaacttggcgataatgtgtcgctttcgtaatgaacgcggggataagcgtggcccatggttttgggccgctgaattttttttacgtgggccatgctaggtggggtggggggctgcaccgtgcccaatgattcgaccgcgtcgcagtcctccgcgcgcaagtattcgatgcccatgggtcatagcgaacagatcattttcgcccgtcgcgccctgcgacggcgacggcgacggagagccagtggggtctcactgggattagacatcgaaatgacgctttgtgattctttagctcatccatttctcgtcagctgcacggacgacaaactaagttctctattgtgttgacgggtgcagttggatgactgggtcctgtgccgcatctacaacaagaagggcggcgggctggagaaggcggcggcgccggcggccggcggcgaccacaagcctgtgttcgccacggcggcggtgagctccccgccggagcagaagccgttcgtggcggcggcgggcgggctgcccccggcgttcccggagctggcggcgtactacgaccggccgtcggactcgatgccgcggctgcacgcggactactccagctgctcggagcaggtgctgtccccggagcagctggcgtgcgaccgggaggtgcagagccagcccaagatcagcgagtgggagcggaccttcgcctccgaccccgtgaaccccgcgggctccatgctcgaccccgtcgtcggccacgccggcggcgacccgctgctgcaggacatcctcatgtactggggcaagccgttctagacgacaccgcccatcatgtcctgaggggaggtgggggtggcgaagcatcctcggctgcggttggttggttgattgatctgtcttgggcagcgcaatgcaatgcaaccgcacggtgtgggctttgactcaggcgagccgccattgttgacttgcaaggaggatataatatgaaactatagctggattacatggagaggcggcaatgagaccgtctggccccgccggaagggagacggagacggagacggatggcgcagtgcatcgggtgtggtggatcgtgcgcggcatgtgtgtgtgtggctgtacatatacatactgtacatgattggttcagtgcagggtttctgttccttcattgattagttattatactaataagtactagtaattttgtaagggcttgtagttgcagtctccgtactggtggtaggtagtgcaggccatattcgtcatcgccaagcttcgagtgtacttactcctacaatatatattttacagtatatattgtagctgtgttggctcttccggaaaaaaaatggaaggggaaaatagggattatgttattttgattattctgctggtctcgtctgaagtgctactgttcgtctgtattctgctatatcgtcagcacaccacttgtagaaaaaaaaaaggagaggggaaaacgtttgaaccgttgcacgactgtggctcgcaatcgcagctatagcacggttgctgtatgcaggagtatacttatcgacgaagaaacgtttctgaaccgcatgttgaagggggtaaaaaaaacgtgctgtggcagcaggaaaaagtctgccgaacacattggaaaccgcga

SEQ ID NO: 116059 - DNA, 1919 bp, Zea Mays
cgcgggcgcgcgtccgtccaagaaacctgacgtaagcagtgacagaattggcgccgcctctcggcgtccacgtgtcgtggtcaacctgtcagagtggggctccgtgtgtgcgctaccgcaggggcccggcgcacgggccacacgtgtcgcggtcgaccgcggctataaatgcccggctccgcactcggaacaagtttcaagctctcctcccctcttcctaccattagcagtagccacagccagaacaccagcagacagcagcatcagcagggaggaacacgatgagcggcgccggtccggatctgcagctgccaccggggttccggttccacccgacggacgaggagctggtgatgcactacctctgccgccgctgcgccggcctgcccatcgccgtccccatcatcgccgagatcgacctctacaagttcgacccatggcagctcccaaggatggcgctgtacggcgagaaggagtggtacttcttctccccgcgggaccgcaagtacccgaacgggtccaggcccaaccgcgccgccggggctgggtactggaaggccaccggcgctgacaagcccgtgggcacgcccaagccgctggccatcaagaaggcgctcgtcttctacgccggcaaggcgcccaagggcgagaagaccaactggatcatgcacgagtaccgcctcgccgacgtcgaccgctcggcgcgcaagaagaacagcctcaggttggatgactgggtcctgtgccgcatctacaacaagaagggcggcgggctggagaaggcggcggcgccggcggccggcggcgaccacaagcctgtgttcgccacggcggcggtgagctccccgccggagcagaagccgttcgtggcggcggcgggcgggctgcccccggcgttcccggagctggcggcgtactacgaccggccgtcggactcgatgccgcggctgcacgcggactactccagctgctcggagcaggtgctgtccccggagcagctggcgtgcgaccgggaggtgcagagccagcccaagatcagcgagtgggagcggaccttcgcctccgaccccgtgaaccccgcgggctccatgctcgaccccgtcgtcggccacgccggcggcgacccgctgctgcaggacatcctcatgtactggggcaagccgttctagacgacaccgcccatcatgtcctgaggggaggtgggggtggcgaagcatcctcggctgcggttggttggttgattgatctgtcttgggcagcgcaatgcaatgcaaccgcacggtgtgggctttgactcaggcgagccgccattgttgacttgcaaggaggatataatatgaaactatagctggattacatggagaggcggcaatgagaccgtctggccccgccggaagggagacggagacggagacggatggcgcagtgcatcgggtgtggtggatcgtgcgcggcatgtgtgtgtgtggctgtacatatacatactgtacatgattggttcagtgcagggtttctgttccttcattgattagttattatactaataagtactagtaattttgtaagggcttgtagttgcagtctccgtactggtggtaggtagtgcaggccatattcgtcatcgccaagcttcgagtgtacttactcctacaatatatattttacagtatatattgtagctgtgttggctcttccggaaaaaaaatggaaggggaaaatagggattatgttattttgattattctgctggtctcgtctgaagtgctactgttcgtctgtattctgctatatcgtcagcacaccacttgtagaaaaaaaaaaggagaggggaaaacgtttgaaccgttgcacgactgtggctcgcaatcgcagctatagcacggttgctgtatgcaggagtatacttatcgacgaagaaa

SEQ ID NO: 116060 - DNA, 2034 bp, Zea Mays
cgcgggcgcgcgtccgtccaagaaacctgacgtaagcagtgacagaattggcgccgcctctcggcgtccacgtgtcgtggtcaacctgtcagagtggggctccgtgtgtgcgctaccgcaggggcccggcgcacgggccacacgtgtcgcggtcgaccgcggctataaatgcccggctccgcactcggaacaagtttcaagctctcctcccctcttcctaccattagcagtagccacagccagaacaccagcagacagcagcatcagcagggaggaacacgatgagcggcgccggtccggatctgcagctgccaccggggttccggttccacccgacggacgaggagctggtgatgcactacctctgccgccgctgcgccggcctgcccatcgccgtccccatcatcgccgagatcgacctctacaagttcgacccatggcagctcccaagtacgtcccgtcgtcctcggtcttcttgcagcagcagtagcagccgtgaaccaatttcctgtgcggccgtgacgatggcgagctaatcgatcgattgctaactctctgtgtgcagggatggcgctgtacggcgagaaggagtggtacttcttctccccgcgggaccgcaagtacccgaacgggtccaggcccaaccgcgccgccggggctgggtactggaaggccaccggcgctgacaagcccgtgggcacgcccaagccgctggccatcaagaaggcgctcgtcttctacgccggcaaggcgcccaagggcgagaagaccaactggatcatgcacgagtaccgcctcgccgacgtcgaccgctcggcgcgcaagaagaacagcctcaggttggatgactgggtcctgtgccgcatctacaacaagaagggcggcgggctggagaaggcggcggcgccggcggccggcggcgaccacaagcctgtgttcgccacggcggcggtgagctccccgccggagcagaagccgttcgtggcggcggcgggcgggctgcccccggcgttcccggagctggcggcgtactacgaccggccgtcggactcgatgccgcggctgcacgcggactactccagctgctcggagcaggtgctgtccccggagcagctggcgtgcgaccgggaggtgcagagccagcccaagatcagcgagtgggagcggaccttcgcctccgaccccgtgaaccccgcgggctccatgctcgaccccgtcgtcggccacgccggcggcgacccgctgctgcaggacatcctcatgtactggggcaagccgttctagacgacaccgcccatcatgtcctgaggggaggtgggggtggcgaagcatcctcggctgcggttggttggttgattgatctgtcttgggcagcgcaatgcaatgcaaccgcacggtgtgggctttgactcaggcgagccgccattgttgacttgcaaggaggatataatatgaaactatagctggattacatggagaggcggcaatgagaccgtctggccccgccggaagggagacggagacggagacggatggcgcagtgcatcgggtgtggtggatcgtgcgcggcatgtgtgtgtgtggctgtacatatacatactgtacatgattggttcagtgcagggtttctgttccttcattgattagttattatactaataagtactagtaattttgtaagggcttgtagttgcagtctccgtactggtggtaggtagtgcaggccatattcgtcatcgccaagcttcgagtgtacttactcctacaatatatattttacagtatatattgtagctgtgttggctcttccggaaaaaaaatggaaggggaaaatagggattatgttattttgattattctgctggtctcgtctgaagtgctactgttcgtctgtattctgctatatcgtcagcacaccacttgtagaaaaaaaaaaggagaggggaaaacgtttgaaccgttgcacgactgtggctcgcaatcgcagctatagcacggttgctgtatgcaggagtatacttatcgacgaagaaa

SEQ ID NO: 116061 - DNA, 106 bp, Zea Mays
ggtctactactcctcacttttagactacatatgtttcctattttcgatgatggattagcaatctgtcatgggtcaatctaactttttgctctgtttttcactcttt

SEQ ID NO: 116062 - DNA, 1473 bp, Zea Mays
ggacagcttccctgcacactcgcagctcgcacatctcatggtgtcctaagaacggcaagagccagctctgcctagcagcagcgcacagccacatccatggacgccagcccgaccccaccgctccccctccgcgccccaactcccagcattgacctccccgctggcaaggacagggccgacgcggcggctaacaaggccgcggctgtgttcgacctgcgccgggagcccaagatcccggagccattcctgtggccgcacgaagaggcgcggccgacctcggccgcggagctggaggtgccggtggtggacgtgggcgtgctgcgcaatggcgacggcgcggggctccgccgcgccgcggcgcaagtggcggcggcgtgcgcgacgcacgggttcttccaggtgtgcgggcacggcgtggacgcggcgctggggcgcgccgcgctggacggcgccagcgacttcttccggctgccgctggctgagaagcagcgggcccggcgcgtccccggcaccgtgtccgggtacacgagcgcgcacgccgaccggttcgcgtccaagctcccctggaaggagaccctgtccttcggcttccacgacggcgccgcggcgcccgtcgtcgtggactacttcaccggcaccctcggccaagatttcgagccagtggggcgggtgtaccagaggtactgcgaggagatgaaggagctgtcgctgacgatcatggagctgctggagctgagcctgggcgtggagcgcggctactaccgggagttcttcgaggacagccgctccatcatgcggtgcaactactacccgccgtgcccggtgccggagcgcacgctgggcacgggcccgcactgcgaccccacggcgctgaccatcctcctgcaggacgacgtcggcgggctggaggtcctggtggacggcgagtggcgccccgtccggcccgtcccaggcgccatggtcatcaacatcggcgacaccttcatggcgctgtccaacgggcggtacaagagctgcctgcaccgcgcggtggtgaaccggcggcaggagcggcaatcgctggccttcttcctgtgcccgcgcgaggaccgggtggtgcgcccgccggccagcgccgcgccgcggcagtacccggacttcacctgggccgacctcatgcgcttcacgcagcgccactaccgcgccgacacccgcacgctggacgccttcacccgctggctctcccacggcccggcggcggcggctccctgcacctaacgagccggccgtctctttcgccggggcccgcgcggggttcgcccacgtggtgatcaggtggcagacatgtggcccacgggccccgcgccgccttccccatttttggacgaccctactgctactactactagtgtacatatgcaaaaaaatacatatatatataggtactttctctaatatttttatatataagcaaggcggcctggtgttcttttc

SEQ ID NO: 116063 - DNA, 677 bp, Zea Mays
cacaaacagtatgaagtttactcctgaatttataacagttatacttttttgaaccagtgcatgcgcatcttattcagcatatttacaagataaaatagcaataacttactgtgaatatttgacttgactggtaaatgatgccaaaaaaggaacaagctttatgttctctgatgcagtgatgctcgagtattaccgagtctagtgtgactcgcattcctctggttgcagtagtagcgatgcagtgcctcccgagcttctcacttgcctgctcgtccttttcgcgtcctttgctcaggtgcttcgcctccccaccgcgtgatggcggcgataatccgatgtgcacgcacgctacgcccaatggggaggaacacaacttggtcagtaggggcgaaggtccggggtggatctccgtgcagaacctcgagcagctgcacaccatatggcgtgaggtcaatgttgtggtcgtgggcgtcgcgtccagatatggcgctagagtggtgatgacagggtggcggcggggtcggtgtatgtcgcggacaacagggtgagaacttctaggctcatgtcataacaatataatccttattcataaggcaaacctgaaagagagacaaagcgatgagtgggtgtgccgctggcaaggccgttgtacttgctggccaccctgcaattccgag

SEQ ID NO: 116064 - DNA, 1239 bp, Zea Mays
gtcctgatcgtgaaagataaccttttcaaactgctattttaggtaccagtggcacatacatcatgagaatgaagagttgaaccaagatgagaagtggtagtgtgctggatcctcccctcttttttttggaagaaggcaggagcgttgccttgaacaattaaggaggagcgttcctcccctcttgagctgtatccaatatatatctctctcccgcacatcttccctggataccgtgctcctcttgcactcccccaaaacgcagctccctcagccaatcttccccagagcgcggctaggcacaggcatctgaagtatggacccctctgaacttccggagctgtcccgtactgctatgttgatctgctgcaaggtgtgtggaggacctgaagaggtggacaagaggttcctgatctgtgaccactatctttgcctgtacaagtactaccacattagttgcctgactaccgagcagattgcaagtgatgtgcagatgggcagccagcgctggtactgtccatcttgcctctgccgtgtctgcctgtgcgacacggacgatgaccagatcatcctgtgtgactgctgcgatcagggctatcatctctactgcctcagtcctccaagaagaaaggtgcccaaggggcattgggactgcgaaccctgcaaggagcggagggagaaggagaagaggatactgatgctccacaggaaggattacgatgaagacatcctgaagagtggcgagttccatggaccgaacttgctgcttaaggccgcgaaaaaggtgaagcgcgatgaggaggtgaaggtggctaagactaagagcaccagaaagtaagaggcatggagattgtgagcgagcggattttgtgttctctgccatgatcagctagcgccaagtttctgccctgggaggctcagctctgcccagctgaatgggacgggcggctgagggccgtagaaacctgtgctttctgaactgaatggttagagaacatgaattcgctagaattgctccagtctatttctttacaatcgtttctttcaacccggcagggtcatacttgacaaacttgccagcgcctgaacttgagaaggttgtgatcacccgtgatgcttttaaaccccgtgatgcttttaatggtttatgaaactggatcttggtagacttaattacccgtgatgcttttaatggtttatggaactgaatcttggtagaattaaagtatctgttgctgtgtt

SEQ ID NO: 116065 - DNA, 1370 bp, Zea Mays
gtcctgatcgtgaaagataaccttttcaaactgctattttaggtaccagtggcacatacatcatgagaatgaagagttgaaccaagatgagaagtggtagtgtgctggatcctcccctcttttttttggaagaaggcaggagcgttgccttgaacaattaaggaggagcgttcctcccctcttgagctgtatccaatatatatctctctcccgcacatcttccctggataccgtgctcctcttgcactcccccaaaacgcagctccctcagccaatcttccccagagcgcggctaggcacaggcatatgacttttcactccatagaatcgagtagggcccagatctgattgattccctgatggtctggtagtactgggttacctgctatggggagaagagctcaacaaagtgcagtaattccccattcgatccaaatggactggccttgcttcaaaggcatctgaagtatggacccctctgaacttccggagctgtcccgtactgctatgttgatctgctgcaaggtgtgtggaggacctgaagaggtggacaagaggttcctgatctgtgaccactatctttgcctgtacaagtactaccacattagttgcctgactaccgagcagattgcaagtgatgtgcagatgggcagccagcgctggtactgtccatcttgcctctgccgtgtctgcctgtgcgacacggacgatgaccagatcatcctgtgtgactgctgcgatcagggctatcatctctactgcctcagtcctccaagaagaaaggtgcccaaggggcattgggactgcgaaccctgcaaggagcggagggagaaggagaagaggatactgatgctccacaggaaggattacgatgaagacatcctgaagagtggcgagttccatggaccgaacttgctgcttaaggccgcgaaaaaggtgaagcgcgatgaggaggtgaaggtggctaagactaagagcaccagaaagtaagaggcatggagattgtgagcgagcggattttgtgttctctgccatgatcagctagcgccaagtttctgccctgggaggctcagctctgcccagctgaatgggacgggcggctgagggccgtagaaacctgtgctttctgaactgaatggttagagaacatgaattcgctagaattgctccagtctatttctttacaatcgtttctttcaacccggcagggtcatacttgacaaacttgccagcgcctgaacttgagaaggttgtgatcacccgtgatgcttttaaaccccgtgatgcttttaatggtttatgaaactggatcttggtagacttaattacccgtgatgcttttaatggtttatggaactgaatcttggtag

SEQ ID NO: 116066 - DNA, 437 bp, Zea Mays
ccaagtgtttgaagagattgccagctagattagaatctgtcatcagatcgcttgagatagttagcatttgaaagtgaaacaaatggaaggcctattagaaaaactgagacaaacaaaatttaattcaccacaagagcttctttatcttttttgttgttgtcctgatcgtgaaagataaccttttcaaactgctattttaggtaccagtggcacatacatcatgagaatgaagagttgaaccaagatgagaagtggtagtgtgctggtaaaaacttgtgcaacctcttacttttaagaaacgaaagtatactacattccacgaaaagtaaggctaaccttagagtgctctccagcctaagaaaataacgtactggaaacttatatttgccttgagtttataaagtactaatcaatatcatcaattttttacttcttcc

SEQ ID NO: 116067 - DNA, 295 bp, Zea Mays
actatttgttgaggcaactctacttaacatgtcaaatcagggattcatgcatcacatatattgcatattgaacattacatgtgcaaatagttcaaataacagcacaaaaaacgtgaaaaggtatatatgtattgggatttaagacacctttgtatattctgccatatcaaataacttagaacagtttaatgatttcctaaaagcccagtgaagtagcatgagcattacagtaactcacaatttcccaaaaaaagagacagaagtggagtatgatgaaaagaaactgaggataaga

SEQ ID NO: 116068 - DNA, 3242 bp, Zea Mays
aaaaaataaactaaaataaagggagagaaaaactgtcttttgctacagctgagctagaaaaggaacctttttccgcgcgttattcttcttcttgtattcgaaagcccaagcccaactgataaaaggcccatgctcaagcgataagacgagaataaacaaccaccgatcccccagggcccaggcccacgcgcacacattctgattccgaaggcaagggcgtgtacatggcggtgagacgaggagccaaaacccaacggcgacgagaaatccacggcggctagttcaccccatccggcgcgagcgactccctccgcctgcaccaaaaacgagggcgttttcgtgtcccctcctccaaactccggagcccacatcctccagtccccactcacctgcgccactccccaccacgctcctcaaaaccctaggtccttcgatctaatgccgtgagctctcgaattctcaattcccccagcctctccatggaagaccccgtggcggtaccctcctcgtccttgaccgaccctgccgctgccgccgcagctagggttccgggtgcggtggcagcagcccctggcgtcacctctgcgccgtccgctctcgctccgacgcagccgcctgccaccgcggccgcggtctctgaagccgcgacgccgtgccagaggcagctgttcacagtggagctgcggccaggggagaccacaatcgtgtcgtggaagaagcttctcaaggaggccgggcacaccgccgcggcaccgccagtggcggtggagccagcgttcgccgcacatgcgggcccatctggtccggcacatcctgcagaaaatgacccaaaggatccaacacagccaaatcggttcaatgcagtgattgaaaaaatagagcgcctttacatgggaaaacatagcagcgatgaagaggatcttaatgatgtaccagatgatgatcagtatgacactgaggattctttcattgatgatgccgaattggatgaatatttcgaagttgataatttgaaaactaagcatgatggctattttgtgaacaagggaaaattggaacagattgaacctggtacagcggcaaatgttgctccaaagaaaaggagaagaaaggatgcatcaagttcttatctggagagtaatcaccttggtccaattgattattttgatattggcgatgtacctgaaaaatcctctgcaagaggtactgtgcagacgggaaaacagttagttagtagcaacgtaagttcttatggtcaataccatgaggacaatagagtggtgaagaataaaatcagtggtcctggaggagcccctaaaagaaaatcttctgaattctcgggtgacgctgcagcacgagctaagattattaaggatgtctcgcatgctcctttggagctaagagacatggaaaagcataaagctgcagcactacctgttgactatgcacataagtcaaaaatcagcgaaacatttgattatgcatatccagcttatagggataaaggcacttcagggcaacttgatttccaacaaagaaagataagcagggaaaatcaaggtccatcaaatagaacctatcgcaaagagaaacatggaacaaatgaatatcctggcatcgctatggctactgcggtctattctacacaaacaatgcacccagttgttggtagggagggttcaggaactaaacccaaaggcaccaggcttgagcgagctattcgcgatctccagaagatcgttgcagaatacagaccaccaacaattgatattaatgaggtagatccaaatggccaggtagcagttaaaagacggttgcctcctgaaataaagcaaaagcttgcgaaggttgcaaaggcaaataacggaaagatccaagaacatgagctaatgaatcgcctcatgggcatagttggacaccttgttcagcgcaggacactgaagggatggcagcgggtcaggtattatccgcacatgagtatacctgtgatcctaatttttacccgtgcccgcgagcatacctgcgggctgcggagaaacatgaaagaaatggtagaatctggtatatctgctaaactggagaaggctgacaggtttcagcgtgtaaaattggagatcaatgagatgattaaagagcgtatggctacaaagtccaaggtcaatgaacaggatggttcagctgatgattttcaggttgctaatgatgaaagaagagctttaaaaacaaagtatacaatggatactgcattggaggacaagatgtgtgatctgtatgatatgtatgttgagcctgataaggcgttagcacgaattgttagctttatcatttgcatgttagtgaagggtatggatgaagacaagggccctcaaagcaggaagttatatgtagagcttgccgagttatggcctcatggttgcatggacaatgtcgggatcaaagatgccatttatagatcaaaggagcgaagaagattattgtacagccagcaaaaggttcgcagtgaagagagaatgaagaggaagaggctggctgcaacagcaaagctgccagatggcctcgcagttgcaatgcaaagtggagttgccccacaagttgcacagccacccataacaaatcccatcacataccatacggctgattatggacagaacccggggttaaaatattttgatagggctcgtgaaacgagctccagtgcaatccctgatgacggcaacagaattgctggtgaggtcaagaagaagaaaagaaaacctgaatatgaccctgtagatacacaagctaacctaccaagggctcccatgccgcacgggagcgagaagcaaaagccttctaagcctgctgacgaggccagtgctggtagcctgccctccatggcgacaactcaaactgtgcttggcctaccgtcggtgcttggtcataaccaacaacctagctgattctttcggcgtagtgttggacatttggttctccttataggcctttttcagctgctgtaacaaattatggcctttccatgtgttcagcatcgattgttgagactaacatgttcccgagtagagaggatatttgatcactctttacttttccagcattgcatggttggtacccttgcccagattatctgtgcagcgctgatagatatgatctgcaaccccttcaaataccagttgtaattatgaatattttctcgagacatgtactgctcatattgtgcgaagcgatgtgcagattttctttta

SEQ ID NO: 116069 - DNA, 2966 bp, Zea Mays
catgaatcatgcgtatacaagttaaaaaaactcgcgtttagcaatgatgcagagtctgatttaagtacttatgagttgcaactcacgaacatggttgctagtatatgcctatataccacatgctgctgcgtctcccgtaggccgtgaatctgatcagtaggacttgaacgggcggtagactttgaggtcggacgcgatgccggcgatggacccggctgcggcggcgatggagatgacgaggcagccgaggctgagcatctgcaggcacacccaccgggagctccaccgcggcaccttcttctgcaccacgtacatctcgacggggaagtagacggtgagcggccagaagccgagcgcgcccaggaagcccaccacgtcgttgaagaagggcagcagcatggacacgaccgtcgtggccacgacgaacgccgtccgccacgtcgcccggaacaggttcaccttgcagcaccgccgccggctcgccgggagcgggagcgggacctcgacctccccggtgatgtacgccgagtccggccaccgctgcgcggcccacttctccacgaaggcgaacagcggctggcagtagacctggtaggcgccgaccaggtggaccacgatggcggcgttggccacgtccaggagccagaagggctcgtagaagccgaagcccgtgaggaggttcccgggcgcgccgtcgccgaacgccgcgtaccccatgcagccgcacagcatgtagaagagcgtggtgaccgccacgctcaccaccgtggcgcgcttcatcaccgtcgactccgacggcggcggcgcccggatggtgtcctggatctcgatcaggatgagggagtaggagtaggcgaaggcgacgtcgccgaacgcctggaggctgcgccacaccttgtccatcggggtcaccacgccgatggtgatgccggtcaggctgccctgcacgcctctcgtaccgatgacttggacgacgcccaggccgagcccaatggaggagtaggtgaaggacatgacggcggcgaggatggagagccaggagatctggtcgaagtccgggatctgcgagaagaagatctccgccacgccgaagatgatcatgtagggcgtgctggagatcttgcaggggttgccgtgtcccttctggtggaagcagttggccctcctgatcgcgctcatgctaatggaggcagcgatggtgtagccgatggccacgcccacgatgttggcgtactgcaggaacccgcagatctggaccttgatgccacctgctcgacgaaattccagtccacgggatgcacagagtaagctctagctaatgggtctccaactctcgcaaagtcgcaatgcagagacgtgggaaggagggggacgaaggcggaggggcacgcactgaggttcgcgttgacggcgtccatgtaggtgtagttccgcttgccggtgctggggtcgccggagcggtagcagtctgcgagcagcgacgaggtgtagtaggtgacgagcgagaagagcagcatgacgacgggtccggccacccagccgagctgcgcgatggcccaccccagcgagagcaccccggagccgatcaccgccgtgatgatgtgcgcgctcgccgtccacatcgtccctgtagcacatgcatgcagcccaatacgtcggaatgcacatcagcactcaacgttaacacggcagcaagcgggaaaaaaaatcatggtccctcccagggcgtgcatccgctagacgcctagacccgagatgatttgctgacacgtcgacggacgttccctcgctagcctacgggccgtgcaatcgagcgagccgattttattaaattggaattgttcggtgtgcgcctgcagcgggaaaatttccatcgtagaatagcggcactccggtctccgttcccgcggggagaaaaaaatttcgtccaatttcgcagaaacactcaagcatgtttaggagcaaaaataccgaagaaatttgatggacaaaaattctctttctattcagttttaaatagcacgaggattttagctcctttgacctcctctatatttagaaaattagaggtaaatacaaattaattgtaccaaatcgatataaattgaacaaacaatatttaaatttttaagagacattcactttagagttcagtttaatattttaaaatagactatgcattgaaattagcaggataatagacacatcacgaatcgaatggagcctacatcgttacctccaattagttgaaatcaaacctacgtaccattgcgcttggggcggccatcgtcgtcgaagcacttgtcgggcttgccctggccgagctccgcgccgcagacctccatggccgccggcgctgccgtcgggtagtagtacgtggccacgacgttgttctccgccatgtcaatctgcggagtgtccaaggaggcaacaggtcagaatcgaagcggcggttcactctgcacccccataccgtagtgtcttgtagtacgtgacggcaggcagcgatgccctgacctgtcactgtcagtgatcactagctcctgccagatctgctgctgctgctcctgctgcgtggctggctgcctggctgcgagcacgacgtgccattttataaaggcccgcgcccgctcccgcggtcccgccccgaccagtcgccatcgaggccgcgcgcgccggggagcttgggttgagcatgcaagcgcgcagtgcagtgcagtgcaaggcatcagacgacgggcggggcgcgtgaccgactcgcgcagtggcggcacgcggtgtcaacgggaaacagcgtctacctaaactgcacgcgccgccgcttttgatgccaccctcacatagtcgtcgccgtcgtcgcatacacacacatcctacgtatgtacgcaacagtcacctgagcaaggccggatcgtcgtggaatttaacccagcacagcaaatacgatgcgataagatcgcaacagg

SEQ ID NO: 116070 - DNA, 1646 bp, Zea Mays
catgaatcatgcgtatacaagttaaaaaaactcgcgtttagcaatgatgcagagtctgatttaagtacttatgagttgcaactcacgaacatggttgctagtatatgcctatataccacatgctgctgcgtctcccgtaggccgtgaatctgatcagtaggacttgaacgggcggtagactttgaggtcggacgcgatgccggcgatggacccggctgcggcggcgatggagatgacgaggcagccgaggctgagcatctgcaggcacacccaccgggagctccaccgcggcaccttcttctgcaccacgtacatctcgacggggaagtagacggtgagcggccagaagccgagcgcgcccaggaagcccaccacgtcgttgaagaagggcagcagcatggacacgaccgtcgtggccacgacgaacgccgtccgccacgtcgcccggaacaggttcaccttgcagcaccgccgccggctcgccgggagcgggagcgggacctcgacctccccggtgatgtacgccgagtccggccaccgctgcgcggcccacttctccacgaaggcgaacagcggctggcagtagacctggtaggcgccgaccaggtggaccacgatggcggcgttggccacgtccaggagccagaagggctcgtagaagccgaagcccgtgaggaggttcccgggcgcgccgtcgccgaacgccgcgtaccccatgcagccgcacagcatgtagaagagcgtggtgaccgccacgctcaccaccgtggcgcgcttcatcaccgtcgactccgacggcggcggcgcccggatggtgtcctggatctcgatcaggatgagggagtaggagtaggcgaaggcgacgtcgccgaacgcctggaggctgcgccacaccttgtccatcggggtcaccacgccgatggtgatgccggtcaggctgccctgcacgcctctcgtaccgatgacttggacgacgcccaggccgagcccaatggaggagtaggtgaaggacatgacggcggcgaggatggagagccaggagatctggtcgaagtccgggatctgcgagaagaagatctccgccacgccgaagatgatcatgtagggcgtgctggagatcttgcaggggttgccgtgtcccttctggtggaagcagttggccctcctgatcgcgctcatgctaatggaggcagcgatggtgtagccgatggccacgcccacgatgttggcgtactgcaggaacccgcagatctggaccttgatgccacctgctcgacgaaattccagtccacgggatgcacagagtaagctctagctaatgggtctccaactctcgcaaagtcgcaatgcagagacgtgggaaggagggggacgaaggcggaggggcacgcactgaggttcgcgttgacggcgtccatgtaggtgtagttccgcttgccggtgctggggtcgccggagcggtagcagtctgcgagcagcgacgaggtgtagtaggtgacgagcgagaagagcagcatgacgacgggtccggccacccagccgagctgcgcgatggcccaccccagcgagagcaccccggagccgatcaccgccgtgatgatgtgcgcgctcgccgtccacatcgtccctgtagcacatgcatgcag

SEQ ID NO: 116071 - DNA, 1541 bp, Zea Mays
cagagtccacaccgaaatatccgcgtggcgtggactcgggcaccactctccattcctgcatcccattcccatctcttcttcgcctcctccgcctcgccggcgtcaccgtccggccccgcctcttccccccgctcgaagctcgatctctcctcccgttctccgcccacgcaatccctgccaccgccgaatgcggaacactcgcctttggtgaccgactgacctaccctgcttctgccgggttagttgagtgtccgcgcctaccggaccccgcgccgcgtccggatctcgaatgcgccgccgccgccgtcgcgcgatctagcggctgcgcgctgccccgcaggagggtagagctccaggggcccggtgtggtcaggcggcggatatggcaacggaggcgtctacctctgcggcgggcgggatctgggtggaggggatgtccgcggacaacatcaaggggctggtgctcgcgctctcctccagcttcttcatcggggccagcttcatcgtcaagaagaaggggcttaagaaggccggtgcgtccggcgtccgcgcaggtgttggtggttactcttacttgtatgaaccattatggtgggcaggaatgattacaatgattgttggagaagtggctaactttgcagcatatgcttttgctcctgctatcttggtcacaccacttggtgcacttagcatcataattagacattatgttgaaggaaaagctgcatatatttggtatacttgggtgtgttctttgtgttgtgggttcaacaactattgtacttcatgcccctcaggagcgcacaattgaatctgtagcagaagtgtgggatcttgctactgaaccagcctttctatcttatgctgccatcgttcttgctgcaacatttgtcctcatatactactttattccacgatatggtcagacacacatcatggtctatattggtgtttgttcccttgtaggatctctgtcggtcatgagtgtgaaagctcttggaatagccttgaaactgaccttttctggcatgaatcagctaatttatccacaaacatggttgttcaccattgttgttgttgcatgtatagtaacacagatgaactacctgaacaaggctcttgatactttcaacacagcagttgtatcaccgatatactatacaatgttcacgtcactaaccattttggctagcgtgataatgttcaaggactgggatcgtcaaaatccaactcaaattgtaacagagatgtgtggttttgttaccattctttcggggacgtttcttctccacaagacaaaagacatggttgatggcctcccgccaactctacctgtccggattcctaaacatgaggacgatggagctgaaggaatccctctcagatccgctgaaggcatcccgctcagatcaccgagggcaacggcgcgctctttaattcagcttacctgagcatcaatggtgaaggaagaatgcaagctcattgaccaaggtggcaatgatgtcgccgatccacaacgcgatggagacgaggacagtgat

SEQ ID NO: 116072 - DNA, 822 bp, Zea Mays
ccattagtttgtgacagatatttttaagcttgtgctccaataaatgaccgtgtaacttgagtcatgtacttatccagttcaaggctttcgggcatggttgtccgtattctctcataccgttgtcatagtttctgctgtaactttcaacattattattgacaactgaagtacttgcatcaggactgggatcgtcaaaatccaactcaaattgtaacagagatgtgtggttttgttaccattctttcggggacgtttcttctccacaagacaaaagacatggttgatggcctcccgccaactctacctgtccggattcctaaacatgaggacgatggagctgaaggaatccctctcagatccgctgaaggcatcccgctcagatcaccgagggcaacggaatcgtttcgatcaacgctataatggttggtgatccttcttcaaaggccatggtcagccattctttcatttgataacacacctttgtagattgtattttaggattccaaaaggtaaaggcaccgctccccatgtaatttttttgagacaccggtgtagagtattgggggaacttatgttatacatctcgaaatgcccagaatgggcttagatccagtttttgatacacaccagacaccacggtggcatacaagacccgttatcagcgacacagttactgttgtattcttttggatagaaaattagaagataggggaagaatctgaagaaggctcctcgaagaaacttctttacctcccatccacatgtggtgttctagtttctgatatgcgttttttttttgggttaattcattcatcttatgtt

SEQ ID NO: 116073 - DNA, 1855 bp, Zea Mays
caccgaaatatccgcgtggcgtggactcgggcaccactctccattcctgcatcccattcccatctcttcttcgcctcctccgcctcgccggcgtcaccgtccggccccgcctcttccccccgctcgaagctcgatctctcctcccgttctccgcccacgcaatccctgccaccgccgaatgcggaacactcgcctttggtgaccgactgacctaccctgcttctgccgggttagttgagtgtccgcgcctaccggaccccgcgccgcgtccggatctcgaatgcgccgccgccgccgtcgcgcgatctagcggctgcgcgctgccccgcaggagggtagagctccaggggcccggtgtggtcaggcggcggatatggcaacggaggcgtctacctctgcggcgggcgggatctgggtggaggggatgtccgcggacaacatcaaggggctggtgctcgcgctctcctccagcttcttcatcggggccagcttcatcgtcaagaagaaggggcttaagaaggccggtgcgtccggcgtccgcgcaggtgttggtggttactcttacttgtatgaaccattatggtgggcaggaatgattacaatgattgttggagaagtggctaactttgcagcatatgcttttgctcctgctatcttggtcacaccacttggtgcacttagcatcataattagtgctgctcttgcagacattatgttgaaggaaaagctgcatatatttggtatacttgggtgtgttctttgtgttgtgggttcaacaactattgtacttcatgcccctcaggagcgcacaattgaatctgtagcagaagtgtgggatcttgctactgaaccagcctttctatcttatgctgccatcgttcttgctgcaacatttgtcctcatatactactttattccacgatatggtcagacacacatcatggtctatattggtgtttgttcccttgtaggatctctgtcggtcatgagtgtgaaagctcttggaatagccttgaaactgaccttttctggcatgaatcagctaatttatccacaaacatggttgttcaccattgttgttgttgcatgtatagtaacacagatgaactacctgaacaaggctcttgatactttcaacacagcagttgtatcaccgatatactatacaatgttcacgtcactaaccattttggctagcgtgataatgttcaaggactgggatcgtcaaaatccaactcaaattgtaacagagatgtgtggttttgttaccattctttcggggacgtttcttctccacaagacaaaagacatggttgatggcctcccgccaactctacctgtccggattcctaaacatgaggacgatggagctgaaggaatccctctcagatccgctgaaggcatcccgctcagatcaccgagggcaacggaatcgtttcgatcaacgctataatggttggtgatccttcttcaaaggccatggtcagccattctttcatttgataacacacctttgtagattgtattttaggattccaaaaggtaaaggcaccgctccccatgtaatttttttgagacaccggtgtagagtattgggggaacttatgttatacatctcgaaatgcccagaatgggcttagatccagtttttgatacacaccagacaccacggtggcatacaagacccgttatcagcgacacagttactgttgtattcttttggatagaaaattagaagataggggaagaatctgaagaaggctcctcgaagaaacttctttacctcccatccacatgtggtgttctagtttctgatatgcgttttttttttgggttaattcattcatcttatgtt

SEQ ID NO: 116074 - DNA, 1587 bp, Zea Mays
ctcgctcgccacccaccctgacccagagtccacaccgaaatatccgcgtggcgtggactcgggcaccactctccattcctgcatcccattcccatctcttcttcgcctcctccgcctcgccggcgtcaccgtccggccccgcctcttccccccgctcgaagctcgatctctcctcccgttctccgcccacgcaatccctgccaccgccgaatgcggaacactcgcctttggtgaccgactgacctaccctgcttctgccgggttagttgagtgtccgcgcctaccggaccccgcgccgcgtccggatctcgaatgcgccgccgccgccgtcgcgcgatctagcggctgcgcgctgccccgcaggagggtagagctccaggggcccggtgtggtcaggcggcggatatggcaacggaggcgtctacctctgcggcgggcgggatctgggtggaggggatgtccgcggacaacatcaaggggctggtgctcgcgctctcctccagcttcttcatcggggccagcttcatcgtcaagaagaaggggcttaagaaggccggtgcgtccggcgtccgcgcaggtgttggtggttactcttacttgtatgaaccattatggtgggcaggaatgattacaatgattgttggagaagtggctaactttgcagcatatgcttttgctcctgctatcttggtcacaccacttggtgcacttagcatcataattagtgctgctcttgcagacattatgttgaaggaaaagctgcatatatttggtatacttgggtgtgttctttgtgttgtgggttcaacaactattgtacttcatgcccctcaggagcgcacaattgaatctgtagcagaagtgtgggatcttgctactgaaccagcctttctatcttatgctgccatcgttcttgctgcaacatttgtcctcatatactactttattccacgatatggtcagacacacatcatggtctatattggtgtttgttcccttgtaggatctctgtcggtcatgagtgtgaaagctcttggaatagccttgaaactgaccttttctggcatgaatcagctaatttatccacaaacatggttgttcaccattgttgttgttgcatgtatagtaacacagatgaactacctgaacaaggctcttgatactttcaacacagcagttgtatcaccgatatactatacaatgttcacgtcactaaccattttggctagcgtgataatgttcaaggactgggatcgtcaaaatccaactcaaattgtaacagagatgtgtggttttgttaccattctttcggggacgtttcttctccacaagacaaaagacatggttgatggtatggcataatgctctccacttttttgtagttttacatgtgcctaaagcacactaaatttttgtaacctttcactctggttttacaggcctcccgccaactctacctgtccggattcctaaacatgaggacgatggagctgaaggaatccctctcagatccgctgaaggcatcccgctcagatcaccgagggcaacggaatcgtttcgatcaacgctataatggttggtgatcct

SEQ ID NO: 116075 - DNA, 2592 bp, Zea Mays
agtaccctactgcttccatcaaggagaactgcaactggaagcgggtgcgagcgactgcgatccggacgaggggagggacctgtccgtaatttcggaaaggagcctgggggagaatgccgatagacatgccgcggggtctccccttcgccgtcgacacgtgggggtcctcctcccgaagccggcgccaccgcttccttacccacgcacaccgggaccacctcgtcggcgccggtgcggacatcgatgggggagggatcgtctacgccactcgcctcaccttgcacctcgcacttcgccactttccccagttggggagttgggagttcgtggagatggaggtgggaaggacgttggtggtggatgatcccgtcggcgccttctctgtcaccacgtacgacgcaaatcactgccctggggcagtcatgttcttgtttgagggtcaatttggtaccatacttcacacaggggactgtcggcttacaccagattgcgtacagaatttgccaatgaagtacataacaaagaaaggaaacgagaacatttgccgacttgactttgtattcctagattgcaccttctccaaatgcttcctcaagctaccgagcaaggactcagcaatccgacagcgattgcaggttatatcttgcatatggaaacatctgcatgcaccatttgtcttccttgcttgtgatctgcttgggcatgaagatatactagttgaggtgtcaaggactttcggaacaaaaatttacgttgaccggaaattggattgttttaaagcactctcactgacagcccctgaaatcatcactgacgattcatcttctcgctttcagatggttgggttccaccaattacatgatagagcaagcaaagagcttgcagaggcaagggcaaatctccaacctgaacccttatttattcgtccatcaacacaatggtatgcaacctgtgctcgaagcccgaaacccagcctaacagaagctgagcaggatgagcttggcatctggcatgtttgtttctccattcactcctctcgtgatgagttggagcaagcactacaacttctccaacctcactgggttatttcaacaactcccccatgctttgccattgagctgagctatgtaaagaaacattgtttcaagacccgcttaacagctgatgatccactctggaaaatattcagagatcctctgggaaagtcagtgtcctccccttgttcagtgcttgcgacacagacagatgaaaataactcaaattttgttgttgatgatgaccattcttcttcctctagcgatggatgcacatacttaaatgtaataagcactcttgaactgaaatttgtgccacctcaaccacctgaagaaccggacattacattgtttggaagagcaaggtttgcctctcaagcaattgactttatgaaagaagattacattgccttagaagaagccagggcatgtgcaccaacagattcggttcatggcagtagtgaagaagtcgaaacatattctggaatggatttcggtgtgaaacaaccaccagcctcccagcaggatctcatggaagttggagatgatgtttctttcaaaaaagttggagatgatgtggattcctgtaagcatgaagtaacctcaacacaattagaagggtttcgagtcaagtcattacctactgttcaaagcaatatgttagtggtgtctgatcaacttgaaaggtcagaagttgtaggagagtcaaaattattgaaatccacggaagacttaaaccttaccattgtcagaagtgcagaaagaactgattgtcaaaaggaacctttgtgctatattggatcatcgaaatgtttgaatgcaagtttgaagaggttttacaggtcaaggaatatccctgttcctagacctcttccatcgcttgtcaaacttatggagtccactaaacgggtcaaaatacaaccaaatactaattatactttgttgaactcacgacacagcttaccctaatgaatgattgagcttatacttggcatattatgatagccaaaattttcagatttatgagtatatgaatggattatttctgaagaggacacctgtatattggttattgtgataaccaaaatactcggattctattgggtatacaggtatacttggactggttccgaagaagatacctgtttagtattgatccagatccacacttatacaggagctttgtacgattctcaaactgttgtacagaaaattgatgtaattacatgatgactctattggataatccgaagtgtattattcttctgcaatactagctaggcatcgtatgatgtcaaatatattctcagcaagttcgctttacgacttgatttactgaatatcatgatattctggcgtggatctatattgcttctgattcataattgtttgctgcaggagagtacataatatcttctagttcactaatgcataattttatacacaaagcagtgtcgccatggcatgacccttcaatccgaaaatacagattcatcacgcgacaagtcccgatgctactaggaattaaatcgtccagggcttaacagggcataaactt

SEQ ID NO: 116076 - DNA, 2177 bp, Zea Mays
tccgaacaggctctcttctccaccggtcctaccccttacctcccaagatcacaatcctctgctccttatatattagccacaccgctcgttccctgctgcaccgggtgacacacaggcacaaagacaccgcccgtacacaggctcgttggcttggctgctgtgtgttgcgctcagccattcagacttgagagctactagctaactgctcgttgggtgtgggtgcgctcccggcctagaccgtggaggaaaggagtccagtccactcactaccccctctgctccgttcgggttccaggccagcacagccgagggttccgcacagcgataagcgcgaagcggaagagatggagcatatcgccaggttcttcttcggagtttctgggaatgtcattgcgctcttcctcttcctgtcgcctgttgtcaccttctggagggtcatcaggaagcggtcgacggaggacttctccggcgtgccctacaacatgacgctgctcaactgcctcctatcggcttggtacggcctgccgttcgtgtccccgaacaacatcctggtgtcgacgatcaacgggacggggtcggtgatcgaggccatctacgtggtgatcttcctcatcttcgcggtggaccggcgggccaggctcagcatgctgggcctcctgggcatcgtcgcctccatcttcaccaccgtggtgctcgtctcgctgctggccctccacggcaacgcccgcaaggtcttctgcggcctcgccgccaccatcttctccatctgcatgtacgcctcgccgctctccatcatgaggctggtgatcaagacgaagagcgtggagttcatgccgttcctgctctccctggccgtgttcctgtgcggcacctcctggttcatctacggcctcctcggccgcgaccccttcattattgtacgcacacggttctctctctagtctagatcctgagccgcactcaccgcccggccgtacgcacgtgctatccgcgcatgttgtccgattggcactcggaaaccactgtagcagcactgtatcactagctgttgggactggacgtaactgcatctgatctggccagcacagtacccccgggctgggcgtcggttgccctttcgatgtcccgcccaagcccaaccaggcgcacatgcctgccgctgccgcagccgatgcacgggcatgggcgccggtagcgtctagcagcgtgggcgtggccacccacaggcagcgcacgccggtgctagctgccgatgggccgccgtgcccatgtccatgcagctggattggacccggcacaggcagaagcaacagcgcccgcgctctttcttgtcgcaatgctagttagcaaactgcacggtgcactccacttcagtacacaccaacgcgacagactgcgatgaaatatctaaggccgagttttttttttttgcaaatctcatcatgtcggaatgattcatgcggtccaaacttcagcacacccccactgtcgctaaacccgcgctgtctgtgcatgcgtgcagatcccgaacgggtgcgggagcttcctgggcctgatgcagctcatcctgtacgccatctaccggaaaaacaagggccccgccgcgccggccggcaagggagaggccgccgccgccgccgcggaggtggaggacaccaagaaggtggccgctgccgtggagctggccgatgccacgaccaacaaggcagcggacgccgtcggcggcgacggcaaggtcgccagccaggtgtaggcgggcaaggcttatttgctgtctgggactgggaggaacatcctaaacgaggctgccttagtttgtcggtggagcagattggtgttggtttctgtgggcttttacggttgttgttactctcatctccatctctcccaggaggctaccccaagcatgtagtagcttccattctgattctgggacggtgttgcacgttacagtgctctcaagctgtctctgcaaagtgtgtttttttattccatttccctcctgctcttgttctccaactgcgcttacctgcccccgatttctctaaaaaatgtattaaactatctgagaaattcatccaactgcgagtactgtgctgtgcgtgagcaatgcatcttttgcgtgtacggtgtgtgtgacacgctgaaccctgacttatcacaacaattctagagtg

SEQ ID NO: 116077 - DNA, 1151 bp, Zea Mays
ggatgagttggtgtcccgtttgatttttcacgcgcctttgaatccatgtgaagatcgatgtgctagctagctagctcgctcttcatgcgttcgtctggattttgtttgaaattcacgcagcatatatgtgtggaatataatctgtatgcacatacaggtacggcctgccgttcgtgtccccgaacaacatcctggtgtcgacgatcaacgggacggggtcggtgatcgaggccatctacgtggtgatcttcctcatcttcgcggtggaccggcgggccaggctcagcatgctgggcctcctgggcatcgtcgcctccatcttcaccaccgtggtgctcgtctcgctgctggccctccacggcaacgcccgcaaggtcttctgcggcctcgccgccaccatcttctccatctgcatgtacgcctcgccgctctccatcatgaggctggtgatcaagacgaagagcgtggagttcatgccgttcctgctctccctggccgtgttcctgtgcggcacctcctggttcatctacggcctcctcggccgcgaccccttcattattatcccgaacgggtgcgggagcttcctgggcctgatgcagctcatcctgtacgccatctaccggaaaaacaagggccccgccgcgccggccggcaagggagaggccgccgccgccgccgcggaggtggaggacaccaagaaggtggccgctgccgtggagctggccgatgccacgaccaacaaggcagcggacgccgtcggcggcgacggcaaggtcgccagccaggtgtaggcgggcaaggcttatttgctgtctgggactgggaggaacatcctaaacgaggctgccttagtttgtcggtggagcagattggtgttggtttctgtgggcttttacggttgttgttactctcatctccatctctcccaggaggctaccccaagcatgtagtagcttccattctgattctgggacggtgttgcacgttacagtgctctcaagctgtctctgcaaagtgtgtttttttattccatttccctcctgctcttgttctccaactgcgcttacctgcccccgatttctctaaaaaatgtattaaactatctgagaaattcatccaactgcgagtactgtgctgtgcgtgagcaatgc

SEQ ID NO: 116078 - DNA, 1514 bp, Zea Mays
ggctctcttctccaccggtcctaccccttacctcccaagatcacaatcctctgctccttatatattagccacaccgctcgttccctgctgcaccgggtgacacacaggcacaaagacaccgcccgtacacaggctcgttggcttggctgctgtgtgttgcgctcagccattcagacttgagagctactagctaactgctcgttgggtgtgggtgcgctcccggcctagaccgtggaggaaaggagtccagtccactcactaccccctctgctccgttcgggttccaggccagcacagccgagggttccgcacagcgataagcgcgaagcggaagagatggagcatatcgccaggttcttcttcggagtttctgatctgtctccccagggaatgtcattgcgctcttcctcttcctgtcgcctgttgtcaccttctggagggtcatcaggaagcggtcgacggaggacttctccggcgtgccctacaacatgacgctgctcaactgcctcctatcggcttggtacggcctgccgttcgtgtccccgaacaacatcctggtgtcgacgatcaacgggacggggtcggtgatcgaggccatctacgtggtgatcttcctcatcttcgcggtggaccggcgggccaggctcagcatgctgggcctcctgggcatcgtcgcctccatcttcaccaccgtggtgctcgtctcgctgctggccctccacggcaacgcccgcaaggtcttctgcggcctcgccgccaccatcttctccatctgcatgtacgcctcgccgctctccatcatgaggctggtgatcaagacgaagagcgtggagttcatgccgttcctgctctccctggccgtgttcctgtgcggcacctcctggttcatctacggcctcctcggccgcgaccccttcattattatcccgaacgggtgcgggagcttcctgggcctgatgcagctcatcctgtacgccatctaccggaaaaacaagggccccgccgcgccggccggcaagggagaggccgccgccgccgccgcggaggtggaggacaccaagaaggtggccgctgccgtggagctggccgatgccacgaccaacaaggcagcggacgccgtcggcggcgacggcaaggtcgccagccaggtgtaggcgggcaaggcttatttgctgtctgggactgggaggaacatcctaaacgaggctgccttagtttgtcggtggagcagattggtgttggtttctgtgggcttttacggttgttgttactctcatctccatctctcccaggaggctaccccaagcatgtagtagcttccattctgattctgggacggtgttgcacgttacagtgctctcaagctgtctctgcaaagtgtgtttttttattccatttccctcctgctcttgttctccaactgcgcttacctgcccccgatttctctaaaaaatgtattaaactatctgagaaattcatccaactgcgagtactgtgctgtgcgtgagcaatgc

SEQ ID NO: 116079 - DNA, 1500 bp, Zea Mays
ggctctcttctccaccggtcctaccccttacctcccaagatcacaatcctctgctccttatatattagccacaccgctcgttccctgctgcaccgggtgacacacaggcacaaagacaccgcccgtacacaggctcgttggcttggctgctgtgtgttgcgctcagccattcagacttgagagctactagctaactgctcgttgggtgtgggtgcgctcccggcctagaccgtggaggaaaggagtccagtccactcactaccccctctgctccgttcgggttccaggccagcacagccgagggttccgcacagcgataagcgcgaagcggaagagatggagcatatcgccaggttcttcttcggagtttctgggaatgtcattgcgctcttcctcttcctgtcgcctgttgtcaccttctggagggtcatcaggaagcggtcgacggaggacttctccggcgtgccctacaacatgacgctgctcaactgcctcctatcggcttggtacggcctgccgttcgtgtccccgaacaacatcctggtgtcgacgatcaacgggacggggtcggtgatcgaggccatctacgtggtgatcttcctcatcttcgcggtggaccggcgggccaggctcagcatgctgggcctcctgggcatcgtcgcctccatcttcaccaccgtggtgctcgtctcgctgctggccctccacggcaacgcccgcaaggtcttctgcggcctcgccgccaccatcttctccatctgcatgtacgcctcgccgctctccatcatgaggctggtgatcaagacgaagagcgtggagttcatgccgttcctgctctccctggccgtgttcctgtgcggcacctcctggttcatctacggcctcctcggccgcgaccccttcattattatcccgaacgggtgcgggagcttcctgggcctgatgcagctcatcctgtacgccatctaccggaaaaacaagggccccgccgcgccggccggcaagggagaggccgccgccgccgccgcggaggtggaggacaccaagaaggtggccgctgccgtggagctggccgatgccacgaccaacaaggcagcggacgccgtcggcggcgacggcaaggtcgccagccaggtgtaggcgggcaaggcttatttgctgtctgggactgggaggaacatcctaaacgaggctgccttagtttgtcggtggagcagattggtgttggtttctgtgggcttttacggttgttgttactctcatctccatctctcccaggaggctaccccaagcatgtagtagcttccattctgattctgggacggtgttgcacgttacagtgctctcaagctgtctctgcaaagtgtgtttttttattccatttccctcctgctcttgttctccaactgcgcttacctgcccccgatttctctaaaaaatgtattaaactatctgagaaattcatccaactgcgagtactgtgctgtgcgtgagcaatgc

SEQ ID NO: 116080 - DNA, 2213 bp, Zea Mays
ggctctcttctccaccggtcctaccccttacctcccaagatcacaatcctctgctccttatatattagccacaccgctcgttccctgctgcaccgggtgacacacaggcacaaagacaccgcccgtacacaggctcgttggcttggctgctgtgtgttgcgctcagccattcagacttgagagctactagctaactgctcgttgggtgtgggtgcgctcccggcctagaccgtggaggaaaggagtccagtccactcactaccccctctgctccgttcgggttccaggccagcacagccgagggttccgcacagcgataagcgcgaagcggaagagatggagcatatcgccaggttcttcttcggagtttctgggaatgtcattgcgctcttcctcttcctgtcgcctgttgtcaccttctggagggtcatcaggaagcggtcgacggaggacttctccggcgtgccctacaacatgacgctgctcaactgcctcctatcggcttggtacggcctgccgttcgtgtccccgaacaacatcctggtgtcgacgatcaacgggacggggtcggtgatcgaggccatctacgtggtgatcttcctcatcttcgcggtggaccggcgggccaggctcagcatgctgggcctcctgggcatcgtcgcctccatcttcaccaccgtggtgctcgtctcgctgctggccctccacggcaacgcccgcaaggtcttctgcggcctcgccgccaccatcttctccatctgcatgtacgcctcgccgctctccatcatggtacgtgagcgatgatgattggttgttgctgccttgctgggtagctagctccagcgggtccccttctgggcgtgtacgtgcgtccttgctgtcaacgtacggcatcagttaacaagctaagcgtgtgcttggtgtgtgcagaggctggtgatcaagacgaagagcgtggagttcatgccgttcctgctctccctggccgtgttcctgtgcggcacctcctggttcatctacggcctcctcggccgcgaccccttcattattgtacgcacacggttctctctctagtctagatcctgagccgcactcaccgcccggccgtacgcacgtgctatccgcgcatgttgtccgattggcactcggaaaccactgtagcagcactgtatcactagctgttgggactggacgtaactgcatctgatctggccagcacagtacccccgggctgggcgtcggttgccctttcgatgtcccgcccaagcccaaccaggcgcacatgcctgccgctgccgcagccgatgcacgggcatgggcgccggtagcgtctagcagcgtgggcgtggccacccacaggcagcgcacgccggtgctagctgccgatgggccgccgtgcccatgtccatgcagctggattggacccggcacaggcagaagcaacagcgcccgcgctctttcttgtcgcaatgctagttagcaaactgcacggtgcactccacttcagtacacaccaacgcgacagactgcgatgaaatatctaaggccgagttttttttttttgcaaatctcatcatgtcggaatgattcatgcggtccaaacttcagcacacccccactgtcgctaaacccgcgctgtctgtgcatgcgtgcagatcccgaacgggtgcgggagcttcctgggcctgatgcagctcatcctgtacgccatctaccggaaaaacaagggccccgccgcgccggccggcaagggagaggccgccgccgccgccgcggaggtggaggacaccaagaaggtggccgctgccgtggagctggccgatgccacgaccaacaaggcagcggacgccgtcggcggcgacggcaaggtcgccagccaggtgtaggcgggcaaggcttatttgctgtctgggactgggaggaacatcctaaacgaggctgccttagtttgtcggtggagcagattggtgttggtttctgtgggcttttacggttgttgttactctcatctccatctctcccaggaggctaccccaagcatgtagtagcttccattctgattctgggacggtgttgcacgttacagtgctctcaagctgtctctgcaaagtgtgtttttttattccatttccctcctgctcttgttctccaactgcgcttacctgcccccgatttctctaaaaaatgtattaaactatctgagaaattcatcc

SEQ ID NO: 116081 - DNA, 961 bp, Zea Mays
ggctctcttctccaccggtcctaccccttacctcccaagatcacaatcctctgctccttatatattagccacaccgctcgttccctgctgcaccgggtgacacacaggcacaaagacaccgcccgtacacaggctcgttggcttggctgctgtgtgttgcgctcagccattcagacttgagagctactagctaactgctcgttgggtgtgggtgcgctcccggcctagaccgtggaggaaaggagtccagtccactcactaccccctctgctccgttcgggttccaggccagcacagccgagggttccgcacagcgataagcgcgaagcggaagagatggagcatatcgccaggttcttcttcggagtttctgggaatgtcattgcgctcttcctcttcctgtcgcctgttgtcaccttctggagggtcatcaggaagcggtcgacggaggacttctccggcgtgccctacaacatgacgctgctcaactgcctcctatcggcttggtacggcctgccgttcgtgtccccgaacaacatcctggtgtcgacgatcaacgggacggggtcggtgatcgaggccatctacgtggtgatcttcctcatcttcgcggtggaccggcgggccaggctcagcatgctgggcctcctgggcatcgtcgcctccatcttcaccaccgtggtgctcgtctcgctgctggccctccacggcaacgcccgcaaggtcttctgcggcctcgccgccaccatcttctccatctgcatgtacgcctcgccgctctccatcatgaggctggtgatcaagacgaagagcgtggagttcatgccgttcctgctctccctggccgtgttcctgtgcggcacctcctggttcatctacggcctcctcggccgcgaccccttcattattgtacgcacacggttctctctctagtctagatcctgagccgcactcaccgccc

SEQ ID NO: 116082 - DNA, 186 bp, Zea Mays
tatgtcacagcataccattttggtgcctacatgccttttgtatttgctaaaaacagtaaaatctatatttacaattaaaacaattgtgctcttgttctcagctgatgcctacatgcatccgttgtgagtccgatgacgagtctggcagtagtgtagtcattcaaccttgcgttttctaggtcttcc

SEQ ID NO: 116083 - DNA, 3143 bp, Zea Mays
atgggcgagcgcagcggcacgcaggccgagctggagcatcacggtctgctgcgcagccatggagacgagcaaatgggagcagggcgccgcaaggtactcgacgacggcgcgacagggaaggagttggagactgggcacacggctgacgagctggagggatgcgagctaggagctctggccgacgagcacgtgcaggaaacttcggctgggcgcgagcatagggagcgagcagggcccgagcgcgcagagttccacggcgcggtggccatggcgaacgccagggcgctcaagcgcgcgcaacagggagagaaacgggatgagggaggagcgaggaaaccgcgaacaagttggagaaccttccgcatccttccacccgttcctccggcggacacatctttgccgcgcccgctcgaagaaatgctcctccgccaccgccaccacctcttgtcgcgcccgcgccgcagcttccctctcgctgccctgggctgtgtcgccatgtccacctcctcttccccctcttcctccacctccacctccgcggccgccgactaccactgccgcaccaagcacagtcccaccgccggttacgcgcgcggtccgggccgcctcgactgggccaaccagcccaaccccttcctccgtttctcccccgcaccgccattaccgctccccaacccacctccgctcgcccccgtcccctaccctgctctcttccactccccacccccgccgccgcagccgctcaccctcgactccctctctgcgctgctcttccactccctcgcgctctccgcctggaagtccgcgggcctctcaacctggtcgctccgcgttaaccccagcagcggcaacctgcaccccaccgaggcccacctggtcttcccgcatccgcgagaggtcgaccgcctcgccatcgcgcactacgcgccccgcgaccatctcctcgaggcccgtgctaccgcaccaattagggattgttccgcgattctgtctgcgccggggatggcgatcctggctctatcgtcagtcttctggcgagaggcgtggaagtatggagagcgggcgctgcggtactgcaaccatgacgtggggcacgcgctcgcagcggttgccttggccgcggccacgctgggttgggacgcgcgtttactagacgggctgtcggacgaggacctcgggaggctcgttggggtggagaaagggagcccggctgcagttccggaggggctccttaacaaagtggtcaagggtaaggcgcggtgggtggagcggcagcatccagattgcgcggttctgctattcccagttgggtctgagccggaggtcgactatggtagaattagtgaggagctgaaggtgttcgatgggctggagtgggtggggaaggcaaatgcacttagtaatgatcatgtggtgtgggatgtgatataccgcacagcagagcaagttaagaagcatggccctgcaccgggggaacggttctttgtgatgccatggcagaagagtccagccttgtccaaaggattgtataaggaattaacagtgcaggaggtagtacgtcagaggagaagtgcggtggacatggatggtgtgcatgtgatgggaagggatacattttatcagatgctgatgcactgccttccatcaggggaggttggatcaggtgaacggcaaggggagcagagtgctctgccattccgagtattaccatgggaagcagaggtgcatgctgcactatttgtgcatcgtgtctcagggcttcacagggggatttatttcctggtgagaaatgaggagcactttgatgcgttgcagcgtgctatgaggcaggactttgagtgggttcagccggaaggatgccctgatggtctcccactctacaggctgatgaaaggagattgccagaagtttgctatgcagatatcatgctttcaggaaattgcctcgcatggatgttttagccttgggatgattgctagattcgagcctgtgttgcatgagaaaggtgaatggatgtatcctcgtttgttctgggagactggcattcttggtcaagtgctttaccttgaggcccatgctattggaatatctgccacaggaatcggatgctactttgatgatactgttcacgaggcacttggcttgaaaggtttggactttcagagcatgtaccattttacagtgggcgctcctgtgcttgacaagaggataatgagtctcccagcttaccctggtcccggaattgacgcatgatatcttgcctcgggggaattttttgtcgacagatcaacaaagaaccgtggagcctgactgttttggtttatgtgtagtggcatgcctgaaatctatgcattgcataccccggtactaaccactcgtatttatctagttgttagccacgatgctcctatgttgcaccagcgtacaagtatgtcccgatgttccagtgcaattattctggtcctcaaccaggtatatagtttggtatattgtgcaactaatttttttgccacatttactagaataaggagggcgtacaaaattgtagaagtagagatacaacaagaagaaaaaaaacagggaatgtaaatcctctttgcgactatacacttagaacgaaatttctgcatgtatagaatggtttatgcatcctgtccaaatcagaatggcatctgtaaactgatagtgcctgaatctacctgcttgcttcatcgattcctgttcttgcttttgacgtcttttgaagggaatttgctgcataacgtgctataaaacttcaagtatgccttgccctggtttcgaatatgtaatgtaataataaaattccgtgaaaagctgccagttgcacatacgtctcgtgttcgatacaattaatcaattatgtaggagtatcatgtaaagaaaaataaacattcagtgctagcgtgaggatctctgatggtactatatgactgcttgcttagttcgaaaagagagatctagcctgagtcatggcgcatgaatgcatgcgtccgtaaaagtgggtgggcgccgagccacgaccatgactcccgagccctcattttggttgggtcgtagggcggcggcgcacatgtggcggtgggggcgcagtgaaaagacacagctgcaaagataggcagtgt

SEQ ID NO: 116084 - DNA, 2253 bp, Zea Mays
atgggcgagcgcagcggcacgcaggccgagctggagcatcacggtctgctgcgcagccatggagacgagcaaatgggagcagggcgccgcaaggtactcgacgacggcgcgacagggaaggagttggagactgggcacacggctgacgagctggagggatgcgagctaggagctctggccgacgagcacgtgcaggaaacttcggctgggcgcgagcatagggagcgagcagggcccgagcgcgcagagttccacggcgcggtggccatggcgaacgccagggcgctcaagcgcgcgcaacagggagagaaacgggatgagggaggagcgaggaaaccgcgaacaagttggagaaccttccgcatccttccacccgttcctccggcggacacatctttgccgcgcccgctcgaagaaatgctcctccgccaccgccaccacctcttgtcgcgcccgcgccgcagcttccctctcgctgccctgggctgtgtcgccatgtccacctcctcttccccctcttcctccacctccacctccgcggccgccgactaccactgccgcaccaagcacagtcccaccgccggttacgcgcgcggtccgggccgcctcgactgggccaaccagcccaaccccttcctccgtttctcccccgcaccgccattaccgctccccaacccacctccgctcgcccccgtcccctaccctgctctcttccactccccacccccgccgccgcagccgctcaccctcgactccctctctgcgctgctcttccactccctcgcgctctccgcctggaagtccgcgggcctctcaacctggtcgctccgcgttaaccccagcagcggcaacctgcaccccaccgaggcccacctggtcttcccgcatccgcgagaggtcgaccgcctcgccatcgcgcactacgcgccccgcgaccatctcctcgaggcccgtgctaccgcaccaattagggattgttccgcgattctgtctgcgccggggatggcgatcctggctctatcgtcagtcttctggcgagaggcgtggaagtatggagagcgggcgctgcggtactgcaaccatgacgtggggcacgcgctcgcagcggttgccttggccgcggccacgctgggttgggacgcgcgtttactagacgggctgtcggacgaggacctcgggaggctcgttggggtggagaaagggagcccggctgcagttccggaggggctccttaacaaagtggtcaagggtaaggcgcggtgggtggagcggcagcatccagattgcgcggttctgctattcccagttgggtctgagccggaggtcgactatggtagaattagtgaggagctgaaggtgttcgatgggctggagtgggtggggaaggcaaatgcacttagtaatgatcatgtggtgtgggatgtgatataccgcacagcagagcaagttaagaagcatggccctgcaccgggggaacggttctttgtgatgccatggcagaagagtccagccttgtccaaaggattgtataaggaattaacagtgcaggaggtagtacgtcagaggagaagtgcggtggacatggatggtgtgcatgtgatgggaagggatacattttatcagatgctgatgcactgccttccatcaggggaggttggatcaggtgaacggcaaggggagcagagtgctctgccattccgagtattaccatgggaagcagaggtgcatgctgcactatttgtgcatcgtgtctcagggcttcacagggggatttatttcctggtgagaaatgaggagcactttgatgcgttgcagcgtgctatgaggcaggactttgagtgggttcagccggaaggatgccctgatggtctcccactctacaggctgatgaaaggagattgccagaagtttgctatgcagatatcatgctttcaggaaattgcctcgcatggatgttttagccttgggatgattgctagattcgagcctgtgttgcatgagaaaggtgaatggatgtatcctcgtttgttctgggagactggcattcttggtcaagtgctttaccttgaggcccatgctattggaatatctgccacaggaatcggatgctactttgatgatactgttcacgaggcacttggcttgaaaggtttggactttcagagcatgtaccattttacagtgggcgctcctgtgcttgacaagaggataatgagtctcccagcttaccctggtcccggaattgacgcatga

SEQ ID NO: 116085 - DNA, 2601 bp, Zea Mays
atgccgtcccttcccttctggtcgctgttccgttcaccatgctccgccccctctatttgtgaggacacagctaagcgaaggacccagaaaagcaaaagtttcaaagaggttgagaaatttgatgtttttgtgctggagaaaagttctggttgcaaattccggtcgttgcaacttttgctcttcgctatcatgtctgctgcgtttctaacactcctatacacaccatctgtgtatgaacatcagttgcagtcaagctctcggcttgtcaatgggtggatatgggataagaggagttctgatccccgatatatatcttctgccagcattcaatgggaggatgtatataaaagcatgcaaaatctgaatgttggtgaacaaaagctcagtgttggactcctgaattttaacaggactgagttcagtgcttggacacatatgctcccagaaagtgatttttcagtcataaggctagagcatgccaatgaaagcatcacctggcaaactctgtatcctgaatggatagatgaggaggaagaaacagagataccatcttgtccttcgcttccagatcctagtttttcaagagcgacacactttgatgttgttgctgttaagcttccctgtactcgtgtggcgggttggtcaagagatgttgcaaggctgcatctgcagttgtcagcagcaaaattagcagcagccacagcaagaggcaatagaggaatccatgtgctgtttgtgactgattgcttcccaattccaaacctcttctcttgcaaggacctagtgaaacgtgaaggcaatgcttggatgtacaaacctgacgtgaaggctctaaaggagaagctcaggctgcctgttggttcctgtgagcttgctgttccactcaacgcaaaagcacgactctacacggtagacagacgcagagaagcatatgctacaatactgcattcagcaagtgaatatgtttgcggtgcgataacagcagctcaaagcattcgtcaagcaggatcaacaagggaccttgttattcttgttgatgacaccataagcgaccaccaccgcaaggggctggaatctgctgggtggaaggttagaataatacagaggatccggaatcccaaagccgagcgtgatgcctacaacgaatggaactacagcaaattccggctgtggcagcttacagattatgacaaggtcattttcattgatgctgatctgctcatcctgaggaacattgatttcttgtttgcaatgccggaaatcaccgcaactgggaacaatgcaacactcttcaactctggagtgatggtcattgagccttcaaactgcacgttccagttactgatggagcacatcaacgagataacatcttacaacggtggtgaccaagggtacctgaatgagatattcacatggtggcaccggattccaaagcacatgaatttcttgaagcatttctgggagggtgacgaggacgaagtgaaggccaagaagactcggctgttcggcgccaacccaccgatcctctacgttctccactacttggggcggaagccatggctgtgcttccgggactacgattgcaactggaacgttgagatcttgcgggagtttgcgactgatgttgcgcacgcccgctggtggaaggtgcacaacaagatgccgaagaagcttcagagctattgcctcctgaggtcaaggctgaaggctgggttggagtgggagcggcggcaggccgagaaggcgaacttcaccgacgggcattggaaacggaacataaccgatccgaggctgaagacttgcttcgagaagttctgcttctgggagagcatgctatggcactggggcgagaacaagaacaactcgacgcagagcagcgcggtgccggcaacacctgccgcgacgagcctgtcgagctcgtgaggcctgttgtgtagatacagctttgttgagagtagtataccagatacgaaacttctgaagctcctccatacatacatagcaacagctctgtaaagcactcgtgtttgtttctggtcgtgtgccaccaagccatggacgcaatgcaagcgttcaaatgccgtgcctccctgcgtcgtactggcacagagcaagcatcatcattgcgtccatcgagagctttggttccgtgcactgctgctgttgcgccaaagaacgagacgcatcattgcccggatccatgatctcgtggtgctgtcgagttccttggaggtgcggtcttttgcagctcatcagcctgctcgcttttccagcagcggcacacctaaaaagcacagggataggctgtatctgcgtgcgacctcgctccggcggtgccgtcgcttcgcctgagacagagacactgtacgtacacctggttgggtccttcccttgtcgctcacgattggagtagttggatgtttgcgttgcaagtgactgagattaggttttctccacgtttgccactacaaaatccgcgagatgcgcgtccagatctgacgcgcagtctagtagtgctacagtaatataatgtatagaaaaaactattgcgcgattaagttttttcgtgcgatcatcgtgtagttaaatgactgaaaattt

SEQ ID NO: 116086 - DNA, 2757 bp, Zea Mays
gcttaaaccagctcggcctttgcttttttgcagcggggtatatatcttcgctatatatacaactcctctcctgctccgctcttcaagcccacccagagctctgtagaagagaggggaggaaggaccgaggaccaaccggagccccactcggccgccgcctctcacctccaccgactgcctgcgtcccaccgctcctgctgccgcccgttgctctcgccattgaagccctcgccgcctccgcccgcttgcccgccctcccgtcggctgccttccggatgagaagcggcgcaacctgggcggtggaagcgtggtcggactgagccttcgtgggggttagcgccgagaaggatcctggagattaagcgcatgggttccttggaggcccggtacaggccgaccggggcagctgaggacacagctaagcgaaggacccagaaaagcaaaagtttcaaagaggttgagaaatttgatgtttttgtgctggagaaaagttctggttgcaaattccggtcgttgcaacttttgctcttcgctatcatgtctgctgcgtttctaacactcctatacacaccatctgtgtatgaacatcagttgcagtcaagctctcggcttgtcaatgggtggatatgggataagaggagttctgatccccgatatatatcttctgccagcattcaatgggaggatgtatataaaagcatgcaaaatctgaatgttggtgaacaaaagctcagtgttggactcctgaattttaacaggactgagttcagtgcttggacacatatgctcccagaaagtgatttttcagtcataaggctagagcatgccaatgaaagcatcacctggcaaactctgtatcctgaatggatagatgaggaggaagaaacagagataccatcttgtccttcgcttccagatcctagtttttcaagagcgacacactttgatgttgttgctgttaagcttccctgtactcgtgtggcgggttggtcaagagatgttgcaaggctgcatctgcagttgtcagcagcaaaattagcagcagccacagcaagaggcaatagaggaatccatgtgctgtttgtgactgattgcttcccaattccaaacctcttctcttgcaaggacctagtgaaacgtgaaggcaatgcttggatgtacaaacctgacgtgaaggctctaaaggagaagctcaggctgcctgttggttcctgtgagcttgctgttccactcaacgcaaaagcacgactctacacggtagacagacgcagagaagcatatgctacaatactgcattcagcaagtgaatatgtttgcggtgcgataacagcagctcaaagcattcgtcaagcaggatcaacaagggaccttgttattcttgttgatgacaccataagcgaccaccaccgcaaggggctggaatctgctgggtggaaggttagaataatacagaggatccggaatcccaaagccgagcgtgatgcctacaacgaatggaactacagcaaattccggctgtggcagcttacagattatgacaaggtcattttcattgatgctgatctgctcatcctgaggaacattgatttcttgtttgcaatgccggaaatcaccgcaactgggaacaatgcaacactcttcaactctggagtgatggtcattgagccttcaaactgcacgttccagttactgatggagcacatcaacgagataacatcttacaacggtggtgaccaagggtacctgaatgagatattcacatggtggcaccggattccaaagcacatgaatttcttgaagcatttctgggagggtgacgaggacgaagtgaaggccaagaagactcggctgttcggcgccaacccaccgatcctctacgttctccactacttggggcggaagccatggctgtgcttccgggactacgattgcaactggaacgttgagatcttgcgggagtttgcgactgatgttgcgcacgcccgctggtggaaggtgcacaacaagatgccgaagaagcttcagagctattgcctcctgaggtcaaggctgaaggctgggttggagtgggagcggcggcaggccgagaaggcgaacttcaccgacgggcattggaaacggaacataaccgatccgaggctgaagacttgcttcgagaagttctgcttctgggagagcatgctatggcactggggcgagaacaagaacaactcgacgcagagcagcgcggtgccggcaacacctgccgcgacgagcctgtcgagctcgtgaggcctgttgtgtagatacagctttgttgagagtagtataccagatacgaaacttctgaagctcctccatacatacatagcaacagctctgtaaaggtagctatgtaggcctttctccccccccccccccccccccccccccccgaatgactatactctttgttcgccgtcacggctgcagcgacccctcctgctgcttcctgatggttgacaattcttttggtttttgccaataattcatcagtataggctgtttttcactctgggcggcttgagtccggtctgggcctgttgttgcttcaaatcctaccggggctactgcttttgctgcggtacgcctggttttgatgtatggtggttgaacagtttcagtgataaatctggagtgatgcaatatgggattgctgaccagcaaacactgcatcatctaaggcatgaatatttatttgatcggttattgtctgagtgctgctgttcgggatgaacg

SEQ ID NO: 116087 - DNA, 483 bp, Zea Mays
atggccgttggggctgctgggcgtagccaggggccgagcgcccgagccgcggggggcgcgcctaggctggggccgcacccgagcccgcgtcggggccagcgccgccattcccgcgcgcctggagatctagccgcgctctggggcccgcgcacgcgcgcccaccggggaggccgtgcccgcgcgcccccgcgccggagctccgccgccggggatgccgcgccagccaccgcggctagggtcgcgccgccgcggggccgcttggacgccggggagccgcgccggccgtgcccccgcgccggccatgctcgtgcagccgcgcccgcgccgagggcctacgcccgccctcgtgcgacgggctgccggtctgtgccgagccgccgaggggccgggggccgctcaccggtgcaacccgcaccccagccggggcgccgcgcgcccgagccaccggggccggggcccgccgagcccgccgccagttgttga

SEQ ID NO: 116088 - DNA, 84 bp, Zea Mays
cgctcatacacacacatgacacactcatcgtccgtgctgaaatcaccatggcatgctcatggcaccggccggaccctgaataag

SEQ ID NO: 116089 - DNA, 117 bp, Zea Mays
attttcaattatactaaattatgatgcaaggttggtattttggatcaacttatacaacgcgcacgtacgtgattttgaaaactttagttctgactttaatagcaattttttgattgc

SEQ ID NO: 116090 - DNA, 1059 bp, Zea Mays
atgaagcacttgagagagatcggggaggagaggcggacgaggagcttattgaagaggaggctgatgatgaggctcaggaaagacggctacgatgcgtcgctctgcaggtcttcttgggtcgctaccgccgagcacccgggaggcgactacgagtacatcgacgtggtcgttgcgggggagcacggcgggggcgcggcctcgtcgtcttccacttccagcagcagctccaggatcgtggtcgacatcgacttcagttcccagttccagctcgccaggccggccccgtggtacgcgcagctctgggcccggctgccgccggtgttcgtggggccacgcgcgaggctccggaaggcggtgtcgctgctctgcgaagcggcgcagcggtcgctgcgggagagcgggctgcacgtcccgccgtggcggaggtccgggtacatgcaggccaagtggctccccggcgggacctcggaggtggtggcggcggcggcacagaggtcggtggcgatagcgaggggcgcgggcggcgggacccggaggccaggcgcgggcgcgggcgcgggcggcctctcgatggcgctgctgtccagctccggcgctgaggccaacggctgtcaaggccaagctgggtccatgtgggcgtagtgctctttttactgatcagaggatcatcagaataggccgcagaaactagctacaccattttgtgcattggttaggtaggttagcactggtagtaagaactgcttagtagcagcagtagcattttgggttgagccacggccatgtcgtcatgtggatgtggtttgtgtgtgtttcttttgttttcgttgcaagctgtgctgtctgcctgtctcttgcttggttagccaagcgcccaagccatgcggcagacgacggactttgcttcggtggtggggtagtttccgaggccgcagcaagagagatcagcaatgcgatttctgaaaaggtaaggctaaaagtaaatctgatcgcaacgtgtgcatgggaaagatagttcctcgcctgaaattttgtcggttctgaattctgatgctagag

SEQ ID NO: 116091 - DNA, 725 bp, Zea Mays
cgccaccgctcgtccctaggccctggctagcggctagctcgcgcgtcctgctctgtgctctctcggtctctcccagccccaagctcccagcgccagccgcctgctcgccagaagccacggctccaccgcagattggcctcaccgcggcacgccggcaccggtgacacgccgtgacgccgtgccagccgcccagcctcaacagctcctccaccacacgccgtcgtgacgtgccgtccctccactgctgactgctccacaggccacggctccctctgtccctcgcagtcgcagcaccagcacgacacggcagccgacaggaactctcttcagcggctacggctccattcctgagatgacgcctccggttggaaataatactccctcaagctcaaccataaaattagccaagttgatgtctaccacaagagcgccttctacacacaaaacaaattcggtattcatatacatgctaagtgatccagatgtaagcaagtgattatgaatatatgttttaaactttatattgtgtcatgtgtgctagtagacttatatggcttcttatgttagccaagagtccaagacttatcactcatgtgctacattaaactatgtgtgcttcacatttatatggcttttatctatgtttaattaagacttgtgtttatattttttatatttgttgttaagttttgaatatatggtttcatggtgtgattttaccgaac

SEQ ID NO: 116092 - DNA, 389 bp, Zea Mays
aggagagatcctaggtagagatggcaatgggtatccgcgacccgatatccgatgggtatttactccattagggtatgtatgtgggctaaatattctacctgtgggtctgttattgggcaaaaatcttcatccaattggtaaacgggtattagaacgttccgccttcacccatacccgttaacccgtgggtataaaatacccaatataaacttagcccaagcatgaactttgactttagtcatccatcttttttactatttaacaaccttttaggccataatgtcatagaaggcttaacgacaatttaatgatcatgtaatggaacatgtaatgtgctatgtagtactatcctagtgttactactttatcccattatctttggtgtgttg

SEQ ID NO: 116093 - DNA, 2334 bp, Zea Mays
cttggcggttgttgactgttgtagacttttgtggtctcacctcgcggacggcggacataccccgtctcggttctcaaacaccgccgccgccgttctcccaacatctccccgtccaggtcgttgggtcagcccctatccttcaccttcacgacttcacctgcttctccactgcgcgccccgcccccggccccgtcgtgcgccctgctcagatccatcgcacggggcttgccgcaccactgcgccaagcaaaaggtgggcggccagcggcgcgtgcgcagatcatgcactggtaggactaatttgcaagatcttggaccgggatggttcgcctgttagttgtcttatgaagattggtaaggggagaaagaagatgaggaataaacagcgaaaatcatctgccctcggttctgatgcaggatgtggatcttctttatcttgtattgtatggagcttggtgggttttggtcttgtctgcttcattttccttaaacatcaagcagacagtggtcagacccatgtttatttcagtcctcttcatgcgaccagagaattagaggacatcgaggaggatcatttccgcttgccacctcctcacaaggtgaatcctcgtgcagtgaaaaggaggggacctcgtaaacaaccaaaggttatagatgattatctggaggagtcttcagcagtacatgcactgttctttccagatcaaatgactgctgtggatccaacaaaaggaggaaatgatagcatgtatttctatcctggtagagtgtggctagacactgatggaaacaccattcaagcccatggtggggggattatgtatgatcacaagactgccagattctattggtatggagaaaacaaggatggaccaacataccaagctcgccccaaaggaacacagagggttgacatcattggggtaagctgctactcatcaaaagacctgtggtcgtggactcatgaaggaattgtgcttcgtggtgagccttctaatgtcatccatgacctttataaatcaaaggtgcttgagagacctaaggtgatatataatgatcgcactgaaaaatatatcatgtggatgcacatcgatgatgctaactacaccaaagcatctgtcggtgtggccgtgagtagctctccgactggaccttttacttacctttacagctttcgtccacatggttgtgagagtagagacatgacagtcttcaaagatgacgatggaatggcttacctcttctattcttctcgtgacaatactgagctccatgttagcccattgacagaggactaccttcagatcacagcagcaatgaagagaatactaataaggcggcatcgtgaggctccagccgtcttcaagcaccaggggacctactacatgatcacctctggttgctcaggctgggctcccaacagggcattggcacatgctgcagagtctatcatgggcccatgggagacactgggaaacccttgcgttggaggcaacaggttttaccgccttacaacattcttatctcaaagcacatttgtgcttcccctccctggtttgtctggtgcatttatcttcatggcggataggtggagtccgtcaaacttgagagactcccggtatgtgtggcttcctctattcgtcggagggctcgcagacgaacctttagattacagttttggtttccctctgtggtcaagggtatcgatttattggcacaagaaatggcgcctcccagaagattggaagattgcaaacacagcaaatacataagatagctagctatacttgaaccgatagatcgttcataaacttgcttgaggattctaatcgcttgctcctcaagcttttgtacaaaacagtcatcctaaacatgcttcagtgatatatcttttttttggcgtgtgcatgtgtctgtaacttctcttggaaaaagaagtgtgtttcagataactgtattgataattggtatgaccatactctgtcgtttatgccaggacagcaaggtgcatcttgtcatgtttttttttgtttatcattaaacaagcatcaatagaggcttccctatgtccagcatcgtgacttcatcttctagactagatcacatttgtttggaaaccaaacttatataaatccagtgagtgatttatgtaacctctccagaaagtttacattaccattttgtttggaaactgaacttctctgaatccagcgagtgatttatgtaacctctccagaaagtttacattaccggcagacagaatccacacgcaaacgaacacatgctgtctcccacgtcataaatctcaagtatctaatctcctacagaaaacaaa

SEQ ID NO: 116094 - DNA, 2022 bp, Zea Mays
cttggcggttgttgactgttgtagacttttgtggtctcacctcgcggacggcggacataccccgtctcggttctcaaacaccgccgccgccgttctcccaacatctccccgtccaggtcgttgggtcagcccctatccttcaccttcacgacttcacctgcttctccactgcgcgccccgcccccggccccgtcgtgcgccctgctcagatccatcgcacggggcttgccgcaccactgcgccaagcaaaaggtgggcggccagcggcgcgtgcgcagatcatgcactgttgtcttatgaagattggtaaggggagaaagaagatgaggaataaacagcgaaaatcatctgccctcggttctgatgcaggatgtggatcttctttatcttgtattgtatggagcttggtgggttttggtcttgtctgcttcattttccttaaacatcaagcagacagtggtcagacccatgtttatttcagtcctcttcatgcgaccagagaattagaggacatcgaggaggatcatttccgcttgccacctcctcacaaggtgaatcctcgtgcagtgaaaaggaggggacctcgtaaacaaccaaaggttatagatgattatctggaggagtcttcagcagtacatgcactgttctttccagatcaaatgactgctgtggatccaacaaaaggaggaaatgatagcatgtatttctatcctggtagagtgtggctagacactgatggaaacaccattcaagcccatggtggggggattatgtatgatcacaagactgccagattctattggtatggagaaaacaaggatggaccaacataccaagctcgccccaaaggaacacagagggttgacatcattggggtaagctgctactcatcaaaagacctgtggtcgtggactcatgaaggaattgtgcttcgtggtgagccttctaatgtcatccatgacctttataaatcaaaggtgcttgagagacctaaggtgatatataatgatcgcactgaaaaatatatcatgtggatgcacatcgatgatgctaactacaccaaagcatctgtcggtgtggccgtgagtagctctccgactggaccttttacttacctttacagctttcgtccacatggttgtgagagtagagacatgacagtcttcaaagatgacgatggaatggcttacctcttctattcttctcgtgacaatactgagctccatgttagcccattgacagaggactaccttcagatcacagcagcaatgaagagaatactaataaggcggcatcgtgaggctccagccgtcttcaagcaccaggggacctactacatgatcacctctggttgctcaggctgggctcccaacagggcattggcacatgctgcagagtctatcatgggcccatgggagacactgggaaacccttgcgttggaggcaacaggttttaccgccttacaacattcttatctcaaagcacatttgtgcttcccctccctggtttgtctggtgcatttatcttcatggcggataggtggagtccgtcaaacttgagagactcccggtatgtgtggcttcctctattcgtcggagggctcgcagacgaacctttagattacagttttggtttccctctgtggtcaagggtatcgatttattggcacaagaaatggcgcctcccagaagattggaagattgcaaacacagcaaatacataagatagctagctatacttgaaccgatagatcgttcataaacttgcttgaggattctaatcgcttgctcctcaagcttttgtacaaaacagtcatcctaaacatgcttcagtgatatatcttttttttggcgtgtgcatgtgtctgtaacttctcttggaaaaagaagtgtgtttcagataactgtattgataattggtatgaccatactctgtcgtttatgccaggacagcaaggtgcatcttgtcatgtttttttttgtttatcattaaacaagcatcaatagaggcttccctatgtc

SEQ ID NO: 116095 - DNA, 709 bp, Zea Mays
tccaaactccacgataagccacaagtgaggaggcataataatccagtagcgatctttcggttttaccatggcagctacgacgagcgctgccagtgccaggggcttgctgctctgcgtgttggtggcctttctccaccgcctccagtttcagatcccgcctgtagcagtagcagctgcgacgccgaagaacaaaaccgagagccgagacgggcacgggaagacgctcagcttcacgctgtaccagcacgagaccatcaacaggaccggctacatcgtggtggacggcgtcgcgggcgcgggcgtcagccagaccaccacgcccttcggcaccatctacgtcttccgcgacgacctgacggtgcgcgcggacagggactcccgggtggcgggcgtcgcggaggggacctccatcaccaccagcctcgacgggctgcagagcatgtcgctggccaagatcacggtccaccaccgcggccaccggggctccgtctcggtccttgggggcacctacaacaccaagccgtccgactacccggtggtgggtggcaccggcgacttcgcgtacgcgctgggatacgtccggtcctcgccggtggacttgcgaggacgaacggtgacgtacaagatggagcttcacttgtactggcctccatacgcccactacgctcccgttccacgtaaagcgtgaatactagtatagctaccactg

SEQ ID NO: 116096 - DNA, 3088 bp, Zea Mays
tctagtatcccagtgcacttatgtgaggatcccctgttttttcaggtaacggtgctaagagtgtgatggtgtattttaaaatgcatttctggttagtccttgtgctctgcagtttccgagcatcaaaatccctacctctggatagagatatacttttgggcatcagaggctatctgaaagatccacagaattacctacacaactgggatgaatcccactcaccgtgccaattctacggtgttacatgtgaccacaattctggcgatgtcatcgggatatcactctcaaatatctcgctgtcaggcactatatcatcttcattttctcttcttggacaattacgcactctggagcttggggcaaactccatctcaggaactgttcctgctgcgctagccgactgcacaaatctgcaggtacttaatctgtcaatgaacagtttaactggtgaattgcctgatctttcagcattggtcaacctacgagttctggacttgtcgaccaatagtttcaatggggcattcccaacatgggtcagcaaattaccaggtctaactgaactaggccttggagagaacagcttcgacgaaggtgatgttccggaaagcattggagacctgaagaacttaacgtggctgttcttgggacaatgcaatcttaggggagagataccagcttcagtcttcgatttggtatcactcgggacactggacttctcacgcaaccaaattactggtgtattcccgaaggcaatatctaaactgaggaacttatggaagattgagctctaccagaacaacttgactggtgaaattcctcaagagcttgcaactctaaccttgttatctgagtttgatgtttctcggaatcagctgactggcatgctgcctaaggagattggcagcctgaagaagctgaggatattccatatataccacaacaacttctttggtgaacttcctgaagagttggggaacctgcagtttcttgagtcattctcaacctatgaaaatcagttctcaggaaagttccctgccaacctgggtcgattctcaccactcaacacaatcgacatatccgagaattacttttctggcgaatttccaagattcttgtgccaaaacaacaagctccagttcttattggctttgaccaacaacttttcaggtgaattccccgcttcttactcttcttgcaagacacttcagaggttcagaataagtcaaaatcaattcagtgggagtattcctgctggcttgtggggattgcctaatgctgtgataattgatgttgctgataatgcatttagtgggggcatattttctgatataggcttttcagttactctgaaccagctgtatgttcagaacaactacttcatcggggagcttccagtagagctagggaggctcaccctgcttcagaagttggttgcttcgaacaacagactctctggccaaatacctagacagattggaagactcaagcagcttacttacctacatttggaacataacgcattggaagggccaataccacgtatgtgcagtagcatggttgacctgaatcttgcagagaattccttgactggggacattccagacacactggtctcccttgtctctctgaattcactcaatatatcccataacatgatctctggtggcattcctgaaggtctgcagtcactgaagctgagtgatatcgatttctcccagaatgagttgtctggcccagtccctccccaactcttgatgatagctggagattatgcattctctgaaaatgctggcctttgtgttgcagacacttcagaaggctggaaacaaagtatcactaatctaaaaccttgtcagtggtccgataaccgtgacaacttgtcaaggagacgactccttgttctggtaactgtggtatctttagttgtcctcctgtttgggttggcgtgtctaagctatgaaaattataggctagaagagctcaacagaaaaggggatactgagagtggcagtgacactgatttgaagtgggctctcgagacattccatcccccagaacttgaccccgaggagatatccaacttggatggagagagtttgattggctgtggaggcactggcaaagtttacaggctagaattgagcaagggaaggggaactgtggctgtgaaggagttgtggaagcgtgatgacgcaaaggtcttgaacgctgagataaatacccttgggaagatacgccatcggaacattttgaaactcaatgcatttttgaccggagcatcaaattttctggtttatgagtatgtggtgaacggcaatctgtatgacgctattcgccgtgagttcaaagctggacacccggaacttgactgggacaagaggtgccggattgcggttggggttgcaaaggccatcatgtaccttcaccacgactgctccccggccataattcatcgggacataaagtcaaccaacattctgctggacgagaagtatgaagctaagcttgcagatttcggtatcgccaaaatggtggaaggttcgacgcttagctgcttcgctggtacgcatgactacatggctcctgagcttgcgtattctctaaacgcgactgagaagagcgatgtttacaacttcggtgtcgtactgctagagttgcttacaggacatagcccaactgatcaacaatttggcggtgaaaaagacattgtgtcctgggtttcattccatttggcagagaaagaccctgctgctgttcttgacccgaaagtaagcaatgatgcatcggatcacaatcacatgatgaaggcgttgcatattgctattctttgtaccactcagcttccatctgaacgaccgacgatgagagagatcgtgaaaatgctcaccgacattgatcctagctccacagctaggagggcaaagaacaagactgataagtaacagcgacaggctttgtcttagtaaaatatactagtaataaccataatgtcagggcctcttggcaccctgtagcaatcatgggggaagcttattaggccgtcagaatggctgattagttaatagaaactagagggctggtaaaataa

SEQ ID NO: 116097 - DNA, 257 bp, Zea Mays
ggcagcaaggacaggacgtccatatcggattcgcgatcacctgaacaactgaatatacaacccctcaaaactatagtaagcgcgatgaacgagcgcgtcgtcgtacgtacggtggaaacatgcatgctctcgtgctcggctgcctctctatttaaagccagtgactgagctgatccgaaagtgagatctcagctgatctggtggtggcaatgtggatggagggagctagcgagtgggagagagagaagaaagaaagt

SEQ ID NO: 116098 - DNA, 2613 bp, Zea Mays
tcgctattctcatattctgctcgtgtgaagtatttatttgcacgcccatgtatgaagacaaatattttcccgttcaccgtcgcttgattttcgaatcgaatcgctcattcattcctcaccgcctccatccccgctccggcctcccctccggaagtcccaaaccctaggaaccagctgaactgccgaagctttcagaaccccaggcggcaagaacaattgcggcgagatgattctccggactccaccacagcggaagcgccgcgcaggctccggcgccggcgatgacgccgatctcggtcttgtcaaatccgtgggcgtcgcgagcgcgaccggccgtagtccggtctccgatcgccgcctggccctctacgaccgccccaccgccctcgcgcttgccgacgcccccggggagccgttcgacgacatggtctgcacgtaccactgccgccagatggtcaaatccgagttcatggtggcacttgacacggcagagaagcaagttcaggagtatcaaacaaaacttgttgccttggaggaccaattatctaagagtgaggatgaaagaatgcagtttctggataaacttaactatgtggaacaagaactggcagcaaccaaaggacgggagagtgcattacaggaacgcctactaaaggagttgggtgaatatcaggaacgatatcgtggtcaagtaatgaaaataaatgaacttgaggtacaactcaataaagagattgattctaggatcagtgcagaatcatcagtatcatccgcgaaggcattgatcaaagacttggaaggggatttgcatcgattatctgaaagttcagaaagggagaagaaaacccttaagaaggaactttcatacgtgaaagaagacttatccctatctgcttccaaaaataatgctgagcttgagaaaacaatactcagagcagaaaactatgagagtgaggcaaagttgttgaacgagcagttgaccaacttgaaaaagcaacttgacgagtgtctcagtgagaagaatgaaatggagctcaagctattgaattccagtgctttgcctaatcaacatgccccaacagaagaacagaagttgatcaagcttttgcaagaggagctccggaattatgaaaaagaagtgcatgaagctaaaaggttgaaatcttcccacatgaatgttgagttgctgaaagaaaaactattggaggagcaggggcgcagggaaagagcagaacttgaattatctaaactgcaggaaattggtgctagagcacataagctggagcttgaattagcatcttgtacagcactgctcagcaacatacctgatgtgtcttcttatgctgacataccccaaaagatcgcagatctgcaaaagcaagcattgacatatttgaacgaagttggtgaggtaacatcaaggttgaaagaattagaggttgcactagaatatgctgatctcagcaagcaacaagcagaaggtgaagctgctcttgctaaagagagggctgcaagtgctactagggaggtcaagcggcttgagcttatgcttactgcgatcagtgaagaaagagataagctgagaaaggaacatgctacggagtcggatcagtctgggatggaaaaaacgataagagagctggagagcattatacacgagctgaaagaattgattagtcacaaggacactgaactcaatataatgaatgaaagattaaaccttgaaacaaggaaagtgaagtctttggagcgagagggagatcagctacgctctcaggtggcattactagagtctaagttaggtcatggggattactctgcttcaagcacaaaagtactgcgcatgatgaatactcttggagtcgacaatgaagccaagcagacaatagaagtactgcaagctgagctaaagaaaacaaaagagaggctgcaagcagttgaagaactgaaaggacaaactgatcctggaaccgtggtagacgctaatattgctgaaaagttagcacaacttaagaatcaaattgcgacacttgaaaaacgtgaagaaagatacaaggcggtgtttgcagagaggatctcggtcttccggaaagcctgctgctcccttttcggttacaagatagtgatgaatgatcagcagcagtcaaatgggattcccgtaacacgctttattctgcagtcagtgtatgcccaaagcgatgatgaaaagcttgagtttgactatgaatcaggaagcactaatatcgtggtcaacgattacacatcccaacaagaaattgctcggcaggtcgacatctacataaggaggacgaactccataccagccttcactgccaacctgacaatggagtctttcaacaaaagaagtatatgctgaagacatgaaactagtgtcagggcacattgcttgatttctgtatgttatcattgacgaagagtatgtatatgagcactcacattggtgggtgaaaactgctcctgctaattgaagttgaggctggagctttgattctattcccaacggattctttttttccctttaactagcaaggcgtacatgagctcacaaacggaaaaaaattgggtgtagccagctagataataactctttag

SEQ ID NO: 116099 - DNA, 2731 bp, Zea Mays
tcgctattctcatattctgctcgtgtgaagtatttatttgcacgcccatgtatgaagacaaatattttcccgttcaccgtcgcttgattttcgaatcgaatcgctcattcattcctcaccgcctccatccccgctccggcctcccctccggaagtcccaaaccctaggaaccagctgaactgccgaagctttcagaaccccaggcggcaagaacaattgcggcgagatgattctccggactccaccacagcggaagcgccgcgcaggctccggcgccggcgatgacgccgatctcggtcttgtcaaatccgtgggcgtcgcgagcgcgaccggccgtagtccggtctccgatcgccgcctggccctctacgaccgccccaccgccctcgcgcttgccgacgcccccggggagccgttcgacgacatggtctgcacgtaccactgccgccagatggtcaaatccgagttcatggtggcacttgacacggcagagaagcaagttcaggagtatcaaacaaaacttgttgccttggaggaccaattatctaagagtgaggatgaaagaatgcagtttctggataaacttaactatgtggaacaagaactggcagcaaccaaaggacgggagagtgcattacaggaacgcctactaaaggagttgggtgaatatcaggaacgatatcgtggtcaagtaatgaaaataaatgaacttgaggtacaactcaataaagagattgattctaggatcagtgcagaatcatcagtatcatccgcgaaggcattgatcaaagacttggaaggggatttgcatcgattatctgaaagttcagaaagggagaagaaaacccttaagaaggaactttcatacgtgaaagaagacttatccctatctgcttccaaaaataatgctgagcttgagaaaacaatactcagagcagaaaactatgagagtgaggcaaagttgttgaacgagcagttgaccaacttgaaaaagcaacttgacgagtgtctcagtgagaagaatgaaatggagctcaagctattgaattccagtgctttgcctaatcaacatgccccaacagaagaacagaagttgatcaagcttttgcaagaggagctccggaattatgaaaaagaagtgcatgaagctaaaaggttgaaatcttcccacatgaatgttgagttgctgaaagaaaaactattggaggagcaggggcgcagggaaagagcagaacttgaattatctaaactgcaggaaattggtgctagagcacataagctggagcttgaattagcatcttgtacagcactgctcagcaacatacctgatgtgtcttcttatgctgacataccccaaaagatcgcagatctgcaaaagcaagcattgacatatttgaacgaagttggtgaggtaacatcaaggttgaaagaattagaggttgcactagaatatgctgatctcagcaagcaacaagcagaaggtgaagctgctcttgctaaagagagggctgcaagtgctactagggaggtcaagcggcttgagcttatgcttactgcgatcagtgaagaaagagataagctgagaaaggaacatgctacggagtcggatcagtctgggatggaaaaaacgataagagagctggagagcattatacacgagctgaaagaattgattagtcacaaggacactgaactcaatataatgaatgaaagattaaaccttgaaacaaggaaagtgaagtctttggagcgagagggagatcagctacgctctcaggtggcattactagagtctaagttaggtcatggggattactctgcttcaagcacaaaagtactgcgcatgatgaatactcttggagtcgacaatgaagccaagcagacaatagaagtactgcaagctgagctaaagaaaacaaaagagaggctgcaagcagttgaagaactgaaaggacaaactgatcctggaaccgtggtagacgctaatattgctgaaaagttagcacaacttaagaatcaaattgcgacacttgaaaaacgtgaagaaagatacaaggcggtgtttgcagagaggatctcggtcttccggaaagcctgctgctcccttttcggttacaagatagtgatgaatgatcagcagcagtcaaatgggattcccgtaacacgctttattctgcagtcagtgtatgcccaaagcgatgatgaaaagcttgagtttgactatgaatcaggaagcactaatatcgtggtcaacgattacacatcccaacaagaaattgctcggcaggtcgacatctacataaggaggacgaactccataccagccttcactgccaacctgacaatggagtctttcaacaaaagaagtatatgctgaagacatgaaactagtgtcagggcacattgcttgatttctgtatgttatcattgacgaagagtatgtatatgagcactcacattggtgggtgaaaactgctcctgctaattgaagttgaggctggagctttgattctattcccaacggattctttttttccctttaactagcaaggcgtacatgagtattactgggcatggcgacgtaatgttgaagcttccggcttgtctagagttgagtgtagctaccaggtaactaggaatacttgattcgccaatcatgactgacgttattcctctgagagaacgagagttttgctgcagatgggcttctctgatcagtcacgtttacctg

SEQ ID NO: 116100 - DNA, 2363 bp, Zea Mays
tttatatgagcgtgctttggacaagaaggacctcgcgggtgcattatagcaaactctagtatatattgctgtttcggtaccctacccccctctctctctctcctctacctccttttcctctaacctttagctttcctccctccctctcctctctcccccctcctctaacaagaactactcccagccattcagatcctaagttgctgaccttgctgctgcttgttggagatagatttgttggttctaagttccaagtaccatgagtccaccgagtgtgatggggcagtttggggacacaacctacaccaaggtttttgttgggggactcgcgtgggaaacccagaaggagacgatgaggaagtacttcgagcagtttggggagatcctggaggctgttgtcatcactgacaagaacactggcagatccaagggctacggatttgttaccttccgggatccggacgcggcgatgagagcttgcgttgatcccgcaccggtgattgatgggaggagggctaactgtaatcttgcttcccttggggttcaaagatctaggcctcctactccccagcatggaggagctagaaactttagagtaatgaaatccttcaaccagcaggcaggaatccaaggtggactcggcgcagcttttccttctcatgccaccttccctcattatgccatcccacaaggccttcccttccatgtctatgggtactctccatataccccagactatggttatccaacaaacttctacaatatatatggaggagctcagtacccgttttatggaggagcaacagctggcatggtgacaggaacaagtcccttttatccatatttccaatttgggcagtcaggaaacactactaccaactatacaagtggacaaggctacaacttgcaacaatacccacaaatgttccacttctcaactgtatcttctacagctgcagctgtgaccggctttgctcagcaatatggaggaccattgtcactagcagcaagccctcaagcccaagcaggcatgactatggcactcacagctccaaccctgccaactccaacacaggctgctcatccttaccggttgattccctcgcactttgcagtttctgctgctccagagcaacccttggcctaaccatggtctcccttctcaccgttgttgtactgtctcgtttccgacgtgtttgagtccatgcatccatctctaacaccaaaaggcactattgtagatcacgcttatcagtcaaagtgctcacctccatatcccacatggtcatgtggtgaatggatattagctttagccccaggatgggcataaagcttcatgccccaaggatggggtgttctaacagacaagtacaaaccccaaccattctaacaatagtccaaggaaggactttatctgggagagttaatttcagccgtaccaagacaatgctgtagctaaaagaaactaacagtcaagcatgacccagggatggttcatgctgatactagtcaaattggacaacaatgacagctaaataactgactagcatgccactcccacatgtcattagtagaatcccaactgtacctagcttaggcatggcatctcttgttgaagcatgaaccatttagcaaaacctacccttctatagtcccgatgttacctagaccaaatgcatttgatatatgaccagcgactacttgtgtaaccaactcatcttttctttgcaaatgcttagatgcatcaactaacattttatttgatctttcagtcgatagcttgcatctaggtggtcaaggctctaaggagagcctgtgcccctaatcagacacaggttcagagtagtgctaatgtttgtttttagcacttggcactacctcctgtcactccaaacacagtattgggactccaaagaaggctttggagtaaccaagcactgctgtgtaactcattaacacaatggacccacagataaatttttattgtcttgggccaccccactcatgtagatgtcattacttctcagtgtcactaccatggttaggtccaggcccccctccccaaccgcgtcccccacctctctcactgcacatcgcagagaccttagtgctctttaatctactattaccaggcatggtggttgtaataataaagtagcgctgtgctactcgtaggacatgaagaactatttgttattcaacccttcatatgtacttaatatcttgtctatttcagttcagtagtcggtacttatttccatccattgtaatgcaccatataatgttgtgtaatatatgtccactgtgctgcacatttcttagggcatgtttggttcgtcttttttgtgacgaggttttctgag

SEQ ID NO: 116101 - DNA, 1984 bp, Zea Mays
accctacccccctctctctctctcctctacctccttttcctctaacctttagctttcctccctccctctcctctctcccccctcctctaacaagaactactcccagccattcagatcctaagttgctgaccttgctgctgcttgttggagatagatttgttggttctaagttccaagtaccatgagtccaccgagtgtgatggggcagtttggggacacaacctacaccaaggtttttgttgggggactcgcgtgggaaacccagaaggagacgatgaggaagtacttcgagcagtttggggagatcctggaggctgttgtcatcactgacaagaacactggcagatccaagggctacggatttgtactctccatataccccagactatggttatccaacaaacttctacaatatatatggaggagctcagtacccgttttatggaggagcaacagctggcatggtgacaggaacaagtcccttttatccatatttccaatttgggcagtcaggaaacactactaccaactatacaagtggacaaggctacaacttgcaacaatacccacaaatgttccacttctcaactgtatcttctacagctgcagctgtgaccggctttgctcagcaatatggaggaccattgtcactagcagcaagccctcaagcccaagcagtgtgtatccccattaaacaggcatgactatggcactcacagctccaaccctgccaactccaacacaggctgctcatccttaccggttgattccctcgcactttgcagtttctgctgctccagagcaacccttggcctaaccatggtctcccttctcaccgttgttgtactgtctcgtttccgacgtgtttgagtccatgcatccatctctaacaccaaaaggcactattgtagatcacgcttatcagtcaaagtgctcacctccatatcccacatggtcatgtggtgaatggatattagctttagccccaggatgggcataaagcttcatgccccaaggatggggtgttctaacagacaagtacaaaccccaaccattctaacaatagtccaaggaaggactttatctgggagagttaatttcagccgtaccaagacaatgctgtagctaaaagaaactaacagtcaagcatgacccagggatggttcatgctgatactagtcaaattggacaacaatgacagctaaataactgactagcatgccactcccacatgtcattagtagaatcccaactgtacctagcttaggcatggcatctcttgttgaagcatgaaccatttagcaaaacctacccttctatagtcccgatgttacctagaccaaatgcatttgatatatgaccagcgactacttgtgtaaccaactcatcttttctttgcaaatgcttagatgcatcaactaacattttatttgatctttcagtcgatagcttgcatctaggtggtcaaggctctaaggagagcctgtgcccctaatcagacacaggttcagagtagtgctaatgtttgtttttagcacttggcactacctcctgtcactccaaacacagtattgggactccaaagaaggctttggagtaaccaagcactgctgtgtaactcattaacacaatggacccacagataaatttttattgtcttgggccaccccactcatgtagatgtcattacttctcagtgtcactaccatggttaggtccaggcccccctccccaaccgcgtcccccacctctctcactgcacatcgcagagaccttagtgctctttaatctactattaccaggcatggtggttgtaataataaagtagcgctgtgctactcgtaggacatgaagaactatttgttattcaacccttcatatgtacttaatatcttgtctatttcagttcagtagtcggtacttatttccatccattgtaatgcaccatataatgttgtgtaatatatgtccactgtgctgcaca

SEQ ID NO: 116102 - DNA, 1167 bp, Zea Mays
tttatatgagcgtgctttggacaagaaggacctcgcgggtgcattatagcaaactctagtatatattgctgtttcggtaccctacccccctctctctctctcctctacctccttttcctctaacctttagctttcctccctccctctcctctctcccccctcctctaacaagaactactcccagccattcagatcctaagttgctgaccttgctgctgcttgttggagatagatttgttggttctaagttccaagtaccatgagtccaccgagtgtgatggggcagtttggggacacaacctacaccaaggtttttgttgggggactcgcgtgggaaacccagaaggagacgatgaggaagtacttcgagcagtttggggagatcctggaggctgttgtcatcactgacaagaacactggcagatccaagggctacggatttgttaccttccgggatccggacgcggcgatgagagcttgcgttgatcccgcaccggtgattgatgggaggagggctaactgtaatcttgcttcccttggggttcaaagatctaggcctcctactccccagcatggaggagctagaaactttagagtaatgaaatccttcaaccagcaggcaggaatccaaggtggactcggcgcagcttttccttctcatgccaccttccctcattatgccatcccacaaggccttcccttccatgtctatgggtactctccatataccccagactatggttatccaacaaacttctacaatatatatggaggagctcagtacccgttttatggaggagcaacagctggcatggtgacaggaacaagtcccttttatccatatttccaatttgggcagtcaggaaacactactaccaactatacaagtggacaaggctacaacttgcaacaatacccacaaatgttccacttctcaactgtatcttctacagctgcagctgtgaccggctttgctcagcaatatggaggaccattgtcactagcagcaagccctcaagcccaagcagtgtgtatccccattaaacaggcatgactatggcactcacagctccaaccctgccaactccaacacaggctgctcatccttaccggttgattccctcgcactttgcagtttctgctgctccagagcaacccttggcctaa

SEQ ID NO: 116103 - DNA, 1024 bp, Zea Mays
cgtgcctcttccgctccccgttcccgcaataaaggcctaccctacctgattagcccgtgccctcgcgcggcatcacacagattcccgcgtcccgccgtcggcgactcggcgtcctgctgattgcgtcgcgaggagtgctcgtagccgccctcctctctcagattcagtcgcccatggcgaggaatccaggccgcaccgtcttcatcggcaacttggatgaaaaagtatctgaaagagtcttgtatgagattcttattcaggcaggccatgtagtaggcctacatgtacctagtaataaggagagtaacagtcgcaaaggttatgcttttgctgagtatgaaaccgaggatatcgcgcaatacgctgttaggcttttctcgggacttgttcggatcaatggtaaaacgctcaagttcgtgattgctggtcatgacaaaccgtcttcaaatgacaataagtcggtactgctcaatcatgtaccctcttcaaatggcaataacccacatatccggtggtaaacgggaggattggaggttatggtttttcttccactccttatcctaatggtttccacccgcaagctttaccgggtggaccagtacacagccatggcaaggtttagcaacagtacgtatgcttacaataggcaggaatttggttctgttctgaacattgcgcagagaggtcctgttatgaatgcctttgcccatgaggctgcgaatcagccaatcatgtatgttgagaacgtaggtgcagaagaacgtagtatgttaagagtaggcaggttccacataggttcttgacacctcaatacctcggtaacgtctaggtaggttgtagtacctcctagtcttgcccaagcttgtaatatggttatcaatcctctagatcttcagtagaacattgcattattcttgaaggcaaaaaaaagtcttcttgtgttctccattgtccattgtcccaaccctgaaggcagcaggtgttacttatacaaagacagtgaagtacactattatgttcgtgc

SEQ ID NO: 116104 - DNA, 812 bp, Zea Mays
cgtgcctcttccgctccccgttcccgcaataaaggcctaccctacctgattagcccgtgccctcgcgcggcatcacacagattcccgcgtcccgccgtcggcgactcggcgtcctgctgattgcgtcgcgaggagtgctcgtagccgccctcctctctcagattcagtcgcccatggcgaggaatccaggccgcaccgtcttcatcgattgctggtcatgacaaaccgtcttcaaatgacaataagtcggtactgctcaatcatgtaccctcttcaaatggcaataacccacatatccggtggtaaacgggaggattggaggttatggtttttcttccactccttatcctaatggtttccacccgcaagctttaccgggtggaccagtacacagccatggcaaggtttagcaacagtacgtatgcttacaataggcaggaatttggttctgttctgaacattgcgcagagaggtcctgttatgaatgcctttgcccatgaggctgcgaatcagccaatcatgtatgttgagaacgtaggtgcagaagaacgtagtatgttaagagtaggcaggttccacataggttcttgacacctcaatacctcggtaacgtctaggtaggttgtagtacctcctagtcttgcccaagcttgtaatatggttatcaatcctctagatcttcagtagaacattgcattattcttgaaggcaaaaaaaagtcttcttgtgttctccattgtccattgtcccaaccctgaaggcagcaggtgttacttatacaaagacagtgaagtacactattatgttcgtgc

SEQ ID NO: 116105 - DNA, 2667 bp, Zea Mays
ccgcacctctccaccaagtcaccctgcgacccctaccgcgtacttcggtggcctattgtcctctcttcgtcttgggtggcgcggatggataatgctgatccagaaagttggttggacgggaccgagagctccggcacgacgccgttggagacaccaacggcgacaccacttgcaactccgatttcggcgaggtccgtgaggtgggagaaggacgtcgaggatgcggcggctggcgctctgcagcggccactgctctacaagcgcggcaccaacacgacgtcgcagatggccatcgtcggcgctaacacctgccccattgagagcctcgactacgaaattgtggagaatgacgtgtacaaccaagactggaggtcaagagggaaacttcagatcttccaataccaggtccttaaatgggtcctggcacttcttgtaggtgtagtcgtcggcctagttgggttcttcagcaacatcgctgtcgaaaacatcgccgggttcaagttgctcctgacgggcgatctcatgctccagaaccggtacctggctgcttttgagctatacatcggttgcaacgcagtgctggctgctgcggctgcagcgctgtgcgcttacgttgccccggcggcggccggctctggcatccctgaggtgaaggcgtacctgaatggcatcgacgcgcactcgatcttagcgcccagtaccctcttagtgaagattttaggctcggtattaggagtgtctgctggatttgtcctgggcaaggaaggccctatggtgcacaccggttcttgtgtcgcctccttgctcgcgcaaggcgggtcacggaagtatggcctcacttggaactggatcaggtacttcaagaatgacctggaccgaagagatctcatcacctgcggagctgcagctggggtggcggcggccttccgcgccccagttggaggcgtgctctttgcgctcgaagaagttacatcatggtggcggagcgcgcttctctggaggaccttctccacgacagcggtggcgaccatggtgctgcacgcgctgatcacctactgccgtggtggccactgtggcctgtttggcaaaggagggctgatcatgttcgatctcagctcacggcaggcgacgtacaccgcaacggaccttgccgcagtcgtgttactcgccgtcctcggcggtctgctcggcgctcttttcaacttcctcgtcgaccgggtccttcgcgcatatagcatcgtcaacgagaagggcgcgtgctacaagatcgtcctgacggtgaccatctcggtgatcacgtcgtgctgcaccttcggcttgccgtggctgacggcgtgcaccccttgcccgccggagctcgccagtaagtgcccgaccatcgggcgctccggcaatttcaagaacttccagtgcccgccggggcagtacaacgcgctggcgtccctcttcttcaacaccaacgacgacgccatccgcaacctcttcagcgccgggtacgacagggagttcggcgtgtccacgctcctcaccttcttcaccacggtgtacaccctgggcctgctcacctacggcgtggccgtgccgtcgggcctcttcatccccgtcatcctgtcgggcgcctcgttcggccgcctggccggcacgctgctgggctccgtcagcggactcgacccggggctcttcgcgctgctcggcgccgcggccttcctcggcgggaccatgcggatgacggtgtcggtgtgcgtcatcctgctggagctcaccaacgacctgctcctgctgccgctcatcatgctcgtgctgctcatcgccaagacggtggcggactgcttcaacaagggggtgtacgagcagatcgtgcgcatgaagggcctcccctacctggaggtgcacgccgagccgtgcacgcggagcctggtggccggcgacgtggtgtccggcccgctcgtcaccttctccagcgtcgagcgcgtgggcaccgtcgtccacaccctcaggagcacgggccacaacgggttccccgtgatcgaggacccgccgttcgcgccggcgccggagctttgcggcctcgtcctgcgctcccacctgctggtactgctgcaggggcggatcttcacgagcgaccgcgtcaagacaggcgccgccgaggtcttccgccggctcgcgccgttcgacttcgccaaggccgggtccgggaagggcatcaaagtggacgacctggacctgaccgaggaggagatggacatgtacatggacctccaccccatcaccaaccggtcaccgtacaccgtcgtggagaacatgtcgctggccaaggccgccgtgctgttccgcggcctcggcctccgccacatgtgcgtcctgccgaggacgcaggggcggccgccggtggtggggatcctgacgcggcacgacttcatgccgcagtacatccgcgggctgtacccgaacgtgctccctcgctagaacgagagaaagcacggccgccacgcgaatgccatcccattgcattgaactgcattatgtatagggtttttatttgtttactataggctttcaatgtttttcgaacaaaaaacctaggctcttcagtcagcgccctgtcccctgcgactaaagtggtgtgcctgaatatttttctcagaactgacaaacccgagaccatag

SEQ ID NO: 116106 - DNA, 249 bp, Zea Mays
aacggcgtggcggaggctgcgtggctcgggcagctcctcgccgtgctccacagtcccctctccaggagcacgttggtctactgcgacaacgtcagcgccgtctacctctccaccaacccggtgcagcaccagcggaccaagcatgtagagatcgatctacacttcgtccgtgattatgttgccgccggtactgtttgggtcctccacgtcccgaccacctccagtttgctgatatcttcaccaatggtc

SEQ ID NO: 116107 - DNA, 252 bp, Zea Mays
aggtaactttcttgtgaagagagaggttatatataacagaggaagctaccaccaattcttaacattgacgcaaagaggaggcttgcaagcagcagtacttccagttactccaccgctattagataatgaggggaaaaggaaacaaatggctgaagattacggaacaaccagatgacattactctcaaagatgtgatggatactctacctaaagaggtgccaactgtccatgccagtttgcttttggtgttta

SEQ ID NO: 116108 - DNA, 112 bp, Zea Mays
attcccttttcaaattcttatttaaactcgtctcataatttaaagtacaaatgcaacattacaagaacttcgacatgatgcacacttcattgaggtatgatttattttagac

SEQ ID NO: 116109 - DNA, 1629 bp, Zea Mays
aaagcaacaaatctcacaccgtcacacgatcacgtccttgcccctctgagtccttgtccatgtccgttgccaacaattcaccctcatgacctctatggccccacacgtacgaccactagtagtactaggcgtacggagtacctctatttcacgatggcatccatccacaattgcagtaatccctctctccgtccctcccaatgttactccatctctctatttttaaagccggttccactcctcctccctcgctcactctcagtttccgctgtcaccccctctccctctgttcgccactttataccgcccgcccaccactccccgtttctctctgcttcatccttcgctttcccctgcgccaggcccgccccgccccgcccctccagaacgacatcctgcttccccgccccctccgatggggaacccgccggagctgtaccacaagatcctcaacatccccaaggacacctcgccgcacgaaatccgcgccgcgtacaagaacctcgtcaagaagtggcaccccgacaagcacccgccgtcgtccaggccggaggccgaggcgcgcttcaaggccatcagcgaggcctacgaggcgctcctggaccagcaggagaacaggggcgtgttcgagctgtgcaacgacggccgggcgggtgagaggacgcgcggcgccttcggcggcgccggcggcggcggtggcggaggcctcggcgccggcgtcggggcgcgcatggagaggacgcgcagcgacgggttctgcacgaggagcgcgcccggcacaccggcgagggagttcaagaaggtgtacagctccggcgaccccggcgggcgccgcgccttcgccgagttctccagctccatcgtgcgcaaggcgccgccgctggagcgcaagctcgagtgcaccctcgaggagctctgccgcggctgcaagaaggaggtcagcttcacccgcgacgtcgtcaccaagaacgggtcaaccgtgaagaaggaggtgacacagacggtggtggtgaagccagggtggaggaaagggaagcaggtggtgctggaaggcatgggggacgagcggccggggtgcctgcccggcgacgccatcctcacggtgtccgagaagaggcacccggcgttcaagcgggtgggcgacgacctggtgctcaaggcggaggtgccgctggtgggcgcgctcaccggctggtccttctcgttccgcctcctcggcggcaggaaggtgagctgctcgttccaggacgaggtcgtccgccccggctacgagaaggtgatcgccggcgagggcatgccggtccccgggcagaagggcgcgcgcggcgacctgagggtcaagttggacgtcgtcttccccaaggagctcacccccgagcagcgcgccggcctcgccgagatcctcagagggtcctgctgatccatcggccccagttccaagcgtatcaagttttcttggccgtgtccgtgtgttaaattttaatatgtatactcatagcgcgtgtgatgagtatataagtacataaagagagaggggagggggcgtcgttgtacatacaggtcgtttatatattatatatgtaaggataaaaagaaatatgaaacgtgagccaaagccaagccttgtgt

SEQ ID NO: 116110 - DNA, 849 bp, Zea Mays
caaggcccaagatgcttctttcgccacatatgcgttttagtacacgcgttttggatgtattcatatttgtttccttttttttacacgtgagggtgacagtgactcctgagcaagagcatccctcccttcctccttgttcctatggagggagactaatcgcaactagcctaatggctcgaagtacgtgctttttgtttgtgcaggtcaaccgtgaagaaggaggtgacacagacggtggtggtgaagccagggtggaggaaagggaagcaggtggtgctggaaggcatgggggacgagcggccggggtgcctgcccggcgacgccatcctcacggtgtccgagaagaggcacccggcgttcaagcgggtgggcgacgacctggtgctcaaggcggaggtgccgctggtgggcgcgctcaccggctggtccttctcgttccgcctcctcggcggcaggaaggtgagctgctcgttccaggacgaggtcgtccgccccggctacgagaaggtgatcgccggcgagggcatgccggtccccgggcagaagggcgcgcgcggcgacctgagggtcaagttggacgtcgtcttccccaaggagctcacccccgagcagcgcgccggcctcgccgagatcctcagagggtcctgctgatccatcggccccagttccaagcgtatcaagttttcttggccgtgtccgtgtgttaaattttaatatgtatactcatagcgcgtgtgatgagtatataagtacataaagagagaggggagggggcgtcgttgtacatacaggtcgtttatatattatatatgtaaggataaaaagaaatatgaaacgtgagccaaagcc

SEQ ID NO: 116111 - DNA, 3300 bp, Zea Mays
ggcacggcacaccgagagagagagagcgcgcgcgcgcgacgcagccaatcccccacggcatgcccaaaaccctcagttccgtgcaataattctgcctcgtcctcccatcgctgtcccccaccgaaacactctcggacgcgtcgtcgtctccccaagaccaaagccaggcggcctgtctgtcctccagtctccccacttcgctctcaccccacgccgcgtaccgctattaataccaccaccagtaccaccacctctgccagttcgccaccatcgtgctccgtacacgctccgctccggccatggccgccgccgcggcctccttttcggccctgccgttccttctacttttgctgctggtgccgtcgctcgacggcgcctccaatgtgacgtacgaccaccgctccctcatcatctccggccgccgccgcctcgtcatctccacctccatccactacccccgcagcgtccccgagatgtggcccaagctggtggctgaagccaaggacggcggcgccgactgcatcgagacctacgtcttctggaacggccatgaaatcgccccaggccagtactacttcgaggaccggtttgacctggtgcggtttgtgaaggtcgttagagacgctgggctgctcttgatcctgcgcatcgggccctatgtggccgccgagtggaattatggaggcgtgccggtgtggttgcactacgtgccaggaacggttttcaggacaaacaacgagccattcaagaaccatgtgaagagtttcacgacatacatcgtggatatgatgaagaaagagcagctcttcgcttctcagggagggaacattatcctagctcagatagagaacgaatatggagattattatgaacaagcgtatggagctggcggcaaaccatacgccatgtgggcagctagtatggctcttgctcaaaacactggtgtcccttggattatgtgccaagagtctgatgctcctgatcccgtgataaactcttgcaatggtttctactgcgatggattccagccaaattcgccaaccaagccaaaaatttggactgagaattggccaggatggttccagacttttggtgaaagtaatccccacagaccacctgaagatgttgcattcgctgttgcacgttttttcgagaaaggtggcagtgttcagaattactatgtgtatcatggtggcacaaattttggtcgcactactggggggccattcattacaactagctacgactatgatgcaccaattgatgaatatggacttcggagatttccaaagtgggcacatctgagggatcttcacaaatctataagattgtgtgagcacaccctgctttatggaaatacaacgtttctttctctgggtcctaaacaagaggctgatatttacagtgatcagtctggaggctgtgttgcattcttggcaaatattgattcagccaatgacaaagttgtcactttccgtaacaggcaatatgatcttcctgcttggtcagttagcattcttcctgactgcaggaatgtggtgttcaacactgcaaaggtgcaatctcaaacttcaatggtgaccatggttccagaaagtttgcaagcatcaaaacctgagcgatggagcattttcagggagagaactgggatttggggtaaaaatgactttgtccggaatggatttgtggaccatattaatacgacaaaggactccaccgactacctatggtacacaacaagttttagtgtggatggaagttactcctcaaaagggagccatgctgtccttaatatcgactccaatggccatggtgtccatgctttcttgaataatgtgctcataggtagtgcatatggtaatggctcacaatcaagattcagtgtcaaattgcccatcaacctgaggactggaaagaatgaacttgcccttctaagtatgactgttggtttacaaaatgcaggattcgcttatgaatggataggagcaggctttacaaatgtgaacatctctggtgtgagaactggaaccatagacttgtcttcaaataattgggcatacaagattggactggaaggggaatattataatttgttcaagcctgatcagacaaataaccaacggtggataccacaatccgagccaccaaaaaaccaacctttgacatggtataaggtaaatgttgatgttccacaaggagatgacccagttgggatagacatgcagtctatggggaaaggcttggcttggttgaatggaaatgccatcgggcggtattggccgaggaccagttctattaatgataggtgcactcccagttgtaactacaggggaacatttattccagacaagtgcaggacaggttgtggacagccaactcagagatggtaccatatcccacggtcatggtttcatccctcagggaacatcctcgtggtctttgaggagaagggtggggatcccacgaagatcacattctcaagaagagctgtgacgagcgtgtgctcctttgtgtcagagcacttcccttccatagacttggaatcctgggatgaaagtgccatgaccgaaggcacacccccagccaaagcacagctgttttgccccgagggtaaaagtatatcttccgtgaagtttgcgagcttgggaaaccccagtggaacctgtagatcataccaaatggggcgctgccaccacccgaactccttatctgttgttgagaaggcttgtctgaacaccaacagctgtacagtctccctgacagacgagagctttgggaaggatttatgccctggagtcaccaaaacactcgccatcgaagcggactgttcttagtggcctacggagtacgaagtgtctcggtgtgcatctaggttccactgcaagtatgcccgtcaaaattctaaaactgtagtgcttgttgcacggcaatgctattgtaacctggatttgaatcgcaaatatgtttcctagattttaagagtcttcagaggcattactcaatatgataagtgttcaattgtcccaaagaccaaattaccatcaaaagataattgttcaattaggctaagtacaaagtatggggcagctaatcgcgaaccaaacaaaagctaaagttaagcaatttagcggtgctaaatcgtgatttagcagtcgcaactcacgtagcggcagctctcgcagccactatagcgccgccatctaaaaccatgctgagcagtattcagtgatgctggtaggtgacagttagcgattgatactgaccatccgcgctagcaaatgcaatattgtatttgggatc

SEQ ID NO: 116112 - DNA, 3426 bp, Zea Mays
acgaacggcgccggcgggtggccgtccacgacgctgtcacgcacgcttggcacggcacaccgagagagagagagcgcgcgcgcgcgacgcagccaatcccccacggcatgcccaaaaccctcagttccgtgcaataattctgcctcgtcctcccatcgctgtcccccaccgaaacactctcggacgcgtcgtcgtctccccaagaccaaagccaggcggcctgtctgtcctccagtctccccacttcgctctcaccccacgccgcgtaccgctattaataccaccaccagtaccaccacctctgccagttcgccaccatcgtgctccgtacacgctccgctccggccatggccgccgccgcggcctccttttcggccctgccgttccttctacttttgctgctggtgccgtcgctcgacggcgcctccaatgtgacgtacgaccaccgctccctcatcatctccggccgccgccgcctcgtcatctccacctccatccactacccccgcagcgtccccgagatgtggcccaagctggtggctgaagccaaggacggcggcgccgactgcatcgagacctacgtcttctggaacggccatgaaatcgccccaggccagtactacttcgaggaccggtttgacctggtgcggtttgtgaaggtcgttagagacgctgggctgctcttgatcctgcgcatcgggccctatgtggccgccgagtggaattatggaggcgtgccggtgtggttgcactacgtgccaggaacggttttcaggacaaacaacgagccattcaagaaccatgtgaagagtttcacgacatacatcgtggatatgatgaagaaagagcagctcttcgcttctcagggagggaacattatcctagctcagatagagaacgaatatggagattattatgaacaagcgtatggagctggcggcaaaccatacgccatgtgggcagctagtatggctcttgctcaaaacactggtgtcccttggattatgtgccaagagtctgatgctcctgatcccgtgataaactcttgcaatggtttctactgcgatggattccagccaaattcgccaaccaagccaaaaatttggactgagaattggccaggatggttccagacttttggtgaaagtaatccccacagaccacctgaagatgttgcattcgctgttgcacgttttttcgagaaaggtggcagtgttcagaattactatgtgtatcatggtggcacaaattttggtcgcactactggggggccattcattacaactagctacgactatgatgcaccaattgatgaatatggacttcggagatttccaaagtgggcacatctgagggatcttcacaaatctataagattgtgtgagcacaccctgctttatggaaatacaacgtttctttctctgggtcctaaacaagaggctgatatttacagtgatcagtctggaggctgtgttgcattcttggcaaatattgattcagccaatgacaaagttgtcactttccgtaacaggcaatatgatcttcctgcttggtcagttagcattcttcctgactgcaggaatgtggtgttcaacactgcaaaggtgcaatctcaaacttcaatggtgaccatggttccagaaagtttgcaagcatcaaaacctgagcgatggagcattttcagggagagaactgggatttggggtaaaaatgactttgtccggaatggatttgtggaccatattaatacgacaaaggactccaccgactacctatggtacacaacaagttttagtgtggatggaagttactcctcaaaagggagccatgctgtccttaatatcgactccaatggccatggtgtccatgctttcttgaataatgtgctcataggtagtgcatatggtaatggctcacaatcaagattcagtgtcaaattgcccatcaacctgaggactggaaagaatgaacttgcccttctaagtatgactgttggtttacaaaatgcaggattcgcttatgaatggataggagcaggctttacaaatgtgaacatctctggtgtgagaactggaaccatagacttgtcttcaaataattgggcatacaagattggactggaaggggaatattataatttgttcaagcctgatcagacaaataaccaacggtggataccacaatccgagccaccaaaaaaccaacctttgacatggtataaggtaaatgttgatgttccacaaggagatgacccagttgggatagacatgcagtctatggggaaaggcttggcttggttgaatggaaatgccatcgggcggtattggccgaggaccagttctattaatgataggtgcactcccagttgtaactacaggggaacatttattccagacaagtgcaggacaggttgtggacagccaactcagagatggtaccatatcccacggtcatggtttcatccctcagggaacatcctcgtggtctttgaggagaagggtggggatcccacgaagatcacattctcaagaagagctgtgacgagcgtgtgctcctttgtgtcagagcacttcccttccatagacttggaatcctgggatgaaagtgccatgaccgaaggcacacccccagccaaagcacagctgttttgccccgagggtaaaagtatatcttccgtgaagtttgcgagcttgggaaaccccagtggaacctgtagatcataccaaatggggcgctgccaccacccgaactccttatctgttgttgagaaggcttgtctgaacaccaacagctgtacagtctccctgacagacgagagctttgggaaggatttatgccctggagtcaccaaaacactcgccatcgaagcggactgttcttagtggcctacggagtacgaagtgtctcggtgtgcatctaggttccactgcaagtatgcccgtcaaaattctaaaactgtagtgcttgttgcacggcaatgctattgtaacctggatttgaatgtatccatctgagctaggttatgtttcaggagctttcttaaactaacgttgttgctgagcagcatgaaatctgattagcgcaaatatgtttcctagattttaagagtcttcagaggcattactcaatatgataagtgttcaattgtcccaaagaccaaattaccatcaaaagataattgttcaattaggctaagtacaaagtatggggcagctaatcgcgaaccaaacaaaagctaaagttaagcaatttagcggtgctaaatcgtgatttagcagtcgcaactcacgtagcggcagctctcgcagccactatagcgccgccatctaaaaccatgctgagcagtattcagtgatgctggtaggtgacagttagcgattgatactgaccatccgcgctagcaaatgcaatattgtatttgggatc

SEQ ID NO: 116113 - DNA, 232 bp, Zea Mays
ctccgggcatcttcagcatgcacaccagtcctctgccactagttagatcaataataatctggaacaccagatacagagatgatagcagactcaggcatgttcacccttatttacccattcaaaatgtaaatggtctattatttgagcaagacgaccaagtagacacacgcatatatgaccacagttagttatacacatggcactaggcttggtcttacaaatccaacacatc

SEQ ID NO: 116114 - DNA, 1102 bp, Zea Mays
aactatttgtaaagaatcctcgctcgccaccgttcagtactagggtccatggctttgggtgaaaataacgcctttaggatgcagctccatgtgcaatccataaatccaagatgccatgcatgtccttctagatacatctctcccaaacaaaagcaagaaccacgcacacagatgccagcgagatacgagtacagtacactttttgctgcaatgtgacatcacatgtggaggggcagctgaacctctctaggttggataggattattagggcaaatgtagtaagtactcttcacatcagtgtctgataaccagccgttgtttgagcaaattccaatgctgtgaccctttctttttgcagcttcctgcggagcagcggcgaggagtttgtggagcagtgcatcaaccaggcggagtgcctgacgctggcggtgaggaagcagagcaagggcgtcggtgggtacctcatcagcacccggtggcagaagaacttctggctcctggcctgacaaccatgcattttacctagctagttactactgctacatgatcacatttgttttaagtcactcccgtatatgtgctgtcatttcgtgtcatcaagtgcgtcacaagaaagaccatctctctctctccttcatcctgttgtaaagcgaaaagagcctccgaatctgaccacctttctacgaacctgtatcttccctgcaagtctttagcgtgcgtgtagtactgtgatctgcactgaacaatcatgtaatgctgcataaatgaccaattctgttgtacggcgcttcttgcttgctgcaattgacacttgaggctgtacagcttgcggattacgctaccggatgaaacctgattgcttaaccacgagggaagagctacgcaaattcaggataacaacatcggcaaggccaaggcgacgtttcggatgccgaaggtcgaaattggaaagcaatcaaggcgactcacactcaagcttgggtgcgagaaggaagtcttgagttatttctagaagtaaaataatgttcaggtcctgctccgccaaaataatgttctggtcctgcagccgtccctataataaatacttcatccgtttcaattt

SEQ ID NO: 116115 - DNA, 1482 bp, Zea Mays
atatagcccccgaggggcctttcctctgcacgtagccatatcacaccgcacacagtactcgtcctccttgcagagcttgcaccaacacgccaccttaccttgctttgctcgcactcgcacacagttgcgagcgcattgcttgcattgcgcagccgcaggccgcagcacgaagctagccagtaggcggtagatggcgagcagcgcggggaaccgcttcctgaggcagctgagcgcgagcaacggcgacgaagcggtctgcggcggcctgcagatggaccagcaggagtacggcggcgccggcgtggggaggaggggatcccggcggtggtcgaagaagcgggccgccgccgccgccgccgcgaggggctacggcgccggcagcgggaatggcgtgaagcagccggcctctgccgcggggaagcgggtgatggtggtggtggacgagagctcgggagccaaccacgccatgatgtgggcgctcacccacgtcgccgacaagggggacttcctcacgctgctccacgtcctgccgcgctccggcagcggcaggggcgaggaggcctcctccctcgccaactcgctcggcacgctctgcaaggcctccaggccagaggtggaggtcgaagcgcttgtgatccaagggcccaagctgggcaccgtgctcagccaggtgaagaagctggaggcctccgtgctggtgctcagccagtgcaggccatctccctgctggttaagctgcttcctgcggagcagcggcgaggagtttgtggagcagtgcatcaaccaggcggagtgcctgacgctggcggtgaggaagcagagcaagggcgtcggtgggtacctcatcagcacccggtggcagaagaacttctggctcctggcctgacaaccatgcattttacctagctagttactactgctacatgatcacatttgttttaagtcactcccgtatatgtgctgtcatttcgtgtcatcaagtgcgtcacaagaaagaccatctctctctctccttcatcctgttgtaaagcgaaaagagcctccgaatctgaccacctttctacgaacctgtatcttccctgcaagtctttagcgtgcgtgtagtactgtgatctgcactgaacaatcatgtaatgctgcataaatgaccaattctgttgtacggcgcttcttgcttgctgcaattgacacttgaggctgtacagcttgcggattacgctaccggatgaaacctgattgcttaaccacgagggaagagctacgcaaattcaggataacaacatcggcaaggccaaggcgacgtttcggatgccgaaggtcgaaattggaaagcaatcaaggcgactcacactcaagcttgggtgcgagaaggaagtcttgagttatttctagaagtaaaataatgttcaggtcctgctccgccaaaataatgttctggtcctgcagccgtccctataataaatacttcatccgtttcaattt

SEQ ID NO: 116116 - DNA, 791 bp, Zea Mays
atagcaatcaactccaaaggaagtaagcaacacagactggaggagggctctctatttcctccctggtcccctaaaatctggaaccatgaaccatcgcattatgaaatgcaatatcctgcccggtttctgtttgcttcaatcaacgccatagttattttaatgtctgtgcacctgcctgcttaaatacgacagtagaggcgcatcaactgttcctttgtcttgttgtgctgtgccctgtaaatgtaaagaagaagaggtcatggtggctcacgatgagaaatgggtgtgaatgatggtaggtggaggtcgaagcgcttgtgatccaagggcccaagctgggcaccgtgctcagccaggtgaagaagctggaggcctccgtgctggtgctcagccagtgcaggccatctccctgctggttaagctggtaaggcactccgcaccccgtaccccttctcctatcttatccgctctgcatttgtctcggaaatgtgaagctctcagaggtcaactatggaccagtaaaattggggtgagggaatctctcatgatgccaatccatagcgtttcgtttaaaaatggaaaacgaagcttagacttcagaactagtaatttacatgtctgcaattccagcagaatattcgactagtatcagatttagcttatcctctcaggtaaacaatcctaaaagcaataggtcaaggctcaggagtgagctgattggcacttatttagttgcgtttgcgtctcaatgtatactttctgtaagataaatcaggtaaaaaatgtaatta

SEQ ID NO: 116117 - DNA, 659 bp, Zea Mays
atgcgcggcgtggcgtcaccacccatgccaccggagcgcgctagaaatcgaagccgccgccatcgtcgaacccggcgtcgtacgctgacgagtccgagatcatgtcgtcgatcaggaggcccccgacggcgcctccgagcaggccggtacccgtagccggcggcctgcggcggcgggtagccgtacccgtacccgacctgctgcggcggcggggacgggtagccgtagcccgcggcctgctgcggcgggtaaccatagccgccgtactgcggtagacgagcagcgtagggcgccgccgtgctgggaccggccgaagggtaagccgtcaccggttcgccccccttgcctggcttgcctgccgtgggtgggtagccggatgagggcgggtaagcagcgtcggccttgccgccggcgggcgggtaggcgccgtatggaggtgggtacgcgtcggccttggctgccggcgggtatgcggtggcaggggggcgtacgcgtcggccttgcctgaaggaggcgggtacgcggcgggaggcgggtaggcatcaaccttgcctgaaggaggcgggtacgcggcggtcggtggaggctgggcgtaggcggactgggcggcggggcgggggcgtagccgttggcgacctcgccgagcttgtacgagaggt

SEQ ID NO: 116118 - DNA, 195 bp, Zea Mays
atgggaaattggagttcggtcgtcgtgagggcctccaagctttgccgagaagcttcgccatggcacagggaacgtttctgtggccccttctggcggattgggctgttcgtggctctggaatcgctcaccggagcaaccccaacaccgcagatccgccatgaccgtggatgggtccctgcgcctcgacgttcaccg

SEQ ID NO: 116119 - DNA, 761 bp, Zea Mays
cacttctttctgttagcgtttttcttggcgcagctggcggctccgaacacgcaggcctcgttcggccctatcttcgcgcatgccgccatggccttgtgcgcccggagctccagctcacacgccctcgacagcagacgcatggacgccgggtccaagagcgccgccatcctctgtccagcgctgggaggaaacaaaaaatcacgcggcggtctgcacccagcggcgctgcctgcgcacggccaccagacagccgaacggcggccagcagacagccgaacggcaaagaaaggagccttcgcccctgcacctgcacgggtaaatccagtcgccatttggctttcttttctgttgttttatctatgaatccaaacagattcgacctcttttcattttcatcgattaaaacttttcccaactagatcaacacctagattatggctccggtaccaatgttaagatttacaggatctctaggagtagatcagtggggtaatctatattctattgagtaatttcgggttcctaatttgtagaacagaacagtagttagattgttaccgtcattgggaagtgcaggcgtgttggaggatgtagatccgtccgccatcaggttcgttgatgaaggttgatgcagcgaggttgtcgacggcgatgaacggcggtgtcttcccgtcactggctgcgcaccctctcagatcggtgttagggttttgtcggtggggagtacggctctagtgaaacacgtcatccgagccgccggc

SEQ ID NO: 116120 - DNA, 462 bp, Zea Mays
atgggcaaccctccactcccatcagcccgctctcgctccgtcttcctcaagggaaatgatggcccggcatgggtccgtggaccgaccgaccacaccgacgggtgcgaggacgaggacgaggacgagcgacacaggcggcaaagggccaggggtccttttcttgaatgcgcagcagaaagccgcgctgctccccgggtcagtcccgctgccgttccagaggacgctttaatcattgcgatcggccgtccgcagctttccctgcccggggacaccgccggtccaaccccgacaaagcgccacgggagcgggacggaaggccgccacagcgttttcgctccgatcgcgtgttgcgctgccttcccatccgcccatccaatccatccatctccggatacgcaggcggccgccggttgccgtcctcggccagggacggggagacagtcaggggtacaaggaatctga

SEQ ID NO: 116121 - DNA, 2356 bp, Zea Mays
acgacaccaccaccagccctccccttcatcaattggagcacggcgcccgttcattcccctctgctccgctgcttgcctccggctccccaattccacgagatctccaattccaccgcgtcgtctctgcatccggaccccataccccgatcgatccctaaggcccatggttttctccgccgccgcgtcgcctctagtagccaccgctgctgactctgcttcctcctgcgtcgcccacctccgctgctgctgtcgcgttagttgctgccgttgttgaagacgcgtagctctttagggttcgcgatttctcgccgatcggttcgagaattggcacgcggtagccgcgccgctgcgcctgttcgacgacgcggaggagccgaagccggagcgcgtcggggccggagaggccgacgcggagagggatgacgaggacgggggcgaccagcacttctccctcctcgggcactccctctgcgtcaagcgcccgcgccgcgccggcaacggcggcgggggcggagagacgtcatcctgctcgtccacgtccgcggcgcttcgccctgccaagcgacaggcgacgggggagggcagcggcgcagatctggagacccgccgcgccgcggtccgcgcctggggcaatcagtcgctggcggaggccgacccggacgtgcactcgctgatggagcaggagttggaccgccaggtgcgaggcatcgagctcatagcgtcggaaaacttcgtctgccgcgcggtgctcgatgcactcggcagccacctcactaacaagtactccgagggggccccgggtgctcgctactacggcgggaatcagcacatcgacgccatcgaacggctctgccatgagcgcgctctcaccgccttcggtctcgaccctgcctgctggggcgtcaacgtgcagccctactcgtgcacgtctgccaacttggctgtctacactgggctccttcaacccaaggaccgcatcatggggctggagccaccgtcgggcggccatgttagccatggttactacacgcccagtggcaagaaggtgtcaggtgcctctattttcttcgagagcatgtcgtacaaggtgaacccacagactgggtatattgattacgacaagcttgaagaaagagcaatggatttccaccctaaaattctcatctgtggtgggagctcttaccccagagagtgggactttgcacggatgagattgattgctgataagtgtggtgcggtgcttctttgcgacatggcacatatcagtgggcttgtcgcagcaaaggaatgccgtagccctttcgactactgtgatgttgttacgtcaactactcacaagaatcttaggggccctagaggtggtataatattcttcaggaaagggaaaaatttaaggaaacgagctggatctttttctcaaggagatgagaatgaatacgacttcgaggataggataaattttggtgttttcccttcaatgcaaggagggccccataataatcatattgctggcttggctataactctgaagcaggtagcaacttctgaatataaagcatacattcaacaagtcaagaaaaatgctcaggctttggcatcagctttgatcagaagaaaatgcagattggttacaggtggcacagataatcacttagtactttgggacctcagaactcttggcttgactggcaagatcttcgagaaggtttgcgaggcatgccacatatctgtcaacaagacaccaatatatggagataatggctcgatatcgccaggtggtgtgcggattggaacacctgcaatgactactagaggttgcttagaagaggacttcgaggtgattgcagacttcctcataagggctactcaaattgctaacaatgttctgaaagaacatggcaaagtgcaaaaggagtttctaagaggcctacagaacaataatgatgttatagaactccgaaatcaggttgaggcatttgcgtcacagtttgcgatgccaggttttgatgtatgaatgtgcatatatacgtagtcagcaattatcagattcacagcaacattgccatcctttccgttactccaatactagcaactattgctttcaactgcacaatgattagggagtttttttttatttgatggtagacggtctagatggttgattcaaacaattatgtacagcaagttgtgatgaattatgtatgcagtgaaccttggtatgacgggttcctataggagatattttcttgtcactacaacagaaccctttgttgccttttgacacctgtttgttgccgaggctgaataagctttaaccatatggtttctggctaattattagacgatgatatttggt

SEQ ID NO: 116122 - DNA, 2463 bp, Zea Mays
cgggttcccatcgaaccgcatctgagtatctgaccacgtcacacgacaccaccaccagccctccccttcatcaattggagcacggcgcccgttcattcccctctgctccgctgcttgcctccggctccccaattccacgagatctccaattccaccgcgtcgtctctgcatccggaccccataccccgatcgatccctaaggcccatggttttctccgccgccgcgtcgcctctagtagccaccgctgctgactctgcttcctcctgcgtcgcccacctccgctgctgctgtcgcgttagttgctgccgttgttgaagacgcgtagctctttagggttcgcgatttctcgccgatcggttcgagaattggtaagctatggatctctcgcggcccacatcgtcggacctctcgctcgggctccactctcacggtcacgcccacgcccacgctcgcaggcacgcggtagccgcgccgctgcgcctgttcgacgacgcggaggagccgaagccggagcgcgtcggggccggagaggccgacgcggagagggatgacgaggacgggggcgaccagcacttctccctcctcgggcactccctctgcgtcaagcgcccgcgccgcgccggcaacggcggcgggggcggagagacgtcatcctgctcgtccacgtccgcggcgcttcgccctgccaagcgacaggcgacgggggagggcagcggcgcagatctggagacccgccgcgccgcggtccgcgcctggggcaatcagtcgctggcggaggccgacccggacgtgcactcgctgatggagcaggagttggaccgccaggtgcgaggcatcgagctcatagcgtcggaaaacttcgtctgccgcgcggtgctcgatgcactcggcagccacctcactaacaagtactccgagggggccccgggtgctcgctactacggcgggaatcagcacatcgacgccatcgaacggctctgccatgagcgcgctctcaccgccttcggtctcgaccctgcctgctggggcgtcaacgtgcagccctactcgtgcacgtctgccaacttggctgtctacactgggctccttcaacccaaggaccgcatcatggggctggagccaccgtcgggcggccatgttagccatggttactacacgcccagtggcaagaaggtgtcaggtgcctctattttcttcgagagcatgtcgtacaaggtgaacccacagactgggtatattgattacgacaagcttgaagaaagagcaatggatttccaccctaaaattctcatctgtggtgggagctcttaccccagagagtgggactttgcacggatgagattgattgctgataagtgtggtgcggtgcttctttgcgacatggcacatatcagtgggcttgtcgcagcaaaggaatgccgtagccctttcgactactgtgatgttgttacgtcaactactcacaagaatcttaggggccctagaggtggtataatattcttcaggaaagggaaaaatttaaggaaacgagctggatctttttctcaaggagatgagaatgaatacgacttcgaggataggataaattttggtgttttcccttcaatgcaaggagggccccataataatcatattgctggcttggctataactctgaagcaggtagcaacttctgaatataaagcatacattcaacaagtcaagaaaaatgctcaggctttggcatcagctttgatcagaagaaaatgcagattggttacaggtggcacagataatcacttagtactttgggacctcagaactcttggcttgactggcaagatcttcgagaaggtttgcgaggcatgccacatatctgtcaacaagacaccaatatatggagataatggctcgatatcgccaggtggtgtgcggattggaacacctgcaatgactactagaggttgcttagaagaggacttcgaggtgattgcagacttcctcataagggctactcaaattgctaacaatgttctgaaagaacatggcaaagtgcaaaaggagtttctaagaggcctacagaacaataatgatgttatagaactccgaaatcaggttgaggcatttgcgtcacagtttgcgatgccaggttttgatgtatgaatgtgcatatatacgtagtcagcaattatcagattcacagcaacattgccatcctttccgttactccaatactagcaactattgctttcaactgcacaatgattagggagtttttttttatttgatggtagacggtctagatggttgattcaaacaattatgtacagcaagttgtgatgaattatgtatgcagtgaaccttggtatgacgggttcctataggagatattttcttgtcactacaacagaaccctttgttgccttttgacacctgtttgttgccgaggctgaataagctttaaccatatggtttctggctaa

SEQ ID NO: 116123 - DNA, 110 bp, Zea Mays
gttcatttccatttctcatttttaattttcaaatccactttcaaatttagttttggatttcaaattcaattaagtgcacaatcataagaaccagcatgagatgtcattat

SEQ ID NO: 116124 - DNA, 2425 bp, Zea Mays
tgcagctgctctggttttggttctcttccagccagccaccgtagagcgcgcagcaaagctggcgtcagtcagtctgacagctcagctcctcccgacctccctatatctctgctcccccaaaccctaatccctggcataacacaacaatctctctcccctcactccctctctgcagcgcgcagctttcaaagcgttgggagagatggcagaggagacgcaaccagaggccgcagccgccgccgcgcccgccgcggccgaggtagtcgtgaccgaagctgcgccggcggaggcggaggtgcctgtggcggcggaagctgaagccgaggccaaggatgagaagaaaggtgacgaggcggagctcaccgccgatgacgcgggggtggggaccggctcgttcaaggaggaaagcaacctggtggaagacctgcccgacccggagaagaaggcgctcgacgagttcaagcagctgatcgctgccgccctcgccgccggtgagttcaacctgcctcccccgccgccgccgccgaaggccaaggagacgaaggtggaggaagccaaggccgaggagcccgccaaagaagagcccgcggccgaggcggaggctacggcggaggagcccaaggcccaggtggctgcggatgccccggttgaggaggtcaagacggaggtgccgccggccgaggaggccaaggctgagacactggctgaggaagccaagccttccgagcccgagccgcaggagaagaccgtcgtggtcactgaggaggagactgccaccaagacggtggaagcaatcgaggaaaccgtcgtgtccgcccccgccgccatcccggaggaagcagcggcgccagaggcggtggtcgaggctcaggcgaccgcgcctgaacccgtgctgatttggggcgtgccgctggtcggcgacgacgagcgcacggacacggttctgctcaagttcctgcgtgcgcgggagttcaaggtgaaggatgccatggcgatgctcaagtccgcggtgctgtggcgcaagcgcttcggcatcacctcgctcctcgacgccgacctcggcctgacggagctggagaacgtggtgttctaccgcggcacggaccgcgaaggccaccccgtgtgctacaacgtctacggtgagttccaggacaaggatctctacgagaaggccttcggcgacgatgagaagagggagcgcttcctcaagtggcgcatccagctgctggagcgcggcattctgtcgaagctggacttctcgcccagcggcatctgctccatggttcaggttaccgacctcaagaactcgccgcctatgctcggcaagcaccgcgccgtcacccgccaggctgtcacgctgctccaggacaactaccccgagttcattgccaagaaggtgttcatcaatgtgccgtggtggtatctagccgccaacaagatgatgagcccgttcctcacacagcgcaccaagagcaagttcgtctttgctagcccagccaaatcagcagcgactctattcagatacatcgcaccggaacaagttcctgtccaatttggaggcctcttcaaggaggatgatcctgagttcaccacctctgacactgtctccgagctcactatcaaaccatcctcaaaagaaaccgttgagatccctgtcaccgagaactccacaattgtatgggaactccgggtgctgagttgggaagtgagctatggcgccgagttcacccccgacgcggagggtgggtacaccgtcattgtacagaagacaaggaaggtgcctgctaacgaggaaccgatcatgaagggaagcttcaaggcaggcgagcctggcaaacttgtgctaactgtgaacaaccctgcatccaagaagaagacgctcctttacagatcgaaggtgaagagcaccagcgagtgagtgtgaggtcacgccgctagctgcctgggccctacagttaaaacgatctacagcatgatagaagagagaaggaaccttttggtttggttcgttaatttactgggttttttttttgggttcgcattctacattttgtttggttgaaaccaaagtgagcttgtttttgtgacagtagatgggagaagtataatggcattgtgtgatggatggttgttgatgagggcagggaggacgaaaatgtgggggaatgaaaggttggagaatgtctgttcctctgtagatgtgttctgtacattgcatctcttggattctcattgatatgttaaaatttaggagtacttggtcacatcattattcaatccatgttactctgcatgttcctcttttctcttcgtgtccttttcccttgttaatggaacactgtctgctgccgctcccaccatttatatatatatgctcatttgcagcaacaaggggatgtactcagaagtgacaaataatggccgt

SEQ ID NO: 116125 - DNA, 1215 bp, Zea Mays
cacagtagcgtctacacgcactgcgccccggcctgctgcccggctcccatatgtatgccctccgttgcacttgcactgcacccccctgtctgtccccacccttctgccctggcttatctctttccgcttccccctgttataatagcaaccaaaccaaaccaaaccagagctcaggaggagcttccacgcaaactcagggggaggcgcgcgcaagcaagcacacgagggagcagcgggcaggcaggcaggcagccatggggaggtctccgtgctgcgagaaggcacacacgaacaagggcgcctggaccaaggaggaggaccagcgcctgatcgcctacatcagggcgcacggcgaggggagctggcgctcgctgcccaaggccgcgggactcctccgctgcggcaagagctgcaggctccgctggatgaactacctccgcccggacctcaagcgcggcaacttcaccggcgacgacgacgagctcatcatcaagctccacgccctgctcggcaacaagtggtcgctcatcgcggggcagctgcccggccggacggacaacgagatcaagaactactggaacacgcacatcaagcgcaagctgctcagccgcggcatcgacccgcagacgcaccgcccgctcagcggcggcgcgggcagcgcgctcaccaccacgtccagcaccgccggcttcccgtcccccgcgccggcgtccaggcccacgcccacgcccccgcccgccgtcgtcgtcccgcccaatgcgatcttcgcgcgcccggcgccgtcggaggacggccacagcagcagcggcgcgagcacggacgcgccgcgctgccccgacctcaacctggacctggacctgtccgtgggcccgccgcccaagacgccggcggccacgcccgcgtcgcagcagcggcggcggacgaccatctgcctgtgctaccacctcggtgtccgcggcggcgaggcctgcagctgcgagaccgcgtcgtcgctggcgggcttccggtttctccggccgctggaggagggccagtacatataggtaaaggtaggcgtcgttaaatcactgtaggcaggcagaggcaaccctaccctcgcaaacctgtaaaaacagccagggaaaaaaaatggagagtttctaatggacggagatggttgtgatgtggatgatgagttcccctttctatcttcagaactgatgcgattcccctttc

SEQ ID NO: 116126 - DNA, 465 bp, Zea Mays
atggccatgatcatgccatcgacgacctgctccacctcctctccttcacagagtcggagcttgtcgtcgaagccgccacccttcaccatgggttttctcgacgcgctctaccatgtggtgatgtgccgcaacgccgtctatgtcaccttcgttgtcatcgatgcttccgcaagcgaggagttgagtctgctccctccggcctctctctccaattctccataccacgttggcttctccacgccctacacattcctggcagggtccttcctagaggcaaagcggttgttgatggccggccgaagatggatggcgcccctggacgccgactgccacgacattgtgcccatcctcgtgccgcagtttctcagatgggtcgcagactatggtaaattggtgactgttggtgccagaagcaacttgaagatggaaccaaggtttggtctaatcttagcctgcctgaattag

SEQ ID NO: 116127 - DNA, 1101 bp, Zea Mays
tctttgatccccctccgccctctcaaaacttgtattccttgtacatgagctaagtaacacaacaaatccctttttacaataaaatttcactttcctattaaccctgccatatatcatacaaagttggccagaacatgctgccaccatctctaaccctcgtggtgccttcaaactggcaccatgatgcctgttcacctcaagcagggacattgctgcagaagtgctgacagcatgccaattcagctcagctgattacttgtatctttcaagcaatcttgattttcaggatcatagattgagggtgcatttttcagactttgccattgcttaatctaggttcatcattgtactctcagatcgtcaactctgtcgatcatatcaagggcttttatcctgtcgatctcaaagtcgatcacaggaagcagcctcctgattgatagcgtctctttccggttgccactgcttggtgaatggctattacttttgcttaacctgctttgcttattatgcctttccttagtgtcaaactcctggcttttgcttataccagggatgaatttcctgtacttgacatcccttagcatatcttgatcttcttgcgtcagaagaggtgatgaattgctgctgtttttgtttggagataatgtgattgaggcccctctttgtgtaggagaccgaacaggagacttgattggagacctttcaccatttgcagttttggataggctgataagatgatgaagccaaataacaagctcgaggatatatgcttcagtcttctccttgtcagcgtggtacagtgtctcaattcggatcaggtctatctgcccatttggcttgcagttcacatctgacctgttatttgcccactctccaacccaaccgaaaccatggtgagccctggtatggacagatcataaaaaaatcagtaacaaaaagggataagtggaagctctggctattttgcatgttatgaaggtagttaagattttgaattacttggtggtgttacttgcaatagggacaagccaccgcagggtcttctccatttcagccttgatttgagaaacagtaagctacacaaattcagcaaaagcttgc

SEQ ID NO: 116128 - DNA, 1623 bp, Zea Mays
ggcagacaccagctccgggactggctccggcactgtgggcagcaccgggtagttccgtgagaagcaggcgtcacagaactcatgtgcttcattgccgtagatgctgtggagcttgtcgagagagaggaaggcgagcgagtcgcagccaatggtcctcctcacaccctcgaggtccatcctgttggatatcagctcgccttcgctcggcgtgtcgatgccgtagaggcaggacccgacgactggggggctggagatgcgcatgtgcacctcgcgcgcgccggcatcgcggagcaggcgcacaatcttgctagaggtggtgccgcgcacgagcgagtcgtcgacgacgaccacgctcttgccggtaatgacgccgcgcacgggcgcgagtttgagcttgacggcaaggtcacggattgcctgcgatggctgtatgaagctgcggccgctgtagtgccaccggataagaccttgctggaactcgagtcccgacgcctgcgcgaagccgagcgccgcatagaaccccgagtcaggcacggggatgacgacgtccgcggtcggggcgggcgactcctcggcgagcgcgcggccgtacgcggtgcggcgctcgtggacggcgtgcccaaacacgacggagttgggaagggcgaagtagatgtgctcgaacacgcatgacttgcgcgggcgatgtgggacgaggcaggcgtaggacaccgacatgtcgcggcggtccacgaccaccacctccccgggctccacctcgcgctcataggtggcgtcgatgaggtcgagcgcgcaggtctctgacgagaacaccacggcgccgttggggcgtcggcccatcaccaggggccggaagccgaacggatcgcgcacggcaaaaagcttgtcggcagtcatgaacaacagcgagtacgcaccggcgaggcgctcgcaggcgtcgcagatgcgcgagagcagcgggcgcgagagcgaggttgagatgaggtgcaggatgacctccgtgtccgacgaggtgttgaagatggaaccctgcgcctcgagtttgttgcgcagcgcctggtagttcacgaggttgccgttgtgtgccacagccaactgcccgaatcggtacgcggcgaggaacggttgtacgttgcgcctcgaagaggcgccggcggttgagtagcgcacgtggccgatggcggcgtttccggggagcttggcgaggcgcgccggatcgcggaaaacgtccccgacaagacccaggtccgtcactgaattgagcttgccgtcggcgtccgacgcaacgatgcccgcgccctcctccccgcggtgctgcagcttctgcaggccgaggtagcagagcgacgacgcgtctgggtcgccaatgactccgaacacgccgcactcctctcggggatggtcgtcgccgtccgcgtcgaaggaaaacggcgtgacgcggtcagggagcagagctcgcgccggagcgagacccgcggcgcggtgccgcagctcgaactgcgagggcttgatggagcatttgagctgggagttgtgtcttgtggtaggcgccgcagaggctcggcggcggaggggagaggaaggcgtggaggccgtcgcggcggcggcggctgtggcggccat

SEQ ID NO: 116129 - DNA, 553 bp, Zea Mays
ccgaaacagaaggtaggatcagggcatccgtaagaagtagggcaaagatttcaaggaccaaatctgaacatgtcaaatgcttgtaccccaacagaaaaccagctttgagtcaatgtattataatacaaagaagaccacaagcagctacatcagatgagcagcaacactgccaaatccgtgtttgttttggctactattaaatcataaacggaccatgtcaacatcatgtcattctgcttaccattgaatgccttcttgaatgcaaatcaacatgtaaacaaagactcatcggaagacaggcaattggcatgaagtatgccctcactccgtcctaaattataagttttttccaactttgagggagagtcaaagcatcttaatgttgaccgaatttatataataaaacaataacatttatgatattaaataagtattattagatcttttttaatcatattttcatagtatgcctatttgtttgagattataatttgcccagattatataatctaacttattttgaactaagtgttagttcaaaataagttggatc

SEQ ID NO: 116130 - DNA, 143 bp, Zea Mays
aaattttttgaatttggaacgaattttgaaaaaaccggtggtttatcaaaaccgcaccccagcggtttcggtaaaccgaccggtttaccgcgcggtttttaccggttttgtaaaccatggtcagctcacgagccagatttgag

SEQ ID NO: 116131 - DNA, 1331 bp, Zea Mays
atgctgacggcctcatccatgatgccaacggcgatctcgtcgccgtcggcgtctcctgcccggctgatcctgttctacgtcgcgctctacctgctggctctggcgcaaggcttctacgggccatgtggggaagccttcggcgcggaccagttcacgcctagcgacgacgccaaccccagcgcgcccgcgttccggagctcctacttcaactggttccacttctccatatcctggggctacgccatcgcgtcggctgggctgagctacgtccaggacaacgcgggctggaccttggggttcggcgcgtgctggaccgcgatgctgctatgccttgccgtcttcttacttggcacgcggacataccgtgccaagcaacccgccgatggcggcacgttcgctgtgaccgtgcgggcgtgggccgccagggtcttccgtcgcaaggacgccactccaactgaaaggcttgttctaactccacagcctgagggcggcgggctcatagtcatagctaaactgctcccgatatggctgacgagcttagtcttcgcggccatcttctcgcaagtgtccactctgttcaccaagcaggccagcatattggacaggcaccttggcacggcgacgggcatcgttgtgccgcctgctgcgctccagtgcttgagcaacgtcaccttcatcgtcatgctccccttgtacgaccgcgtcatcgtgccgctcgccaggcgcctcaccgggcacgcctcgggcatcacgatgctccagcgcatcggcgccagcatggccacgtcctgcgtcgccatggccgtcgcggcgctcgtggaagtcaggcggctccgcgtggccagagacgcgggcctggtcgaccggccggacgaggctgtgccgatgagtttgtggtggatgattccgcagtatgttctcatcggcctcgccggtgtgctgggtcaggttgggctcgaggagttcttctacgaccaggtgcctgacactctccgcagcgtcgggctcgcgttgtgcctgagcatctttggggtgggaagctacgccagcagcatccttgtgtccgtcatcgactgggcgacgagaaggagaggcgacagctggttctctgacaatctcaaccgagcgcacctcgactacttctacgggctcctcgccgggctcgcggctctggaggtagccgcgttcttgcattttgcaaatcgatacgtctacacaaagaaagaagagctgtgaacccatgattattgaaactttgcaagtataaaaatactttgagcttatgttaaagaataggggtaacatcatagaatgtaattgtgatattctgg

SEQ ID NO: 116132 - DNA, 423 bp, Zea Mays
ttttctgatacaaaccttaatttgtcttttcgacgtacaatcatggggaataaattagtggaatggcacaacatgctaaacttgctaactgaggttactctgtctctgtctagagataaatttgtttgggacgatcaaaggaatggaatcttctcggtccaatctatgtaccatttgttgatgaatattcccaacaacgaacggaacaagaagctttggaaacttaagctccccttgaaaataaaagtttttttgtggaatttatgtcgtggagttattttcagatgtactcactggttaagattctggagaccgctacaaaaggaggaatcgcaacaacaaattctcgttgcttcgcacgttttggaagtggtggcgatggaagtcttcgcaaaccatggatggcgctcaaatacaagaatt

SEQ ID NO: 116133 - DNA, 2063 bp, Zea Mays
cataacatgattttcccttgagccttggtttgcatatatagctgaactcatctccatcattgtgttttttttttttcgagaaacactcactgacggcagtaatagccagtagggcgctggaataaatactccagccgttgctgcggccattagccacgagacgaattgaagccgcaaaaggttcgacgtgctcctatcgttgcggaggcgcgccgcggggatacgaatggagtccggcggcgccggcgagcttctgtccggacctgctgggtcgcccgtcacatccaaacccggcggtgggcgtggcggttggcgtgccgccctcttcatcatcggtaatcatgcagattgcaagtctccaaatttcctagttcgtccgcaggttttcatgcttcactgtcaccgttgctgttggctgttgctatgctaccatatatatatatgcagtgatggggttctttgagcgtattgggttcgtcggcgtgtcggccaacttgatcacgtacctcaccgggccactcggcatgtccacggctgccgcggccgccggcgtgaacgcgtggtccggaaccgtgcaggtgctaccgctcgtcggcgctctcgtcgctgattcgcggcttggccggtatcgagctatcctcgccgcctgcgtgctctatcttctgagcttgggaatgctaacagcctcatccatgatgctaaccgcgagctcgccgccgtcgccgtctcctgcccggctcaccctcttctatgtcgcgctctacctgctggctctggcgcaaggcttttttgggccatgcggggaagccttcggagcagaccagttcacgcctagcgacatcgacgacctcagcgcgcccacactccggagctcatacttcaactggttccacttctccatgtcctggggctacgccatcgcgacggctgggctgagctacgtccaggacaacgccggctggaccttggggttcggcgcgtgctggaccgccatggtgctatgccttgtcgtcttcttacttggcacgcgaacgtaccgtgccgccaagcaacccatcgatggcgtgcaggcgtgggtcgcgagggtcttccgtcggagtggcaccactccaactgatgaaaggctgcttctagctccacaacctgagggtgagggcggactcatagctaagctgctcccgatatggttgacgagcttagtcttcgcagccatctactcgcagacgtccactctgttcaccaagcaagccagcacattggacaggcaccttggcacggagacgggtctcgtcgtgccgcccgcggcgctccagtgcttgatcgacgtcaccttcatcgtcatgatccccttatacgaccgcgtcattgtgcccttggcgaggcgcctcacagggcacgcctcgggcatcacgatgctccagcgcatcggcgccagcatggccacgtcctgtgtcgccatggccgtcgcggcgctggtggaagtcaggcggctccgcgtggccagagacgcgggcctggtcgaccggccggacgtggctctgccgatgagcctgtggtggatgattccgcagtacgttctcatgggccttgccgcggtgctgggtatggttggcctcgaggagttcttctacgaccagatgcccgacgctctccgcagcgtcggtctcgcgctgtgcctgagcatctttggggtgggaagctacgccagcagcatgcttgtgtccgtcatcgactgggcgacgagggtcaaaggggagagctggttctctgacaatctcaaccgagcccacctcgactacttctactggctcctggcagggctcgcggctctggaggtagccgtcttcttgcattttgcaaatcgatacgtctacacaaaaaaagccgagctgtgaatctgcaattcttgaaactttacaagtataaaaaatacttcgcttatgttaaaagaacatgatgttggattttagttgggcctggcccaattttatttaattaggacaaaaaaatcctaaggcatggacaaaatgctggtgaaataaagtgtttagtctcacacggaa

SEQ ID NO: 116134 - DNA, 2043 bp, Zea Mays
cagggaaaaaaaagaaacaaatgtcatgggtgtcctgtacccccctaccccgttgttggaaagtcgttcggcgccatgcgagccggtctgatcctcttcgccagcggcaccagtatatggagatgatccgcgcagcctgtcgccacacctgacaacacacacacacacacacgtagctgtggcgcaggggggcgcggcaatggacgcaaacactctcctcctgccctgctccgacggcgccgtcgccggcgcggtggacttccgcgggcgccccgcgtcccggtccggcaccggccgatggtccgccgcgatgttcgtcctcggggtggagatagcggagaggttcgcgtaccacggggtgtcggcgaacctgatcagctacctgacggggccgctcggggaatccaccgcgggcgcggcggctgcgatcaacgcgtggagcggggtggcgaccatgctgccgctgctgatggcgtgtgtggccgacgcctggctcgggcggtaccgcaccatcgtcctcgcctccctcctcttcgtcgtgagcatgggcatgctgaccgtctccgcgctcccggcgttccaccacgacggctgcagcagctacgcctccgcctccagaccgctggcctgctccccgccccccgtgcaagtgggcgtcttctacgtctccctgtacctggtggcgctcgcggaggccgggcacaagccctgcgcgcaggcgttcggcgcggaccagttcgaccagaacgacccaaaggagtccgcgtccaggagctccttcttcaactggtggtacttcggcatgtgctccggcaccgccgtcaccaccatggtgtccagctacatccaggacaacgtcggctggggcctcggcttcggcgtcccctgcctcgtcatgctcttcgcgctcctcatgttcttgctcggtaccaggaattaccgctactacacgtatactgaatcgagcccatttgctcgcctcgccacagctttcgttgcgctcatcaaaggctccaaatcgagacaacatgacggcactcttgcgagcgacgacgccgggcaccgtgaagaagtgaaaggcgtgctgcgcctgttccccatctgggcgacgtgcatcatctacgccgtcatcttctcgcagtcgtccacgttcttcacgaagcaggccgcgacgctggaccggcgggtcggctcgactctgcgcgtgccgccggcggcgctgcagacgttcatcagcgtgaccatcatggccttcatcccggtctacgaccgcgcgttcgtgccccttgcgcggcggcttacgcgcctctcgtccggtatcaccatgctgcagcggatcggcacggggctcgtcctggccctggttgccatggtcgtggcggcgctggtggagatgcggcggctcgccgtggcgagggacgccgggctcgtggaccagcccaaggcggcgctgccgatgagcctgtggtggatggtcccgcagtacgtgctgttcgggctctcggacgtgttcgccatgatcggcctgcaggagttcttctacgaccaggtccccgacgcgctgcgcagcctcgggctggccttctttctcagcatcttcggcgtaggacacttgttcagcagcttcatcatctccgccatcgacggtgccaccaagaagagcggagcgagctggttctccaacaacctcaatcgcgcgcacctcgactacttctactggctgctcgccgggctctgcgccgtggagttggctgctttcatcatcgtctcgcgcgtttacgtgtacaagaagaggatgtctcacgacaataatgctgctgccatgtagatcagtagacgtgacttttaccgtgctgtgaatggcgatacaatatgattgaggtgtagagaaagagaacgaaaaaaccttttgtacgctaaacctggacactaaactgacttttacggacggtcggcaatcggcataatagtgccggtttgttagcaaccggcagtgctagcgtttattgggaaaaaaaattctatgcaggagccctatacaaa

SEQ ID NO: 116135 - DNA, 1485 bp, Zea Mays
aactcaaacaacgtcagtcccactgctgctaaagctgagcccccagacccccagcagctagcagccgcctcctcgtcaggcccttcctccttcaccctcgccaaacccgcctcctccggtccgaactccgtctgcttcatctgagcgtccgggaggacaaaacacgcggcgaggaccaggatggcgattgtgcgggaggaggcagtggacacgtccatcagcccaagggccgggatggatgcaattaggaatggttatacaagatacactcctaatgctgggactttggagctgaggaaggctatttgtactaaactccaggaggagaacggggtatcctacctcccagatgaggtgctggtgagcaatggagctaagcaatgcatcacacaagctgtgcttgcagtttgctcacctggtgatgaggttttgattccagccccatattgggtcagttatcctgagatggctagactggctgatgcgactccagtgattcttcctacaaacatatcagagaatttcttgttaaggccagagttgcttaccgacaagatcaatgagaaatcgaggctcttaattctctgctctccatctaatccaacagggtcagtatatccaaaggagttgcttgagaaaatagctgatatagtcaagaagcatccgaggcttttggttttatctgatgaaatttatgagcatattatctatcagcctgcaaaacacacaagctttgcttcactacctggaatgtgggaaagaacattaactgtaaatggtttttctaaggcttttgcaatgacgggttggcgtcttggttaccttgcagcccctaaacattttgttgcagcatgtggaaagatccaaagccagttcacctcaggtgccagcagcatatcacagaaggcaggggttgccgctctgaatcttggctatgctggtggtgaagcagtatcaactatggtcaaagcattccaggaacgccgtgactatcttgtgaaaaatttcaaggaactgcctggtgtgaaaatatcagaacctcagggtgccttttatttgttcattgacttcagcgcctactatgggtctgaagtagaggggtttggcactatcaagaattccgagtccctttgcatcttcctattagagaaagcacaggttgcccttgtccctggtgacgcatttggggatgacaagtgcattcgtatttcatatgctgcatccctaactacacttcagactgcgatgtcaaaattaaaggaagctgttgctctgctcaagccctgtgttgctgcgtagcaagatcactaaattgcaataaggagtgaccaaggcacctttaactaacctttcacattattttaaacacaatgttcgaattgttgggcagacttggtctgttgtttttatatgtaacattatggatttatgatgtgtacatgcaaataaaaatgttttgtttagaaaaggctaggttgtggtact

SEQ ID NO: 116136 - DNA, 1627 bp, Zea Mays
aactcaaacaacgtcagtcccactgctgctaaagctgagcccccagacccccagcagctagcagccgcctcctcgtcaggcccttcctccttcaccctcgccaaacccgcctcctccggtccgaactccgtctgcttcatctgagcgtccgggaggacaaaacacgcggcgaggaccaggatggcgattgtgcgggaggaggcagtggacacgtccatcagcccaagggtgagcgcgctgcggccgtccaaaaccatggccatcaccgatcaggccatggcgctgcggcaggccggcgtgccggttatcggtctagccgcgggggagccagacttcgacacgccgcccgcgatcgcggaggccgggatggatgcaattaggaatggttatacaagatacactcctaatgctgggactttggagctgaggaaggctatttgtactaaactccagggtgtgtggataggagaacggggtatcctacctcccagatgaggtgctggtgagcaatggagctaagcaatgcatcacacaagctgtgcttgcagtttgctcacctggtgatgaggttttgattccagccccatattgggtcagttatcctgagatggctagactggctgatgcgactccagtgattcttcctacaaacatatcagagaatttcttgttaaggccagagttgcttaccgacaagatcaatgagaaatcgaggctcttaattctctgctctccatctaatccaacagggtcagtatatccaaaggagttgcttgagaaaatagctgatatagtcaagaagcatccgaggcttttggttttatctgatgaaatttatgagcatattatctatcagcctgcaaaacacacaagctttgcttcactacctggaatgtgggaaagaacattaactgtaaatggtttttctaaggcttttgcaatgacgggttggcgtcttggttaccttgcagcccctaaacattttgttgcagcatgtggaaagatccaaagccagttcacctcaggtgccagcagcatatcacagaaggcaggggttgccgctctgaatcttggctatgctggtggtgaagcagtatcaactatggtcaaagcattccaggaacgccgtgactatcttgtgaaaaatttcaaggaactgcctggtgtgaaaatatcagaacctcagggtgccttttatttgttcattgacttcagcgcctactatgggtctgaagtagaggggtttggcactatcaagaattccgagtccctttgcatcttcctattagagaaagcacaggttgcccttgtccctggtgacgcatttggggatgacaagtgcattcgtatttcatatgctgcatccctaactacacttcagactgcgatgtcaaaattaaaggaagctgttgctctgctcaagccctgtgttgctgcgtagcaagatcactaaattgcaataaggagtgaccaaggcacctttaactaacctttcacattattttaaacacaatgttcgaattgttgggcagacttggtctgttgtttttatatgtaacattatggatttatgatgtgtacatgcaaataaaaatgttttgtttagaaaaggctaggttgtggtact

SEQ ID NO: 116137 - DNA, 1648 bp, Zea Mays
tctgacgattgtacactactcgtcagatgacaactcaaacaacgtcagtcccactgctgctaaagctgagcccccagacccccagcagctagcagccgcctcctcgtcaggcccttcctccttcaccctcgccaaacccgcctcctccggtccgaactccgtctgcttcatctgagcgtccgggaggacaaaacacgcggcgaggaccaggatggcgattgtgcgggaggaggcagtggacacgtccatcagcccaagggtgagcgcgctgcggccgtccaaaaccatggccatcaccgatcaggccatggcgctgcggcaggccggcgtgccggttatcggtctagccgcgggggagccagacttcgacacgccgcccgcgatcgcggaggccgggatggatgcaattaggaatggttatacaagatacactcctaatgctgggactttggagctgaggaaggctatttgtactaaactccaggaggagaacggggtatcctacctcccagatgaggtgctggtgagcaatggagctaagcaatgcatcacacaagctgtgcttgcagtttgctcacctggtgatgaggttttgattccagccccatattgggtcagttatcctgagatggctagactggctgatgcgactccagtgattcttcctacaaacatatcagagaatttcttgttaaggccagagttgcttaccgacaagatcaatgagaaatcgaggctcttaattctctgctctccatctaatccaacagggtcagtatatccaaaggagttgcttgagaaaatagctgatatagtcaagaagcatccgaggcttttggttttatctgatgaaatttatgagcatattatctatcagcctgcaaaacacacaagctttgcttcactacctggaatgtgggaaagaacattaactgtaaatggtttttctaaggcttttgcaatgacgggttggcgtcttggttaccttgcagcccctaaacattttgttgcagcatgtggaaagatccaaagccagttcacctcaggtgccagcagcatatcacagaaggcaggggttgccgctctgaatcttggctatgctggtggtgaagcagtatcaactatggtcaaagcattccaggaacgccgtgactatcttgtgaaaaatttcaaggaactgcctggtgtgaaaatatcagaacctcagggtgccttttatttgttcattgacttcagcgcctactatgggtctgaagtagaggggtttggcactatcaagaattccgagtccctttgcatcttcctattagagaaagcacaggttgcccttgtccctggtgacgcatttggggatgacaagtgcattcgtatttcatatgctgcatccctaactacacttcagactgcgatgtcaaaattaaaggaagctgttgctctgctcaagccctgtgttgctgcgtagcaagatcactaaattgcaataaggagtgaccaaggcacctttaactaacctttcacattattttaaacacaatgttcgaattgttgggcagacttggtctgttgtttttatatgtaacattatggatttatgatgtgtacatgcaaataaaaatgttttgtttagaaaaggctaggttgtggtact

SEQ ID NO: 116138 - DNA, 2173 bp, Zea Mays
atggcgagtctgacctcatggacccacaccaaacgggatagtagaagcagctggagcacgtcacggcgccgcgctgggttggtgggggcgcaccgcagtccgcaccggacctcgagaggggaggagaggagatgggaggggtcaacgaggtgggagcagacaggaaggctcggggctccttcctcctataaacccaccgcacctgccttagaggctcccattttctcggccgggagccgcaattccatcctgctgctagagttacatactcacccaatagaacaattctatgcccggtgattgtacctcctgaagtagaagagcatactgaagcagaactcgagtggtgttggatcgaaatggaaggcgggatgtcaagtttggaagccgccatgaaagcttcttcatcgatggcaagcagcatggcaaggaatgctgaccctaaccaacagactctccgccccaatttagtggagcagttctattttccaagacctggtcaatctttgccaggcattcctccattttttgggcctccctctagtttgtatcttcctaatgacaatgaagctaaatttggcaacaactttgaatcaaatccttcacagaatacagattggaacccacaggcaatagtgagcaacctaaccttccttgagcagaagatcaagcaggtaaaggatattgtgcagtccatgagtaaccgagagaaccaagtagctggtggttcctgtgaggtagctgcaaagcagcagctcataaccgctgacctcactagcattataatccagctcatatctactgcgggttcgctgctcccttcaatgaagaacccacttcttagcagcaatccagcagtcaggcagcttggcaacactcttggttctcctacgggctttggcatgaatgctaatcagcgaccaagcgtagacagcaagaccgatattcctgacacaggaaaaacttctgattatgaggagctgatgaatacccttaatactagtcaagctgaaagagatgagctgatcaaatgcccaaatccctgtggtggggaagggtctgaactgactccgatggaggaccatgatgtgaaggagagtgacgatggtggtgagggagagaatctcccccctggttcatatgtaatcttgcaactggaaaaggaggagattttagcaccacatactcatttctgcttgatctgtggtaagggtttcaaaagagatgctaacctaaggatgcacatgaggggccatggagatgagtacaagactccagctgctcttgccaaacccacaaaagattatggtgcagatcatgcaccggttacaaggtactcatgcccatttgtgggttgcaaacggaacaaggagcacaggaagttccagcctctcaaaacaatcttgtgtgtgaagaaccattacaagagaagccactgtgacaagagctacacctgcagccgttgcaacaccaagaagttctctgtcatcgcggacttgaagactcatgagaagcactgtggtcgtgacaagtggctctgttcttgcggaacgaccttctccaggaaggacaagctttttggacatgttgcgcttttccaaggccacacacctgcgctccccgtggaagacggggatgtaccagaaggttcagagcagcctcaggacggcgaaccaacgaatgaaatggcgaggagcatggtgtatagcttcccgtgtagctcgtctgatggtttattgaacctcgacatgaaaatggctgatgacgtgcgtggttatctctcgccgctgagctttgataattgctttggcgcgtttgacgacttcactcgccctggatttgacatctctgagaaccccttctccttcccgccttcaggatcttgcagttatgggcagcagaacggtgatagctgatggatgccgccatcgatgatgactacaccgcggcactgtcaacctttatgtatgttgttgcatgatgctagtttggttcatcctctgttcaagagccattttaggctatgcctttaactttcttaagtgtacctccgtttgtggtcattaataatgatcaaggacttctagatagccccaattttctgcatacatatgcaaggattgctggttcatttggttgaatcggtgcgatgcctctagcgctgacaatatgt

SEQ ID NO: 116139 - DNA, 2346 bp, Zea Mays
aggggaccaggaaagcgctctttgcatctccgccggtccgtccacggtgtgaatcgcgtggtccgccgaacctcagaatagccgctcgaaccgcttcataactcccaccgcaccggtcgccccggcgcgccggcgaggtgacctactgacctcgacgagcgcgcgacgttgaccggggcgtgcatccggccgcatcttgtcctcgttccttacgcagaggagcgccgctccaaaatcgcagaacgccaaggcgggcgtagcgaaggatgtcggaggccgtcgccgcaggcgagtcgcccgtcgagctgctgctccgcgcggcggcgatggtgcccgcagagcgctacgcgctggccgccatcatcgtcgtgtccgtctttctgtaccgcttcctcgagctccatgttatcggcgacatcctccgcggcttccggggcggccgcgtcgagctcaccttccaccccgcctcggagatctaccaccgcgtcgcgtccaagtgccgcttgctccacggcaggtatctggcgacaccatggctggcgagcccgcatttgcagacattgttcctgggcatttacgggacgccgccttcattcacatacaagagacagttgtacactgttcgtgatggtggaaccattgctttggattggctgttcgcatctgatttggaagttgcagatggattcatttcgaaagacgcttcaacaccccttgtagttgtggttcctggattaactagcgattctgctgctgcttatgtaaaacacttggtttactccatggcaagcaaaggatggaatgttgttgtaagcaaccacagaggtcttggtggtgtgtccattacttcagattgcttctacaatggtggttggacagaagatgtccgagaggtcattacacacctgcatcacagatatccgaaaaccacactgttttgcattggtacaagcataggtgccaatattgtggtcaagtatcttggagaagaaggcgagaatactcctatagcgggtgcagtatctatttgttctccatgggatctgttgataggtgacagatttatttcccgcaagcttgtacagcgtatttacgacaaagcacttgcaattggtctgaagggctatgcaaaattacatcaacctgtcttggcccgacttgcaaattgggaaggtattaaaaagtcacgatctatccgagagtttgaccaccatgctacttgtgttgtctcaagatatgagacagtggatacttactatcgccggtgcagtagtgctagttacgtcggaaatgtgtcagttcccttgctttgtatcaatgctttggatgatcctctttgcacaagggaggctattccttgggatgaatgcagggccaataagaacattgttttagcaactactccaaatggtggtcatcttgcattctttcaaggactaactgcgcggagactatggtgggttggagctacttctgagttcctttctgctcttcatgacagctcctacatgcataggcagaaggcaaatgatcatgttttgctctcgtctttggaatcctccattgataagagtccgtatgttaatctcatggaagatggaatggtagctgcggtaacaaaagatggccctagcaatgacgggtcacctttgaaccatgcagctgatgaacaattaagtaacgaggcgggcggtggacaacagaatgtggtatctgcattgaaccataatgaaaactccattggagtgggaaacgacagccctgcagagccagtaaaacagcaaggtgatgacatccacagcaataagcttcatgagataattgctcctgtcaagagatctatgagccaactgactcgataccaagggaggtcagtctggttgcttgcctacattgcttttgtaacatcctggccgctgcttggctccctagctttcatcaccttccggaaaaagtccaggaatccgttgcgagctaaatgaatcatacttatattatgttattacaattacatcatgcaacatcctctgagctacgaaggccatttttccccgggtcgtcacagctcctgtgtacagtatcatcaccgatcatcagcaaacattgggggcgcctggataaactgatactttgtaatttgtattgtatttacaacaaaataatacgcaggataagcatctgtgtaattttactcggtaaatctggctggatttgctgtttggcatctgtcgagcttaacattatttttaatccaaaggatgcgaaacgtgtggtgaatgaacggtaaaaactatcagatagttgaggcgggaattttaattttaatttattactacttttttgttg

SEQ ID NO: 116140 - DNA, 1787 bp, Zea Mays
gcttccgcagttccgcttcaaaattccggtgaaaaaggaagacgacagctccagacccctaggcccctagccatggccggagaggcgggaaaagacccccaagcgtggctagccgccaacgagacggcgtcggccttcctctcccgttcactctcctcgcggccccccatcaccctcccgccaccactgcaccgcgcgcctctccgcccgggcaacgtcgtcgagatcgccggcccgtccaactctggcaagtcccacctcctcctcatggctgcagtgcagtgcatattaccaaaggagtgggagggaatctactttggggggctggggagggcggtcatgtacttggacttggactgccgatttgatgtgctacggctggctcaaattctgaggaatcgtattgcagagggctgccgtttagcacaccttagaaatggagaccctgaaaatgatgtcactaaagatgagtttcagtgttctcttcaaaatacactgttttctgattgtatgcagcgcttcttgtatgctcgatgttgcaaaagtcctgaattcatagatgctttgaagactgtacagtctcaatcaaggagggaagtgtccggcgctggtatatattttgttatgatagacagcattggtgcgttctactggatagatcgtggttctcaagcttcacgagagaataaagggaaaacactgcaaagcatttttgaaagtgttgtccacgagttacgcaagattttgcaacttgaacctgcattggttttggtcacaaaggcatccgtttatggggaaggcaccacaacagcaaatgacttcaatcgggattcttcaaaatacatgctggaggatcctagcggtttgggatattcaagacgggaggaagaaagaactctctctaatcgggaatatatgccatcaatatggcaggtctgataaattgacactgaggttcaatctttattgatgagtactcattcttttgtcacacacaggataaaccttcaagtagaagcagaagttccctctgtgctggaaagtgaggtgcttcctttgcatacttctgagtgggtgcaaccttgcctcaaaatgaaggagaagttttctattatggatgatggtgttaaccttatccactgaatttaccagtctggcattctgtgatgaacatgtcgaacctcactgaattgttgtgatctgattaagaaaacagtatgcccacagcacgcctacaggatgttatgtggcagtgtctctatcttggttcttttattctttggcatggcacacatacagaacacagaagcatagaacgtgtgatggctgagtactgtatgattttaaagtttatccaatagtaccaaaaaatggaaactgttctcacgttcaagaattcttaacatagtggagctgagtaacctctactgatgtaagtctcttatttttaattattttctatttgtgcgtgtgtaattcgctgcaaggtgagacgtgagtgactggtgttttgtatgggggtcaatcccccttttttcccttcttaatataattatacatggcttctgtgtgatggagattttttccatttgtgggctttacttgccaatttcaaattgtccagcttttgtacctactttcagtgtgcttttatattgagcttgttcgctgcggcttgctgcggctgcaatccggctgcggctgcggcttctacagtatttttctctctatggattgcagctgcagcagtccaaacagctgcaacagtgtcggcttgtagccagccg

SEQ ID NO: 116141 - DNA, 1739 bp, Zea Mays
gcttccgcagttccgcttcaaaattccggtgaaaaaggaagacgacagctccagacccctaggcccctagccatggccggagaggcgggaaaagacccccaagcgtggctagccgccaacgagacggcgtcggccttcctctcccgttcactctcctcgcggccccccatcaccctcccgccaccactgcaccgcgcgcctctccgcccgggcaacgtcgtcgagatcgccggcccgtccaactctggcaagtcccacctcctcctcatggctgcagtgcagtgcatattaccaaaggagtgggagggaatctactttggggggctggggagggcggtcatgtacttggacttggactgccgatttgatgtgctacggctggctcaaattctgaggaatcgtattgcagagggctgccgtttagcacaccttagaaatggagaccctgaaaatgatgtcactaaagatgagtttcagtgttctcttcaaaatacactgttttctgattgtatgcagcgcttcttgtatgctcgatgttgcaaaagtcctgaattcatagatgctttgaagactgtacagtctcaatcaaggagggaagtgtccggcgctggtatatattttgttatgatagacagcattggtgcgttctactggatagatcgtggttctcaagcttcacgagagaataaagggaaaacactgcaaagcatttttgaaagtgttgtccacgagttacgcaagattttgcaacttgaacctgcattggttttggtcacaaaggcatccgtttatggggaaggcaccacaacagcaaatgacttcaatcgggattcttcaaaatacatgctggaggatcctagcggtttgggatattcaagacgggaggaagaaagaactctctctaatcgggaatatatgccatcaatatggcagtcttttgtcacacacaggataaaccttcaagtagaagcagaagttccctctgtgctggaaagtgaggtgcttcctttgcatacttctgagtgggtgcaaccttgcctcaaaatgaaggagaagttttctattatggatgatggtgttaaccttatccactgaatttaccagtctggcattctgtgatgaacatgtcgaacctcactgaattgttgtgatctgattaagaaaacagtatgcccacagcacgcctacaggatgttatgtggcagtgtctctatcttggttcttttattctttggcatggcacacatacagaacacagaagcatagaacgtgtgatggctgagtactgtatgattttaaagtttatccaatagtaccaaaaaatggaaactgttctcacgttcaagaattcttaacatagtggagctgagtaacctctactgatgtaagtctcttatttttaattattttctatttgtgcgtgtgtaattcgctgcaaggtgagacgtgagtgactggtgttttgtatgggggtcaatcccccttttttcccttcttaatataattatacatggcttctgtgtgatggagattttttccatttgtgggctttacttgccaatttcaaattgtccagcttttgtacctactttcagtgtgcttttatattgagcttgttcgctgcggcttgctgcggctgcaatccggctgcggctgcggcttctacagtatttttctctctatggattgcagctgcagcagtccaaacagctgcaacagtgtcggcttgtagccagccg

SEQ ID NO: 116142 - DNA, 1153 bp, Zea Mays
tccggtgaaaaaggaagacgacagctccagacccctaggcccctagccatggccggagaggcgggaaaagacccccaagcgtggctagccgccaacgagacggcgtcggccttcctctcccgttcactctcctcgcggccccccatcaccctcccgccaccactgcaccgcgcgcctctccgcccgggcaacgtcgtcgagatcgccggcccgtccaactctggcaagtcccacctcctcctcatggctgcagtgcagtgcatattaccaaaggagtgggagggaatctactttggggggctggggagggcggtcatgtacttggacttggactgccgatttgatgtgctacggctggctcaaattctgaggaatcgtattgcagagggctgccgtttagcacaccttagaaatggagaccctgaaaatgatgtcactaaagatgagtttcagtgttctcttcaaaatacactgttttctgattgtatgcagcgcttcttgtatgctcgatgttgcaaaagtcctgaattcatagatgctttgaagactgtacagtctcaatcaaggagggaagtgtccggcgctggtatatattttgttatgatagacagcattggtgcgttctactggatagatcgtggttctcaagcttcacgagagaataaagggaaaacactgcaaagcatttttgaaagtgttgtccacgagttacgcaagattttgcaacttgaacctgcattggttttggtcacaaaggcatccgtttatggggaaggcaccacaacagcaaatgacttcaatcgggattcttcaaaatacatgctggaggatcctagcggtttgggatattcaagacgggaggaagaaagaactctctctaatcgggaatatatgccatcaatatggcagtcttttgtcacacacaggataaaccttcaagtagaagcagaagttccctctgtgctggaaagtgaggtgcttcctttgcatacttctgagtgggtgcaaccttgcctcaaaatgaaggagaagttttctattatggatgtaagattttggtattcatattcctttggcctgctgcaaacatagcagtttactaatacaatttgaacttttttgaatgataccgtgtttgtgttaattgagaata

SEQ ID NO: 116143 - DNA, 2342 bp, Zea Mays
gcgtccgccccttgccccctccctctccgtgtctccgattctggatctgcccatgccgtaacccgcaggctcccggcatctcgctcttgcctccaaaattcaccttcgccgattgccgtcgtgggccgccgcgatggcgttgcggacgcctcgtaccacctccgtcgcattctccgctgactcccccctcggcggcgtcccaatacgctcctcaacagcctgctccgttcccacgccacctcctctcgctccgctgcgaccaccgaggaccaccagagcgggacgccgcggaactcgtcggccacgtcctggccgtcgcgcatgctgacgacgaggctgttgccctcccgggcgccctcggcgcggagctcgcacgcgtcctgcgagcgcgcggcgccgctgaggcaccgggcgcgccggcggaggaacaagttgaagtaggtccggaacagaggacagggagggacctaaaattcaagcccaaaggaccaaagcccgaagtttcttttcttccccgcaaagaaagaaggcaagagttctcggcttctcgcaagtcgcgacagagaaagaggcggagttgcggagaagatgcagagcagcagcatgaagagggagatcagcgaggcccacgacaccattcgcttcggcatcaacgccggcgtcaaagcggacctcgccccgccgcacccgaatgaaatccagaaatcatttcttcgttctaaattgaaagtctagaaataggtgtttatagattcatcgcgacacgaattcaccagaaaaggttacaagagaaatgcagagatttattctatggagaaagcatcagggcattctgctttgcgtcacaaagtttcaaacccagcaaaacccccagtcgatatatcagataggatgattggtgataccaaaggaagcaaactcaaacacacaaagtttcagaagcacagctactgcttgctccctcaggcgaccttgacctcgatggtcttgggcttcttgggctccggcgggggcagcttctcgacggtcaccgtgagcacgccgtccctgcacacggtgtcgcatcgggcggctcgacgaggcggacaaagccggtggcagaccatgggtgcaatgggtgcagagacttaggtggatggttctaaatgttcacgacaaaaaaatgtgtggcgcatgggtttctgtcctgagggtgcgcagatcggtcgccattagaaagatgcagcttcaactactttggaccaggtgcaaagtcatggcagttctgatagggcaccctacacaaatctggagtttgaacacacgacaggtgatatgcttatcttttgtggatggactgttcgcttggcttttgctgattgaattggagctgcacttgtagtttggtaacgtttatatacataactatgcggattgcgttagctagaatatgtcttccagtacctgggtgacaatgggctctaaattttagagtgttgtagatttgttttgttgcaaatgtggcatggcatggcttggcttgcagcttcgagtactggtcgttcgagatccttgtgctgtttgcagggctgatgcccgactctcatctcagcacttccatcattgcaatgtgccaaaacaccgaagccatatcatacatgatcacctatggcttcgccgctgtcatcagcacaagggtgtccaacgagctgggagcccggaacatcgccaacgccaggaaggcgctcactgtgtcgctggcgctgtccctgatgctgggggtggcgttcctgctgctcctgggcctcggccacgacctctgggtgcgcctcttcatcaccagcgaggccgtggtcagcgccttcgcctccatgacgccgctgctcatcggctccgtcgtgctggactccacgcaggggtactctgcggcgtcgccaggggctacgggtggcagcacctggcggcgtggaccaacctggtggccttctatgtcatcggcttgccgctcgccatcctcttaggattcacgctcgccttccaaaccaaggggctgtggatggggcagatatgcagcctcctctgccagaactgcgtcctcttttttatcaccctgcgaaccaactggcaggagttagacctgaccatattcaacaaggacaacgattttgtctgctaggaatctagaaagagtttttcttttcttttttgccatgtgctgttgctgaaacattgaaccatcagcatcaggcttcgacagagctgtctgatgtttgttcatcaattcatcaccagtgtaacactacagattgtaacatttggaatctcaaggataggaattaaaaatgttctgatacaccaatata

SEQ ID NO: 116144 - DNA, 2337 bp, Zea Mays
gcgtccgccccttgccccctccctctccgtgtctccgattctggatctgcccatgccgtaacccgcaggctcccggcatctcgctcttgcctccaaaattcaccttcgccgattgccgtcgtgggccgccgcgatggcgttgcggacgcctcgtaccacctccgtcgcattctccgctgactcccccctcggcggcgtcccaatacgctcctcaacagcctgctccgttcccacgccacctcctctcgctccgctgcgaccaccgaggaccaccagagcgggacgccgcggaactcgtcggccacgtcctggccgtcgcgcatgctgacgacgaggctgttgccctcccgggcgccctcggcgcggagctcgcacgcgtcctgcgagcgcgcggcgccgctgaggcaccgggcgcgccggcggaggaacaagttgaagtaggtccggaacagaggacagggagggacctaaaattcaagcccaaaggaccaaagcccgaagtttcttttcttccccgcaaagaaagaaggcaagagttctcggcttctcgcaagtcgcgacagagaaagaggcggagttgcggagaagatgcagagcagcagcatgaagagggagatcagcgaggcccacgacaccattcgcttcggcatcaacgccggcgtcaaagcggacctcgccccgccgcacccgaatgaaatccagaaatcatttcttcgttctaaatttctagaaataggtgtttatagattcatcgcgacacgaattcaccagaaaaggttacaagagaaatgcagagatttattctatggagaaagcatcagggcattctgctttgcgtcacaaagtttcaaacccagcaaaacccccagtcgatatatcagataggatgattggtgataccaaaggaagcaaactcaaacacacaaagtttcagaagcacagctactgcttgctccctcaggcgaccttgacctcgatggtcttgggcttcttgggctccggcgggggcagcttctcgacggtcaccgtgagcacgccgtccctgcacacggtgtcgcatcgggcggctcgacgaggcggacaaagccggtggcagaccatgggtgcaatgggtgcagagacttaggtggatggttctaaatgttcacgacaaaaaaatgtgtggcgcatgggtttctgtcctgagggtgcgcagatcggtcgccattagaaagatgcagcttcaactactttggaccaggtgcaaagtcatggcagttctgatagggcaccctacacaaatctggagtttgaacacacgacaggtgatatgcttatcttttgtggatggactgttcgcttggcttttgctgattgaattggagctgcacttgtagtttggtaacgtttatatacataactatgcggattgcgttagctagaatatgtcttccagtacctgggtgacaatgggctctaaattttagagtgttgtagatttgttttgttgcaaatgtggcatggcatggcttggcttgcagcttcgagtactggtcgttcgagatccttgtgctgtttgcagggctgatgcccgactctcatctcagcacttccatcattgcaatgtgccaaaacaccgaagccatatcatacatgatcacctatggcttcgccgctgtcatcagcacaagggtgtccaacgagctgggagcccggaacatcgccaacgccaggaaggcgctcactgtgtcgctggcgctgtccctgatgctgggggtggcgttcctgctgctcctgggcctcggccacgacctctgggtgcgcctcttcatcaccagcgaggccgtggtcagcgccttcgcctccatgacgccgctgctcatcggctccgtcgtgctggactccacgcaggggtactctgcggcgtcgccaggggctacgggtggcagcacctggcggcgtggaccaacctggtggccttctatgtcatcggcttgccgctcgccatcctcttaggattcacgctcgccttccaaaccaaggggctgtggatggggcagatatgcagcctcctctgccagaactgcgtcctcttttttatcaccctgcgaaccaactggcaggagttagacctgaccatattcaacaaggacaacgattttgtctgctaggaatctagaaagagtttttcttttcttttttgccatgtgctgttgctgaaacattgaaccatcagcatcaggcttcgacagagctgtctgatgtttgttcatcaattcatcaccagtgtaacactacagattgtaacatttggaatctcaaggataggaattaaaaatgttctgatacaccaatata

SEQ ID NO: 116145 - DNA, 2249 bp, Zea Mays
gcgtccgccccttgccccctccctctccgtgtctccgattctggatctgcccatgccgtaacccgcaggctcccggcatctcgctcttgcctccaaaattcaccttcgccgattgccgtcgtgggccgccgcgatggcgttgcggacgcctcgtaccacctccgtcgcattctccgctgactcccccctcggcggcgtcccaatacgctcctcaacagcctgctccgttcccacgccacctcctctcgctccgctgcgaccaccgaggaccaccagagcgggacgccgcggaactcgtcggccacgtcctggccgtcgcgcatgctgacgacgaggctgttgccctcccgggcgccctcggcgcggagctcgcacgcgtcctgcgagcgcgcggcgccgctgaggcaccgggcgcgccggcggaggaacaagttgaagtaggtccggaacagaggacagggagggacctaaaattcaagcccaaaggaccaaagcccgaagtttcttttcttccccgcaaagaaagaaggcaagagttctcggcttctcgcaagtcgcgacagagaaagaggcggagttgcggagaagatgcagagcagcagcatgaagagggagatcagcgaggcccacgacaccattcgcttcggcatcaacgccggcgtcaaagcggacctcgccccgccgcacccgaatgaaatccagaaatcatttcttcgttctaaattgaaagtctagaaataggtgtttatagattcatcgcgacacgaattcaccagaaaaggttacaagagaaatgcagagatttattctatggagaaagcatcagggcattctgctttgcgtcacaaagtttcaaacccagcaaaacccccagtcgatatatcagataggatgattggtgataccaaaggaagcaaactcaaacacacaaagtttcagaagcacagctactgcttgctccctcaggcgaccttgacctcgatggtcttgggcttcttgggctccggcgggggcagcttctcgacggtcaccgtgagcacgccgtccctgcacacggtgtcgcatcgggcggctcgacgaggcggacaaagccggtggcagaccatgggtgcaatgggtgcagagacttaggtggatggttctaaatgttcacgacaaaaaaatgtgtggcgcatgggtttctgtcctgagggtgcgcagatcggtcgccattagaaagatgcagcttcaactactttggaccaggtgcaaagtcatggcagttctgatagggcaccctacacaaatctggagtttgaacacacgacaggtgatatgcttatcttttgtggatggactgttcgcttggcttttgctgattgaattggagctgcacttgtagtttggtaacgtttatatacataactatgcggattgcgttagctagaatatgtcttccagtacctgggtgacaatgggctctaaattttagagtgttgtagatttgttttgttgcaaatgtggcatggcatggcttggcttgcagcttcgagtactggtcgttcgagatccttgtgctgtttgcagggctgatgcccgactctcatctcagcacttccatcattgcaatgtgccaaaacaccgaagccatatcatacatgatcacctatggcttcgccgctgtcatcagcacaagggtgtccaacgagctgggagcccggaacatcgccaacgccaggaaggcgctcactgtgtcgctggcgctgtccctgatgctgggggtggcgttcctgctgctcctgggcctcggccacgacctctgggggtactctgcggcgtcgccaggggctacgggtggcagcacctggcggcgtggaccaacctggtggccttctatgtcatcggcttgccgctcgccatcctcttaggattcacgctcgccttccaaaccaaggggctgtggatggggcagatatgcagcctcctctgccagaactgcgtcctcttttttatcaccctgcgaaccaactggcaggagttagacctgaccatattcaacaaggacaacgattttgtctgctaggaatctagaaagagtttttcttttcttttttgccatgtgctgttgctgaaacattgaaccatcagcatcaggcttcgacagagctgtctgatgtttgttcatcaattcatcaccagtgtaacactacagattgtaacatttggaatctcaaggataggaattaaaaatgttctgatacaccaatata

SEQ ID NO: 116146 - DNA, 1610 bp, Zea Mays
ttccttccctccccctccctgctcggtgctcgcacacgctggcgcggcttgcccccacgctgcgctcccaccaccaccactatataatccccgatcgcctcacgcacacgcaccgacccaccggccgacgaggggcgaccgccgcaacacaaatccacacgcccgccgccaccgccgccatacggacccactcctcctttgccctggtgcgagcaggcttcggcagcaaaccccgcagactgctcccggacgagggagaacgcgcggggctgggctagccgctacccgctagccaggggaccggggcggaggcagcgaggaggtacgtatggacaagtacgaggcggtgcgggacatcgggtcggggaacttcggggtggcgcggctgatgcgcaaccgcgagactcgagagctcgtcgccgtcaagtgcatcgagcgtggccaccggattgacgagaatgtgtacagggagatcatcaaccaccgctcgctgcgccatcccaacattattcgcttcaaggaggtgatacttacaccaacacatcttatgattgtgatggagtttgcagcaggtggagagctttttgatcggatctgtgatcgtgggcggtttagtgaggatgaggcccggtatttctttcagcagttgatctgtggagtgagctattgccattacatgcaaatatgccatagagatctgaagctggagaatgttctcttggatggcagcccagctccacggcttaagatctgcgattttggctattccaagtcatcagtgttgcattcaagacccaaatcagcagtaggaacgccagcatatattgcacctgaggtgctatcccgtcgcgagtatgatggaaagcttgcagacgtatggtcctgtggggtgactctttacgtcatgcttgtgggagcatacccatttgaagacccagatgaccccaagaatatacgcaacaccattcagcaaataatgcaagtgcaatacaagataccagatcatgtccacatatctacggaatgccagcaacttattgcccgtatctttgttgccaatccaatgaggagaatcacaatgaaggaaataaagagccatccatggtttttgaagaacctaccacgggaactcacggagactgcacaaggcatgtactacaggagggataacagggtcccttcttattcagaccaaacgtcggaagaaatcatgaagatagttcaagatgcaaggaccatgccgaaatcatccagatcaggctatgggtggagcagtgagtattcggatgaagaagaagagaaggaagaggaacacagaccagaggagcatgaggaagaggaagatgaatacgataggagggtgaaggaggtccatgcaagcggagaactccgtatggacgctcttcacatatgaaagctagtggaagagaaagttgcatgtagataactgggttgttgcggatctgaaggatccagtgggatgtatgcagttttggcttgagaatttgcttctgtttgtcaattttcatgtaacataatttaatacaccgagacaacagactaccatgttcttatattggtaaatatgaagcatgtaccttctatctgca

SEQ ID NO: 116147 - DNA, 1626 bp, Zea Mays
ttccttccctccccctccctgctcggtgctcgcacacgctggcgcggcttgcccccacgctgcgctcccaccaccaccactatataatccccgatcgcctcacgcacacgcaccgacccaccggccgacgaggggcgaccgccgcaacacaaatccacacgcccgccgccaccgccgccatacggacccactcctcctttgccctggtgcgagcaggcttcggcagcaaaccccgcagactgctcccggacgagggagaacgcgcggggctgggctagccgctacccgctagccaggggaccggggcggaggcagcgaggaggtacgtatggacaagtacgaggcggtgcgggacatcgggtcggggaacttcggggtggcgcggctgatgcgcaaccgcgagactcgagagctcgtcgccgtcaagtgcatcgagcgtggccaccggattgacgagaatgtgtacagggagatcatcaaccaccgctcgctgcgccatcccaacattattcgcttcaaggaggtgatacttacaccaacacatcttatgattgtgatggagtttgcagcaggtggagagctttttgatcggatctgtgatcgtgggcggtttagtgaggatgaggcccggtatttctttcagcagttgatctgtggagtgagctattgccattacatgcaaatatgccatagagatctgaagctggagaatgttctcttggatggcagcccagctccacggcttaagatctgcgattttggctattccaagtcatcagtgttgcattcaagacccaaatcagcagtaggaacgccagcatatattgcacctgaggtgctatcccgtcgcgagtatgatggaaagcttgcagacgtatggtcctgtggggtgactctttacgtcatgcttgtgggagcatacccatttgaagacccagatgaccccaagaatatacgcaacaccattcagcaaataatgcaagtgcaatacaagataccagatcatgtccacatatctacggaatgccagcaacttattgcccgtatctttgttgccaatccaatgagggtaatgatctcaacctgtaaattacaatcatggcgtgtgggatagtgtaaaacgtggtagtttgaagcattgatgatgcagtactttttacgaatattctccagagaatcacaatgaaggaaataaagagccatccatggtttttgaagaacctaccacgggaactcacggagactgcacaaggcatgtactacaggagggataacagggtcccttcttattcagaccaaacgtcggaagaaatcatgaagatagttcaagatgcaaggaccatgccgaaatcatccagatcaggctatgggtggagcagtgagtattcggatgaagaagaagagaaggaagaggaacacagaccagaggagcatgaggaagaggaagatgaatacgataggagggtgaaggaggtccatgcaagcggagaactccgtatggacgctcttcacatatgaaagctagtggaagagaaagttgcatgtagataactgggttgttgcggatctgaaggatccagtgggatgtatgcagttttggcttgagaatttgcttctgtttgtcaa

SEQ ID NO: 116148 - DNA, 321 bp, Zea Mays
atgcaaccatcatacatccatcgctcgactctactcaaatttatgctatatattttgcttcgagagacaaaccacttcctccttattcatcatgaagcccttgctttcgttgagcaggccactgagcagcaaattcttattattggaatcaaggtcgtggatcttcttgcaccgtaccaaaggggtgaaaatattggtctcttcgatggtacacaagagtgggtggcaaaacagcctccaccctaccatcacccgagcaaggacaacaatagatcacgccataaaatgtggtgcataacaccaactagagagctaatgtag

SEQ ID NO: 116149 - DNA, 198 bp, Zea Mays
atggagccctttgctttctttcataaagatactaagcagcaaatccttgttattggaatcaaggtcgtggatcttcttgcaccctaccaaaggggtgaaaatattggtctcttcaatggtgcaggagtgggtaaaaatgtgctcattatggagctgatcaataatgttgctagggcacacggttggtattgttcctag

SEQ ID NO: 116150 - DNA, 1353 bp, Zea Mays
ccgcctcgccgctcgccaatggacacctccactagtccacttggcgccactccagcttcacgctgcccgcgtctgtgattcccattcataagagctggccacgcagcctcggagcaacagacccccgcccacgaccacacgcagcaagcagcagccgcgcgctcgcctaggactaccgactacgagtagtgctcagctagcctccatcctcagcgcgcgagtggctgctgcgcattcctctctttatccgtctctgtgcttgtttaatttgtgttcgttcgtgagtaggcggccggcacatatggcagcgcagtccatgctcatgtcgaccagcgtcaacggcggccgcgcgctgccgtctcttcaggccgtccggccggctccatacccgcggctaccgctgccgtcgtcgtcgtcctcgtcagctggctacaggcactccaagtccgtctccgtgaagacgctcgccctgttcggcaaatccaaggtcaagaccgcgccggcgaagaaggctgctgcgcccaagcccaagccgaaggttgaggatggtatcttcggcacgtccggcgggatcggtttcaccaaggagaacgagctgttcgtcggccgcgttgccatgcttggctttgccgcatcgctacttggagaggccattaccgggaagggcatccttgcgcagctgaacctggagacgggcatccccatctacgaggcggagcccctcctcctgttcttcatcctcttcaccctccttggcgccatcggcgctctcggagaccgcggccgcttcgtcgacgaggaggtcaccggcctcgacaaggccgtcatccaacccggcaagggcttccgcggcgccctcggcctcagcgagggagggccgctgttcgggttcaccaagtcgaacgagctgttcgtggggcggatggcgcagctgggcgtggccttctccatcatcggcgagatcatcacggggaagggcgcgctggcgcagctcaacatcgagacgggggtgcccatcaacgagatagagccgctcgtcatcttcaacgtcctcttcttcttcatcgccgccatcaaccccggcaatggcaggttcatcatcggcgaggaagaggaataggctgctggctgctgctgctggcctcggacatgagtcgtgtgcgtttacttttacctgtgactgtgcgtctcggtgcgcgcgcgtaagtgctttgctgtgtatcaattactcgtgatgagacctcgaaggtagggtgtcgcgttgggttgtctgcttgtagaaacaagagcttatatataaattactactagctaatatgccatggttgcaacgagttctcctagactatataa

SEQ ID NO: 116151 - DNA, 826 bp, Zea Mays
gattgtctaatccacgcattattttgttatgcaaatctgctcgtgtatgtattattgtttcaaaccaaaaacggtagctagcattgccagttcaagctagcgaggatttattgacactgcttggcttcaggcatcgctacttggagaggccattaccgggaagggcatccttgcgcagctgaacctggagacgggcatccccatctacgaggcggagcccctcctcctgttcttcatcctcttcaccctccttggcgccatcggcgctctcggagaccgcggccgcttcgtcgacgaggaggtcaccggcctcgacaaggccgtcatccaacccggcaagggcttccgcggcgccctcggcctcagcgagggagggccgctgttcgggttcaccaagtcgaacgagctgttcgtggggcggatggcgcagctgggcgtggccttctccatcatcggcgagatcatcacggggaagggcgcgctggcgcagctcaacatcgagacgggggtgcccatcaacgagatagagccgctcgtcatcttcaacgtcctcttcttcttcatcgccgccatcaaccccggcaatggcaggttcatcatcggcgaggaagaggaataggctgctggctgctgctgctggcctcggacatgagtcgtgtgcgtttacttttacctgtgactgtgcgtctcggtgcgcgcgcgtaagtgctttgctgtgtatcaattactcgtgatgagacctcgaaggtagggtgtcgcgttgggttgtctgcttgtagaaacaagagcttatatataaattactactagctaatatgccatggtt

SEQ ID NO: 116152 - DNA, 1288 bp, Zea Mays
ccgtcgccatcgagcacgacgaccgatgcgccccaccgtgccggaggaggcgcagcggcggcggacacgaagcgcgtttcgcggcggacgtaggtactttggctgtgtccttggggttcgagaatcgccgtgcggggaagacgcgagctggcgcccgtggccccggctttgcctttttccaggccgccaacaccgcagttcgcgggttggtttcccgcgatccgctttttgtcaacaccgccggattggttttccactcctccctcacctccgtttccgttatctttgttcttgctaatcaatggcgtaataagggccttgagaacatgtttgagcatgaagaactatttggtggcagttggattggagcatattctgctctgtgcttttcttgtggctactttgcatatgaccaactggacatgctccgataccggctatacagtggatggcttcctggaattctcatgcatcacttgatcctactcatttgctttacactagctctgtataggaatgtcacaatcaactacctaaatctctcccttgtatgtgagctgcactccatatttttacatgtaaggaaagtcaggcgaatggttggatttcgggattttgacagaacagtggtgaagctggaatgggtactcaactggactacctttgtaacagcaagggtgatatgccatatcttgattacttacaagctcatctctgatgcccacaaatttgggaagggcattgagcttccgctagctctacttggtatggcaggaatgaatctgcttaacatatttcttgggctcgatctacttaaagcattcacacgagaaagaaataagcagaaccatcaggattgaatgcacctttcttgatgacggtgtactctaaattttgagaaggctgtagttccgttcttgtagggacatagaggtatgtttaagtcttaattaatcagcaactacactggaggctatggattctttatgtatcaacacgtgctaatgctaagatctctacaagaaagggttgttaatgtgtaatcatgtaggtataacattattgttcattaggagaattaagagagtgcaggcgggtaactggatgcaggatttacatacattttgcaatcaggaatcggaaagaagagaagcgtaccatgtatcaaaccccttggtcccaactctcatacctcatctaaagtaacacctaagcaacttgtagattggcactgtgactttgaggctacaatgctcttgtttattaatatttataatatttgacgata

SEQ ID NO: 116153 - DNA, 2463 bp, Zea Mays
atgcggcctccccatccaaggcgtctcccctcctttcccctgtctctggcgggtctgctccgtgcgccacccaagggaggtccaagttacagagttcttcgtcgaggcttgctgctccagttgcgctcccaccacttgagaccaccgcgttgccaccctcctttggctggacgccggcggtctcgtggtctggttagagcgtcggggcctcctcaggatggctggactcgagtggaatctcggaaggctaggaggcgtcgtttgcagctcccgctctccgtcacctctgttcctcggaacttgttgggccggtgcttcaactgcttcgctgaagatcactttgttgcgtcttgtcgtttgaggacgagatgtctccgctgcatgggtctgagccatagttcgtacaactgccctgatcctgctgggaggcctgccagtaaggttccagttcaccgacgactgtccaagggacctgtctggggcagactctctccggcggtctcagcaggccctgtccggcttccggcagcgcccaaggcccacgcccgggcgtctggtggctctgtctgggaccgtcttcgcccaccgacgtctcctccaggtggagttgaagtacagaggatggtttggcgcagggtctccacgcagaatgggggcaatggctctggccacacgctggaggcctctaatgggaggactcctgcgttggttatttcttcgtctccagtggagccatcccatattgacgctccaggcttgctggggaccctccctccccgtcatcgtcgtaggcgtcaccgcaagcgtcggtcctcgatccggggtggttctgatcccggccccgatcacgttgatcaaccgggaggtgacgagacccttttggatcagtcttctggtgttaagcatggatcatgtattattggatggaataatcatttttccaaggcggagatcgctctgaagcttgaagttggggctgattcgttaattctaagacagtcctccccatctgagttcctgtctatgctaccctatgagcaccaggctatttttctaacggataggtggcgcattatcagatcaggctccttttctttgttgtgtaagagatggtccaagctacttggttcttcaggatccaaccttatcacttcggttgattttgagcttagtggcattccgctgcatgcatgggagctttctacggtcaaccagattcttaacccttttgcttgggttcaggaggtgcatgctgatactctggaatcaagaagccttgatgtttttcggtgttctgggtggtgctacaacccttcaatcattccttcttcacggaacctttggattgttgagccacacgtgtgccttccctccggcaaggggagactggccctggtataccggatccatattaaagtggttgcccatcagagtgcattgctccccctcctcgggaccctgtggttgacgatgattccaccaggcagcggcgacgataccgttctcggtcaccacccccagattttgacggtcgtggaacccctgatgtggacaatactcaccggggagcttgttcctgtggagctgtatggatcggtttttggcaccacaaacattgctcccagcaattcatgcatcgttcctgatggtgtgattgtggcggtcactgtggccccagaagaagtgttcccccaggacgttgttgttccttttgaggaggttggtcctgttgagccccttgaactggtgggagatgcacccttgtatactattaattcaaccagcagcagccctgttattgtcatggacagcacagatgttgccctcatcagctcaggccttgtccttgatggtatgctagagacggtcaccgtgtctctagaagcaatgctcttccaggacgttgttgtccctgttgaggaggttgttcctattgagccccatggaccgatggatgttgtacccttgtttgctatagctccggccagcagcagccctgttcttgttcctcctattcaggacttgtttgatcagagatggcgtcctgatcgctgttgtctcaatgtctattctcgaagatcgaaggttgggtcagatccatctattctggaggagtcggttgattctttgcccctggaggccttcaaacaaattatcaccaaaccgattaacgggctgctctcgccacctaggtgcaatttgagaaacaagaagacattgccaaaggatttcatgcccaggaggagtagaagggtggctaagcttcctcctgacctcggaaacatttcagttgccaaggtgtgcaggcatttggggtattttggtgaccatgaggaaatctccttagaaaatgctgctagatatgtcaaattattcaagaacggcctctccagatcacatgtggaggctatggctgctttgttcggctgggaagtgccggtagagatccaggtctcagcctga

SEQ ID NO: 116154 - DNA, 416 bp, Zea Mays
acccaaacccgtgaacccgtgggttttttaaacccgaccaaaccaagtgcatattatcattttattttataaacgaccaacaaacttgttattccttatttacttcataatttttatcaattggtgaatgtatcagtagtcggtgagagtgttgcttgcttgctattatagtttttactagcattatatgtggtggatggataacttagtgcaaggtcacttaattatacaacttattatttgtatttcattctctctactaataatttttataccaaatcatgaactcgttgttcattacatagattttggatcatgatctcattaatcattacgatacttattgattatgagaagaacaagtatattggagatgaaacccgcgggtaacccatgggtacccgctaacccgatgg

SEQ ID NO: 116155 - DNA, 1489 bp, Zea Mays
aacccactcacgtgacctgacggctgacgcatctccctcctcggtcctcgctaggctggtcggcagtgacacacacccgcaattcgcaaacccgcccccaagcccatccctcccgcccgccaggtcccgcgagatctctcacagccccctcagatccgcctcccctcgccgccggcgcgctcgcgcgctttccgcacgcccgccgccatgtcgcacaaccacggcgacacgatcccgctccacccctcgtcggcgcagtccgacatggacgagatcgagagcctcatccacgccgcgccatccccggccaccgtgctccccgcgcggccaccgtctccgacgcgggcctccatccccgtttcttcctctccggccccgtcgcccgtccccacgaagccgcctttccccgccgcttccatcccaatctccgtctccgtctcccccgttcccgttcccgcgtccgtctccgtccccatcggcgccgacgggtttgggtctccgcccaacacgctcacggagccggtatgggacaccatcaagcgagacttagcacgcatcgtcagcaatctcaagctcgtcgtcttccccaatccctaccgcgaggaccccggcaaggcgcttagggactgggacctgtggggtcccttcttcttcatcgtcttcctaggcctcacgctctcctggtcggcttccgtgaagaagtctgaagtatttgctgttgcattcgcggtcctggcagctggtgctataattctgaccttgaatgttctgcttctgggggggcacatcatcttcttccaaagcctgagtcttcttggctattgcctatttccattggatgttggtgctctagtttgcatgctgaaggacaatgtcatacttaagattgtcgtggtgacaatcacattggcttggagctcctgggctgcgtatccattcatgagcgctgctgttaacccaaggagaaaagctctggccctatatcctgtcttcctcatgtatatctcagttggtttcctcataattgccattgattaacggggttgagctttgtagtaacatctgaagagttgagagtttccttggatggttgaaccaccagaatacatacaagtttgagtagacaatgcttctatccttgtaccctcgtggagtctttgtgaattgcctcgtaggaattttggtttttacatgatcttgaggcataaggttgtaaaattagtcgaaaatctgtatctgttgtaaagggcatggactttggaccactgaaatggctgtcaagctttcgtatactgcaatgtatgctgttcaaaagtcaactattcaaatattcgattattccttgaatactctttcgaaggtgcatcatgtgttagtacttaataagccgactaggattatctggacggctggagcttagtgatcaaatctttggatgaggctgtgagacacgctccttgagttctgctgcattggcaaaagaggaaaa

SEQ ID NO: 116156 - DNA, 1618 bp, Zea Mays
aacccactcacgtgacctgacggctgacgcatctccctcctcggtcctcgctaggctggtcggcagtgacacacacccgcaattcgcaaacccgcccccaagcccatccctcccgcccgccaggtcccgcgagatctctcacagccccctcagatccgcctcccctcgccgccggcgcgctcgcgcgctttccgcacgcccgccgccatgtcgcacaaccacggcgacacgatcccgctccacccctcgtcggcgcagtccgacatggacgagatcgagagcctcatccacgccgcgccatccccggccaccgtgctccccgcgcggccaccgtctccgacgcgggcctccatccccgtttcttcctctccggccccgtcgcccgtccccacgaagccgcctttccccgccgcttccatcccaatctccgtctccgtctcccccgttcccgttcccgcgtccgtctccgtccccatcggcgccgacgggtttgggtctccgcccaacacgctcacggagccggtatgggacaccatcaagcgagacttagcacgcatcgtcagcaatctcaagctcgtcgtcttccccaatccctaccgcgaggaccccggcaaggcgcttagggactgggacctgtggggtcccttcttcttcatcgtcttcctaggcctcacgctctcctggtcggcttccgtgaagaagtctgaagtatttgctgttgcattcgcggtcctggcagctggtgctataattctgaccttgaatgttctgcttctggtaagaccttttttcttctacacataagcacggtcacacatgcacatgactgttggaggtcaattgcctctgtgctaatcaaagtaccttcttagaagttctacaattatttactcaagcacttttcagggggggcacatcatcttcttccaaagcctgagtcttcttggctattgcctatttccattggatgttggtgctctagtttgcatgctgaaggacaatgtcatacttaagattgtcgtggtgacaatcacattggcttggagctcctgggctgcgtatccattcatgagcgctgctgttaacccaaggagaaaagctctggccctatatcctgtcttcctcatgtatatctcagttggtttcctcataattgccattgattaacggggttgagctttgtagtaacatctgaagagttgagagtttccttggatggttgaaccaccagaatacatacaagtttgagtagacaatgcttctatccttgtaccctcgtggagtctttgtgaattgcctcgtaggaattttggtttttacatgatcttgaggcataaggttgtaaaattagtcgaaaatctgtatctgttgtaaagggcatggactttggaccactgaaatggctgtcaagctttcgtatactgcaatgtatgctgttcaaaagtcaactattcaaatattcgattattccttgaatactctttcgaaggtgcatcatgtgttagtacttaataagccgactaggattatctggacggctggagcttagtgatcaaatctttggatgaggctgtgagacacgctccttgagttctgctgcattggcaaaagaggaaaa

SEQ ID NO: 116157 - DNA, 2407 bp, Zea Mays
cactccgtcagtctcccctccggcctcacgccgcgctcgcggtgctgcctcccgggctcccgttccagcattccaggctcgcatcgcacggcctggccccgcccgctccgacccttctcggcgacactcctcgtaggctcgtactggcacgtccccgctctgtcttctgcccaccaggcactagcgggtgcgggtccacgcttccaagggttccaaactctcggcggcgcaagcaatggcggcgcggggccgggagcactggtagtttcgcatatcgcggcggcttgttgccacctcgccatcgcagattatggggatcaacggcgaggagtgggaggagacggtactgggcgacggcgttgggaggcggaagggtggtgctgaggcttccggtttggtcgcatcctcctcctttgctgaggggatgggggaattcgtgctgaggtctatggacgccaggttctccggatcggtcgacgacgatgaatatgtctcgtctcggcagccagtatttggccatagtaaatcgacagctactacttctggtaccattaaagggcaagataacgtttttgtaaggtcatactctgataggttgctgaagtgtgacctcactttggatatgctatcagaaaatgagaagataaagataaccgagagattggtaaagatccagaatgatggtacagtggaggtagatgtgacgcgcagtgctcttgttgcctcagaactctcggagattgatgcttttggttgtgtaccacacgatattgaagaagttacacctggaatcaccaaatcagtcccaaagctgaagattgctatacttgtagttggaacccgaggggatgtacagccttttatagcattagctaaacgactgcaggaattcggtcattatgttagattggcaactcatgtcaattttcgtacttttgtgaagtcagctggcattgatttttacccattgggtggtgatcctcgggttatggctcagtatatgacaaaaaacaaagggtttttcctggcggcaccgacagagattgccattcaaagaaagcagcttaaggaaatcatcttctcacttctacctgcatgcacagaacctgatttggatactggaacacctttcagagctcaggcaataatcgcgaatcctcctgcttatggtcatctacacatagcagaagcacttggagcacctctgcatatcttcttcacttttccatggacgccaactaatgaattcccacatccattggcacgaatgcctcaaagtgcaacttataggctatcgtatcttattctggatttaatagtttggtggggctccaggggattcataaatgatttcaggaagaaattaaatttgccccctattgcttacttcagcacataccatggatctatatcacacttacctactggatacatgtggagcccgcaacttatgccaaagccaaaagattggggtcctctagtggatgttgtgggatattgcttcttaaatcttggaacaaagtatcaaccgccaccacaactgtcacagtggcttcaacaggggcccaagccaatatacattggttttggtagcatgcctcttgatgatgagaaaaaagtcactgctatcattttagatgcacttagagaaacaggacaaaggggaatcattagccgtggttggggagctcttggaagtttttcagaagttccagttgatgtcttcatcttggaggattgccctcacgattggctcttccctcggtgtgctgcagtggtgcatcatggtggagcaggtactacagcagcagggctgatagctgggtgtcctactactgtagtgccgttttttggagaccagttcttctggggcgagagagttcatgcacgaggagtgggtcctgcacctatatctatcgcagaacttactgtagaagcactatcaaatgcaataatattcatgcttgatccagaggtaaaatcacgaacaatggaactggcgatagcaataggcaatgaggatggtgtggcagcagctgtagatgcatttcatcgtcacctgccttcagaattgccgctgtcgccgcccgcacatgtggaggaagaacgcacagacttcttccaatggttttctcgaggcctggagaagtgttgtttcccattcagtttttaggtacggcagtccgtacgctaggtatatgtatgatttattcatttatgagttgaaaaggtatatcacagtaattttctaaaattggaataaatgctggtataagccaatggtgaggatgcaataaaaaagatcgacgcaattgtaaatgtttgggcagctacaattgtattcagaatttgctggtaggcctgaaatttgtgccccgatgtgccttccagtatgagtgtagtagct

SEQ ID NO: 116158 - DNA, 1651 bp, Zea Mays
ggggagaggggagaagtgggaaacggggaacggcgagaacacgcggatttcgctgcgggagaaccggagaaggatagcatgcggtcgacggtgttggtggcgcggagcctgcagaaggcgtccgtcccgccggccttgctctcagacccgacgcccggcagcctccagcccacccgcctcgccgcccatgtcaatggcgccggctcctcgtgctctgtttacctcgcctctggctgccgcgtctacaggatcgagtgacatttttgtgaagttgatttttcctctctttggagatggaagataagactggatgctagtgtgatgctgtccaaaggaaaggagagcctcttgattcctgataatgcacaggtcatcagttcgtcggttgtggatcgctgcccacatcgttctgagatccagagtgtagctcttgcagagggcgaagatgactgtttgattctgggaacggttgactcatatggtcatcttattgtatctcgtttggacatcgtggctgatgacattgacaggacatcctattcagtaccacctcgtgattgtggtgttggggaaggcagttgggctggggtatgctttagcccaatgcagcaatccatggtagctgttgctcgtcagttgtgcaagaccattgatatctatgatcaagatattcacgttcggagtttacgcacatagagcctatattacaagctactgcatacccaaaatgactctagcttcctcatcgactcttaatgatctttgtatgcacaatctttttattcaaaggaggctgctgtggattcaacacataaaccatgagttcttttagcagcatccattatctcacaattgcagactgtaatttgcacgatttagggggtaaaacttaacttgcaggctatggtatccatcttcgtttagctttgttcaatactctccacatgtgaacgaaagtagttctctcttggcaactgcagaaggttctcagctgagcatctgggacctaagaatgaataacaatgggggatgcgtacatcgcattactggatcagttggagacattatatactccacatgtagctcaccttcaggactgattgctagtggtggaactgatcgtgctgtcaccatctatgatcctcgcaggtggtctgctctgtcaagatgggtgggctgctccaagtttgagattacaggtcttgcgttttcatcagttgacgaatctttcatctacgtccaaggtgttgattatgagattacctgtggacattggaaacaaagtgagcgagcattctcatttcgaggggattccaactggttggggttttcaaagtgtgccaacaatgatgtgatagcagggtggtgcgagtctggaagtatcttcattgctgatgctaggcagctataggatcaatatccccttcatctggtgccctggagccccggaagtcaccagtatgtgttgtgttttgccatttctgtaagaatgtgatgtttacaggaggaactgttcttaactctccagtaccaagtagcatgcgaactcatgcccattggccattatggttcttgaaaaacatgattattccagatttcatccagcaaattgaattgaatttggtcaccagaaggggtattggcttgtacc

SEQ ID NO: 116159 - DNA, 1724 bp, Zea Mays
ggggagaggggagaagtgggaaacggggaacggcgagaacacgcggatttcgctgcgggagaaccggagaaggatagcatgcggtcgacggtgttggtggcgcggagcctgcagaaggcgtccgtcccgccggccttgctctcagacccgacgcccggcagcctccagcccacccgcctcgccgcccatgtcaatggcgccggctcctcgtgctctgtttacctcgcctctggctgccgcgtctacaggatcgagataagactggatgctagtgtgatgctgtccaaaggaaaggagagcctcttgattcctgataatgcacagttcgtcggttgtggatcgctgcccacatcgttctgagatccagagtgtagctcttgcagagggcgaagatgactgtttgattctgggaacggttgactcatatggtcatcttattgtatctcgtttggacatcgtggctgatggacatcctattcagtaccacctcgtgattgtggtgttggggaaggcagttgggctggggtatgctttagcccaatgcagcaatccatggtagctgttgctcgtcagttgtgcaagaccattgatatctatgatcaagatattcacgttcggagtttacgcacgtaagttcactcatgcaataattttggcattgtgccaatctgtccaactgccttttttataaaaaaagtcagattccgctgataaatgacatctttcagataaataaatgctaacccatgacatttttggctacagatagagcctatattacaagctactgcatacccaaaatgactctagcttcctcatcgactcttaatgatctttgtatgcacaatctttttattcaaaggaggctgctgtggattcaacacataaaccatgagttcttttagcagcatccattatctcacaattgcagactgtaatttgcacgatttagggggtaaaacttaacttgcaggctatggtatccatcttcgtttagctttgttcaatactctccacatgtgaacgaaagtagttctctcttggcaactgcagaaggttctcagctgagcatctgggacctaagaatgaataacaatgggggatgcgtacatcgcattactggatcagttggagacattatatactccacatgtagctcaccttcaggactgattgctagtggtggaactgatcgtgctgtcaccatctatgatcctcgcaggtggtctgctctgtcaagatgggtgggctgctccaagtttgagattacaggtcttgcgttttcatcagttgacgaatctttcatctacgtccaaggtgttgattatgagattacctgtggacattggaaacaaagtgagcgagcattctcatttcgaggggattccaactggttggggttttcaaagtgtgccaacaatgatgtgatagcagggtggtgcgagtctggaagtatcttcattgctgatgctaggcagctataggatcaatatccccttcatctggtgccctggagccccggaagtcaccagtatgtgttgtgttttgccatttctgtaagaatgtgatgtttacaggaggaactgttcttaactctccagtaccaagtagcatgcgaactcatgcccattggccattatggttcttgaaaaacatgattattccagatttcatccagcaaattgaattgaatttggtcaccagaaggggtattggcttgtacc

SEQ ID NO: 116160 - DNA, 1727 bp, Zea Mays
ggggagaggggagaagtgggaaacggggaacggcgagaacacgcggatttcgctgcgggagaaccggagaaggatagcatgcggtcgacggtgttggtggcgcggagcctgcagaaggcgtccgtcccgccggccttgctctcagacccgacgcccggcagcctccagcccacccgcctcgccgcccatgtcaatggcgccggctcctcgtgctctgtttacctcgcctctggctgccgcgtctacaggatcgagactggatgctagtgtgatgctgtccaaaggaaaggagagcctcttgattcctgataatgcacaggtcatcagttcgtcggttgtggatcgctgcccacatcgttctgagatccagagtgtagctcttgcagagggcgaagatgactgtttgattctgggaacggttgactcatatggtcatcttattgtatctcgtttggacatcgtggctgatggacatcctattcagtaccacctcgtgattgtggtgttggggaaggcagttgggctggggtatgctttagcccaatgcagcaatccatggtagctgttgctcgtcagttgtgcaagaccattgatatctatgatcaagatattcacgttcggagtttacgcacgtaagttcactcatgcaataattttggcattgtgccaatctgtccaactgccttttttataaaaaaagtcagattccgctgataaatgacatctttcagataaataaatgctaacccatgacatttttggctacagatagagcctatattacaagctactgcatacccaaaatgactctagcttcctcatcgactcttaatgatctttgtatgcacaatctttttattcaaaggaggctgctgtggattcaacacataaaccatgagttcttttagcagcatccattatctcacaattgcagactgtaatttgcacgatttagggggtaaaacttaacttgcaggctatggtatccatcttcgtttagctttgttcaatactctccacatgtgaacgaaagtagttctctcttggcaactgcagaaggttctcagctgagcatctgggacctaagaatgaataacaatgggggatgcgtacatcgcattactggatcagttggagacattatatactccacatgtagctcaccttcaggactgattgctagtggtggaactgatcgtgctgtcaccatctatgatcctcgcaggtggtctgctctgtcaagatgggtgggctgctccaagtttgagattacaggtcttgcgttttcatcagttgacgaatctttcatctacgtccaaggtgttgattatgagattacctgtggacattggaaacaaagtgagcgagcattctcatttcgaggggattccaactggttggggttttcaaagtgtgccaacaatgatgtgatagcagggtggtgcgagtctggaagtatcttcattgctgatgctaggcagctataggatcaatatccccttcatctggtgccctggagccccggaagtcaccagtatgtgttgtgttttgccatttctgtaagaatgtgatgtttacaggaggaactgttcttaactctccagtaccaagtagcatgcgaactcatgcccattggccattatggttcttgaaaaacatgattattccagatttcatccagcaaattgaattgaatttggtcaccagaaggggtattggcttgtacc

SEQ ID NO: 116161 - DNA, 1732 bp, Zea Mays
ggggagaggggagaagtgggaaacggggaacggcgagaacacgcggatttcgctgcgggagaaccggagaaggatagcatgcggtcgacggtgttggtggcgcggagcctgcagaaggcgtccgtcccgccggccttgctctcagacccgacgcccggcagcctccagcccacccgcctcgccgcccatgtcaatggcgccggctcctcgtgctctgtttacctcgcctctggctgccgcgtctacaggatcgagataagactggatgctagtgtgatgctgtccaaaggaaaggagagcctcttgattcctgataatgcacaggtcatcagttcgtcggttgtggatcgctgcccacatcgttctgagatccagagtgtagctcttgcagagggcgaagatgactgtttgattctgggaacggttgactcatatggtcatcttattgtatctcgtttggacatcgtggctgatggacatcctattcagtaccacctcgtgattgtggtgttggggaaggcagttgggctggggtatgctttagcccaatgcagcaatccatggtagctgttgctcgtcagttgtgcaagaccattgatatctatgatcaagatattcacgttcggagtttacgcacgtaagttcactcatgcaataattttggcattgtgccaatctgtccaactgccttttttataaaaaaagtcagattccgctgataaatgacatctttcagataaataaatgctaacccatgacatttttggctacagatagagcctatattacaagctactgcatacccaaaatgactctagcttcctcatcgactcttaatgatctttgtatgcacaatctttttattcaaaggaggctgctgtggattcaacacataaaccatgagttcttttagcagcatccattatctcacaattgcagactgtaatttgcacgatttagggggtaaaacttaacttgcaggctatggtatccatcttcgtttagctttgttcaatactctccacatgtgaacgaaagtagttctctcttggcaactgcagaaggttctcagctgagcatctgggacctaagaatgaataacaatgggggatgcgtacatcgcattactggatcagttggagacattatatactccacatgtagctcaccttcaggactgattgctagtggtggaactgatcgtgctgtcaccatctatgatcctcgcaggtggtctgctctgtcaagatgggtgggctgctccaagtttgagattacaggtcttgcgttttcatcagttgacgaatctttcatctacgtccaaggtgttgattatgagattacctgtggacattggaaacaaagtgagcgagcattctcatttcgaggggattccaactggttggggttttcaaagtgtgccaacaatgatgtgatagcagggtggtgcgagtctggaagtatcttcattgctgatgctaggcagctataggatcaatatccccttcatctggtgccctggagccccggaagtcaccagtatgtgttgtgttttgccatttctgtaagaatgtgatgtttacaggaggaactgttcttaactctccagtaccaagtagcatgcgaactcatgcccattggccattatggttcttgaaaaacatgattattccagatttcatccagcaaattgaattgaatttggtcaccagaaggggtattggcttgtacc

SEQ ID NO: 116162 - DNA, 1798 bp, Zea Mays
ggggagaggggagaagtgggaaacggggaacggcgagaacacgcggatttcgctgcgggagaaccggagaaggatagcatgcggtcgacggtgttggtggcgcggagcctgcagaaggcgtccgtcccgccggccttgctctcagacccgacgcccggcagcctccagcccacccgcctcgccgcccatgtaagtatgcatttgagcggccgtcactgcccaccgcgcaatctcagcacggacacctcgtcaatggcgccggctcctcgtgctctgtttacctcgcctctggctgccgcgtctacaggatcgagatggaagataagactggatgctagtgtgatgctgtccaaaggaaaggagagcctcttgattcctgataatgcacaggtcatcagttcgtcggttgtggatcgctgcccacatcgttctgagatccagagtgtagctcttgcagagggcgaagatgactgtttgattctgggaacggttgactcatatggtcatcttattgtatctcgtttggacatcgtggctgatggacatcctattcagtaccacctcgtgattgtggtgttggggaaggcagttgggctggggtatgctttagcccaatgcagcaatccatggtagctgttgctcgtcagttgtgcaagaccattgatatctatgatcaagatattcacgttcggagtttacgcacgtaagttcactcatgcaataattttggcattgtgccaatctgtccaactgccttttttataaaaaaagtcagattccgctgataaatgacatctttcagataaataaatgctaacccatgacatttttggctacagatagagcctatattacaagctactgcatacccaaaatgactctagcttcctcatcgactcttaatgatctttgtatgcacaatctttttattcaaaggaggctgctgtggattcaacacataaaccatgagttcttttagcagcatccattatctcacaattgcagactgtaatttgcacgatttagggggtaaaacttaacttgcaggctatggtatccatcttcgtttagctttgttcaatactctccacatgtgaacgaaagtagttctctcttggcaactgcagaaggttctcagctgagcatctgggacctaagaatgaataacaatgggggatgcgtacatcgcattactggatcagttggagacattatatactccacatgtagctcaccttcaggactgattgctagtggtggaactgatcgtgctgtcaccatctatgatcctcgcaggtggtctgctctgtcaagatgggtgggctgctccaagtttgagattacaggtcttgcgttttcatcagttgacgaatctttcatctacgtccaaggtgttgattatgagattacctgtggacattggaaacaaagtgagcgagcattctcatttcgaggggattccaactggttggggttttcaaagtgtgccaacaatgatgtgatagcagggtggtgcgagtctggaagtatcttcattgctgatgctaggcagctataggatcaatatccccttcatctggtgccctggagccccggaagtcaccagtatgtgttgtgttttgccatttctgtaagaatgtgatgtttacaggaggaactgttcttaactctccagtaccaagtagcatgcgaactcatgcccattggccattatggttcttgaaaaacatgattattccagatttcatccagcaaattgaattgaatttggtcaccagaaggggtattggcttgtacc

SEQ ID NO: 116163 - DNA, 1398 bp, Zea Mays
ggggagaggggagaagtgggaaacggggaacggcgagaacacgcggatttcgctgcgggagaaccggagaaggatagcatgcggtcgacggtgttggtggcgcggagcctgcagaaggcgtccgtcccgccggccttgctctcagacccgacgcccggcagcctccagcccacccgcctcgccgcccatgtcaatggcgccggctcctcgtgctctgtttacctcgcctctggctgccgcgtctacaggatcgagataagactggatgctagtgtgatgctgtccaaaggaaaggagagcctcttgattcctgataatgcacaggtcatcagttcgtcggttgtggatcgctgcccacatcgttctgagatccagagtgtagctcttgcagagggcgaagatgactgtttgattctgggaacggttgactcatatggtcatcttattgtatctcgtttggacatcgtggctgatgacattgacaggacatcctattcagtaccacctcgtgattgtggtgttggggaaggcagttgggctggggtatgctttagcccaatgcagcaatccatggtagctgttgctcgtcagttgtgcaagaccattgatatctatgatcaagatattcacgttcggagtttacgcacgctatggtatccatcttcgtttagctttgttcaatactctccacatgtgaacgaaagtagttctctcttggcaactgcagaaggttctcagctgagcatctgggacctaagaatgaataacaatgggggatgcgtacatcgcattactggatcagttggagacattatatactccacatgtagctcaccttcaggactgattgctagtggtggaactgatcgtgctgtcaccatctatgatcctcgcaggtggtctgctctgtcaagatgggtgggctgctccaagtttgagattacaggtcttgcgttttcatcagttgacgaatctttcatctacgtccaaggtgttgattatgagattacctgtggacattggaaacaaagtgagcgagcattctcatttcgaggggattccaactggttggggttttcaaagtgtgccaacaatgatgtgatagcagggtggtgcgagtctggaagtatcttcattgctgatgctaggcagctataggatcaatatccccttcatctggtgccctggagccccggaagtcaccagtatgtgttgtgttttgccatttctgtaagaatgtgatgtttacaggaggaactgttcttaactctccagtaccaagtagcatgcgaactcatgcccattggccattatggttcttgaaaaacatgattattccagatttcatccagcaaattgaattgaatttggtcaccagaaggggtattggcttgtacc

SEQ ID NO: 116164 - DNA, 379 bp, Zea Mays
ggggagaggggagaagtgggaaacggggaacggcgagaacacgcggatttcgctgcgggagaaccggagaaggatagcatgcggtcgacggtgttggtggcgcggagcctgcagaaggcgtccgtcccgccggccttgctctcagacccgacgcccggcagcctccagcccacccgcctcgccgcccatgtcaatggcgccggctcctcgtgctctgtttacctcgcctctggctgccgcgtctacaggatcgaggtttgcgtcccctactattgctcctctcgtttcgtacaactggattgtatagcaaatcatgcttgcttgtgaagcagctagttagagtgttcggcggtgatttctgttatcacatcaaccctta

SEQ ID NO: 116165 - DNA, 1835 bp, Zea Mays
cccttccttcctttgctcctcccctgcctcgcctctctcccctctcctcgcctccagctcctgctcggcccgctcgcgtccagctgcgcgcgcgcctgcggtggccgtgaaggacagcccgagggacgcgccgggtgcactgatctgggggccgcgtgtccccggtggtggggcgaggcggcgccggcttccaggaatgtgagttcccgctacacaaggggtggtgccgtggtggggcagcttgtagtggctgtttcttttgcatatgcgctttctattgttgttgtcatttcaaaggaggccatagtctcctggattttgtatgccttgttatctggaattggtgaccatagatgtcatttcgtagcatagtccgtgatgttagggatggcttcggcagcttgtcaaggagaagctttgagcctggtcctcgagatggaaatacaatggtccagtgttttataaagaggaataagtcaaaatccacttaccatctctacctgtgccttagcaatgttgttacttcagaaagtgggaaattcctcttatcagctaaacgacaccgcaaaaccacatgcaccgagtacactatatcaatggattctggcaacatctcaagatcaaaaagaacctacattggaaaaataaggtctaacttccttggcacaagatttttaatttatgatacacaaccgccctataatggggctgtagttcctcctgccggaaggacaagcaggaggttcaactccacaaaagtctctccaaagctgccttcagtcagttacaacatcgcacaggtatcgtatgagttaaatgtccttggcacgagaggtcctaggcggatgcgttgcatcatgcactccatacctgcatcatcagtggagccaggtggcacagtgcctggacagccagagcagattgtacctcgagccctggaggattcattccgcagcacggcttccttctcgcagtcgttccgtagcactgcctcattctccaagtccatcatggactcatccatggatttcaatagcgctcgcttctctgacatcgctggcagcagcgctcgcttcacgggcgttcctggtagcagcgctcgcttcgcgggcgttcctggcagcagcgctcgcttctcgggcattgctggcgccagactggacaacgacgaggagagtgaaaccaaggagaggccactggtgcttcgtaataagccgcctaggtggcacgaacagctgcagtgttggtgcctcaacttccgtggccgtgtgacaattgcctcggtgaagaacttccagctgatcgccgcggctaccccgccaccggcaggtgcgccaaccccctctcagcctgccccgtcagatcccgacaaggtgattctccagtttggcaaagtggcaagggatatgttcacgatggactatcgctaccctctctcggctttccaggcctttgccatttgtctgagtagctttgatacaaagttagcctgtgaataaatggagaagaacaaaggtaaaggagaacatcaggttgcttgcattaggccatcagtgtacctctttccatctggctctcgtgttgccttggttgtatttgtgcttaatgtagccatgaatttggtggcccatatatggacgcatgtgttgttgttggccctctcccttagaagtgattaaaagttgcatttggaccacatgttacccgatctgtaatatacttgcagtggcatcgcatgccgcgtgataacaaagttcccgttcgtgattggacttgtatggtttcagaaaagcagcaaacaaagtttggtacggtgtgcattttttttgctcgtc

SEQ ID NO: 116166 - DNA, 2090 bp, Zea Mays
cccttccttcctttgctcctcccctgcctcgcctctctcccctctcctcgcctccagctcctgctcggcccgctcgcgtccagctgcgcgcgcgcctgcggtggccgtgaaggacagcccgagggacgcgccgggtgcactgatctgggggccgcgtgtccccggtggtggggcgaggcggcgccggcttccaggaatcttgtagtggctgtttcttttgcatatgcgctttctattgttgttgtcatttcaaaggaggccatagtctcctggattttgtatgccttgttatctggaattggtgaccatagatgtcatttcgtagcatagtccgtgatgttagggatggcttcggcagcttgtcaaggagaagctttgaggtgaccctcgcaagcatttatggccttactgggcatcacaaagggaagacccagagctcatcacatgtgctcgacgactcaccttccataattcgtgaaagtcgatgggcgaatctacctcctgaactcatccgtgatatcatacggagactggaggctgatgagagcacctggccagcgcggaagcacgtcgtttgcttcgcagctgtttgtaggacatggagagaaatgtgtaaagagattgtgttgagcccggagttttgtggcaagctcaccttccctgtgtctctaaaacagcctggtcctcgagatggaaatacaatggtccagtgttttataaagaggaataagtcaaaatccacttaccatctctacctgtgccttagcaatgttgttacttcagaaagtgggaaattcctcttatcagctaaacgacaccgcaaaaccacatgcaccgagtacactatatcaatggattctggcaacatctcaagatcaaaaagaacctacattggaaaaataaggtctaacttccttggcacaagatttttaatttatgatacacaaccgccctataatggggctgtagttcctcctgccggaaggacaagcaggaggttcaactccacaaaagtctctccaaagctgccttcagtcagttacaacatcgcacaggtatcgtatgagttaaatgtccttggcacgagaggtcctaggcggatgcgttgcatcatgcactccatacctgcatcatcagtggagccaggtggcacagtgcctggacagccagagcagattgtacctcgagccctggaggattcattccgcagcacggcttccttctcgcagtcgttccgtagcactgcctcattctccaagtccatcatggactcatccatggatttcaatagcgctcgcttctctgacatcgctggcagcagcgctcgcttcacgggcgttcctggtagcagcgctcgcttcgcgggcgttcctggcagcagcgctcgcttctcgggcattgctggcgccagactggacaacgacgaggagagtgaaaccaaggagaggccactggtgcttcgtaataagccgcctaggtggcacgaacagctgcagtgttggtgcctcaacttccgtggccgtgtgacaattgcctcggtgaagaacttccagctgatcgccgcggctaccccgccaccggcaggtgcgccaaccccctctcagcctgccccgtcagatcccgacaaggtgattctccagtttggcaaagtggcaagggatatgttcacgatggactatcgctaccctctctcggctttccaggcctttgccatttgtctgagtagctttgatacaaagttagcctgtgaataaatggagaagaacaaaggtaaaggagaacatcaggttgcttgcattaggccatcagtgtacctctttccatctggctctcgtgttgccttggttgtatttgtgcttaatgtagccatgaatttggtggcccatatatggacgcatgtgttgttgttggccctctcccttagaagtgattaaaagttgcatttggaccacatgttacccgatctgtaatatacttgcagtggcatcgcatgccgcgtgataacaaagttcccgttcgtgattggacttgtatggtttcagaaaagcagcaaacaaagtttggtacggtgtgcattttttttgctcgtc

SEQ ID NO: 116167 - DNA, 2096 bp, Zea Mays
cccttccttcctttgctcctcccctgcctcgcctctctcccctctcctcgcctccagctcctgctcggcccgctcgcgtccagctgcgcgcgcgcctgcggtggccgtgaaggacagcccgagggacgcgccgggtgcactgatctgggggccgcgtgtccccggtggtggggcgaggcggcgccggcttccaggaatgggcagcttgtagtggctgtttcttttgcatatgcgctttctattgttgttgtcatttcaaaggaggccatagtctcctggattttgtatgccttgttatctggaattggtgaccatagatgtcatttcgtagcatagtccgtgatgttagggatggcttcggcagcttgtcaaggagaagctttgaggtgaccctcgcaagcatttatggccttactgggcatcacaaagggaagacccagagctcatcacatgtgctcgacgactcaccttccataattcgtgaaagtcgatgggcgaatctacctcctgaactcatccgtgatatcatacggagactggaggctgatgagagcacctggccagcgcggaagcacgtcgtttgcttcgcagctgtttgtaggacatggagagaaatgtgtaaagagattgtgttgagcccggagttttgtggcaagctcaccttccctgtgtctctaaaacagcctggtcctcgagatggaaatacaatggtccagtgttttataaagaggaataagtcaaaatccacttaccatctctacctgtgccttagcaatgttgttacttcagaaagtgggaaattcctcttatcagctaaacgacaccgcaaaaccacatgcaccgagtacactatatcaatggattctggcaacatctcaagatcaaaaagaacctacattggaaaaataaggtctaacttccttggcacaagatttttaatttatgatacacaaccgccctataatggggctgtagttcctcctgccggaaggacaagcaggaggttcaactccacaaaagtctctccaaagctgccttcagtcagttacaacatcgcacaggtatcgtatgagttaaatgtccttggcacgagaggtcctaggcggatgcgttgcatcatgcactccatacctgcatcatcagtggagccaggtggcacagtgcctggacagccagagcagattgtacctcgagccctggaggattcattccgcagcacggcttccttctcgcagtcgttccgtagcactgcctcattctccaagtccatcatggactcatccatggatttcaatagcgctcgcttctctgacatcgctggcagcagcgctcgcttcacgggcgttcctggtagcagcgctcgcttcgcgggcgttcctggcagcagcgctcgcttctcgggcattgctggcgccagactggacaacgacgaggagagtgaaaccaaggagaggccactggtgcttcgtaataagccgcctaggtggcacgaacagctgcagtgttggtgcctcaacttccgtggccgtgtgacaattgcctcggtgaagaacttccagctgatcgccgcggctaccccgccaccggcaggtgcgccaaccccctctcagcctgccccgtcagatcccgacaaggtgattctccagtttggcaaagtggcaagggatatgttcacgatggactatcgctaccctctctcggctttccaggcctttgccatttgtctgagtagctttgatacaaagttagcctgtgaataaatggagaagaacaaaggtaaaggagaacatcaggttgcttgcattaggccatcagtgtacctctttccatctggctctcgtgttgccttggttgtatttgtgcttaatgtagccatgaatttggtggcccatatatggacgcatgtgttgttgttggccctctcccttagaagtgattaaaagttgcatttggaccacatgttacccgatctgtaatatacttgcagtggcatcgcatgccgcgtgataacaaagttcccgttcgtgattggacttgtatggtttcagaaaagcagcaaacaaagtttggtacggtgtgcattttttttgctcgtc

SEQ ID NO: 116168 - DNA, 2009 bp, Zea Mays
gggcaaggcaagtagccgctgcgcggtgctgccacctgacctgactgccgtcccggtccccggtccatccgaacgccgttacggggccgcccaccgcgacggaacggaaaggggcagcttgtagtggctgtttcttttgcatatgcgctttctattgttgttgtcatttcaaaggaggccatagtctcctggattttgtatgccttgttatctggaattggtgaccatagatgtcatttcgtagcatagtccgtgatgttagggatggcttcggcagcttgtcaaggagaagctttgaggtgaccctcgcaagcatttatggccttactgggcatcacaaagggaagacccagagctcatcacatgtgctcgacgactcaccttccataattcgtgaaagtcgatgggcgaatctacctcctgaactcatccgtgatatcatacggagactggaggctgatgagagcacctggccagcgcggaagcacgtcgtttgcttcgcagctgtttgtaggacatggagagaaatgtgtaaagagattgtgttgagcccggagttttgtggcaagctcaccttccctgtgtctctaaaacagcctggtcctcgagatggaaatacaatggtccagtgttttataaagaggaataagtcaaaatccacttaccatctctacctgtgccttagcaatgttgttacttcagaaagtgggaaattcctcttatcagctaaacgacaccgcaaaaccacatgcaccgagtacactatatcaatggattctggcaacatctcaagatcaaaaagaacctacattggaaaaataaggtctaacttccttggcacaagatttttaatttatgatacacaaccgccctataatggggctgtagttcctcctgccggaaggacaagcaggaggttcaactccacaaaagtctctccaaagctgccttcagtcagttacaacatcgcacaggtatcgtatgagttaaatgtccttggcacgagaggtcctaggcggatgcgttgcatcatgcactccatacctgcatcatcagtggagccaggtggcacagtgcctggacagccagagcagattgtacctcgagccctggaggattcattccgcagcacggcttccttctcgcagtcgttccgtagcactgcctcattctccaagtccatcatggactcatccatggatttcaatagcgctcgcttctctgacatcgctggcagcagcgctcgcttcacgggcgttcctggtagcagcgctcgcttcgcgggcgttcctggcagcagcgctcgcttctcgggcattgctggcgccagactggacaacgacgaggagagtgaaaccaaggagaggccactggtgcttcgtaataagccgcctaggtggcacgaacagctgcagtgttggtgcctcaacttccgtggccgtgtgacaattgcctcggtgaagaacttccagctgatcgccgcggctaccccgccaccggcaggtgcgccaaccccctctcagcctgccccgtcagatcccgacaaggtgattctccagtttggcaaagtggcaagggatatgttcacgatggactatcgctaccctctctcggctttccaggcctttgccatttgtctgagtagctttgatacaaagttagcctgtgaataaatggagaagaacaaaggtaaaggagaacatcaggttgcttgcattaggccatcagtgtacctctttccatctggctctcgtgttgccttggttgtatttgtgcttaatgtagccatgaatttggtggcccatatatggacgcatgtgttgttgttggccctctcccttagaagtgattaaaagttgcatttggaccacatgttacccgatctgtaatatacttgcagtggcatcgcatgccgcgtgataacaaagttcccgttcgtgattggacttgtatggtttcagaaaagcagcaaacaaagtttggtacggtgtgcattttttttgctcgtc

SEQ ID NO: 116169 - DNA, 1768 bp, Zea Mays
gcctcgctctcgtctctaatgccaatcgctctcccttaccttcctacgccctgccgcgcgctacgtacgccaccggaccaccaccacaagcgctggacgcgagcggcccagcctgacgcagcgcggatagagggataggcctcgacgccgattccgttggagctccgcgacccttggctcccagcctcactttctcgctcgccgtgctaccctaccccgcagagacacgtcccgtcccgtcccgtcccaccctgtgccagccagctcccgaccggcgcccgccccgcgggatcttgtctaataatataccgtgcgcgcgggagcagcagctggttcgtcgtgcccgcgcgctcactgcactccgtgatcaccaccacaccgctatcctgctagctaggtagctgaattcggagccaggctcgagcgaggggagggcggaggcgagatggaccacgcggcggacgcgcaccggacggacctgatgaccatcacgcggcacgtgctgaacgagcagagccggaaccccgagtcccgcggcgacttcaccatcctgctctcccacatcgtcctcggctgcaagttcgtcgcctccgccgtcaacaaggccgggctcgcccagctcatcgggctcgccggcgagaccaacgtgcagggagaggagcagaagaagctggacgtcctgtccaacgaggtgttcgtcaaggccctcgtcagcagcggtcgcacctgcgtccttgtgtccgaggaggacgaggaagcaacgttcgtggaccctaagctgcgtggaaggtactgcgtctgctttgatcccctcgacggctcctccaacatcgactgtggcgtctccatcggaacgatctttgggatttacatcatcaaggacaaggacaacgtcactctggaggacgtgctgcaacctggcaagaacatgctcgccgccggatactgcatgtacggcagttcctgcacgctcgttctgagcactggaactggtgtcaatggcttcacgctcgacccttcacttggggagttcatactaacccatccagacatcaagatacctaagaaggggaagatctattcagtcaacgaagggaacgccaagaactgggacgcgcctgttgccaagtttgtggagaagtgcaagtaccccaaagatggctcgccaccaagatctttgagatacattggaagtatggttgctgacgtgcaccgtaccttgctatacggcggtgtgtttttgtaccctgctgacgagaagaacccaaacggaaagctccgtatcctgtacgaagttttccccatgtcgttcctaatggagcaggcaggaggccagtccttcacaggcaaagaacgggctcttgatctgatcccaaccaagatccacgacaggtccccgatattcctcggaagctacgacgacgtggaggagatcaaagcgttgtacgccgagcaggcgaagtcgagctcggcttcatcctaagtgagggtgtaaatcgacttttcctggcttaatttgttgcttacctgattcagacattcgtttccgtttcccttggtgtcgtcgtaagtgtgacattcagtgcaatatgtatagcaactaagggactccgtaaaagttacatgcatctctagcacctaaagcattgcgttataaccaacctaaaaagaggtgatcaggtgtcatagatgatgaaactactgtcgcaggctctgcaaaaatgtattgcgcatagagatccctgcaaaaaaaaaatatggccgtgtc

SEQ ID NO: 116170 - DNA, 1754 bp, Zea Mays
gcctcgctctcgtctctaatgccaatcgctctcccttaccttcctacgccctgccgcgcgctacgtacgccaccggaccaccaccacaagcgctggacgcgagcggcccagcctgacgcagcgcggatagagggataggcctcgacgccgattccgttggagctccgcgacccttggctcccagcctcactttctcgctcgccgtgctaccctaccccgcagagacacgtcccgtcccgtcccgtcccaccctgtgccagccagctcccgaccggcgcccgccccgcgggatcttgtctaataatataccgtgcgcgcgggagcagcagctggttcgtcgtgcccgcgcgctcactgcactccgtgatcaccaccacaccgctatcctgctagctaggtagctgaattcggagccaggctcgagcgaggggagggcggaggcgagatggaccacgcggcggacgcgcaccggacggacctgatgaccatcacgcggcacgtgctgaacgagcagagccggaaccccgagtcccgcggcgacttcaccatcctgctctcccacatcgtcctcggctgcaagttcgtcgcctccgccgtcaacaaggccgggctcgcccagctcatcgggctcgccggcgagaccaacgtgcagggagaggagcagaagaagctggacgtcctgtccaacgaggtgttcgtcaaggccctcgtcagcagcggtcgcacctgcgtccttgtgtccgaggaggacgaggaagcaacgttcgtggaccctaagctgcgtggaaggtgagcagactgaacttgttaattattgacctgcccgtttctctgatgaaatgtatgaatatgcgtcgcttttgtgtatccctaaaattaaaggtactgcgtctgctttgatcccctcgacggctcctccaacatcgactgtggcgtctccatcggaacgatctttgggatttacatcatcaaggacaaggacaacgtcactctggaggacgtgctgcaacctggcaagaacatgctcgccgccggatactgcatgtacggcagttcctgcacgctcgttctgagcactggaactggtgtcaatggcttcacgctcgacccttcacttggggagttcatactaacccatccagacatcaagatacctaagaaggggaagatctattcagtcaacgaagggaacgccaagaactgggacgcgcctgttgccaagtttgtggagaagtgcaagtaccccaaagatggctcgccaccaagatctttgagatacattggaagtatggttgctgacgtgcaccgtaccttgctatacggcggtgtgtttttgtaccctgctgacgagaagaacccaaacggaaagctccgtatcctgtacgaagttttccccatgtcgttcctaatggagcaggcaggaggccagtccttcacaggcaaagaacgggtagggtttacgcctctccatttcctatacaaaaaaaaaagcacttctgctccctcgtcatagaatagaactgcttgttcacttctgcttggtttgggtacctttgatgcattggcactgcatgcaggctcttgatctgatcccaaccaagatccacgacaggtccccgatattcctcggaagctacgacgacgtggaggagatcaaagcgttgtacgccgagcaggcgaagtcgagctcggcttcatcctaagtgagggtgtaaatcgacttttcctggcttaatttgttgcttacctgattc

SEQ ID NO: 116171 - DNA, 1661 bp, Zea Mays
gcctcgctctcgtctctaatgccaatcgctctcccttaccttcctacgccctgccgcgcgctacgtacgccaccggaccaccaccacaagcgctggacgcgagcggcccagcctgacgcagcgcggatagagggataggcctcgacgccgattccgttggagctccgcgacccttggctcccagcctcactttctcgctcgccgtgctaccctaccccgcagagacacgtcccgtcccgtcccgtcccaccctgtgccagccagctcccgaccggcgcccgccccgcgggatcttgtctaataatataccgtgcgcgcgggagcagcagctggttcgtcgtgcccgcgcgctcactgcactccgtgatcaccaccacaccgctatcctgctagctaggtagctgaattcggagccaggctcgagcgaggggagggcggaggcgagatggaccacgcggcggacgcgcaccggacggacctgatgaccatcacgcggcacgtgctgaacgagcagagccggaaccccgagtcccgcggcgacttcaccatcctgctctcccacatcgtcctcggctgcaagttcgtcgcctccgccgtcaacaaggccgggctcgcccagctcatcgggctcgccggcgagaccaacgtgcagggagaggagcagaagaagctggacgtcctgtccaacgaggtgttcgtcaaggccctcgtcagcagcggtcgcacctgcgtccttgtgtccgaggaggacgaggaagcaacgttcgtggaccctaagctgcgtggaaggtactgcgtctgctttgatcccctcgacggctcctccaacatcgactgtggcgtctccatcggaacgatctttgggatttacatcatcaaggacaaggacaacgtcactctggaggacgtgctgcaacctggcaagaacatgctcgccgccggatactgcatgtacggcagttcctgcacgctcgttctgagcactggaactggtgtcaatggcttcacgctcgacccttcacttggggagttcatactaacccatccagacatcaagatacctaagaaggggaagatctattcagtcaacgaagggaacgccaagaactgggacgcgcctgttgccaagtttgtggagaagtgcaagtaccccaaagatggctcgccaccaagatctttgagatacattggaagtatggttgctgacgtgcaccgtaccttgctatacggcggtgtgtttttgtaccctgctgacgagaagaacccaaacggaaagctccgtatcctgtacgaagttttccccatgtcgttcctaatggagcaggcaggaggccagtccttcacaggcaaagaacgggtagggtttacgcctctccatttcctatacaaaaaaaaaagcacttctgctccctcgtcatagaatagaactgcttgttcacttctgcttggtttgggtacctttgatgcattggcactgcatgcaggctcttgatctgatcccaaccaagatccacgacaggtccccgatattcctcggaagctacgacgacgtggaggagatcaaagcgttgtacgccgagcaggcgaagtcgagctcggcttcatcctaagtgagggtgtaaatcgacttttcctggcttaatttgttgcttacctgattc

SEQ ID NO: 116172 - DNA, 411 bp, Zea Mays
atggcatcgatgtaccccttgatcgcgcggacgacgccgatgcggccgccggtctccactgcccgtctcaccgcgctgagacatctcgatgaccttagggggcgactacagctagggcttgggtcttttggatttggaaggcgatgcgaaaaccaaatagtggagaatgcgatgagagggcgggaggagcgggtgtgggcggcaggagtagcgagcgggccggagggcatcgtctcaggcgaacatcgtgcgcggcatctcaggcggactgaggaaaggcgtcaaggacaggggcacaacgggagacgtgggagggagacaaaggcggagcggggcacggagctgcggcccgaggtgcactccagcatggcgagatctgcggcggggacggagttgcgcgagtctgtctag

SEQ ID NO: 116173 - DNA, 1897 bp, Zea Mays
atggcggtgtgctgggctgttaagatgggcccagtgtcagactcgtcttctcatgtggggtgcgaccgaatccaacagaagagccgaagaggaaaggggcggttgctttatattccttctcggctgcaatctgcgtccatctatccagccgtctcggggcgtcgtgtgcgcgtggatctctccgtagaagggatgaagatcacggcgctccttgtgctgaagccgtcgacctccggagccggtagctcctcgtccggcggccagtcgggcccggaggcggtcgtgctcgcgaacgcgacggacgtcagccacttcggctacttccagcgcagcgccgcccgcgagttcatcgtcttcgttgcccgcaccgtcgctcagcgcacccagccaggccagcggcagtccgtccagcacgaagaatataaggttcactcccacaacagaaatgggctttgtgcggtggcatttatggatgatcactatcctgtacgaagtgcattttctcttctgaatcaggttcttgatgagtaccagaaggcttttggggactcctggaaatctgctactgcagatggaactcaacagtgggctttcctgacagacgccttggcaagatttcaggaccctgcggaagctgacaaactaatgaaaattcagagggacttggatgaaacaaaaattattcttcataaaactattgatagtgtcctggccagaggagagagattggatagcttggttgagaaaagttctgatctaagtgctgcttctcagatgttctacaagcaggcaaagaagacaaaccaatgttgcacaatactttaaactttggtgcttcaatcatgtttgcaagaaacaaaaacgatcgatattgtgctaatttactgtaagttaaatcgcccatgaagcgtggacacgcggttgcaaggctcgagctcagtgctgttggtctcagtttgcaaggctatagttttctccaagacctgccgattggactgttttcttgtgagaattcctgctctccaaacagcacatggagtatcattctttagtggttatgaaactgcgtagtgcctgctaacaccatttattgtactatataaggcttgcctcaaactgcagaaattaccaaatattgttaaattctcaaagcttactggcagtggcgaagacagcacaagctgatagtctcttcttgcttctatatcctccacctctttctccaatgcagtaggggttcatttttcttcttctcctttgtcctctatacttcaccagtttcatggacgtagcgggggctggagccctccctagcccccttcagatctgcccctcgcatttgttgtccacagcgactgaaagcctgatgcttatatagttatatcaaccgtttacattagtttatctcagctcatatattacatccagagttccatatctcaaccaagcattacattgatcaaaaccactaccagcaccgattcataaaactagtcacattatgctgcttggagcatcagccttttgccagatttctttacaaacagatggtcaccccagcagtagcttgcatatatggcgcttttgcagagttcttcaaccgcatcacgacattctccagattcaagcgatttccagcttgacataggattttccaattttccaccgttatagctacctcccaaatgacttttcaggttcctccaccctgtgttctggaagcaaaaagcatttcttatggtgtgtttggttttgattggatgtataaagagagatggaggagagcagtcacaatttctatagtgtttagaatagtttctgtagtgtttagatgagagtcacgtaagagcgagttaaacatcagagtaattttttgtggcgacgtgatctcaaaaaa

SEQ ID NO: 116174 - DNA, 864 bp, Zea Mays
acacacacatcagatatgcataagctagtttctgacacacttcattcacttttcagccttagtgccttacatccattcatgattcattccagtctatagtctataatgctgaagtggcagtgtttccctgggtatatgatttctctatggctttagaggaagtgaagtgtggctcataggttgcattgttgatttcttgaatagtgattcaggttcgagagtagttgcagtttgcggatacacagagtatgtgacttagtgttgttcctctaggttagacctgggcagtcttaaagattctgattgctcttcaggttactttgtgtttataggtatgcattatctcacacttgtgtattcacattcctgagaaatgtttttgtctttcagatgttctacaagcaggcaaagaagacaaaccaatgttgcacaatactttaaactttggtgcttcaatcatgtttgcaagaaacaaaaacgatcgatattgtgctaatttactgtaagttaaatcgcccatgaagcgtggacacgcggttgcaaggctcgagctcagtgctgttggtctcagtttgcaaggctatagttttctccaagacctgccgattggactgttttcttgtgagaattcctgctctccaaacagcacatggagtatcattctttagtggttatgaaactgcgtagtgcctgctaacaccatttattgtactatataaggcttgcctcaaactgcagaaattaccaaatattgttaaattctcaaagcttactggcagtggcgaagacagcacaagctgatagtctcttcttgcttctatatcctccacctctttctccaatgcagtaggggttcatttttct

SEQ ID NO: 116175 - DNA, 1126 bp, Zea Mays
ttcccacggatcgctctgccacgatccgcgcgctcacacgcatatccaatccagaccgtccgttctgttctaatcgaacgctcgaaaccccatttccctccatgaagtcccgccgctgcccccgagtttcccactcgcccgcccacccgtcccctattattaatcgccccgccgctcaactccatctcacacaacgatctcaatctccctagcagcagatcctcgtgcaacgcaaagcgctagccttcctactgtcccgatggcccgcacgaagcagacggcgaggaagtccactggcggcaaggcgccaaggaagcagctggccaccaaggcggcgcgcaagtctgccccggcgaccggcggagtgaagaagccccaccgtttccgccccggcaccgtcgcgctccgggagatccgcaagtaccagaagagcacggagctgctgatccgcaagctgccgttccagcgcctggtgcgtgagatcgcccaggacttcaagaccgaccttcgcttccagagctccgccgtcgccgcgctgcaggaggcgtccgaggcctacctcgtcggtctcttcgaggacaccaacctctgcgccattcacgccaagcgcgtcaccatcatgcccaaggacatccagctcgcccgccgtatccgtgtggagagggcctaggcgtcgtggcggtggaggtcgaagtagtagtcgcagtttctgtcatcaccgtctggctagaaggtgtagagatgtgccgggttctggagtttgggttatcggtcgaatcatgatgtagttggttcttcacagctgtaatttaactatgacgatgccatggcaatgaagttctcagctatgagttcccgaatttatgcgtctacaatctagacactacttcaaatgttagatacacataagaaattcgtttatacctgtatctaaacctaattttattaaatacgcatcttatttttctgtattgtatcattaaaaccgttggactatacgctatgctaaagatgtcccttcgttaatatagaagtcttgtatttttgcacttagcttcttaaaatactttatgtgttgtacaggttctaaatattttttttgcttttttatcagctggattaattc

SEQ ID NO: 116176 - DNA, 90 bp, Zea Mays
acggagcgcggggcgggtaccacacggagcagcatgactctcccgacagcttcctccctcccggcggggcgcctggtgtacaaaggcagc

SEQ ID NO: 116177 - DNA, 1730 bp, Zea Mays
actgcaaaaaaatccccactcgacagcaggctcttcttcctcccaatcccgaactccatctcaaccgcaaccgcccgtcgcttcgtggccgcccactcaccacgcccgcctcgcccgccgcgggagggaacaagcgctcaggctgctttgtgggggcgccccgccgggagggcgaatcccggtggaggtgaaccctgtttgccagcagatctcgccgttgggaggccagagctgggcggcagaaagaaacgttgtgctcgagttcgaggtcctcgcggagatagccaaggcgagagggaagaccgtggcgcagagccgccaggagggaggaagacgtcgccgggacctactgctccgtgcctccagttggtacgcgtcccacgctccgtgcctctagccataggctacttcgtgggggcgccccgccgggagggaggaagccgccactgggagggactcgttgctccgtgcctccggttggtccgtgcctcgtgctctcgatgccttcagcgggtctgcgcccctactcgcactccagatccagaggcactgcaagctttcggcctgctgctcctatgtgagatccagtcgtcgacgtgatcttcttaacagtagtgtgtgagatccagacaccgacgcgatcttcttgacagcagcagcagtctcctccaggcaaggagcacaaccctctactatctataaatgttgccaccctttgcctatatgggttcttaacgtcgttatttcctatgaaatgggatgaatcgtattattcccaatgatgaggttgaaccaatagaagtagttgctgcccccgatgatgatgagagacagtatcctgggtttgttgacaagtgggatatgctagaatttgaggactataatggagacattttcacaggggcacaatttaaagagactgataaagaggaggaggaagaaaacatagctatgggggtggatgagcaaggagagggtggtgatgtaccaagaaatgattatgacagagataatccatccttaaaagaaggcaacacatttgcatcgatgaccgaatttaggaatgcacttgatacctattgcatcaaaggcgagtatgattatgtaattgacaagagtgagccaactagaatgactgttcattgcgcatttgagagctgtcagtggaggatatatgcttccagtatgcggaatagtacaattattcaggtcaaagtgaatccatctcctcgcacttgtccaagtgaaagaaaagggtcacataagtagctaaaagtagatggtgtgcaaatgcagtattagaatgggcgacatataactcatgcattggtacaactgaaccggtaaagaagatcaaagagaagtacaacattttggtgccttacatgatagtgtattatggcaaggaaatggctcttgacaagatttatggcccatgtaaggaaagctttaacttattattcactttcaaagctgaagtggagaaggcgtgcccaggtagtgttgttgagattgaccatcatacggtggattataaagtgagaggcaagattttgaacaaagaatgttttataagggtgttcgtttcattcaaagcatgttggagtaggttcttagctggttgcaggccttatttagcagtggatgcaacaactctttatgggaggtttagaggccagttagtagctgcttgtgtcattgatgcacataattggctactaggtatatgc

SEQ ID NO: 116178 - DNA, 1947 bp, Zea Mays
agcacacgcccagcgcccgcagaccagtcacacacacatacttcggctgctgctctcccatttgtctcacctcgctctcacgcctgcctgcgtcaccggaagcgaccccgcgggcgagcgatccgatccccttcgcggcctcgtcaacgacgccgagaacactgaggaatggctgaagaggatgtccagccccttgtgtgcgacaatggcactggaatggttaaggcaggtttcgctggtgacgacgcgccgagggcagtctttcccagcatcgtaggcaggccacgccacactggcgtgatggtgggcatgggccaaaaggatgcatacgtgggcgacgaagcccagtccaagagaggcattctgacgctcaagtacccaatcgagcacggcattgtgggcaactgggatgacatggagaagatctggcaccacaccttctacaacgagctccgtgtggcgcctgaggagcaccctatactgctgaccgaggctcctctgaaccccaaggccaacagggagaagatgacccagatcatgtttgagacgttcagctgcccggcaatgtatgtgtccatccaggccgttctttccctgtacgccagtggacgaacgactggtattgtgctcgactctggtgacggcgtgagccacactgtccccatctacgaagggtacacgcttcctcatgctattattcgattggaccttgccggtcgtgacctcaccgacaacctgatgaagatcctcaccgagaggggttactccttcaccacgacagccgagcgagagattgtcagggacatcaaggaaaaacttgcctacgttgcacttgattacgagcaggagctggagacggccaggaccagctccaccgtcgagaagagctacgagctgcccgatggccaggtcatcacaatcggcgcagaaaggtttaggtgccctgaggtgctattccagccatccttcattggcatggaatctcctggcatccatgaagccacgtacaactccatcatgaagtgcgacgtcgatatcagaaaggacctgtacggtaatgttgtcctcagtggtggctccactatgttccctggcatcggtgaccgcatgagcaaggagatcactgcgcttgcccccagcagcatgaaggtgaaggtggttgctccgccggagaggaagtacagcgtttggattggtggctccattctggcctctctcagtaccttccagcagatgtggatctccaaggaagagtatgatgaatctggtccaggcatcgtccacatgaagtgtttctgaattctggagctgtatatctgttatttacttatattttcagttagttgggatgctagattgtcccatggtttctctagcattcttggttctttctaaatcattgaagggctgttggccatgaagcattgtgaaagatggttaggtcgactgatgtactacatgaagaaacatgtgtaacttcagtagtacggatggtcaggtcagtgttttttttttcaagaccaccagatcagtgcgttcctgatatgcgcgatctgggtttctacacgacgcaagggtgccggctgtcgcgtgtcgcccatgcagtttgagtctttgagagttcagttggtttatgcacttctgtacgtggtcatggaatcattcgcatttgcgccccgccgtggcgtggttgttgatttatacttggatatgtttgttttattccttctcatgaaacagctgttgttgtctctaagtgctagtttgggagatataaacccggagaggattggaggggctaaattacccttcttattcaattttgagtaagaaggggaatttaactccttcaattccttccggttttatggctctcaaactagtcctaaaggggtaaattgtttatccttcaggacttgtttgggtaatcttggattggagtggatt

SEQ ID NO: 116179 - DNA, 726 bp, Zea Mays
accaccgccaacgcgttacagacgcgcctctgcgttacagagctcgacaagatgagcgtcgaacagctgcacgcaaggaagctcctgtcgcacgccgccgccgccgcggctgcctcgtcggcgggaccgccagcgacggaggcgcaggtgcctgccgcgcacgctcacgcagcagcgcccttcagctccctgaacacgatggtgatcactgcgctgtcgctgctcctgtgcgggctggtggtcgtgctcgcggtgcacgcggtcgtccggtgcgcgttccgcgtcacgcgccgcgtgtgctacgggcaggacgaggagtcccccggcggcggcggcggcggcggcgccgatgcatcggcggccgcggcctccttctcctgccaggccggtcccaggaggaagcgtgggccgcgaaccgggctgcccccgtggatactctactcccgcgaggtcgagctcacggggtgcggcgcggcggaatgcgccatctgcctcacggagttcgtgcggggtgaccgcgtacgcgcgctgccgcactgcaaccacggcttccacgtgcggtgcatcgaccgctggctcgccgcgcggcagacgtgccccacgtgcaggcgggcgccgttcgccgctaaaccctcgctctcgctgccggacagcgcggaggcaccggagtccgtgcagcttcaggcgcgcgttgaatccggggccgggcagcacgagactcaatag

SEQ ID NO: 116180 - DNA, 129 bp, Zea Mays
cctataatatggtttaggactttagttttggaatttgttggagttgctctaaggaaaaaggaatctacgccactatttgaaaagccataagttcaagctttaactgtacgtttccgaactctatttttc

SEQ ID NO: 116181 - DNA, 1949 bp, Zea Mays
attttataaacagtctattgtattagaacagttttgtatgattatacacacgatacgctggatataaccgctatggtgaattggagattgtgtcagctgtggcgtagacccgtagtgcatcatccatgacataagctgactgtgagactcagagtctgtgaccgattgtttggttctccttttctacgcccactgcttatttgaacagcaatatactggcgaagcggcaaaattgccaatggctagaggacgtactcaaactgaacttttcatatctgatgaacatgcaactgttggactgtactgtacatacggtacactccacgcctattataagaacagagagtggcatactgccaggccatcttccccaatctcataaaaataacctctgattgcgtagaaaaagcctcgcgaatggacgccagaagcagcagcagtatgcacgttgtgatgctgccatggctggctttcggccacatcctcccgttcaccgagctcgccaagcgcatagctcggcagggccaccgagtcaccctcttctccacgccaagaaacacgcggcggttaatccgcatccctccagaactcgcggggaatatccgagtcgtcgacatcaccctgccgcgcgtggagcgcctgccggaggacagcgaggcgagcatagacctcccgtccgatgacctccgcccgtacctccgcgtagcctacgacgccgccttcgccgacaaactctcggccatcctgcaggagccggtgccggagaggccggactgggtggtcatcgactatgccgcgtactgggcgcccgcggccgcggcgaggcacggcgtgccatgcgcgttcctgagcctgttcggcgccgcggcgctcagtttctatggccccccggaggggctcatgggacgcggcaagtacgccaggacgaagccggaggacctcaccgttgtacccgactacgtgccgttcccgaccaccgtcgcgtaccgcggcttggaggcgcgcgagtttttcacgccggtgttggccccggacgaatctggcgtatcggaaggctaccggtttggcaagtgcatcgaacagagccagctcgtgggcatcaggagcagcgcggagttcgaaccggagtggcttcaggtggtcagtgggctataccagaagccggtcatcccggtcggtctattccctccaccaccacccacacaagacatcggcagccacaaggcagcgctgcaatggctggacgggcaggcgcctcgctccgttgtgtacgcggccttcggcagcgaggcgaagctgactagcgcacagctgcaggcaattgcgctcggtctcgaggcttccggcctgccgttcctgtgggcattcaggcaaccaaccgatgccaacgaaggcaaaagcggattgccggaaggtttcgaggagcgcatcaacggccgcggactcgtctgccgcggctgggtgcctcaggccaggtttttggcccacgaatctgtcggagggttcttgacccacgccggttggaactccatcatcgaaggcctcgcccgcggcgtcaggctggtgctgctaccgctgatgttcgatcagggcctcaacgcgaggcatctgactgagaagaagataagcgtcgaggtgccgcgggacgaggaagatggctcgttcgcgcccaaagacattgcagctgctttgaggagggtcctagtggatgaagaatgcgaggtgttcggggataaggccaaagagctcgccaagttgtttggaaatgacgagatgaatgatcagtgcgtgcgagattttctcaagtgcatgtcggaatacagcaggcagcgacaggttgcattatagggctggtaacgtcaaattttagatagggccataggggcctttttcaaaggtttactacgacagacaacatcaccgagataataaaaaatatataaaaaata

SEQ ID NO: 116182 - DNA, 363 bp, Zea Mays
cgtatttaaaaactgatttagagaataaacgaacttgcatctctccatagttttaattacaaaaatccaaaaatgatgaaacttgttttgttagttagatgttgtcataccccatcaaggaaaaatataaaacttatatgttgttcactgttttcttggtgtgttaattaaaacatgttaaataggaaaaagatgattgttttgcttgttatttttagatctgtagctctagtgctccaaatggattcaaatttttacagtagactctcgttgtgatgcttggtgactggtaaaaatttcatgaattgttgtgcatgtatgattaagttagtgatttaacttgtttaatgcaccttaagtagt

SEQ ID NO: 116183 - DNA, 125 bp, Zea Mays
cttgaattttgttcatggggttcacttagggttcttaattagggttgcacattcttatcctttaagagactcaattgttttgatcatgacacttttaagcatatacttggtgaactctttcttac

SEQ ID NO: 116184 - DNA, 513 bp, Zea Mays
atgggggacgccggtttcgctctcctcgtcgcgttagcggccgccctggccgccctgttcctcgtcctgctcggcgccgccgtcctccggcactactgctggcggcggcgcctcgacgctgtggcgcccccacgccgcggcttcgtcctgttcgacgtctgcttcgccgacgacaggcagcagcggcacgccgtgaggccgccgccgccgtccgtggagcggggctgggcgcggcgggcggcgggcgagggccgggtggagcacgcgcccggcggcggcggcgaggccgcggcggacgacgacccggtcgtggagcccgacgagctcgagatcgcgcggtggaggaagatcttccgcggcccgaacaggtccatgtccacgatcgacgaggggacggagaaggacggcacgacgcccgccttctccacgccgtcggcgtcgcctgaccgacgcgacgcccgggccccggccctcggcatggagaccgtcgcggtgcagcttcgtcaggcgtaa

SEQ ID NO: 116185 - DNA, 1466 bp, Zea Mays
cgctctcgcacaaaaaagtctgcaagcagggttaaggcacgcaccaacctttcctcctacctctactcctgttcctcgggttcatcttcacctcgagcgctgctgcggccatggtgaccagaaggctggctctgagctccctcttccacggcaaggcaagggacacttcctccttaccaccgccgcctcctcctcctcccgcaccagcctggccatggccgtccagcaagaacccaagaacgacgcagccgcaggcagcagcagcagcagcagcagcaggcgccaggaccgtcgcctccatcgtcctcgactccgccgactcgtccttcacggcctcctccgcgctgcaggaggactgctgctgctccgacagcctctccacggcgtccgaggcgtcggcgtcggcgtcggcggcgtgcgacgacgcggcggcggacgacgccgtcgtcgtgcgcggggtccgctccgaccggctcctcttcgacccaggcgcgtcggccaccaactccatcctcgaggagaagtctgccaccaaacgggagcaggcgttcggcggcgccgtggccgtcgcgttcgagtccgccgacccgtacgtggacttccgggcgtccatggaggagatggtggccgcgcacgggatcggccgccactggggctggctggaggagatgctgggctggtacctgcgagccaacgacggcgacacgcactgcgccatcgtggcggccttcatcgacgtcgtcgtcgtcgccgccgtagccgccgacccggctcgctcttcgcagcaggcctcatctcgcacgtcgtttgcgacgggggagttggaggtggcagacaagggcaaaccagatggagccggagcgctcgccgtgtcatgtttggattaagctgagctaaatcttcacagtttatttgcattaccttattatatatgtagtactactacgtgttaatctcgtcgttctaaaatgtgtagagactagagaagagtactagtgtacggttctcttgacgatcaacctatgtcgttgacccacctagacgtacgagtacgatcgatcaacctatgcagattattctgtgttaaacaagatcgaggggcgaaccgtacgtaccatgcacgcacgcatggactacggacgggtcacgagtccatggcgaacgagcaaaacggtaaagcaagaggattcgattcttctgtgtgcaaagatgcaccgataaaaagacgaagccagatagatgcatgcaaatggtgccgaccggtagtagtgcagactgcagagctgcggatcgtacatggtgcctgccagtgggtcacccggttgcaagaggctatcaaagtatgaataatgattacgatcgtcggggaaatagtggtacatcacactgtctaacagtagtcttgtgctctacacacttgcatccatagtgatatccaacgacgcgcgcgcaccgtaccgtggacc

SEQ ID NO: 116186 - DNA, 892 bp, Zea Mays
cagctcctcctccctcctatcatcctcttcctcaacgctccctcgtcattatataacacgaggatcagttcagagctgcttgacaaacactcacacctagcgaacagctatacacccaaccaggtgggagagctccaagccaccaagaccaagtgatcggaacctgtgcggcggcggcggcggcggcgacgatgagcaggaacaacggcaaggcgtcgaagctggagctcctaaggatgggcctgtcgagggcgaggggcgggccctcggcgacggcgcggcccggcggggacagcggcagcaacggccgcgcgacgacgtcgccgcgccgggtgtcctcctcgtcctcgtccaccgcgtcgccgccgagctcgtgcgtgtcgtccgagggcagccccgacgcggccgccgccgcgccggcgcccatggtcctggccgggtgcccccggtgcatgatgtacgtgatgctgtcccgcgaggacccccggtgcccccggtgccacaacgccgtgctgctcgacttcagcgagggcgaccagcgccgcccgcgtcagcgccggtgaaatggaaccaccacgagcgatcgagcacgtctgagttcgtcgttgccttcaagaagtcgtcgtcgtagcttcattttcccattcgcggccggagtttgtttcgattacccaaggaattattgcatagacctgtttcttccgagcggcacggtgccaaagggatcggtctaggtaataatttcatgctttgttagacaataataataagaataataatttcgtcttcttactagtactacgcgatgtgctagtgtacaagcattgttctatttttgctaataactggagttgcttgcgctcttgtccccccacgcgaaaattaaaaaaaa

SEQ ID NO: 116187 - DNA, 1247 bp, Zea Mays
ataaattccgttcacggcgccgccaacccgtccatcatccatccgtccacaaccacatagagagccagtaaacaccgcgcacgcaaacgcaacagcgagatcgtgtcgagcagccggggcgacttgcgaggcatggacttccaccacggctgccacaacagcagcatccacgcggcggcggcgccgccggcgcggccgtggagcaaggaggagaacaagatgttcgagagcgcgctggtgatgtggcccgagcacacgcccgagcgctgggcgctcgtcgcggcgcagctccacgggcgcacgccgcgggaggcctgggagcactacgaggcgctcgtcgccgacatcgcacttatcgagcgcggcggggtcgacgtgcccgcctgctggaacgacgacaaccaagtccgcggcggctgcgagggtggcactggcaacagccgccgcgccggcgctgaccgggcgcaccgcgagggccggcgccccgggaaaccctggagcgaggaagagcacaggctcttccttcaagggctggagaagtacgggcgcggggactggcgtaacatctcgcgcttcacggtgcggacgcgcacgccggcgcaggtggccagccacgcgcagaagtacttcaaccggcagctcaaccccgccagccggaactccaagcggaagagcatccacgacatcaccaccccttgaccctggccgccgacggcgacgcgcgctccctgcttacagccactcatctcatctcgagatcagaatagaagaaacaagtaggcattactcgtagtccatgacaagagctaaatccttaggtcgcatggttgggtcgttccagtcagcagctagcacatggtttaggcttactcgtagtcattaaaatagaattaggagtccaaacatctaatggagtctgacgtggcaccgtcgcgtcgagtttaggcgaatgcagaatgggatgagtttctcgcttgagaaacaccggtttcctgcctgtaaattttcttgttcccgctactgacccggaaacgaaaaacggttccgttttcagtgttatttagatttagaattttataatacaagagtcaaacgaaaaacggttcggttttcagtgttatttaggtttagatttaaaaatacaagagtcaaactttggtcacaaaacggcatccgaaaaatgcagaaccaaattgtaatcctatcaatgcccgagtcactgttctagtattgtattggtttatcaa

SEQ ID NO: 116188 - DNA, 1583 bp, Zea Mays
acggaaaatccaatcagggaaaaaatccatttccctttcttctgaagtcgtcctcttcttcccgtcgcttcgccgtgccgcacctgcgaggagaggagacttcgccgcgaagctcaccatgatctcgccggagaggagctcgtcacagagccagcggtcggcggcggcgggggcgccgttcctgtcgatctccgtcacggatcccgtaaagatgggtaccggcgtgcagtcctacatctcctaccgcgtcatcaccaagaccaacctccctgaatttgagggaccagagaaaattgttattcggcgctatagtgattttgaatggttgcatgatcggcttgctgagaggtacaaaggcatttttataccccctcttccggagaagaatgctgttgagaaattccggtttagcaaggagttcattgaattgcggcgtcaagctctggatttattcgttaacaggatagcttcacaccctgaactcaagcaaagtgatgtcttgaggacatttttgcaagcagatgaagagataatggatagggcaagatcttatgagactggtatttttaagaaaccggcagatttcatacagatgtttaaggatgtgcagtcaaaagtcagtgatgttgttctgggaaaagaaaagcctgtggaggaatctactcctgaatatgagaagcttaaaaattacatatttgagctagaaaatcatttagcagaggcccaaaaacaagcataccgtcttgtgaaaagacacagagaacttggtcaatctttggcggactttggaaaggcgattaagcatttaggtgcttgtgaaggagatttgatggaaaaggtgttttctgaagttggttcgaagtcagagatgttgtcaataaagctgcaaagagaggcagacaaccttctctttaactttgaagaacccttgaaagattatgtgcgtgctgtacaatctataaaagccactatgcttgatcgagccaatgctttcaggcagcacttcgatttggatcaggagaggaagtataaagagcttaatcttgaaaaattgaagttcatgaaccctgaaaagtatgccgaagcagaatctgagtttcgagagttgaaagcagacagtgaggaggctactaagaagtttgaacacatagttagactaatgaatgaagagcttgctcgtttccaggagcaaaagacagctgatattggactcgcattccatgaatttgccaagggtcaggctaagctagctaaagacattgcggatgcatggcgcagcgtcctcccaaagctcgaagcttgttccacatcataaatgtgatttgtgtttcctcatgatgtttgggaatgggatagggggttggcagctggtgagtttaggctgttttttcccagcctgttttgacactgattactgtatacttgaactgcggtttggaaatgctccagctgttaggttcagttgacgtcatttcttgctgtttgagcttttaaccgtcttcttttcttagatcaactgaaatagctactggaatctcgtgatattgataatcaatgatgtaccatgatgctacttcctggaa

SEQ ID NO: 116189 - DNA, 1483 bp, Zea Mays
acggaaaatccaatcagggaaaaaatccatttccctttcttctgaagtcgtcctcttcttcccgtcgcttcgccgtgccgcacctgcgaggagaggagacttcgccgcgaagctcaccatgatctcgccggagaggagctcgtcacagagccagcggtcggcggcggcgggggcgccgttcctgtcgatctccgtcacggatcccgtaaagatgggtaccggcgtgcagtcctacatctcctaccgcgtcatcaccaagaccaacctccctgaatttgagggaccagagaaaattgttattcggcgctatagtgattttgaatggttgcatgatcggcttgctgagaggtacaaaggcatttttataccccctcttccggagaagaatgctgttgagaaattccggtttagcaaggagttcattgaattgcggcgtcaagctctggatttattcgttaacaggatagcttcacaccctgaactcaagcaaagtgatgtcttgaggacatttttgcaagcagatgaagagataatggatagggcaagatcttatgagactggtatttttaagaaaccggcagatttcatacagatgtttaagtcaaaagtcagtgatgttgttctgggaaaagaaaagcctgtggaggaatctactcctgaatatgagaagcttaaaaattacatatttgagctagaaaatcatttagcagaggcccaaaaacaagcataccgtcttgtgaaaagacacagagaacttggtcaatctttggcggactttggaaaggcgattaagcatttaggtgcttgtgaaggagatttgatggaaaaggtgttttctgaagttggttcgaagtcagagatgttgtcaataaagctgcaaagagaggcagacaaccttctctttaactttgaagaacccttgaaagattatgtgcgtgctgtacaatctataaaagccactatgcttgatcgagccaatgctttcaggcagcacttcgatttggatcaggagaggaagtataaagagcttaatcttgaaaaattgaagttcatgaaccctgaaaagtatgccgaagcagaatctgagtttcgagaggagcaaaagacagctgatattggactcgcattccatgaatttgccaagggtcaggctaagctagctaaagacattgcggatgcatggcgcagcgtcctcccaaagctcgaagcttgttccacatcataaatgtgatttgtgtttcctcatgatgtttgggaatgggatagggggttggcagctggtgagtttaggctgttttttcccagcctgttttgacactgattactgtatacttgaactgcggtttggaaatgctccagctgttaggttcagttgacgtcatttcttgctgtttgagcttttaaccgtcttcttttcttagatcaactgaaatagctactggaatctcgtgatattgataatcaatgatgtaccatgatgcta

SEQ ID NO: 116190 - DNA, 1492 bp, Zea Mays
acggaaaatccaatcagggaaaaaatccatttccctttcttctgaagtcgtcctcttcttcccgtcgcttcgccgtgccgcacctgcgaggagaggagacttcgccgcgaagctcaccatgatctcgccggagaggagctcgtcacagagccagcggtcggcggcggcgggggcgccgttcctgtcgatctccgtcacggatcccgtaaagatgggtaccggcgtgcagtcctacatctcctaccgcgtcatcaccaagaccaacctccctgaatttgagggaccagagaaaattgttattcggcgctatagtgattttgaatggttgcatgatcggcttgctgagaggtacaaaggcatttttataccccctcttccggagaagaatgctgttgagaaattccggtttagcaaggagttcattgaattgcggcgtcaagctctggatttattcgttaacaggatagcttcacaccctgaactcaagcaaagtgatgtcttgaggacatttttgcaagcagatgaagagataatggatagggcaagatcttatgagactggtatttttaagaaaccggcagatttcatacagatgtttaaggatgtgcagtcaaaagtcagtgatgttgttctgggaaaagaaaagcctgtggaggaatctactcctgaatatgagaagcttaaaaattacatatttgagctagaaaatcatttagcagaggcccaaaaacaagcataccgtcttgtgaaaagacacagagaacttggtcaatctttggcggactttggaaaggcgattaagcatttaggtgcttgtgaaggagatttgatggaaaaggtgttttctgaagttggttcgaagtcagagatgttgtcaataaagctgcaaagagaggcagacaaccttctctttaactttgaagaacccttgaaagattatgtgcgtgctgtacaatctataaaagccactatgcttgatcgagccaatgctttcaggcagcacttcgatttggatcaggagaggaagtataaagagcttaatcttgaaaaattgaagttcatgaaccctgaaaagtatgccgaagcagaatctgagtttcgagaggagcaaaagacagctgatattggactcgcattccatgaatttgccaagggtcaggctaagctagctaaagacattgcggatgcatggcgcagcgtcctcccaaagctcgaagcttgttccacatcataaatgtgatttgtgtttcctcatgatgtttgggaatgggatagggggttggcagctggtgagtttaggctgttttttcccagcctgttttgacactgattactgtatacttgaactgcggtttggaaatgctccagctgttaggttcagttgacgtcatttcttgctgtttgagcttttaaccgtcttcttttcttagatcaactgaaatagctactggaatctcgtgatattgataatcaatgatgtaccatgatgcta

SEQ ID NO: 116191 - DNA, 1413 bp, Zea Mays
gaagggtatctttcttttggtccatcattcattggattggactgacagcatttaaagaaataaagtttccaaacttaatcatatatgtgtactaagtagtaatatgtggcctgaaaagcgcaaatgactaaactaaaaatgactaacatgatactatccagataatcccaccgttatgccacacaagaacaagctattcatctaaaaattgatctccacatcctatggttacagcttcactagaattcattgaagaatcaggatgtagagggattacattaagttaaaaggaacaacataagacaagtatccataaatcagaccaatctgctccactcctctatcacaccaatgtacacaaattgacacatctagtaaatgtagaacaactgaaaatgaacaccttattatttattgcagtaaattgctcctaacaaacacagaatcactcgtgtgacatatttcaacttagttcttatagcccaccaaatgaagagtttacaagtactagagcagacatgttttacaggcgtgactaaaattaacaaacacaggtgtgcatgacaaccagatgtccagactcccatataattttttcagtcacttctacctgagggctactggccagtgcaaatggcacgggtcagtcgaggaatccagtcttccgccagacagcattgcgtacctggcggagatcccgccccttcagtgtgcgcccggctccctccagcattgagaacgtcgtcatcggcgactcccgagcccgcgcgcgcgctaacatctcgtgtggcggtagcatctcctcgtattcatcctccgcttcccccatcaccatcaccacgggcggcttccgcagccgcgccgcaggaacgttgaccggcaatgattgcggcacatacggcgccggtgccggcgccgggcggggaacggcagggatcatgcggggaggggccgcagccggggaagcgggggacgaggacgtggatgaagaggactgaggcggcgagcggcggcgctcggggagggcgtccaggatgccctccggcgggcggcgtaggcgtggaacagggctagggtttgcatggcggacggaggacaggatgagtgggcggcgcaacggctgcggcggctcgggcgagccggatcctgcggagaagaggtcgtcctcgtcaagctcgaaggccgtagaggccgactgttctccggcagctgcggagcgggcgaaggagccaaggaagcgctcggagctgacggagttcctgtgtcgcatgcgatccatggttgagctagcgcgtgccgtcgcgtgtgccagtgtgagtgtgggactgtgagggtgggggagatgtcacgtcactggtgagaggtgacgagacggcgacgagcgcgcaggtgatcaacgaaatgggaggcgtg

SEQ ID NO: 116192 - DNA, 1554 bp, Zea Mays
gctcctctgactacctcctccacctcccacgcaagctcccccgcgctcccagtgcacgccgtgcctccccacctcgcacctcccaagtcccacccacaaccacaaacactcccaaacccttctcagtgcgtggtcccactcacttcgcatgggcaattgctccccgtccccgcgtcgccgccgcccgacggagccggactcgccgccgctcggcagcaccgtgtccgcgcccaccgtgacggtcaactccatctccgtctcctcctacgcgctggccagatctccctccgtctccgccgccgcggtggacgccgaggacgccggcgtcgtgcgcgtttacggctccgacgggtgccccgtcgcgtggcgcctccgcgtctcgctcctctacaaggcggcggcgcccctccacttcacgccctccgaggcggccccgctgggccgccccgtgctccgcctctccgccgccgacccggaggtctgcggcaccgccgacgagctgctgcgcctggtggacgcgcggttcgagggcaagccgcgcgtcgcgccgccggagaggccccgcgcggcgtcgccgtcggccgcggccgcggcggaggtcgccgagctggtgcggctgcagcaccgcagcgcggagcggcacctcgagggcgtggcggcgaaggtggcggagatggttaagaaagggaagaagtcgggcaaggggaggaacgttgtggagggcgctgaggtgaggaggctcggcaagtggtacggggacgcaatggaggtgatgctggagcacgccaggatggaggagaccctcatcttccctgacatacagagggcatcgtttccaggagtgtgcgataaggttaacgagcagcatgggaggcacctgccaatgatgaatggaatcaaggaggatataaaaacactgctgacgttggaattagggagccccctattccatgaagtggtggtcaacctgtcagttcgcctcaaagcgttgcaggaccacaccaaagagcacttcaaggaagaagagagtgaccttctgccacggctagagcaagtaagacggatgcagcgggaggaggggaaggtttctgacaagtctagttcagcgtgggcttctgaggcggtagctacaatggagatgacacactcgaagctcttccccttcttcatgactggtctccttccccaggaggccatgcaatacttggacctagtgtgccgatgcaccaagaacacgcgccatctggtctccatgctcagatctcttgcagagcgtctggaagatgcgaacccgtcaattatacacaacaacccaaccaaactgtatgagcacctccttgtaaagtccccataagcctcaaactgctctgcgcagcgatgcggtgctaacctttacttttcctgtcagtagtgcagcttatgtatttcgggttatttgaacgattgtgaaagcgtggcgtgtatagcttattgtgatatggcagcgtgagtaactacacggaaaaaagtggaagtgttttgaaatgggtatgatttccggctgttctctgttga

SEQ ID NO: 116193 - DNA, 1498 bp, Zea Mays
accggtcccgagggctatcgaacgtaactaccgtcctctgtctcggcgtcggcgagcaacagaacagacagaggaggggaggcgaggcgaggcggaaatggggctccgcgtccgcgcttcctcgcttctgctatccctcgccatcgagctcgcggccgtgctcgtctcagtgtcggcgcagcagaaattcgggatcaactacgggcagatcgcgaacaatctcccggacccgacgcaggtggcgaccctcctccggtcgatgaacgtgaacaaggtgaagctctacgacgcggacccccgggtgctgacggcgttcgccaacacgggcgtggagttcatcatcgccgtgggcaacgagaacctgcagaccatggccggcagccccgccgcggcgcggcagtgggtggcggcgaacgtgcggccctacatcccggccacgcgcatcacctgcgtcaccgtgggcaacgaggtcttctccggcaacgacacggccacgatggccagcctcctccccgccatgaaggccgtccacgcggcgctcgcggacctgggcctcggcggccaggccaccgtctcgtcggcgcactccgtgaacgtgctcgccgccagcttcccgccgtcgtcgggcgcgttccgggaggacctggcggagtacatgaagcccatcctggacttccacgcccagacggggtcgccgttcctcatcaacgcctaccccttcttcgcgtacaaggcgagcccgggcagcgtgtcgctgccgtacgtgctgttcgagcccaacccgggggtgcgcgaccccagcaccggcctcagctacgacaacatgctgtacgcccagatcgacgccgtgtacgccgccatgaaggccatggggcacacggacgtgggcgtccggatctcggagaccgggtggccgtccaggggcgacgaggacgagaccggggccacggtgcagaacgccgccgcgtacaacggcaacctcatgcagagggtcgccatgagccaggggacgccgctcaagcccaacgtgcccgtcgacgtctacgtgttcgcgctcttcaacgagaacatgaagccagggcccacgtcggagcgcaactacgggctgttctaccccaacggctcgccggtgtacgcgctcagcgccggctccggcggcggttcaggtccgggcgggtcgctcaacccgtactacacatccatgttctcctcgtcgtccagatccgcggtgagcgcgaccttcttgacagagagagtgatgctgttactgctgctgcaagcaactgtaatactccgacactactgctagtcagtgaataccttgtaatcttgtatacgaaaaaaaaaatgcatctcaattcaacccatagggtaggccttagattcggaaatttggcacgacagtgtggctgctcgaaaaggtctcatctttttttttttctcttttattcccccgcagcaatgaccttgaaagttcttgaaaaggtgaccttttttc

SEQ ID NO: 116194 - DNA, 471 bp, Zea Mays
accggtcccgagggctatcgaacgtaactaccgtcctctgtctcggcgtcggcgagcaacagaacagacagaggaggggaggcgaggcgaggcggaaatggggctccgcgtccgcgcttcctcgcttctgctatccctcgccatcgagctcgcggccgtgctcgtctcaggtaacccagcccccgggcttgctcgctccctgcctgcttctatcgctgtgggattctctgtcttcttgctcgtgctcttctttctgccgccattgctagctcttgctgtgtggtggatcagtgccacgcccgtctgtcctcatgagacgtcatgagtaggagttgctaggtcagttctctcgagtcctgccacgatcacgatgctaagttgctatgtttgttgccgatttttgggtgggcgcggctagaatttgcagcgagggcacagcactggaaagcagctgcgactgcggaccaagaa

SEQ ID NO: 116195 - DNA, 141 bp, Zea Mays
ggatcttttaatggtataaatccaattgttcctaaaataaaactacccccgccgctgtgtcatactccctgtattagtactagtattaccttgaaaaaaaaaagaaaatggacagcaaaatattgagaaacgaaaggaaga

SEQ ID NO: 116196 - DNA, 976 bp, Zea Mays
atgggtaggagaagcagccagtttccgtcaatggcactggccatggccacggtgctgatggcactgggcggggtagccgccacagcgcgcgccggcggcggcatcgccatctactggggccagaacggcaacgaggggacgctggcgcagacctgcgccacgggcaactacaggttcgtcaacgtggccttcctcccgacgttcggcaggggccagacgccggcgctgaacctggcgggccactgcgacccggcgagcggcgggtgcacgggcgtgggcgcggacgtcaaggcgtgccagcgcatgggcgtcaaggtcctgctctccatcggcgggggcgtcggcagctacggcctctcgtcccgggccgacgcccggagcgtcgcggcgtacctctgggacaactacctcggcggcggcgggtccgagtccaggcccctcggcgacgccgtcctcgacggcgtcgacttcgacatcgagagcggcgggggcatgtactgggacgacctggcccggttcctcaagtcctactcccggcgcgggcgcgggcgcgcgcggaggcccgtgtacctgtcggcggcgccgcagtgcccgttcccggacgcgtcgctgggcaccgcgctcgccacggggctgttcgactacgtgtgggtgcagttctacaacaacccgccgtgccagtacagcgcgagcgccggcgtgggcagcctggcgcaagcgtgggcgcagtggacgtccatcagggcggggcgggtgttcctcggcctccccgccgcgccccaggccgctggcagcgggttcgtgccggcgagcgacctcgtggcgcaggtgctgccggtggtcaagaactccaccaagtacgggggcatcatgctctggtcgaggtactacgacgggctcacggggtacagcgacgcggtcaagtcctacgtgtgagctaggcagcctcgtgtcatgtcgggcgtgcaggagggag

SEQ ID NO: 116197 - DNA, 1290 bp, Zea Mays
catcccgtgacgctcacattgctattgataacactagaaaaccgctataaaaaggtggccggacattgatcaatcttcgccagcgccatagctactcaaagcacatccttactagctagcactagcaatagcactgtctcgggttaggctaggcgtaggatcatcagtcgctatctagctagccggtttaaccatggcagtagcccgacctctggctcccttccagctcatcgccgtcctctcgctggcgctcctcgtcacgagccacgccggcgggatcgccgtgtactggggccagaacacgggagaagtgaccctgtccgcgacgtgcgcgtcccgcaggtaccagttcgtcatcctcgccttcgtctcccagttcggcgagggccgggcgccgcggctggacctgtcgggccactgcgacgacgcctcgtcgggcggctgctccggcctgagcgacgacatccgctcgtgccagcgccgcggcgtcaaggtcctgctctccatcggcggcggcgaaggcaggtacggcctgtcgtcgcccgcggacgcgcggctcgtggccgcgtacctctggaacaccttcctcggcggcacgtcgtcgtcgcgcccgctcggcgatgccgtcctcgacggcattgacttcgacatcgagctcggccgcgccaagttctgggacaacctcgccagggacctgaaggacatgggcaaggacggcgacaaggcggtgctcctgagcgcggcgccgcagtgcccgttcccggaccagtgggatggcgccgcgatcaacacggggctgttcgactacgtctgggtgcagttctacaacaacccggagtgccagttcagctcgggtcgcaacgccttcctggacgcgtggaagcagtgggagtcggtgccggcggggcagatcttcctcggcctgcccgcctccaaggacgcggcaggcaccgggttcgtgcccgcgggccagctcacgtcgcaggtgctgccgctcatcaagggctcgcccaagtacggcggcgtcatgctctggtccaagttctacgacgaccgcacgggatacagctccgctatcaagagccacgtctgaatgtctggtagaatggtagcatatttacaagcgtgcatgtactgtatgcgtctgtgagtgcgtgtggagttgtcctgtgctagatagttttatatctcagcatgttcgtattcgatgtagcagagcaaaaataccagctttgcaattttcactcgccatgactccatctcagtaggccctttatcaacaaataaagc

SEQ ID NO: 116198 - DNA, 1215 bp, Zea Mays
cttaaccacagtcacttcagggtaaattcacacagaagtgcagactaaccacggcacgaaacctatcaaagaggtctccacggcgttcatattgctaatgcaaaccgttataaaaggagacacgagtatgcacacttcgccatcccatctctgatctctccactcaatactcgtagaacagctacctaaagtaagctgggcaccctcgatcaagccatggcaaaccgagctctagctccattcctgctcgtgaccaccctcttggtgtcgctccttgccacatgccatggcggtggcatcgctgtctactggggccagaacgacggcgaggcgtccctgtccgagacgtgtgcgtcaggaaactacaagttcgtcatcctcgccttcgtctacaagttcggcaagggccagacgccgcagctagaccttgccagccactgcgacccctcatcgggcggctgcacggggttgagcaaggacatacgttcgtgccagaacagcggcatcaaggtcctgctctctatcggcggcggcgacggcagctatggcctgtcgtccgagggggacgcgcgggacgtggccgcgtacctctggaacaattacctcggcggcacgtcgtcgtcgcggcccctcggcgacgccgttcttgatggaattgacttcgacatcgagcttggcggcgccaagtactgggacagcctggccagggacctcaagaacaagggcggcaagggggtgctcctgagcgcggcgccgcagtgtccgttcccggacgagtgggacggcggcgcgatcaacacggggctgttcgactacgtgtgggtgcagttctacaacaaccctccgtgccaggtgaacgccggccgcggcgcgttcatggacgcgtggaaacagtgggagtcggttccggcggggcagatcttcctaggcctgcccgcctccaaggacgcggccggcactgggttcgtgcccgccgacgatctcaactctaacgtgctgccgctcatcaggggatcgcccaagtacggcggcgtcatgctctggtccaagtactacgacgaccgcgcaggctacagtgacgccatcaagagccatgtgtgaattataaggcctacttaggaattaggatacgcttgtgcatacacacgcgcttggtgttagcgtctaccgttcgtttttgcattgtgtgcgacttattgtattttgtgtgtagtc

SEQ ID NO: 116199 - DNA, 1044 bp, Zea Mays
acgctataaccctaggcctcttggtatttaattcccagcagcagctgcccacacgccgccgccgttcgctgctcggcgctctcctctcccgacgacagctacacctcacaaccgtgagctcgcgaaggaacgctgttcgcaattccggcgccggcaccatgagtaagctgcagagtgattctctgagggacgcgattgcctcaattaccaatgattcccgtgagaagcagcgcaaatttgttgaaaccattgagctacaaattggactgaagaactatgaccctcaaaaggacaagcgcttcagcggttctgttaagctgcctcacatccctcgccctaagatgaaggtttgcatgcttggtgatgctcagcatgttgaggaggcagagagaataggtatagacaatatggatgtggaagccctcaagaagatgaacaaaaacaagaagctagtgaagaagctggcaaagaagtaccatgctttccttgcatctgaggctatcattaagcaaattcctcgtcttcttggtcctggtcttaacaaggcaggaaaattccctaccttggtgacacaccaggaatcccttgagtccaaggttaatgagacaaaggctacagttaagttccagctgaagaaggtgctttgcatgggtgttgctgttggcaactgcggcatggatgagaagcagatcttccagaatgtgcaaatgagtgtcaacttcctcgtgtcgctcttgaaaaagaattggcagaatgtgagatgcttgtacctgaagagcactatgggaaaggtgtaccggctgttctaaattttccaattaggcttagaatttccaggagactcgagtgcttggacacttgccattttccctaccatccatttttttgagcaactatggattatctagttacaaacttggtcttgtacttgatgttttgttcttgataccgaacctatgacattgttaccttatttcaatgtttctctcgtcacccacaggccgggggctacgatgtccttgagtcctatccgtacggtagcct

SEQ ID NO: 116200 - DNA, 1017 bp, Zea Mays
acgctataaccctaggcctcttggtatttaattcccagcagcagctgcccacacgccgccgccgttcgctgctcggcgctctcctctcccgacgacagctacacctcacaaccgtgagctcgcgaaggaacgctgttcgcaattccggcgccggcaccatgagtaagctgcagagtgattctctgagggacgcgattgcctcaattaccaatgattcccgtgagaagcagcgcaaatttgttgaaaccattgagctacaaattggactgaagaactatgaccctcaaaaggacaagcgcttcagcggttctgttaagctgcctcacatccctcgccctaagatgaaggtttgcatgcttggtgatgctcagcatgttgaggagagagaataggtatagacaatatggatgtggaagccctcaagaagatgaacaaaaacaagaagctagtgaagaagctggcaaagaagtaccatgctttccttgcatctgaggctatcattaagcaaattcctcgtcttcttggtcctggtcttaacaaggcaggaaaattccctaccttggtgacacaccaggaatcccttgagtccaaggttaatgagacaaaggctacagttaagttccagctgaagaaggtgctttgcatgggtgttgctgttggcaactgcggcatggatgagaagcagatcttccagaatgtgcaaatgagtgtcaacttcctcgtgtcgctcttgaaaaagaattggcagaatgtgagatgcttgtacctgaagagcactatgggaaaggtgtaccggctgttctaaattttccaattaggcttagaatttccaggagactcgagtgcttggacacttgccattttccctaccatccatttttttgagcaactatggattatctagttacaaacttggtcttgtacttgatgttttgttcttgataccgaacctatgacattgttaccttatttcaatgtttctctcgtcacccacaggccgggggctacgatgtcctt

SEQ ID NO: 116201 - DNA, 429 bp, Zea Mays
acgctggaggagatgctgaacccaagacaatcaagtgttcatgcccccagcgtgcggcgcggacctgagttcctccagcgccgccctggcctggtcctgcagcaggttcatccgacgcagcttgtcgacaattagaggctctcccattcttggatccacttaagcattttagaggtgttgtattctactatcaaagttacatcggttgctctgtgagacaaccactcacttgcatttcttaagaagcatcgacagttatctgtagcagtcccatagtacctctcgcgtcaacaaacatgaaacatataacaacctagggagactgtccgcataagctcacttgaaatcagaacctcgatgacgacatgatgactgatgagattaaatggctttagaaagtaaacgacatgataattgatcagaaactcg

SEQ ID NO: 116202 - DNA, 1065 bp, Zea Mays
atggtgaagactgaagagcattattccttaccttcagcaaggaaaatttatggctaccagagtaattacctatggaagatctttcatcacgtcagcaaagtgtcatttccccataatttacatttacataatcaagttcttcaaaacaacgagcaacccactcatctaccaggccaacaacatcgatggacacctaacaccaacaacatcgatggacacctaacagtgttcgacaatgtttcagttcaaaataacaaagctcgggcgacggatctggatgctaggtcctccggacgacaaggtggcgagggggatgcaggatgcggcgacagctttattgagcagcggccacgcgaggacagaagagagaaggcggcggtggtgggcgagggcgagggggatgcaggatgcggcgacaactttattgagcagcggcctcgcgaggacaagagagagaaggcggcggtggtgggcgacagcctcgcgaggatgggagagcgaagctccggacgacgaggtgggcgagggcgagacgatgtaggacgcagcggtagcgttggtgggcggtggcctcacgaggacgggagagagaagacgctggtggttcgtgctcctgtcctgctcacgcctgcctcccagtggttcatggacctcaccgcctcctcgatcccgcatggcgcgtcgccgcacgccgtggcggcgttccacaacatgctcatccgagcggacgcgaacgcgaaggcagcatgtcgcgcgtccgaggcgctcgatgccatcgtgtcctgcctcgtcgacctcgacctgtgctcactcacgtcctcgctccgccacatcgagcgcctcgtggacgtcgtgggcctcctaacgcgggcgctcggctcatgcctagactccgtcttgccactcgtcgtgtccgtcgtcgtcaatgggttatgcaagtcggggcttgtggacgacgcatgccggctgctcaacgatatgcctcgcaatggcgtgaaactgaatgtgttgtggtacaacttgatgcttgactgttatgacattgttgcattagcgacatcttga

SEQ ID NO: 116203 - DNA, 99 bp, Zea Mays
gagcctctacagtgatgcatatggcatgcagtcattgaaaatgtcaacacgaactttctttaacaatgtagatccgacatgcacccgagctgacattta

SEQ ID NO: 116204 - DNA, 111 bp, Zea Mays
tttttttttggttttgacatgacttgccagttggaaatttcacgctcagtggccagaatatggataatccaaatgcttccacggattgcatcctctttttttttcatccac

SEQ ID NO: 116205 - DNA, 921 bp, Zea Mays
acggctcaccgctcagcgctcacacagtcacactcacacggccacgtccggactccagaggcctcgtcttcagtcttcaccctcttttcaacggttccggtgagccccgaaaacctaggtcgacacggccagcgctggtgtgacgaagcgggcgaggccgtctggctgactattggcggaaccgcggaagaagcgcgcgtgaatctcctggatttacagactcgagggggagctgagaaaagatggagtgtttgttggaggatggccttcttcggttgaacacctgccaccaggtgaccctgcaatcatagattgcacgtgtgagttgccaaaaagctcaactatatctaacaatgcatatctgtgtgttgctacctgggatacgagggctcctcaaccatcacaaattgagtctgccgtgcgatgggctgtgagacagcggtcacagaacaaacctgtctatgtccactgtgcctatggtcatggcagaagtgtctgtgtgatgtgtgcgcttcttgtcgcattaggattggctgaagattggaaagctgctgagcaaatgatccatgagaagcgaccttctattagcatgaacactcttcaccgcaaaagcttggaggaatggtcaaaacatttgctcccctctaaaagaagtggggaagcagatgtgagttctgttatccattcggattataaccggaaataaaattagaccagcaagagacaggcgtgttcagatatttaagatgcattgtacatttggttgtattgtttgctcctgtcctagtgaatgcctatggttcaagttaccattttgtggtaattgtgttgtaaaaactatatgtatcgaattatattagtactgtagctttacacagttagttctttacggaagatttatgaggtgtttggtttgatgaa

SEQ ID NO: 116206 - DNA, 1208 bp, Zea Mays
acggctcaccgctcagcgctcacacagtcacactcacacggccacgtccggactccagaggcctcgtcttcagtcttcaccctcttttcaacggttccggtgagccccgaaaacctaggtcgacacggccagcgctggtgtgacgaagcgggcgaggccgtctggctgactattggcggaaccgcggaagaagcgcgcgtgaatctcctggatttacagactcgagggggagctgagaaaagagatgggttggggaatatcaaggttgattggactgaaggctgctgtcctgctttctgtggcgtgttttttccaaggattaggagtgatccttatctcatttcctctcatatatgcatccgtgattgcaatactagtctccatagcttcccacccatcaattgatcttcctttacttcttggcaaggcatccgatggaagttttccgctgtggtcatggatcatcttctcaccatttcttcttttcattcacctgtttgtgctgatacgaagatttgtgaaaaacgagcccttatacactgaggttgcagatggagtgtttgttggaggatggccttcttcggttgaacacctgccaccaggtgaccctgcaatcatagattgcacgtgtgagttgccaaaaagctcaactatatctaacaatgcatatctgtgtgttgctacctgggatacgagggctcctcaaccatcacaaattgagtctgccgtgcgatgggctgtgagacagcggtcacagaacaaacctgtctatgtccactgtgcctatggtcatggcagaagtgtctgtgtgatgtgtgcgcttcttgtcgcattaggattggctgaagattggaaagctgctgagcaaatgatccatgagaagcgaccttctattagcatgaacactcttcaccgcaaaagcttggaggaatggtcaaaacatttgctcccctctaaaagaagtggggaagcagatgtgagttctgttatccattcggattataaccggaaataaaattagaccagcaagagacaggcgtgttcagatatttaagatgcattgtacatttggttgtattgtttgctcctgtcctagtgaatgcctatggttcaagttaccattttgtggtaattgtgttgtaaaaactatatgtatcgaattatattagtactgtagctttacacagttagttctttacggaagattt

SEQ ID NO: 116207 - DNA, 1870 bp, Zea Mays
acggctcaccgctcagcgctcacacagtcacactcacacggccacgtccggactccagaggcctcgtcttcagtcttcaccctcttttcaacggttccggtgagccccgaaaacctaggtcgacacggccagcgctggtgtgacgaagcgggcgaggccgtctggctgactattggcggaaccgcggaagaagcgcgcgtgaatctcctggatttacagactcgagggggagctgagaaaagagatgggttggggaatatcaaggttgattggactgaaggctgctgtcctgctttctgtggcgtgttttttccaaggattaggagtgatccttatctcatttcctctcatatatgcatccgtgattgcaatactagtctccatagcttcccacccatcaattgatcttcctttacttcttggcaaggcatccgatggaagttttccgctgtggtcatggatcatcttctcaccatttcttcttttcattcacctgtttgtgctgatacgaagatttgtgaaaaacgagcccttatacactgaggttgcagatggagtgtttgttggaggatggccttcttcggttgaacacctgccaccaggtgaccctgcaatcatagattgcacgtgtgagttgccaaaaagctcaactatatctaacaatgcatatctgtgtgttgctacctgggatacgagggctcctcaaccatcacaaattgagtctgccgtgcgatgggctgtgagacagcggtcacagaacaaacctgtctatgtccactgtgcctatggtaattttgctcttctgcctatgtttggataaggaactgtgttgtctttcatatatgtctttcttgcaaatagatatatttatgttcttaaatgtatttctgtggattagccatatttagataactgttgagatcatgatgatccacaatggaatttcatgtattggcgaaccatatattgtgtagcaactggagtcaggagacaacagtaagctgatatgttatttttttcatttctggtgtcatcttatttcatgcgactatttgccatgtcttatttagttgttcttatctgcaacaagatcataagaagtaaaaatgccatgtataagctgaacagcatttgcattacattcagacagtataagggtcatcatatatgttgtgtagatagtcttataatagtatcagactttaaagagattttttagccaaatttaagcttaaacattgaaagaaaattaagctctggatatgtgctttggctggacttttaggtttggctcttagcttaaacttccctgttactaattttaaaataaaacctctttattaagtcttgttcttaccacttcctcacttacctaatatgccatcaaattgaacttaagtccaataatattgatcgcttggatttctttatgtgatggcgtgttatatctctaacaggtcatggcagaagtgtctgtgtgatgtgtgcgcttcttgtcgcattaggattggctgaagattggaaagctgctgagcaaatgatccatgagaagcgaccttctattagcatgaacactcttcaccgcaaaagcttggaggaatggtcaaaacatttgctcccctctaaaagaagtggggaagcagatgtgagttctgttatccattcggattataaccggaaataaaattagaccagcaagagacaggcgtgttcagatatttaagatgcattgtacatttggttgtattgtttgctcctgtcctagtgaatgcctatggttcaagttaccattttgtggtaattgtgttgtaaaaactatatgtatcgaattatattagtactgtagctttacacagttagttctttacgg

SEQ ID NO: 116208 - DNA, 540 bp, Zea Mays
cgagcactatggcatttattatttcctcccgaatgcatcatgttctgttcacatcataaggtaacagttaggaaccacattagggaacaatttctagctggatttcttctctaagttatataagttttgattagctgaaacgattccaaatccattcctagacaaacgaacaagcccttacacagaatggaacgcaaaagctcaggttcgcatgcactggtactaccgcaactatcaggacccaggttccataccatatgtattcagaacctggggactgcaattctaagatgcaaaggtctattgcatcggttctcccctatgcacagctaagccaaccaccctcggcgacccggtcaaaagtagcagaaaagaatagagtagaacctaccaccatctgtgtgacaagcctctgtttctcgaagagcattccagattgcggctcttcagattctctggcatcgtatgatgcctgcagcacctccatagcacagccatctctggctacccttgttcatgttccaccgcacttgattcaaa

SEQ ID NO: 116209 - DNA, 1435 bp, Zea Mays
atacccgctacctcctctggcatgccacacgccgccatccccctagcccatcgtgtgtcacgcgcccagatctcctatttttacgcccccacgcaacataggccatcccaccatggagcaagaaaccctagcgtagccaccaaccactgctgccccacatggcatcctgactgtggctgcatccatctcggcgcctcgcccaccacgttgcaccaccaccgccgctcctcctccccaccgcgctgtcgccctgagtaccaccgccaccgccaccgtgcatgtcgctagggccgcatctctcgatgttagggcccaaccgaacatcgtcgtcgcctccacctctgcgtctgggccaccgcaagagtttagggctcctccggggttcgagatcatgtccgaccagcagagcagcatcctcagcaccatgctcgacaaccccctccacctcggtactggcgtcttcgccctcgggtacgcaccacaccttttctcaccatccgagcattgccaaggagctcctctccatccccaacgcgcgccacgccccaccaccaacgatgaatgggtgcttcagattcactaagacgatggcgcgtctgcggcaaggagcttcagattcactgccatcagaaacttgcagttattggccagatgaagggcgaaggccattatcagatcctcgtccacctttgggctattgctgacaagtggacgagtgtcgtacacctctccaattccccccttcaatgtggtcagtgttgaatcatctacgtcatacagtgagcaagggcatactgatgagggaagggatgacatggatttttctcgttcgagcatcaggttttgtgcgttgattatggtgtgctcgttggtgagactgcgacgtcctcgttcaagtcagctgataatcgtgtcctccaagagcaactactacagaagaatgtggaaatcaacgatttataagaaaaagtttttcacgttgagcaataactctcagcaaaagtggatatatcctctgagaaggaagctgattgtgcacatcaggagactattgatttgaaatctaaacttcagtccaaggaagctaaaattgaaaagatgaaatatgagcatctggcgagggaggctgctttggtagaggatcttcttgaagaggagtacaagaaaaagtttgatgaggcaaacaaggaactatctcttgagaatgatctagcaagcatgtgggttcttgttgctaagttgaaaagaggggctttagacacatctgatttgaatgttgatgatcgaactaaagtgtaagggcgtagagatcgccacactgttgtctcataattggtgttaataaaaaataacatggtgctgcacggaatctctactttgtcttgtaagcaggattgttctgtcggtataatttgatttgtatgtataatgtctt

SEQ ID NO: 116210 - DNA, 436 bp, Zea Mays
attagatggctatatgcaaactgcttgtattttatgctttccttgttgatatttaagccaaccaactttgatgatgtactttggtaggaagctaaaattgaaaagatgaaatatgagcatctggcgagggaggctgctttggtagaggatcttcttgaagaggagtacaagaaaaagtttgatgaggcaaacaaggaactatctcttgagaatgatctagcaagcatgtgggttcttgttgctaagttgaaaagaggggctttagacacatctgatttgaatgttgatgatcgaactaaagtgtaagggcgtagagatcgccacactgttgtctcataattggtgttaataaaaaataacatggtgctgcacggaatctctactttgtcttgtaagcaggattgttctgtcggtataatttgatttgtatgtataa

SEQ ID NO: 116211 - DNA, 1689 bp, Zea Mays
atacccgctacctcctctggcatgccacacgccgccatccccctagcccatcgtgtgtcacgcgcccagatctcctatttttacgcccccacgcaacataggccatcccaccatggagcaagaaaccctagcgtagccaccaaccactgctgccccacatggcatcctgactgtggctgcatccatctcggcgcctcgcccaccacgttgcaccaccaccgccgctcctcctccccaccgcgctgtcgccctgagtaccaccgccaccgccaccgtgcatgtcgctagggccgcatctctcgatgttagggcccaaccgaacatcgtcgtcgcctccacctctgcgtctgggccaccgcaagagtttagggctcctccggggttcgagatcatgtccgaccagcagagcagcatcctcagcaccatgctcgacaaccccctccacctcggtactggcgtcttcgccctcgggttgtctgcgctcttctcttagggatcgagaatcgcagggaggttcctcgcttctataagaaagatgtgcttttttatttcattttccttgtggagttgtagttcagttcagtttgtcttcatgcatggggagtgcttggttcgattgttcatagccataggtgctacagattcgtctatggccaagacagaagtttttgttttcatgatgttttcatggaagaagatggcgagaagctctctgcccttctcatagttaactcttttgattaagtgattaaccaatttagtaacacatatttaatgtttcagcttgtttggtttagacatggtccctcagtaaattttttatttttttattatctttatccataaactaagttggtatgtagtgacgggtaagaaatactgtggtggtttggacctcagttattggccagatgaagggcgaaggccattatcagatcctcgtccacctttgggctattgctgacaagtggacgagtgtcgtacacctctccaattccccccttcaatgtggtcagtgttgaatcatctacgtcatacagtgagcaagggcatactgatgagggaagggatgacatggatttttctcgttcgagcatcaggttttgtgcgttgattatggtgtgctcgttggtgagactgcgacgtcctcgttcaagtcagctgataatcgtgtcctccaagagcaactactacagaagaatgtggaaatcaacgatttataagaaaaagtttttcacgttgagcaataactctcagcaaaagtggatatatcctctgagaaggaagctgattgtgcacatcaggagactattgatttgaaatctaaacttcagtccaaggaagctaaaattgaaaagatgaaatatgagcatctggcgagggaggctgctttggtagaggatcttcttgaagaggagtacaagaaaaagtttgatgaggcaaacaaggaactatctcttgagaatgatctagcaagcatgtgggttcttgttgctaagttgaaaagaggggctttagacacatctgatttgaatgttgatgatcgaactaaagtgtaagggcgtagagatcgccacactgttgtctcataattggtgttaataaaaaataacatggtgctgcacggaatctctactttgtcttgtaagcaggattgttctgtcggtataatttgatttgtatgtataa

SEQ ID NO: 116212 - DNA, 1414 bp, Zea Mays
ctgctgcttatctcgtggccgatccgcgctcgccccgtccccgcatctcgccgccgcgccccggtcagtgtgcgcttgagacatcgcccacacgagacatcgtgtgtgatgcccgcccccaacccttccccggtgtgatgcccgccgttgacgtctcttctctcgcccccatcctcctcaacctcggcgccgcccctgcccctgtcctcgatggcaaggaaacttcccccgggcataaatctcactgctcacgcgccattagcgccatacccgctacctcctctggcatgccacacgccgccatccccctagcccatcgtgtgtcacgcgcccagatctcctatttttacgcccccacgcaacataggccatcccaccatggagcaagaaaccctagcgtagccaccaaccactgctgccccacatggcatcctgactgtggctgcatccatctcggcgcctcgcccaccacgttgcaccaccaccgccgctcctcctccccaccgcgctgtcgccctgagtaccaccgccaccgccaccgtgcatgtcgctagggccgcatctctcgatgttagggcccaaccgaacatcgtcgtcgcctccacctctgcgtctgggccaccgcaagagtttagggctcctccggggttcgagatcatgtccgaccagcagagcagcatcctcagcaccatgctcgacaaccccctccacctcggtactggcgtcttcgccctcgggtacgcaccacaccttttctcaccatccgagcattgccaaggagctcctctccatccccaacgcgcgccacgccccaccaccaacgatgaatgggtgcttcagattcactaagacgatggcgcgtctgcggcaaggagcttcagattcactgccatcagaaacttgcaggtgaggaaggagagggtccaagttcctgacctctgcatcgattgggagggtccaagttcctgacccctgcattgactgattatctttgagtttaatcattatgttgaaattggtgtgcattcaaaatattcaattgattctcacggctaccatggctcctagcgaaacttgtttatcgttggtgtatctggcgtattaatggaaaaaatttaccttctctctttgagggttccagtccatttcgttctctataattgtcacctacccttcctgagcctacttttgttgctaatgtaagaataagaaagaaaaaagcttcatctctatttgtttctgctatgcattgtgtagcttagagttgtcacttaacttacaatcttacgttggtgtaaaacagtgaccacactaaaagcacaaatgcaaggttttatagaccatgtgtgatgctgctaccactaacatgtacaaataggaaaggcaacaaaatggcttagagcaagtatttttt

SEQ ID NO: 116213 - DNA, 407 bp, Zea Mays
ccatggcgtcgggaagccgcgtcgcacccacacgctatctcgcctctgcgcggcctgagttgccacgtcacacgcaccaccaccactcgtagtcatcgggcgaaagcacatcccgcgctggcagaggagggggtcgtggctggccacgaagtcgatctccaaggtcgtggcccagtacaccctagacgtgcggctccacgtgatgttcgagaaatctggtgtgtcggcccgcagcttcgactactcccagttgctgcgcacgccgcccacgccgtcctccgagcagcaaaggccacatccaacccttcaactgcaagctcgacgtcgccaatgactccttccgcctcctcactttctccgagaatgccaccgacttgtcgccgcaccacttcattccctcgctcgac

SEQ ID NO: 116214 - DNA, 439 bp, Zea Mays
atggcgtcgggaagccgcgttgcacccacacgctatcccgcctctgtgcggcgtgagttgccacgtcacgcgcaccaccaccactcgtagttgttgggcgaaagcacgtccctggcagaggagggggtcgcagggctttcgtggccacgaagtcgatctccaaggccatggcccagtacaccctagacgtgcggctctacgtgatgttcgagcaatctggtgcgtcggcccgcagcttcgactactcccagttgctatgcgcgatgcccatgccatcctccgagcagcgactgccacatccaacccttcaactgcaagctcgacgtcgcatgaatccttccgcctcctcgccttctccgagaatgccaccgacttgtcgccgcaccacttcgttctctcgcttgactctacgtcgccgttgcccgtttccctaggtgcc

SEQ ID NO: 116215 - DNA, 702 bp, Zea Mays
gacataattctagcatccattcaaccatttagggtagtgttaaaaaatatcaagacaataaaaaattgtaattctataaccaaatcattacgaaaattgaagatgagaatcatttggaccctagccattgtcgtaataatgatattggttgccccaaactataatgatcataattcttcttgtccaaacttctagcgccttgacgtgtcagagtcgaactgttcaaccttaactgaaacctcgaatccagtagtgctttgtgcatctatcgaacataacgatgtcctgctaatgtggtccagttcagaaaaccgttcctatgcctatgttcaaaaggtaaaagagaaatcatcaaagcacaagttcgatatacaataccacttgatgaaagcaataaagatacaaacaggtttgatagccaaaagaaaaggcaacaaactctgccaaactaaagttccaacaacttcaacattaataaaagaacctcgattaataaacaaactctgcagaactgtaagctccagacttcatttgtattatcatctacatttgcaacatgagaacttggtcttcgatttatacctttattagacatcttatttgcaccctatttctcatatttattgttttccctttgttcaaatcaaaaggtgttatgacttcattattcgcatattattctacaggaaatgattgcttgct

SEQ ID NO: 116216 - DNA, 1661 bp, Zea Mays
gtcattgacctgtcaaatgtttgtttgagttaacttgcaaatggaattgtgggatcctacattggctaaaggaattaagattttcttagcaacatcaactccactctttggacacgtagctactaattacaccgtgaactaccagaaggccgctattcagttgagctgcagtggcaatggtatttccttctcagaaatgtggaccttgcaattataacttcgttcagcatatgaagagtagctcttctgaaagtagttctcatgaagtggttgcctgtttcagttccatgtgactggtgatatggaatgcatgcaggcccttcgccaccacgcagagcagaagccagcaaatttgatgatgatgttagtccacgttacactcatggatatcaagggggtggtagaggaggtgcaaggttccgagagggtcctccaccatatggaagaggtagatcatatgggagaggttatggtgctccacatggaaaggatttgattaatattgatggagaatatgttcaccgaaatgacccaaatctgtcgccaagagaaggtgattggatatgccagaaccctaattgtggaaatctcaattttgctcggcgaactcactgtaacaactgcaacaagttccgctattcagcacgtgaagcatatgaacctaggcgcagccctcccttcaggagttaccccagccctccacgagggcctccaaggatggttggtccacctggtgatcgagcccctgcaagagagatggccaggtacagatccccacctcatggttggggagcaagtgatcccagggcatatgcaggtcgatcccctccagaacgtgcaggacggtttacagatccatcaactaagggaagaatgggcttccgtggtgagcgtgacccaagggaccgtgtgaaatatgagtggtctgccactgatgactacgttcagagggagcgcccatatgatggttatcttgacaggagtcggcgtcgctcaggatctcctcgtggtaactggggaaatgatctgcgtgacagaagccgctctcctgcacggaacaggcctatgaagagttccttcaccggaagaggtcgacctgacgactatgctgctgatccatatggcagccgagggagacccaatggtatggaggccggccgtgggcgtgggcatgcttacagagcaggcagtggtccgtaccctggtgagactcgaggtgaccaacgcgctgctccacgcgctaggaacgaggatggctattagatcttcatgaagctgagtgacgtcattttgtctttgttggtcaggaaaggagaaccttagtcaagctggagcttgagaatatctgcagcttgtaatattaaagatcgtgcacacatcctgttcctgcatgttgtggagttatggttggcttctctcatgctcagtggtgggatctattaaagggtcatgggtggacacatatacacccaataatttctgcaaaaaaaattagtactcatcaagtagcaaataacgttctattgccgtgattctaagcgtctgtttagaagtatccagtttttaagaaactggtttatgtaaattgaggtggtttatagaaattggattcccatttcttaaaaaccaagaagctggccacttctaactaaaaaataaaa

SEQ ID NO: 116217 - DNA, 1960 bp, Zea Mays
cgcggcttgatttcacttggccctctagcgttgtttggtcaatcctctctctcccttccccatctccccgtaccccaaaccctaggacgcagcgccgccgccgtagcacccccacacgcagcaagatgaggccgcgcggcaggggcgacgacgtcgaagacgacgaggatgagtacgaggacatcacgccccctcgaagaacgccagagcctgaggccgaccccgtccgctcgccctcgccctcgcccgctcctgcccccgccccaccacatcccgcgcgtgcccctctcagcagtctcgttgtcaggccgccgccgcagcaacaggagaacggcggcggatcctccccgccctcatcctccgcccgctcgctttctcccagcaccggcggacaccgaggccgcggggcctcgcccccgcggcgacggcgggacttctcaccgccgcctccccgtggttgggtgaggcgccggtcgccgctgccgccaccgccggagaggcggcgtcctgggagcccgccgccccagcgccgacgcttcagcccaccgccccggtcccacctaccgcggcatccgcgcttccacgatgagcaggaaggatatggaatgcatgcaggcccttcgccaccacgcagagcagaagccagcaaatttgatgatgatgttagtccacgttacactcatggatatcaagggggtggtagaggaggtgcaaggttccgagagggtcctccaccatatggaagaggtagatcatatgggagaggttatggtgctccacatggaaaggatttgattaatattgatggagaatatgttcaccgaaatgacccaaatctgtcgccaagagaaggtgattggatatgccagaaccctaattgtggaaatctcaattttgctcggcgaactcactgtaacaactgcaacaagttccgctattcagcacgtgaagcatatgaacctaggcgcagccctcccttcaggagttaccccagccctccacgagggcctccaaggatggttggtccacctggtgatcgagcccctgcaagagagatggccaggtacagatccccacctcatggttggggagcaagtgatcccagggcatatgcaggtcgatcccctccagaacgtgcaggacggtttacagatccatcaactaagggaagaatgggcttccgtggtgagcgtgacccaagggaccgtgtgaaatatgagtggtctgccactgatgactacgttcagagggagcgcccatatgatggttatcttgacaggagtcggcgtcgctcaggatctcctcgtggtaactggggaaatgatctgcgtgacagaagccgctctcctgcacggaacaggcctatgaagagttccttcaccggaagaggtcgacctgacgactatgctgctgatccatatggcagccgagggagacccaatggtatggaggccggccgtgggcgtgggcatgcttacagagcaggcagtggtccgtaccctggtgagactcgaggtgaccaacgcgctgctccacgcgctaggaacgaggatggctattagatcttcatgaagctgagtgacgtcattttgtctttgttggtcaggaaaggagaaccttagtcaagctggagcttgagaatatctgcagcttgtaatattaaagatcgtgcacacatcctgttcctgcatgttgtggagttatggttggcttctctcatgctcagtggtgggatctattaaagggtcatgggtggacacatatacacccaataatttctgcaaaaaaaattagtactcatcaagtagcaaataacgttctattgccgtgattctaagcgtctgtttagaagtatccagtttttaagaaactggtttatgtaaattgaggtggtttatagaaattggattcccatttcttaaaaaccaagaagctggccacttctaactaaaaaataaaa

SEQ ID NO: 116218 - DNA, 1680 bp, Zea Mays
cactttgtagcattcacagtaacatagcattcctggtgttttaccttttcccagttcaggttggaagttggaactcttcaagtaggtcccagtggggattagcttcgtggcacttggtgctttcttaatcttgtgcagtcatgtggagggagaagtattcggtcttgaagcgacctccttgattctaatatttgagatgccatcaagaatctgttgcagtggtctatatgtcattgacctgtcaaatgtttgtttgagttaacttgcaaatggaattgtgggatcctacattggctaaaggaattaagattttcttagcaacatcaactccactctttggacacgtagctactaattacaccgtgaactaccagaaggccgctattcagttgagctgcagtggcaatggtatttccttctcagaaatgtggaccttgcaattataacttcgttcagcatatgaagagtagctcttctgaaagtagttctcatgaagtggttgcctgtttcagttccatgtgactggtgtaagcatttcttgctgaatgttagttggctttatcttttagtgcttatttggaatttttatacttgtttttcaggatatggaatgcatgcaggcccttcgccaccacgcagagcagaagccagcaaatttgatgatgatgttagtccacgttacactcatggatatcaagggggtggtagaggaggtgcaaggttccgagagggtcctccaccatatggaagaggtagatcatatgggagaggttatggtgctccacatggaaaggatttgattaatattgatggagaatatgttcaccgaaatgacccaaatctgtcgccaagagaaggtgattggatatgccagaaccctaattgtggaaatctcaattttgctcggcgaactcactgtaacaactgcaacaagttccgctattcagcacgtgaagcatatgaacctaggcgcagccctcccttcaggagttaccccagccctccacgagggcctccaaggatggttggtccacctggtgatcgagcccctgcaagagagatggccaggtacagatccccacctcatggttggggagcaagtgatcccagggcatatgcaggtcgatcccctccagaacgtgcaggacggtttacagatccatcaactaagggaagaatgggcttccgtggtgagcgtgacccaagggaccgtgtgaaatatgagtggtctgccactgatgactacgttcagagggagcgcccatatgatggttatcttgacaggagtcggcgtcgctcaggatctcctcgtggtaactggggaaatgatctgcgtgacagaagccgctctcctgcacggaacaggcctatgaagagttccttcaccggaagaggtcgacctgacgactatgctgctgatccatatggcagccgagggagacccaatggtatggaggccggccgtgggcgtgggcatgcttacagagcaggcagtggtccgtaccctggtgagactcgaggtgaccaacgcgctgctccacgcgctaggaacgaggatggctattagatcttcatgaagctgagtgacgtcattttgtctttgttggtcaggaaaggagaaccttagtcaagctggagcttgagaatatctgcagcttgtaatattaaagatcgtgcaca

SEQ ID NO: 116219 - DNA, 889 bp, Zea Mays
atgagaaaaaggactcggctggggctagcatggaggcgagaacgccatggagtccggggcacggatgagcacagtggacccggtgtccaagcgccgagccggggcagactgaagaagccgacgctaggaacggcggtcgagcgctttctgggcgtgatgcagcggcagccaattgctaggggaaggagacggccgtgggagagggagcccgcaggaaatccggcgccgggaatagagaacagggaagcaggggcgcgcgctcaagcagagagcccagcgcggtgcaggagcttgaggggtgcggccatggcaagggaaaataaaacttgggcgcagggaacaaaggggatggaagataggaaaccacgacgccatggaagctccagacccgggagcaggaagccgacagaaggttgcgcgcggggaaggagagagatccggttggccgaagggagaagcaggggcgagcaggggagccagcgcggctggggagagctcgtctagcgagcatgggctgggcgcgacgcagccatggggtaaggcgaggagcagggaaccgagcagagggtctcctcgcgcggccctgtgcgtgcgactggtggagctcacccacgacgctgctgtggccagaggagaagagcaggtagataaagaagaggacaactaggcggctgaaaaaaaaatcttacagagagagaacagcaaggaactctgagagagagaaacacgcggcatcagcatagagggaggagataaggccgcgccagaggagaacggcggcggaatctccaccggcggtgagcggcggccaaaaaaatcaggcacggctgggaggagaggatgaggccgactgacgtgctgaggattagagagcgtatgcagtggccgg

SEQ ID NO: 116220 - DNA, 396 bp, Zea Mays
atggcggccgcatgcctcgcgcccgccccgcctcctctctgcgcgtgcccccttcccccgcaaaccccgacctcaagccggcaatggcggccacatgccccgtgcccgccccgcataccccacgcccgccccgatcaattcgccgtcagcaacggcggccacgcatgccccgatcaattcaccatcgcaaccgcaactgcacccgcctaccacacgattctagtgctccaaaccactgctcaatccttcgcccccttcatttccccgccccttcattcccacgccagtgtgacgctggagaggaaggacgaaggagaaggagcttgccccgccaccggagaggaaggatatctgatattgctcaaccgtgcaggcctcgatcaaggtatgtcatga

SEQ ID NO: 116221 - DNA, 1359 bp, Zea Mays
gcgtctctgcccgtcgcctcgccgaatgccggtgcccatggcagatgtaggcttcactgtgccggttccgacagctggcgggggcggtttcggagcgacttttttgcgagtacggcacggcggcgatggcaacgccggcgtgggtcaaggaaccgcttgcctgtgacggaagatctgacgtagcgccgatgcggtgctgacgttgggtgtcgcgctgtgacggaagaccctcctggcgaggcgcgacgcgacggtggtcgcgacgtcgcggcactggcgcgcgtctggacgcactcggccggccaatcgcgctcccaggtcccagggcccggcatcgtgtggcggtgtggctggaacgcgagagatgatggctcctctgtcctccgtagacaacgggatggcgatggagatgtgagatctcggtgtgcgctggagggttcctttcctcgccctccgttttccccagctttttatttccgaaaggaattcgagcagtgaccctgtgaaaatgcctcgaaaaggatagggctaggaacaagctaaggcggggcacgccgcgatgcttatcttttattcatgtcagtgcttctggcgatcgatttcattctgacgactgctgctctgtgtttccctgcaaaaaaaaaattatttgtttttgcaacagaacgccgcggagaagccgcccttcttcctgccgagctggacggggatgttcgtcctcaacatgttcatcgtggtgtgggtgctggtggtcggcttcgggctgggcggctgggccagcatggtcaacttcgtgaggcagatcgacacgttcgggctgttcgccaagtgctaccagtgcccgaagccgccggtcccggcggccgcgcagtcaccggcgccgctgccgcaccactagggcgcgcaggccccgtgacggcatggagctagcgtcgctgcttgcattgcagccggtgttaattgctactaggttttggtcgccttgtaatatacaagcctcctctagggtcgtagaactcgatcacagcagagtcacgcaaaggcggctcgtgccgtgccgtgccgccgccgcgttgctttcccgcccgccctcctctgcctgatcggtccgtcggcattggtgtcgttttgttttcgtttggcttgccaccggtattaaaaagttgagtgatggtcatggcttcttaatccatatgatgatatgacatacgtatcctatataggttcattagttatttttccttgttggttcgtggaggtcggtccatgttgtgtagcgtgtgggtgactgtaatggactgcgctggaatgctagctaaaggcagaaaacaaaaaaccacagtgcccttttgtttgtta

SEQ ID NO: 116222 - DNA, 2044 bp, Zea Mays
acttttttcgtgcgttcgcgttcgacgcctcgctcggctggttccttccttccttccgctgtgttcccttctgtttctcgggcggagacgggaaggccgtgcgctcaaggatggcgcgcgagcagctggaggagtccatcgtggccgacggcaacggcaaggaggaagaggtcggggtcatgggcatcggcgccgcggacggcgccgacgaccagcacggcggcggcaagctcagcatgaagagcctgctgtggcacggcggctccgtctgggacgcgtggttcagctgcgcctccaaccaggtggcgcaggtgctcctgacgctgccgtactccttctcccagctggggatgctgtccggcgtgctgctgcagatcttctacggcttccttggcagctggaccgcgtacctcatcagcgtcctctacgtcgagtaccgctcccgcaaggagaaggagggcgtcagcttcaagaaccacgtcatccagtggttcgaggtgctggacgggctgctgggcccctactggaaggcggcgggtctggccttcaactgcacgttcctgctgttcggctccgtcatccagctgatcgcctgcgcgagcaacatctactacatcaacgaccggctggacaagcggacatggacgtacatcttcggcgcctgctgcgccaccacggtgttcatcccgtccttccacaactaccggatctggtccttcctgggcctcggcatgaccacctacaccgcgtggtacctcgccatcgccgcgctcctcaacggccaggccgaaggcgtggcgcactccggccccaccaagctcgtgctctacttcaccggcgccaccaacatcctctacaccttcggcggccacgccgtcacagtcgagatcatgcacgcgatgtggaagcccgccaagttcaaatacatctacctgctggcgacgctgtacgtgttcacgctgacgctgccgtcgtcggcggccatgtactgggcgttcggcgacgagctgctgacccactcgaacgccttctcgctgctgcccaagacccggtggcgcgacgcggcggtgatcctgatgctgatccaccagttcatcaccttcggcttcgcgtgcacgccgctctacttcgtgtgggagaaggtgatcgggatgcacgacgccaagagcatcttcaagcgcgcgctggcgaggctgcccatcgtcgtgcccatctggttcctcgccatcatcttccccttcttcgggcccatcaactccgccgtcggcgcgctgctcgtcagcttcaccgtctacatcatcccggccctggcgcacgtcctcacctaccgcacggcgtccgcgcgcatgaacgccgcggagaagccgcccttcttcctgccgagctggacggggatgttcgtcctcaacatgttcatcgtggtgtgggtgctggtggtcggcttcgggctgggcggctgggccagcatggtcaacttcgtgaggcagatcgacacgttcgggctgttcgccaagtgctaccagtgcccgaagccgccggtcccggcggccgcgcagtcaccggcgccgctgccgcaccactagggcgcgcaggccccgtgacggcatggagctagcgtcgctgcttgcattgcagccggtgttaattgctactaggttttggtcgccttgtaatatacaagcctcctctagggtcgtagaactcgatcacagcagagtcacgcaaaggcggctcgtgccgtgccgtgccgccgccgcgttgctttcccgcccgccctcctctgcctgatcggtccgtcggcattggtgtcgttttgttttcgtttggcttgccaccggtattaaaaagttgagtgatggtcatggcttcttaatccatatgatgatatgacatacgtatcctatataggttcattagttatttttccttgttggttcgtggaggtcggtccatgttgtgtagcgtgtgggtgactgtaatggactgcgctggaatgctagctaaaggcagaaaacaaaaaaccacagtgcccttttgtttgtta

SEQ ID NO: 116223 - DNA, 2222 bp, Zea Mays
cgctctctctctcaccgaatcacacacacaggcaggccagtgaggcaggggcacgaaggcgcggctccctctctcaagcccctcgccattactcgctcataaaggaagaacagagcgagcgggtagcgaggaagaagctgggccgcggggcaagaggagagaggtccccagccgtaggtctgctgtgcaactccggctcgccgcctgccaaccgcgcggcgcggccaccacgctaggcccctcgccctcctcgtagcgggcggagacgggaaggccgtgcgctcaaggatggcgcgcgagcagctggaggagtccatcgtggccgacggcaacggcaaggaggaagaggtcggggtcatgggcatcggcgccgcggacggcgccgacgaccagcacggcggcggcaagctcagcatgaagagcctgctgtggcacggcggctccgtctgggacgcgtggttcagctgcgcctccaaccaggtggcgcaggtgctcctgacgctgccgtactccttctcccagctggggatgctgtccggcgtgctgctgcagatcttctacggcttccttggcagctggaccgcgtacctcatcagcgtcctctacgtcgagtaccgctcccgcaaggagaaggagggcgtcagcttcaagaaccacgtcatccagtggttcgaggtgctggacgggctgctgggcccctactggaaggcggcgggtctggccttcaactgcacgttcctgctgttcggctccgtcatccagctgatcgcctgcgcgagcaacatctactacatcaacgaccggctggacaagcggacatggacgtacatcttcggcgcctgctgcgccaccacggtgttcatcccgtccttccacaactaccggatctggtccttcctgggcctcggcatgaccacctacaccgcgtggtacctcgccatcgccgcgctcctcaacggccaggccgaaggcgtggcgcactccggccccaccaagctcgtgctctacttcaccggcgccaccaacatcctctacaccttcggcggccacgccgtcacagtcgagatcatgcacgcgatgtggaagcccgccaagttcaaatacatctacctgctggcgacgctgtacgtgttcacgctgacgctgccgtcgtcggcggccatgtactgggcgttcggcgacgagctgctgacccactcgaacgccttctcgctgctgcccaagacccggtggcgcgacgcggcggtgatcctgatgctgatccaccagttcatcaccttcggcttcgcgtgcacgccgctctacttcgtgtgggagaaggtgatcgggatgcacgacgccaagagcatcttcaagcgcgcgctggcgaggctgcccatcgtcgtgcccatctggttcctcgccatcatcttccccttcttcgggcccatcaactccgccgtcggcgcgctgctcgtcagcttcaccgtctacatcatcccggccctggcgcacgtcctcacctaccgcacggcgtccgcgcgcatgaacgccgcggagaagccgcccttcttcctgccgagctggacggggatgttcgtcctcaacatgttcatcgtggtgtgggtgctggtggtcggcttcgggctgggcggctgggccagcatggtcaacttcgtgaggcagatcgacacgttcgggctgttcgccaagtgctaccagtgcccgaagccgccggtcccggcggccgcgcagtcaccggcgccgctgccgcaccactagggcgcgcaggccccgtgacggcatggagctagcgtcgctgcttgcattgcagccggtgttaattgctactaggttttggtcgccttgtaatatacaagcctcctctagggtcgtagaactcgatcacagcagagtcacgcaaaggcggctcgtgccgtgccgtgccgccgccgcgttgctttcccgcccgccctcctctgcctgatcggtccgtcggcattggtgtcgttttgttttcgtttggcttgccaccggtattaaaaagttgagtgatggtcatggcttcttaatccatatgatgatatgacatacgtatcctatataggttcattagttatttttccttgttggttcgtggaggtcggtccatgttgtgtagcgtgtgggtgactgtaatggactgcgctggaatgctagctaaaggcagaaaacaaaaaaccacagtgcccttttgtttgtta

SEQ ID NO: 116224 - DNA, 2218 bp, Zea Mays
cgctctctctctcaccgaatcacacacacaggcaggccagtgaggcaggggcacgaaggcgcggctccctctctcaagcccctcgccattactcgctcataaaggaagaacagagcgagcgggtagcgaggaagaagctgggccgcggggcaagaggagagaggtccccagccgtaggtctgctgtgcaactccggctcgccgcctgccaaccgcgcggcgcggccaccacgctaggcccctcgccctcctccgggcggagacgggaaggccgtgcgctcaaggatggcgcgcgagcagctggaggagtccatcgtggccgacggcaacggcaaggaggaagaggtcggggtcatgggcatcggcgccgcggacggcgccgacgaccagcacggcggcggcaagctcagcatgaagagcctgctgtggcacggcggctccgtctgggacgcgtggttcagctgcgcctccaaccaggtggcgcaggtgctcctgacgctgccgtactccttctcccagctggggatgctgtccggcgtgctgctgcagatcttctacggcttccttggcagctggaccgcgtacctcatcagcgtcctctacgtcgagtaccgctcccgcaaggagaaggagggcgtcagcttcaagaaccacgtcatccagtggttcgaggtgctggacgggctgctgggcccctactggaaggcggcgggtctggccttcaactgcacgttcctgctgttcggctccgtcatccagctgatcgcctgcgcgagcaacatctactacatcaacgaccggctggacaagcggacatggacgtacatcttcggcgcctgctgcgccaccacggtgttcatcccgtccttccacaactaccggatctggtccttcctgggcctcggcatgaccacctacaccgcgtggtacctcgccatcgccgcgctcctcaacggccaggccgaaggcgtggcgcactccggccccaccaagctcgtgctctacttcaccggcgccaccaacatcctctacaccttcggcggccacgccgtcacagtcgagatcatgcacgcgatgtggaagcccgccaagttcaaatacatctacctgctggcgacgctgtacgtgttcacgctgacgctgccgtcgtcggcggccatgtactgggcgttcggcgacgagctgctgacccactcgaacgccttctcgctgctgcccaagacccggtggcgcgacgcggcggtgatcctgatgctgatccaccagttcatcaccttcggcttcgcgtgcacgccgctctacttcgtgtgggagaaggtgatcgggatgcacgacgccaagagcatcttcaagcgcgcgctggcgaggctgcccatcgtcgtgcccatctggttcctcgccatcatcttccccttcttcgggcccatcaactccgccgtcggcgcgctgctcgtcagcttcaccgtctacatcatcccggccctggcgcacgtcctcacctaccgcacggcgtccgcgcgcatgaacgccgcggagaagccgcccttcttcctgccgagctggacggggatgttcgtcctcaacatgttcatcgtggtgtgggtgctggtggtcggcttcgggctgggcggctgggccagcatggtcaacttcgtgaggcagatcgacacgttcgggctgttcgccaagtgctaccagtgcccgaagccgccggtcccggcggccgcgcagtcaccggcgccgctgccgcaccactagggcgcgcaggccccgtgacggcatggagctagcgtcgctgcttgcattgcagccggtgttaattgctactaggttttggtcgccttgtaatatacaagcctcctctagggtcgtagaactcgatcacagcagagtcacgcaaaggcggctcgtgccgtgccgtgccgccgccgcgttgctttcccgcccgccctcctctgcctgatcggtccgtcggcattggtgtcgttttgttttcgtttggcttgccaccggtattaaaaagttgagtgatggtcatggcttcttaatccatatgatgatatgacatacgtatcctatataggttcattagttatttttccttgttggttcgtggaggtcggtccatgttgtgtagcgtgtgggtgactgtaatggactgcgctggaatgctagctaaaggcagaaaacaaaaaaccacagtgcccttttgtttgtta

SEQ ID NO: 116225 - DNA, 2424 bp, Zea Mays
gcaaggcgcttgttataaagccgcaagtggtaccatttctcactcgccctctctccgctcgctcgctctctctctcaccgaatcacacacacaggcaggccagtgaggcaggggcacgaaggcgcggctccctctctcaagcccctcgccattactcgctcataaaggaagaacagagcgagcgggtagcgaggaagaagctgggccgcggggcaagaggagagaggtccccagccgtaggtctgctgtgcaactccggctcgccgcctgccaaccgcgcggcgcggccaccacgctaggcccctcgccctcctcgtaggtgaacagagcctgcagtcgatacaacagtaaattccgcggcattccattcgctttccctctcgaaacgcaccctgcatttactgcacgtcgctcgccctccggccatccgcgatcttcaaatcttccactgtaaaaagcgggcggagacgggaaggccgtgcgctcaaggatggcgcgcgagcagctggaggagtccatcgtggccgacggcaacggcaaggaggaagaggtcggggtcatgggcatcggcgccgcggacggcgccgacgaccagcacggcggcggcaagctcagcatgaagagcctgctgtggcacggcggctccgtctgggacgcgtggttcagctgcgcctccaaccaggtggcgcaggtgctcctgacgctgccgtactccttctcccagctggggatgctgtccggcgtgctgctgcagatcttctacggcttccttggcagctggaccgcgtacctcatcagcgtcctctacgtcgagtaccgctcccgcaaggagaaggagggcgtcagcttcaagaaccacgtcatccagtggttcgaggtgctggacgggctgctgggcccctactggaaggcggcgggtctggccttcaactgcacgttcctgctgttcggctccgtcatccagctgatcgcctgcgcgagcaacatctactacatcaacgaccggctggacaagcggacatggacgtacatcttcggcgcctgctgcgccaccacggtgttcatcccgtccttccacaactaccggatctggtccttcctgggcctcggcatgaccacctacaccgcgtggtacctcgccatcgccgcgctcctcaacggccaggccgaaggcgtggcgcactccggccccaccaagctcgtgctctacttcaccggcgccaccaacatcctctacaccttcggcggccacgccgtcacagtcgagatcatgcacgcgatgtggaagcccgccaagttcaaatacatctacctgctggcgacgctgtacgtgttcacgctgacgctgccgtcgtcggcggccatgtactgggcgttcggcgacgagctgctgacccactcgaacgccttctcgctgctgcccaagacccggtggcgcgacgcggcggtgatcctgatgctgatccaccagttcatcaccttcggcttcgcgtgcacgccgctctacttcgtgtgggagaaggtgatcgggatgcacgacgccaagagcatcttcaagcgcgcgctggcgaggctgcccatcgtcgtgcccatctggttcctcgccatcatcttccccttcttcgggcccatcaactccgccgtcggcgcgctgctcgtcagcttcaccgtctacatcatcccggccctggcgcacgtcctcacctaccgcacggcgtccgcgcgcatgaacgccgcggagaagccgcccttcttcctgccgagctggacggggatgttcgtcctcaacatgttcatcgtggtgtgggtgctggtggtcggcttcgggctgggcggctgggccagcatggtcaacttcgtgaggcagatcgacacgttcgggctgttcgccaagtgctaccagtgcccgaagccgccggtcccggcggccgcgcagtcaccggcgccgctgccgcaccactagggcgcgcaggccccgtgacggcatggagctagcgtcgctgcttgcattgcagccggtgttaattgctactaggttttggtcgccttgtaatatacaagcctcctctagggtcgtagaactcgatcacagcagagtcacgcaaaggcggctcgtgccgtgccgtgccgccgccgcgttgctttcccgcccgccctcctctgcctgatcggtccgtcggcattggtgtcgttttgttttcgtttggcttgccaccggtattaaaaagttgagtgatggtcatggcttcttaatccatatgatgatatgacatacgtatcctatataggttcattagttatttttccttgttggttcgtggaggtcggtccatgttgtgtagcgtgtgggtgactgtaatggactgcgctggaatgctagctaaaggcagaaaacaaaaaaccacagtgcccttttgtttgtta

SEQ ID NO: 116226 - DNA, 1021 bp, Zea Mays
cgctctctctctcaccgaatcacacacacaggcaggccagtgaggcaggggcacgaaggcgcggctccctctctcaagcccctcgccattactcgctcataaaggaagaacagagcgagcgggtagcgaggaagaagctgggccgcggggcaagaggagagaggtccccagccgtaggtctgctgtgcaactccggctcgccgcctgccaaccgcgcggcgcggccaccacgctaggcccctcgccctcctccgggcggagacgggaaggccgtgcgctcaaggatggcgcgcgagcagctggaggagtccatcgtggccgacggcaacggcaaggaggaagaggtcggggtcatgggcatcggcgccgcggacggcgccgacgaccagcacggcggcggcaagctcagcatgaagagcctgctgtggcacggcggctccgtctgggacgcgtggttcagctgcgcctccaaccaggtggcgcaggtgctcctgacgctgccgtactccttctcccagctggggatgctgtccggcgtgctgctgcagatcttctacggcttccttggcagctggaccgcgtacctcatcagcgtcctctacgtcgagtaccgctcccgcaaggagaaggagggcgtcagcttcaagaaccacgtcatccagtggttcgaggtgctggacgggctgctgggcccctactggaaggcggcgggtctggccttcaactgcacgttcctgctgttcggctccgtcatccagctgatcgcctgcgcgagcaacatctactacatcaacgaccggctggacaagcggacatggacgtacatcttcggcgcctgctgcgccaccacggtgttcatcccgtccttccacaactaccggatctggtccttcctgggcctcggcatgaccacctacaccgcgtggtacctcgccatcgccgcgctcctcaacggccaggtgagccccccccacagccaccgccaccggatccgatcgctattgtctaccactgattcacc

SEQ ID NO: 116227 - DNA, 859 bp, Zea Mays
gcaaggcgcttgttataaagccgcaagtggtaccatttctcactcgccctctctccgctcgctcgctctctctctcaccgaatcacacacacaggcaggccagtgaggcaggggcacgaaggcgcggctccctctctcaagcccctcgccattactcgctcataaaggaagaacagagcgagcgggtagcgaggaagaagctgggccgcggggcaagaggagagaggtccccagccgtaggtctgctgtgcaactccggctcgccgcctgccaaccgcgcggcgcggccaccacgctaggcccctcgccctcctcgtaggtgaacagagcctgcagtcgatacaacagtaaattccgcggcattccattcgctttccctctcgaaacgcaccctgcatttactgcacgtcgctcgccctccggccatccgcgatcttcaaatcttccactgtaaaaagcgggcggagacgggaaggccgtgcgctcaaggatggcgcgcgagcagctggaggagtccatcgtggccgacggcaacggcaaggaggaagaggtcggggtcatgggcatcggcgccgcggacggcgccgacgaccagcacggcggcggcaagctcagcatgaagagcctgctgtggcacggcggctccgtctgggacgcgtggttcagctgcgcctccaaccaggttggcctcacgcacctcacgtcctcacctcactcatggcggagccgctccgcgcctccgccttgagttcgttcatgcagatggacagcggagcgccccgactgactgccactgaatttgcgtcttggtcctggtcccgcaggtggcgcaggtgctcctgacgctgccgtactcctt

SEQ ID NO: 116228 - DNA, 1503 bp, Zea Mays
gcagatggtgctgtgtgcgctggcaaatacctttcagcattgcaagaaaaaggctactactctaggagagccctgttttcagctgaacaaatcatacatcgagatttgtagatcaacccaagttccagcacttggaatgattgaattttctaacatgtgtatggttttgagtgatcaggggttcatgaagttggggcaatccaaggaagataagcttaggagagtaacacttcatattgacagttcagatatcacttttgcctttaagggaaatcgtttcttccaaaaatgcctggagcagcgatgctaaccagactcaatagtagatcaatacatgtagccaattgttgttatacactgtagtattagtttattgacattatcaagtaccatcagtttcaaccctggatgtatactcaggtgctttcatccaacatgatcaaaccttggttacatcacgaaactctttcttggagtgcagagataagtgtacatgtgacgagttatgacagtattacgtgacataatttttccaaaatatagttgagtgtagttatgctttctcaatttttggtttttccagaactgattgatcatgtagctaaccatttagcataccaagaacatttattgacacatttcttgctggaagttgacaccagtaatgagaaattacaaataattaatgtgtcttttccgaataagtgacattattttgatattttacagtagcattattcaggttgtaaaatgtctttagcaccccccccccttttggaaatttgaatagggcggcttctcgattaaagataaaaacaaatgaacttatagagacaatacaactgaatgaagtgatcgttatcttttgcaaacaactgctttccgttgtacactgtaatttacaattgttctctgcctttcatttctataccagaacttaatactacatctgttcacaaatatatgacatcgtttactttttttagaaaactttgaccactcgtcttattcaaaatattcattcaaaaatgtaaaattttaagtcaagcataaactacctgataaaaacaaatcataaaaaataaatgataattaatactaatttttaaataagacgtgtggtcaaagtttttttaaaaaattaatggtgtcatatatttatgaacggagagagtactcgtttgcaggatgaggagtcaggcttgttttctatatctattttttaaattattgttatgcgctggtaaatcgttttgtttatgctacacatgctgaaaaagattgggccttcccctcccccgagcgactagcttgactgggctatgaaattaggcctatgaccatcacattcgaagcccacttgagggcgtagggcagcgcatctgaattctgatagatgaaatgtcggaattgttttcctatttttattccgccttttacaaaataatgatcacaaaagaatgttttctataaatataatcattgccaactaaaatggtgacg

SEQ ID NO: 116229 - DNA, 680 bp, Zea Mays
cagatggtgctgtgtgcgctggcaaatacctttcagcattgcaagaaaaaggctactactctaggagagctgaacaaatcatacatcgagatttgtagatcaacccaagttccagcacttggaatgattgaattttctaacatgtgtatggttttgagtgatcaggggttcatgaagttggggcaatccaaggaagataagcttaggagagtaacacttcatattgacagttcagatatcacttttgcctttaagggaaatcgtttcttccaaaaatgcctggagcagcgatgctaaccagactcaatagtagatcaatacatgtagccaattgttgttatacactgtagtattagtttattgacattatcaagtaccatcagtttcaaccctggatgtatactcaggtgctttcatccaacatgatcaaaccttggttacatcacgaaactctttcttggagtgcagagataagtgtacatgtgacgagttatgacagtattacgtgacataatttttccaaaatatagttgagtgtagttatgctttctcaatttttggtttttccagaactgattgatcatgtagctaaccatttagcataccaagaacatttattgacacatttcttgctggaagttgacaccagtaatgagaaattacaaataattaatgtgtct

SEQ ID NO: 116230 - DNA, 692 bp, Zea Mays
cagatggtgctgtgtgcgctggcaaatacctttcagcattgcaagaaaaaggctactactctaggagagccctgttttcagctgaacaaatcatacatcgagatttgtagatcaacccaagttccagcacttggaatgattgaattttctaacatgtgtatggttttgagtgatcaggggttcatgaagttggggcaatccaaggaagataagcttaggagagtaacacttcatattgacagttcagatatcacttttgcctttaagggaaatcgtttcttccaaaaatgcctggagcagcgatgctaaccagactcaatagtagatcaatacatgtagccaattgttgttatacactgtagtattagtttattgacattatcaagtaccatcagtttcaaccctggatgtatactcaggtgctttcatccaacatgatcaaaccttggttacatcacgaaactctttcttggagtgcagagataagtgtacatgtgacgagttatgacagtattacgtgacataatttttccaaaatatagttgagtgtagttatgctttctcaatttttggtttttccagaactgattgatcatgtagctaaccatttagcataccaagaacatttattgacacatttcttgctggaagttgacaccagtaatgagaaattacaaataattaatgtgtct

SEQ ID NO: 116231 - DNA, 1303 bp, Zea Mays
gctcgtgttccatgaggcgataaagttctctactgctctcgcgttcacgcgcgaagccgaaaaccctttcgcgccccgcccccgccccctccatctccacccgtctccctcttaccgccgtacacatccagcattcctccccccaaattctatgccatccacgaagtaaccgccgatttccctccccgcgagccacaagcccacaatgccgactctccgcagcgcgacggcgaacgcgtcccccatgggcaccccattacctgccgagacgagcacgccgcgcagcgtcaagcgccggctgacgccaggtcgagccggcgagtcgcctggcgcgtcgcggcacacctctcctcaccgacacccgcacgccagcaccggacctgtacacgtgcctaagatgctctcggcgtcgcccaagtcctccaggaagcgcctctacggtgacttcgtcgcagccgagaagcccaagtggaacccccgagatgccgcgcagatgagggctgtgaaggaggcgctgcacgtggcgacagtgccgtcgtctgaattggtttgccgggacaacgagctcaggcgtgtccttgagttctgcgaggcgtgcgtcgagcaggagaaggctggtagtctctatgtctgcgggtgccctggcacagggaagacattatctattaacaagatcaaggatagtttggtgtgctgggggaatgagacacctgatgccttaacaatcaattgtacaaacctagcaaacacctctgatatttttggcaagatgctagaaacatttcagaaccgaaagaagggacgcaacaaattgtcgccacttcaccaacttcagagcatgttttccaacaaggattcagctccaagaagaatgatgttggtcatcgtggatgagattgactacttaataacaagagaccgtgctgtgctgcatgatcttttcatgctcacaacttgtccattctctagatgcatactcataggaattgcaaatgccatagacttagcagatcgttttcttccaaagctggaatccttaaattgcaagcctcttgttgtgacttttcgagcatattctaaggatcaaatatctgacatagttaagcataggctaaaggttcttgagtatgatgtctttgaaccactagctctggagttttgtgctagaaaagttgcagctgcctctggtgacatgagaaaagccctaggcgtttgcaggagtgctgtggaggttcttgaagcaaggctacatgatttccctgataaagaattaagaatagtgacattgaccatatggatatag

SEQ ID NO: 116232 - DNA, 1427 bp, Zea Mays
gctcgtgttccatgaggcgataaagttctctactgctctcgcgttcacgcgcgaagccgaaaaccctttcgcgccccgcccccgccccctccatctccacccgtctccctcttaccgccgtacacatccagcattcctccccccaaattctatgccatccacgaagtaaccgccgatttccctccccgcgagccacaagcccacaatgccgactctccgcagcgcgacggcgaacgcgtcccccatgggcaccccattacctgccgagacgagcacgccgcgcagcgtcaagcgccggctgacgccaggtcgagccggcgagtcgcctggcgcgtcgcggcacacctctcctcaccgacacccgcacgccagcaccggacctgtacacgtgcctaagatgctctcggcgtcgcccaagtcctccaggaagcgcctctacggtgacttcgtcgcagccgagaagcccaagtggaacccccgagatgccgcgcagatgagggctgtgaaggaggcgctgcacgtggcgacagtgccgtcgtctgaattggtttgccgggacaacgagctcaggcgtgtccttgagttctgcgaggcgtgcgtcgagcaggagaaggctggtagtctctatgtctgcgggtgccctggcacagggaagacattatctattaacaagatcaaggatagtttggtgtgctgggggaatgagacacctgatgccttaacaatcaattgtacaaacctagcaaacacctctgatatttttggcaagatgctagaaacatttcagaaccgaaagaagggacgcaacaaattgtcgccacttcaccaacttcagagcatgttttccaacaaggattcagctccaagaagaatgatgtaataacctcctgtatccactatgattattgggattttcttgctgttttgatcatgttatctggcttgcatggtgctgttgtaggttggtcatcgtggatgagattgactacttaataacaagagaccgtgctgtgctgcatgatcttttcatgctcacaacttgtccattctctagatgcatactcataggaattgcaaatgccatagacttagcagatcgttttcttccaaagctggaatccttaaattgcaagcctcttgttgtgacttttcgagcatattctaaggatcaaatatctgacatagttaagcataggctaaaggttcttgagtatgatgtctttgaaccactagctctggagttttgtgctagaaaagttgcagctgcctctggtgacatgagaaaagccctaggcgtttgcaggagtgctgtggaggttcttgaagcaaggctacatgatttccctgataaagaattaagaatagtaagttttagtcctcactgacttgttttatcaagtttaaataaaggaatgctaatggtttct

SEQ ID NO: 116233 - DNA, 1407 bp, Zea Mays
agaggcccccgccatctgctgaacccagtaatccgctaggaacgtcttggcggcatccaggctggggtagtagggtggctcgaggaacatctgggccaatggatccatcccctccgccggcacgaacagcgcccggttgcccaacgcctccgccgtgcccatcaccgccgccacgagctgccggtacgcgaagaagaatcctctcacggccacctccactgcttggaaggcctggagcagctccaccttgcccgcctcctcgccctcgccgcgcctacggctgtggtacagcatcatggctgcctcctgcacccgcgggccgccgttggggtccacctcgacaccgagcacccagggcacacgcttcttgaggtccctagtggtgttagcgacgtgcaggagcgccctggaccggaaacagaacgacgcgtcagaccatggagccgctcgtacagcgagctggcccttgagccgcaggaagtcgtccgggtccatcagcaggtggaggtcctcgacgtcggcgagcagcttccacacgcgctccaggatccagcagtcggcagccgccgcttcccagttcttggcttcgatccgttcgttgaggcgggcgaggagttgcgacgcggcgcgcagccacgattcgagtatctggtacatggtgaacagcgtctcgttctccctgttgaggtacccagacttgggctccggcgctggcttgggcttgagcgcgtgcagctcgtgcgggcgcacgacgcggtcgtactcgagcacgggcttgccggcgaggttgggctcgccgagtccgagcgtgaaggcgcagccctgcatctggctctcgatggcgtacatgatcttggccgcgagcgtctcggacttgtcccacgcggcgaggcgcgggagcaggctggcctcgctgacctggcacacgaccgcggcggcgctcccgggcagctgccacacctcggacgcgctgcgctcgcgcgggagcacgccaccggaggcgcccagctcggcgagcggcgcgctccggtcgccctcgcagagcgcggacaccagccccacctcccgcgccgcgagcgactccagccggcgcgcgagctcgcggcggctggcgtacccgcgcgggtcggagagcgcgagggacgccaggcggaaggtgacctcgagcgcctgcagcgccggcttcaccaggccctcgctcgcccactccgggaagcacccggcctcccacaggctcgacagttccggcagccgcaggtactgctcgtacgcctcggccgcggacgcgtcctgcactctcagaattgtgcacgacgaggaggatggcgcgcactgcttgtcgtcccgccgcaccggcgagaccggggacaaatcgggcgttgccattgcagctccagctgaagtatc

SEQ ID NO: 116234 - DNA, 2344 bp, Zea Mays
gcagcactagcactggtaccagcaaccttcacgagctgcgtggtgaggttgaccaggactccttccggatcctgaaataaggccaccgctcgtttcctctccacctccctcctccttcactccctccccttgcgtttagcctcccgctgttgtggagccgcgggccattcccaaccatcgttgcggtggtggccggtattggccgagacccatgggcatccaggtcgcggcggtcgtgatcccgccgccctgctcttctccttcctcctcctcctcctctccggcgtcgccttcgtcctcggccattgccacgtcgccgcagcatgccgttcttggcgccaggctggcgaggagccagtcgtcgctggcttgctggaacgccgccggtctcggccggcggcgcggcggggagcacacgatcaggcgcgctctcagcgcgagcatcgacagcgtcgggagcgacggcggggacgacgaggagttctcgaggaggatccaggagctcgcggtgggtcagcacccgggcgccggcggctgcgggtggccggcgagcgtggagcggagcgcgagcagcgtcgggctgccgctgtccctgcggatgctcaaacggaggaagcagcagcagctggagcaggggcggtgggacgagcggctggtcgacagcgccggcgagtccgcgcgcgccgcggtggggcgcgccttctcctcgatggtgctcatcatccgggagctccagagcttcacgctgcagatgcgggagacgctcttgtacgaggacctgcagggcgtcctggcgcgcgtccacgccgagatgcacgcctccttcgtctggctcttccagcacatcttctccggcaccccggcccttatggtctccctcatgctgctcctcgccaacttcaccgtctactccatgggcgacagcgtcgcggccgctgccagcctcctcccaccgcacgcagccgtggcggctgtggagatggtggacacccagcaaccggagcaatcccattcccagcagcagcggttcgacacccccgcgctcaagacgttctccactggccgcacggcctcggtgggcggaaacggcggcgggggcggcaaggtgcggccggttgccggcgccacgggcgacggccagtcggacgagtcgtcgtcgtaccgacaaagcggagctgtgctgccgcaggacgtgtcgcaggcgacgcccctgggcgcgggcgcgggcgcggggtcggaggcgtccgtgtccgactcaatggccgtggaggaggcacagcagactgtacaggacgagctggtcatctggaaacggatatccgacgaagccatcaggatgcaggcgagcgtgcgtgcagaggagctgatggacccggaaatcctggagcagctcgtcgcgcccgtggaggcaccgaagccagacgtggcctatccgtcggaggagcacgtggccacggcgcagagatacgagcaggccgtgtccgaggagcccaacagctcgctgctcctggcgaactttgcgcagttcctgtaccaggtgcagggcgacctcgacagggcggagcacttcttcaggagggcggtgcgcgcggagccggcggacgcggaggcgctggggcggtacgcggcgttcctgtggcaggcgcgcaacgacctcgcggccgcggaggagacgtaccaggaggccatcgccgccgaccccggcaacgcgcaccacgcggcagcctacgcgcacttcctgtggaacacgggcggtgaggacacatgctacccgctcgactgatgcatgcgacgccgctaccgtccagcacagttcatcggtgcctcccatagaaaaaactgaaacaaaaaagaaagagaaaagaacactccgccgctccactgcctcggcaagtccacgctctttctcacggcatgtgcttgagcggccacccggggcagcagtactagactacaagtgaagctgaagcttatacacttcgcgttacaggaaccgttggttcgctttagtgtctagtctaggcatgttctttctcttccctgtggttgctcgttctgggcaatggccgacggaaatccgcggctcgctgctgcttcccgatccggaaacccggcgactgcgagttgagagcccggccgggaacggcggcaacgctcggttgtcggtgggcccgtctgtccacttggcgtcgcatggatgttttctactggcacttttgcacggtatgccgctttgttcagtggagcagaaaagtatatatatatatacttatatactagcagcaaattgcttcttgtaaatgtgcagatcaataaactctataagaagccctccatttttttt

SEQ ID NO: 116235 - DNA, 2001 bp, Zea Mays
ccaactccaacaagaacagcgccatttcttaatcgcagcgcctaaacccagcccctcctaattatatcaccgcacagctgctagcaccaggtgcgatttacaggcttaaaacgcaccggcatggccactgtacaggacaacggtgtcctgcacttgcacccctatgccgtcgccgcggcggcagcggcattgatctcggcgtacatggtgtggttctgggcgctgacgcgacggctgtccgggccgcggatgtggcccctcgtcggcagcctgcccagcgtcgtcctgaaccgggcgcgggttcacgactggatcgtcgacaacctgcgctccaagggggaagcggccacgtaccagacgtgcatcttgccgctgccgttcttggcgcggcgccaggggctggtgaccgtcacgtgcaacccgcggaacctggagcacatcctgcgcgcgcgtttcgacaactaccccaagggccccatgtggcaggcggcgttccacgatctcctgggccaaggcatcttcaactccgacggcgagacgtggctgctccagcgcaagacggcggcgctcgagttcaccacgaggaccttgcgccaggcgatggcgcgctgggccaaccgcatcatcaagtaccgcctgtggagtatcctcgcagaccactgcgaggccgcggcgagcgtcgacctccaggacctgctcttgcgcctcaccttcgacaacatctgtggcctcaccttcggcaaggaccccgagacactgtcgccggggttgcaggagaaccccttcgccaacgccttcgactccgccaccgaggcgacgctgcagaggttcctgttccccagcttcctgtggcgcgtcaagaaggcgctcggcgtcggcagcgagcggagcctccgcgagagcctcgcgatcgtggaccagtacatgacggaggccatcgcggcgcgcaaggcgaatccgtcggacgacctgctctccaggttcatgaagaagcgcgacggcagcggcagggcgttccccgaggacgtgctccagtgggtcgcgctcaacttcgtgctcgcgggacgcgacacgtcgtccgtcgcgctcagctggttcttctggatgctcatgctgcggcgcgacgtcgagcgcaaggtggtcctggagatcgtctccgtcctcagggagacgcgtggcgacgactgcgggaggtggaccgaggagccgctggacttcgacgagctggaccgcctcgtgtacctgaaggcggcattggcggagacgctgcggctgtacccgtcggtgccgcaggactccaagtacgtggtggaggacgacgtgttgcccgatggcaccgtggtgccggccggctcagcggtcacctactccatctactcggttggacgaatggagagcatctggggaaaagactgctctgagttccggcctgagcggtggctctcggctgacgggacccggttcgagccggccaaggacgcgtaccgcttcgtggcgttcaacggagggccgcggacgtgcctgggcaaggacctggcgtacttgcagatgaagtctatcgcttccgctgtgctactgcgccactcggtggagctcgtccctggacacaaggtggagcagaagatgtcgctcactctgttcatgaagaacggcctccgagtgcacgtcaagccgcgggacctcgccggctacgtcgtggcaccggaggaagccccgcagctgggagcctttgtgatctcgaccacaactgcagcagctgcataagcctgcatgtgcccgcgcacattggcactcgtttcttcgtgctgaagttcttctatatgcctctgcctgtcaaagtcatatcgtttcttcgtttctccctcttcattagactgttaggtttgtgggtacctggcgtcatattggttgtacctgtgtagtttttgtgtggatggatcggtttgtgtacttttgttcaggtctgatggatcgacagagtaaaggagcattttactttgt

SEQ ID NO: 116236 - DNA, 2267 bp, Zea Mays
aaggttttattgcgtcggctggccccaacggagatcctgtttttactgtacactttatgtacaattgcgctcttccctctggcaaagcctggagtgatagcgcagcttagccactggcagctcgcatgtttaattttttgcggactgaataccttggtaggatatggcgccctggcggaagcgatggctcgctggcaggcagcgcaggtgagcgcgatcatcacgctcaccccactgtttacgctgtttttttcagatcttttatcactggcctggcccgatttcttcgccagaccgatgttaaaccttttaggttatctcggtgcgtttgtcgtggttgcgggcgcgatgtattccgccattggtcatcgtatttggggcggattacgtaagcatacaacggtggtatcgcaaccccgcgcaggcgaatgatttacggagcataaaatgaagtttgttgatgaagcatcgattctggtcgttgcaggtgatggcggtaatggttgcgtgagcttccgccgcgaaaagtatattccgcaaggcggcccggatggcggcgacggcggtgatggtggtgacgtatggatggaagccgacgagaacctgaacacgcttatcgattatcgttttgaaaaatctttccgtgcagagcgcggtcagaatggcgcaagccgcgactgtaccggtaagcgcggtaaagacgtgacgattaaagtgccggtaggtacgcgtgtaatcgaccagggtactggtgaaaccatgggcgatatgaccaaacacggtcagcgtctgctggttgctaagggcggctggcacggtctgggcaatacccgtttcaaatcgtccgttaaccgtacaccgcggcagaaaaccaacggcacgccgggcgataagcgcgagctgctgctggagctgatgctgctggctgacgtcggtatgttggggatgccaaacgcgggtaaatcgacctttattcgtgcggtatcggcggctaaaccgaaagtggcggattatccgtttaccactctggtgccaagtctgggtgtggtacgaatggacaacgaaaagagcttcgttgttgccgatattccaggactgattgaaggcgctgcggaaggcgcaggtctgggcattcgcttcctgaagcacctggaacgttgccgcgtcctgttgcacctcatcgatatcgatccgattgacggcaccgatccggttgaaaacgcgcgtattattatcagcgagctggaaaaatacagccaggatctggcgacgaaaccgcgttggttagtgttcaacaagatcgatctgctggataaggtagaagccgaagagaaagcgaaagcgatcgctgaggcgctgggctgggaagataaatattatctgatctctgcggcgagtggactgggcgtgaaagatctctgctgggatgtgatgacctttatcattgaaaacccggtcgtgcaggctgaagaagcgaaacagccagagaaagtcgaattcatgtgggatgattatcatcgccagcagcttgaagagattgctgaagaggatgatgaagactgggatgacgactgggacgaagacgacgaagaaggcgttgagttcatttacaagcgttaatcactgatgataaacgccaaatcagcctgatgcgctacgcttatcaggcctacaagagaattgcaatatgttgaatttgcacgattttgtaggccggataaggcgtttacgccgcatccggcataaacaaagcgcactttgtcaataatctgaagccccggccatgtgccggggtttctttttgactaattgttctgataaatatctttatacaaacggctttcaaaacgcactaacggaatacggcgattacgctgatccgcaggttctactgcatagccagaaagatattgcacaaacgccattcgttgcccgctcgctgtggtaatgaatcccgccaggttatataccccctgcaacgaaccggttttcgctgagacttttccatccacgcccgcctgatgcagacctgcacggtactgcaaagagccgtcatagcccgccagcggcagcatggagataaagttaagttcattgtcgtgttgggcaatgtattgcagcacctgcatcatggtggcgggggcaatcaggttatgccgcgaaagccctgaaccatcggcaataatggtgtttccaatatcgacaccggcttgctggcgcaggatctgacgcacggcgtccgacccggcccgccatgttccaggcac

SEQ ID NO: 116237 - DNA, 103 bp, Zea Mays
gaacaaaactaggttactcatgttatataaaatttaaatatttatttatgtactcttctctattgtgtatattagtacaagcaaccaaacactagctatatat

SEQ ID NO: 116238 - DNA, 699 bp, Zea Mays
cacactatattggttgggggttccatcaggcatccgaccgacgagatgaggagaaaagggagcgagtgtacaaggatcagccccgctgagatcgacgtcgtcatgcccatgatctctctgtcgtccagatccggccgaagggcgccgtcggaccgggaccgacctcgtcggcaagtgcgaggcggctgcgggtctcgcctgctgcggaccgcgcggtggacggccgcacgcttctacaggcgagcgagggtaagcatcgatagggcattccggtcctcgtcgacgtccaagaaagcagctgccactgctgctgcttcaccggattgcacgccggcgaggcatggcagtaggcggcagcagtccgcgccaccggtggccgtcgatgactcgcacaagagcgaagcggtggaagagtgcatcaggttcatgaactcgtcgtcgaggaagtaccggtagtgcatcgatcaggttctgtgcgcgctgatgctggcgtctttcttgtatttgttctttctttctttcttccttttcatctatgtgtgcatctgatcaaaccttgtgattgagaaacatactggttatttctttgatcgatatttgcgtaccctgaaatctctcattactgtataatatcaagtctgcctgtcagtttttatcttgcaagcaattctctttgttactagcagttatttatttcta

SEQ ID NO: 116239 - DNA, 1960 bp, Zea Mays
tgttcggtggtgtcacagcaaaggcggcactgcccaaaccacctctttggccacacacacgcatactgccaccgctactgcttcatcagcagctagcagcaagcggtcggtggtgcagcgctgcgccgggcaatcgaacacatggctcagatgatctccaccatgcccatgctggacgccgccccggcctcgtcagccattatgcccaagctgccggccgccgcctgcctggacgcgccgccctcgggcatcaccgtcgtgtccaggcagcacgttcgcccggacgccgcgtcggcggtcggtgacctcacgctctccgtctccgacctgcccatgctgtcgtgccactacatccagaaggggctcttcttcccggcacccgacctgcccatgtcctcggtcgtgtcgctgctcctgtcctcgctgtcgcgggcgctcgccgtcgtcccggccctcgccggccgcttcgtcacgctgcccgacgaccgcatcgtcatccgctgcaacgacgcgggcgtggacttcctccacgccgtcgcacccggcctgtcgcttgacgactttctcgtccctgacgccgacgtgccgaccaagcacacaaaggacctgttccccatggaccggaccgtgagctacgaggggcaccgtcgcccgctcacgtcgttccaggtcaccgcactcggagacggcaccgtctttatcggcatcgtcgccaaccacgccgtcgtggacggcacctctttttggcaattcttcaatacctgggcggccatctgccgcggcgagtcccccaaactgccggacttccgccgaagcttcttcggcgagtccactgccgtcctccgcttccccggcggcgtcggcccgtccgtgaccttcgacgtggacgcgcctctccgtgagcgcgtctttcacttcagcgctgacgcaattcgcgagctgaaagcgattgccaaccgccgtccgagcggtggccaagacgccgaggtttacggcaagatggcgcaggaccccaagaatccccaagtgcgcggggagatctcgtcgttccagtcactgtgcgcgcagatatggctctcggtcacgcgtgcccggaaacgcctggcgcccgacgcgacgacgacgttccgaatggcggtgaactgccggcaccggctgcagccgcccatctctcctgtctactttggcaacgccatccagagcgctgcgacgatggcgacagtctccgagctggctcgcagcgatctaaggtgggcggcaggcaagctgaacgcgacccttgcggcctatggcgacggcacgatccggcgcgcggcggccgcgtggcaggccgcaccccggtgcttcccgctgggcaaccccgacggctcggtgatcacgatggggagctcgaaccggttcccgatgtacgtgggcaacgatttcggctggggccggcccctcgctgtgcggagcgggcgcgccaacaagttcgacggcaagatgtcggcgttcccgggacgagccggggacggcagcgtggacatcgaggtgtgcctgcctccggagaccatggcggcgctgctccacgacgccgagtttatgcactacgtgtcgtgcccgtcgcatctgttgtgatgtactgcagccgtgcgggcgggcgcgagtgggccatcggccgtgacatgccatcaggcacctgttggattgctcggtcgtccactcgtccttgcctttcgggattcaggaatactagctagttggtgtcaagacattgtatctgtctcgctttttcggagtgctgcgtgtaatcgtgtgttagcagctactactagtagtacttggaaattggaaatgactcttatgctgcagccatcaaacgatgcaacagcggggagaatatgaaccctgtagcaagagtcagaaacaagtttctgaaaaatattggcacaagagagcttgacatctccagagccttcaa

SEQ ID NO: 116240 - DNA, 2452 bp, Zea Mays
tctgaacaagctaacgattcgaagcggaaggctaagtcacaggaccctggctggaagttcggttggtggcctgatccgtctaagaaggagttcgtgcaatgtatcttttgcatgaaagtggtgccctctggaataaagaggttcaaacagcacctcgccagtggattcggcgacacgatgaagtgtgcaagggttctagaggttgtttcaaaggacatgcaagcttatcttaagaagaacacaaggtctgcacttgttttggatgacgatgaaagtatagaaggagaagacgatgctgctgctgctgcccccgttcaatctgaaccaagttctggtactaaatacaagcaagcaaagaagaaggtttctcaagctgcaatgtcctcctttgttgtctctgctcctccgaagccaactactcaaaaggtagtaaatcagtagctgtcatgctttgcaagagcccagaagaagtgattgccgaacggcacaacaacaaagcttcccagtccactctagagcactgcacgaagaaaggcaaggaggcccagcaaattgttgatgaccacgttgctgatttcttctacgagaacaacatgttggagtcgatagggcagtatggtcctggctaccgtggcccatcgtaccacgacattagggttccgtggcttgaaagggctgtcgagaggacatcatcaatgacggcgaagcatgaagaatcgtggaaggagtatggctgctcattgatgtcagattcatggacagatgttagaggacgtcatctaatcaactttttggcaaacagtccagcagggacacactttctgtgctctattgatgcatcaagtgagatagctaatgccaacatgttggcagatttgctagaaaatcagattgacaaaattggcagagaaaatgtagtgcaagtagtaactgacaatgggcaaacttcaaagctgctgggaggcttcttatggagaggattccacatttgttttggacaccgtgtgctgcccattgtttggatttgctgctggaggacattgggaagattaagtacttcaacacttgcatcaaccaagcaaagagggtgtgtcggttcctatacaaacatgggaggctgcacaaccttatgagacaaatgattggaggtgaccttgttaggcccggtattactaggtttgccacgtcttttctcaccctggctagcatgctcaagcataagaatggtttgaagagtgtgtttattagtaacgaatggcagcaaagcaagttctccaccagtcaagaaggcatccaagctgaaaatattatcctctctacagagttttggaatagtgttgagttctgtctacgagcttctcaaccaattctcattgccctaaggattgctgatggtgatgagacacctgctgctctggagattatgacagctatggataaagcaaaaaccaccatcaaagaggtattaaataataagggcaaattactgctgcaagcctctatactatataattatatatctatatatagtgttatatatgactatatgtctatatatatatatatatatcatatatgtcctcgagtacacaggacgaccagggggacgattagggtcgatcaggggcgattaatcgccctgatcgacgtctaatcgcctgatcgcccagtggcttcgatcaggcgatctgaaaactatgtaaaatactatatagttataaattttttgaatcggaccatcctacttcatgcccatttcctataaattgtatatggttgttgtttgctaaaaaaatggcaaatgtggctgtgcaagaaccgtgagccgcagacgatgatttctacgacctccaccaccactggctcatcgcgccaacatgacccacctccactgccatttgatggacagttttaaaatccgacaccacgccactgccagtgcgtggacaagcagccggcagtccagtttgtctcgtggacctgtgctaacccaatgagaagatttaccgtctgtcctcttagatttagcaatccgaatggcaagtacgagctttatcagtggaatgaccctgacttttccgaatttcagaagaaaacaatgcagagttgagggagaagattattagtttggagaacgaggtttcgagtttggaagcagaagtagctcacatggatgaattggcgatgaatgttgctaagttgtgagagaaggatctgttgctgcaagggaagaatgatttgctgcttccccatgcgactactgtttttttcttcagtgatccttttagcctgttggtgctatccctttgtcgcaagtgtcgagtaggctgttagtgatctttttagcccttagtgtcaagtaagtgatgaattatgtcattatggaacttcaagtagcagtggagcggcggtggctggcatgcagctgtgtggtagcaccagaggccaatcg

SEQ ID NO: 116241 - DNA, 2532 bp, Zea Mays
gctacggaatgggcatagccgcatagcataattgatttctctcttatcacagacaagggagacacacggacagacacccttttgagctggttgtggtgcagctcactgagcactgtgctgcgcccggcgggcgacgtaatttatcacctcacctcctgcacccgggtgcttacgtggcgtgaaaccaccggctgatcggcgcaggaacggagtaagcgcagcctccattccccgttcctcgctggccgctactactcatccctcgctcttgcggaggcgaggcagaggcttgctcctacctccaataattcccttccgcctctcctcccgtcctctcgcaagcccacaccacacctgcagaaatcacagcggcaggtgcagcaaaaatctccatgcccccgctcggctagatctccgacgagccggccccgcgcggtagcagattcgctcccctatcccgaccgatgggcggtgaggtgccggagccgcgccggctgagccgcgcgctcagcttcggctgcggcggcgtccccgaggaggcgctgcacctcgtgttcggctacatggacgacccgcgagaccgggaggcggcctcgctcgtgtgccgcctctggcaccgcatcgacgcgctctcgcgcaagcacgtcaccgtgggcttctgctacgccgtggagcccgcgcggctgctcgccaggttcccgcggctcgagtcgctcgcgctcaaggggaggccccgcgccgccatgtacgggctcatccccgaagactttggcgcctacgcggcgccctgggtcgccgagctcgccgcgccccttgactgcctcaaggcgctccacctgcgccgcatgaccgtcaccgacgaggacatcgccgtgctcgtccgcgcgcgcggccacatgctacaggtgctcaagctcgacaagtgctccggcttctcaacagacgccctctgcctcgtcgcgcgctcctgcaggtctctgagaaccttgttcctggaagaatgtataattgaggatgaagggagtgaatggctccatgaactcgctgtcaacaattctgttctggtgacactgaacttttacatgacagaactcaaagtggagcctgctgatctggagcttcttgcaaagaactgtaaatcattgatttctttgaagatgggtgactgtgatctttcagatctgattgggtttttccaaacctccaaagcattgcaagaattcgccggtggtgccttttttgaagttggagagtacaccaagtacgaaaaggtcattttcccacctaggctatgcttcttagggggtcttaccttcatgggtaaaaacgagatgccagttatctttccgtattccacaatgcttaagaaactggacttgcagttcactttcctcaccactgaagaccactgtcagcttattgctaaatgccccaacctaagtgttctcgaggtgaggaatgtgattggggatagaggactagaagttgttgctgctacatgcaagaagctacgaaggctcagaattgagcgtggcgacgatgatcctggccaagaagagcagggaggagtctctcagataggtttgacagccgtagccgttggctgccgcgaactagagtacatagctgcctatgtatctgatatcacaaatggggcgctggaatccattggcactttctgcaagaatctctatgatttccggcttgttctacttgacaaacagaagaagataacagacctgccacttgacaacggcgtccgtgccctactgaggaactgcgtcaaacttcggaggtttgccttctacctgagaccgggagggctttcagacgtaggcctcggttacattggactatacagtgggaacatccaatacatgctgctcggcaacgttggtgaatctgacaacggattgatccagtttgcaacgggatgcaccaacctgcggaagctcgagctgaggggctgctgcttcagcgagcgagctctggcagtggccgtgctccagatgccctcgctgaggtacatatgggtgcaggggtacagagcctctcgaacgggccaggacctcatgctcatggccaggccgtactggaacattgaattcgcgcctcccattcccgagagcgcttatcgggtgatggcagatggacagccttgtgttgacacccatgcccaggtccttgcgtattactcccttgctggaaggaggccggactgccctcagtggctggtgactttgcaccctgcgtcactgtaaatacgtcaagctgtcccgagtgtggtttttgtaccagctgcttgtgtaccgtaataaactctagtactgtagtggtggaggcgtagtgcaataaagttgcagttgttgcttgtactagtgaatctaatcctaggaggttgttgccctgtgctttcttttccccggaattgtatctttgctccactgtaaatatcagaaatggcctgtgctagatgagttgaataatggatctcggaggtgcactgcatgaaagctacattttgtcatcctc

SEQ ID NO: 116242 - DNA, 888 bp, Zea Mays
atgcctggttgctcgaaaattggctccttttggtggaaaagcttgcttacgtttgtccaagattacaagggactggctgccccaaaaatcggggatggaagaaccattcttttttgggaagatatgtggaattcaggcatcccggctaatcaataccctgagttattttccttcgcctgcaatagcaaacttaccatcaaagaagctctccaaaaagatcatcttattgaaatttttcagctacctctgtcggtgcaagctcatgaacattttttagacttagacgcgcactggggccaaatcatggtaaacaacacaaatgatacttggaaactcatttggggagcagacatattctctacaaaaaaaacatataagcatttgatgggtcaggcccaggttcaccagatcttcagatcgctttggagaaataagtgtcaaccaaagcataaggtctttttttggctttggctaaaaaacagactcaatacaagagatatgctgaaaaggaaaaatatgaatcttgagtcctacacttgtgagaactgcatctggcaaaaggaagaaactctctaccatcttttcctcaaatgtaattttgcaaaggcttgctggacttctattggtttgacgtcccccagaattgctaatcctgaggacgctgctgtaaacctaatgcaacagctcaatgtcccattctctatggaaattgtcattctcatgacctggagcatttggaaaacccgtaatgcttggctttttcagaataaagtcccgactgtgcagctttgcaaaaatgagtttgcaagggaacttcatctagtcatgttgagagctaaaggccgttttgattcgacaattcctgcatggcttcagctttggcagtag

SEQ ID NO: 116243 - DNA, 563 bp, Zea Mays
ctttaggtcttttcctatgccgctttcagtacacagaacctgcgtgagcaccagcatatatgcatgcatatgatgcctgtgagtatggtcgatgatgacgcagatcatagtgaaggagaagggcatcttcaccaacgtgacgtccccgacggccaaggccaagctgcggctcctcttcgaggtggcgcccctgggcttcttgatggagaaggccggcgggtacagcagcgacggcaagcagtcggtgctggacagggtgatcaacgagctcgacgagcggacccaggtggcctatgggtccaagaacgagatcatccggttcgaggagaccctctacggctcgtccaggctcgccgccagcgccaccgccaccgcccgcgcccttatctgaattactagaatccgggctcgtagatgctggagtacacagtacagggaaattgcccacttttttcatcaacttaagtttttagattaaacttttttgaaacaatcagacaggagatctgtcttatatattgatgaggagaaagatgcccaaaggcaaaaaaaaaaaagtcgat

SEQ ID NO: 116244 - DNA, 483 bp, Zea Mays
atggagatcgtcgccacgcgctccccggcttgctgcgccgccgtgtccttctcccagtcgtacaggcccaaggcgtccaggccgccgaccacgttctacggcgagtcggtgcgggtgaacacagcgcggccgctctcggcgaggaggcagtccaaggcggccagccgcgcggccctcagtgcccggtgcgagatcggagacagcctggaggagttcctgaccaaggcgacgccggacaagaacctcatcaggctgctcatctgcatgggggaggccatgaggacgatcgcgttcaaggtccggacggcgtcctgcggcggcacggcctgtgtcaattccttcggcgacgagcagctggccgtcgacatgctcgctaacaagctcctctttgaggctttggagtactcacatgtgtgtaagtatgcgtgctccgaggaagtccccgagctccaggacatgggtggcccagtcgaaggtagctaa

SEQ ID NO: 116245 - DNA, 1291 bp, Zea Mays
atgcccgaccagacgtcggctgcggccgcgggcggcgcggcgttcgaccgttgcctgctggcgctgtacctcatcagcccgctcactgttctggcgctccgcttcatctccgcgccgtacggcaagctatcccggccgggctggggccccgtcctaccggccccactcgcgtggttcctcatggagagccccaccctctggctcccaccgctcgtcctcctccgctggccgccgccgccgctctccggcccactcgccgcactccccgccgcgctctacgcgttccactacgtccaccgcacgctggtccacccgctccgcctcgcccgcctgcgccgcgccccggcccccgtgccgctcctcatcgccgcctgcgccttgggattcaatatcctcaacgcctacctacaggcccgctccttcgccctccacgccggccgccaggcgtcccccttccgctgcctcgctgggctggccctcttcgcgtggggaatgcggacgaacatcgcggcggacaaggagctgctgcggctcaaggaggccggaggcgggtacaagatcccgaggggcgggtggttcgacctcgtcaccagccccaattacttcggcgagacggtggagtggctgggcttcgccgtggtggcgtggacgcccgcggcctgggcgttcttcctctacacctgcgccaacctcgggccgagggccagggaccaccgccgctggtacgtgcagaagttccgcggcgagtacccggcgtcgcgcaaggcgttcatcccctacatctactaggtgacgtatgtacttgtaataaaaaagaaaaatcaaactatgtgcaatggaaatatgaatctaaccgaaaaaaaatctggcgtcgtgtccgtttgtggcttgccgggcaggggaacgtcttgccgcggtggcttcttccctgccgctgctgacgtcgtcgccgtttgtgtctggtgagcaggtgatggccgtggtttcggttcgttcttcttggccgccttatcttccttcgcggcggagcagaagcaggagagcaggctgagtttgcccatgtttcgactcgacgagaaggcgagtagacgacagagaacctgcgatgcgattagctgcgcgagactgcaacctgttgaatctaatgttcttactattgctgctgtcgatgattttatagatgtacaggcagagttgaatataaagccggctgaggcataacctggttactctcgtgtttgtactatgttccgactcgaacaggattgactcaagtctaatgtattgggca

SEQ ID NO: 116246 - DNA, 1536 bp, Zea Mays
atagaaaatgatattttatagtggtagtggggtataggggagtatttagggggaaccgctgcgggagaagaaaaaataggggggaaaagtgatatagggggaaaaatttaggggtaactgttgcggatagcctcaggcagcgttcctcgctgctgttaagtcaggctccactccagtgtcccgttttgggcctcaggcctccttttgtgcaatccagacgtcgtggtccaaacgcggatcggcggtgccgacggccgggaacccccctcgcgattaacgcccgagcgagatcgctatccgtggaccgtggttgtcgccgtcctcgtcggttcgtccccatcgcacaccctactcccccggtcgtcagccctcagcactcatccggtcatccccaaaccccagaaacctccttggaaccaactgaagatgcccgaccagacgtcggctgcggccgcgggcggcgcggcgttcgaccgttgcctgctggcgctgtacctcatcagcccgctcactgttctggcgctccgcttcatctccgcgccgtacggcaagctatcccggccgggctggggccccgtcctaccggccccactcgcgtggttcctcatggagagccccaccctctggctcccaccgctcgtcctcctccgctggccgccgccgccgctctccggcccactcgccgcactccccgccgcgctctacgcgttccactacgtccaccgcacgctggtccacccgctccgcctcgcccgcctgcgccgcgccccggcccccgtgccgctcctcatcgccgcctgcgccttgggattcaatatcctcaacgcctacctacaggcccgctccttcgccctccacgccggccgccaggcgtcccccttccgctgcctcgctgggctggccctcttcgcgtggggaatgcggacgaacatcgcggcggacaaggagctgctgcggctcaaggaggccggaggcgggtacaagatcccgaggggcgggtggttcgacctcgtcaccagccccaattacttcggcgagacggtggagtggctgggcttcgccgtggtggcgtggacgcccgcggcctgggcgttcttcctctacacctgcgccaacctcgggccgagggccagggaccaccgccgctggtacgtgcagaagttccgcggcgagtacccggcgtcgcgcaaggcgttcatcccctacatctactaggtgatggccgtggtttcggttcgttcttcttggccgccttatcttccttcgcggcggagcagaagcaggagagcaggctgagtttgcccatgtttcgactcgacgagaaggcgagtagacgacagagaacctgcgatgcgattagctgcgcgagactgcaacctgttgaatctaatgttcttactattgctgctgtcgatgattttatagatgtacaggcagagttgaatataaagccggctgaggcataacctggttactctcgtgtttgtactatgttccgactcgaacaggattgactcaagtctaatgtattgggca

SEQ ID NO: 116247 - DNA, 1106 bp, Zea Mays
agcactcatccggtcatccccaaaccccagaaacctccttggaaccaactgaagatgcccgaccagacgtcggctgcggccgcgggcggcgcggcgttcgaccgttgcctgctggcgctgtacctcatcagcccgctcactgttctggcgctccgcttcatctccgcgccgtacggcaagctatcccggccgggctggggccccgtcctaccggccccactcgcgtggttcctcatggagagccccaccctctggctcccaccgctcgtcctcctccgctggccgccgccgccgctctccggcccactcgccgcactccccgccgcgctctacgcgttccactacgtccaccgcacgctggtccacccgctccgcctcgcccgcctgcgccgcgccccggcccccgtgccgctcctcatcgccgcctgcgccttgggattcaatatcctcaacgcctacctacaggcccgctccttcgccctccacgccggccgccaggcgtcccccttccgctgcctcgctgggctggccctcttcgcgtggggaatgcggacgaacatcgcggcggacaaggagctgctgcggctcaaggaggccggaggcgggtacaagatcccgaggggcgggtggttcgacctcgtcaccagccccaattacttcggcgagacggtggagtggctgggcttcgccgtggtggcgtggacgcccgcggcctgggcgttcttcctctacacctgcgccaacctcgggccgagggccagggaccaccgccgctggtacgtgcagaagttccgcggcgagtacccggcgtcgcgcaaggcgttcatcccctacatctactaggtgacgtgatggccgtggtttcggttcgttcttcttggccgccttatcttccttcgcggcggagcagaagcaggagagcaggctgagtttgcccatgtttcgactcgacgagaaggcgagtagacgacagagaacctgcgatgcgattagctgcgcgagactgcaacctgttgaatctaatgttcttactattgctgctgtcgatgattttatagatgtacaggcagagttgaatataaagccggctgaggcataacctggtt

SEQ ID NO: 116248 - DNA, 2125 bp, Zea Mays
gctgcgctcgtcgccgcgcccctcacctcgagcaaagaggagcgacaatggccatggccgcccccgctttcctcctgccatcactgttccccaagcccactctcctcgccgcgtccctccactccagcttcccacgcggcctctccctccgctgctcgcccaacggcgccgccgtgccggaattccctgaacctgcctcgcgccgcggccgcaaaaagtcaccgtccccgtcggcgccgaagccgagggctacgaggaggagaaccaagaaggcggaccgggatcccgactcggagggcgaggaggagccggtgaagcggaccaaccgccggacgaggaagtccaagggagaggctaaacaggaggaggtggcccaggcggcgaatcacgggacgggggatacgattcaaaaggccaacgaagaggaggatgcggtggaagtgggtagcgacgacgacgatttcgcgaacgagtggccgccgctggtgtgctgcttcggcgcgccgcggtgggagttcgtacccacggtgcgggtgtcggaccgccagatgcatcccgacatgtactccacgtggaggcacctgcaatgggaaccgcccgagttcgcgcgcgcgccggggagcgcggcgagcaacgtggcgattgcgctcacccggctcggcgggcgcgccgcagtgctgggcaaggtcggcgacgacgacttcggccgcgagcttgtgtaccgcatgaactgcgagcgggtgcagacacgtgccataaagttcgacgacaaagcggtcaccgccacggcgcgcatgaaggtgagcttccgggaccgggaggacggcaagggcgggacgaaacttgtagccgagacggtgaagagtgccgccgaggactccctccgcaggactgagatcaatgtagacgtgttgaaagaggctagaatgttccatttcaattcagaagtcctgctaaacccctcaatgcatgacacgctcttcagagccattgagctgtccaagaaatttggaagcaaagttttcttcgatctcaatttgccattgccattgtggacttccaaggataaaacaaaggaggtgataaacagggcgtggaaagaggctgaaatcatagaggtgtcaagggatgagctggaattcctcctagatcatgagtactatgaatacaagagaaacacccctcctcagtattatcttgaaggatttcattttacaagaaactggccacagtactaccactacagccctgaagagatcgctcctatttggcatgacggtataaagatcttgcttgtgacgtatgggacacttcggatccactattacacacctaagtttcatggctgtgtggttgggacagaggatgcactcataactccatacaccactgaccgaacaggttcaggggatgctattgtggctgctgctattaggaagctgacaacttgtcctgaaatgtatgaagaccaggatacattggagaggcaactgagatttgctgttgccgctggaatcatatcacaatggacaattggtgctgtgcgaggatttcccactgagagtgccacccagaacctgaaggaagaagtctatgtgccttctatgtggtgaaatgataaaccatttgtgatgggaatgaacaaatatatgatacaagcatacttgatgaatggtctaacagaactgaacaagggggttttccttttttttgcgacaatagagctacaagagcaacttacatgcactaattggtcaggtctatggttgctttagttaggcggcagacaggtaggagtttgtgcttcatattgtccgatgaacaaggaatctttctatcatctggttgttctgcgaagggttccgctgtacgtacgactcatttgtacaacgccttttcaatcaacggagaaccaggatacaaatggcggaaaatcactcaaatgtactggttcatttgccaagaacgcaagattcatctggttgtaccggagatgtactttaggtgaagtatttccctttctgtcaatgtgatctgtgagaaacacctgtccctacgatttagcctgtggtttgtaactatgctgtgttttctgtggttactgcattctaacatgaatttacag

SEQ ID NO: 116249 - DNA, 1769 bp, Zea Mays
aaagaagagtctgacgttttcttgtctctggatgaggctgtcgtcatgagcaggcgagtggtggaaccgcaatgtagtcgacgtcgagagcgacgccatcttggccggtcagcttcccgcccagtccgacgcgttcacagttaacggcaaaaccggcctgctgtaccagtgcgcgaacgagacgttcacggcggtggtggagcccagcacgagggtgctcctccgggtcgtcaacgccggcctcaactcgcacctcttcttcaagctggccggccacaacttcaccgtcgtcgccgtggacgcgggctacacctccaacctcaacacggacacgctcgtgctcgcgccgggccagaccgtggacgcgctcgtcaccaccgccgccgcgcccgggagctactacatggcggtgctggcgcacgacaccatgagcccgctcgcgttcgcggcgtcggacacgaccaccgccaccgcgatcctccagtacaacggcacgtcgtccaccaacccgcccgcgatgcccgccatgccgtccagctccgactccgggacggccaacgccttctacttcgggctgaggggcctgggcgcgcccgcggtgccggcgccggtggacgtgagcatgaccatcgagctgggcctcggccagctgccctgcgacccgtcgcagaccaggtgcaacgggaccgcggccgccgccgcgatgaacggcgtctcgttccgcctcccgtcccccgagacgtctctcctcggggcgcacgtcgacggcgtcgcgggggtcttcacggcagatttcccggacggtccgccgccgagcggcacggcgatgtcggtggggaccaagctcaagaagctcagctacaactcggtggtggagatcgtgctgcagaacccggcggccgtcccgacggagaaccacccgatccacctccacggcttcaacttcttcgtgctggcgcaggggatgggtaccttcgccccgggaagcgtggcctacaacctggtggacccggtggcccgcaacaccatcgccgtgcctggcggtggctgggctgtcatacgcttcgtcgccaacaatccaggcatgtggttctttcactgccacctggacccgcacgtgcctatgggcctgggcatggtgttccaggtggacagcgggacgacgcccggctccacgctccctacgccgccgggggattgggtgggagtatgcgacgcgcagcactacgcggccgcggcggcggtagcagcagcgccggtgccagttccggccccagccccagtcccagcaccaatcctagcgccagcaccagcagaatcgccgttgccacctccgcgcgcggtggaccacaagccgtcgcccaaccttcctcagcgcagggagcacacgggtacctctaattccgctgctggacggagagctaaggggcacctcgcttgtttcttgtgttctgtcctccttttctttcttcttcgtcaacacaaggcctagctcatgggaagctttggcgtgatacccgcgcagaatctgcagttttgttcgttcgtgtaagtaatatgaaattgttttttctttaaatcttttatacacgtgtatatggatttatattctgatgtaattgtgtgaccttttccttctccacgtgggaagttgtgcatagcaaagttcatgtttagggtttattggctctctgtattcatgatagacattgatacaaagtaatatcatacactacggtttgatttgaaagcatagcgtatacttgaat

SEQ ID NO: 116250 - DNA, 2017 bp, Zea Mays
ccagtgatggcctaacctgacacttcgggcgcttggcttgctgcgagaattgacaggcatggtgtgctccagctcatgaccccgtgggcggacggcccgagcatggtgacgcagtgccccatccagcccagcagctcctacacgtaccggttcagcgtgccggggcaggagggcacgctgtggtggcacgcgcactcctccttcctccgcgccacggtgtacggcgccttcatcatccgcccgaggcgcggcaacgcctaccctttcccggcgccggacaaggaggtccccatcgtgctcggcgagtggtggaaccgcaatgtagtcgacgtcgagagcgacgccatcttggccggtcagcttcccgcccagtccgacgcgttcacagttaacggcaaaaccggcctgctgtaccagtgcgcgaacgagacgttcacggcggtggtggagcccagcacgagggtgctcctccgggtcgtcaacgccggcctcaactcgcacctcttcttcaagctggccggccacaacttcaccgtcgtcgccgtggacgcgggctacacctccaacctcaacacggacacgctcgtgctcgcgccgggccagaccgtggacgcgctcgtcaccaccgccgccgcgcccgggagctactacatggcggtgctggcgcacgacaccatgagcccgctcgcgttcgcggcgtcggacacgaccaccgccaccgcgatcctccagtacaacggcacgtcgtccaccaacccgcccgcgatgcccgccatgccgtccagctccgactccgggacggccaacgccttctacttcgggctgaggggcctgggcgcgcccgcggtgccggcgccggtggacgtgagcatgaccatcgagctgggcctcggccagctgccctgcgacccgtcgcagaccaggtgcaacgggaccgcggccgccgccgcgatgaacggcgtctcgttccgcctcccgtcccccgagacgtctctcctcggggcgcacgtcgacggcgtcgcgggggtcttcacggcagatttcccggacggtccgccgccgagcggcacggcgatgtcggtggggaccaagctcaagaagctcagctacaactcggtggtggagatcgtgctgcagaacccggcggccgtcccgacggagaaccacccgatccacctccacggcttcaacttcttcgtgctggcgcaggggatgggtaccttcgccccgggaagcgtggcctacaacctggtggacccggtggcccgcaacaccatcgccgtgcctggcggtggctgggctgtcatacgcttcgtcgccaacaatccaggcatgtggttctttcactgccacctggacccgcacgtgcctatgggcctgggcatggtgttccaggtggacagcgggacgacgcccggctccacgctccctacgccgccgggggattgggtgggagtatgcgacgcgcagcactacgcggccgcggcggcggtagcagcagcgccggtgccagttccggccccagccccagtcccagcaccaatcctagcgccagcaccagcagaatcgccgttgccacctccgcgcgcggtggaccacaagccgtcgcccaaccttcctcagcgcagggagcacacgggtacctctaattccgctgctggacggagagctaaggggcacctcgcttgtttcttgtgttctgtcctccttttctttcttcttcgtcaacacaaggcctagctcatgggaagctttggcgtgatacccgcgcagaatctgcagttttgttcgttcgtgtaagtaatatgaaattgttttttctttaaatcttttatacacgtgtatatggatttatattctgatgtaattgtgtgaccttttccttctccacgtgggaagttgtgcatagcaaagttcatgtttagggtttattggctctctgtattcatgatagacattgatacaaagtaatatcatacactacggtttgatttgaaagcatagcgtatacttgaat

SEQ ID NO: 116251 - DNA, 2496 bp, Zea Mays
gtctctctctcttccatctccatgcagagtcgtatcgtattcgatcagtctcatctggtagaattctccaaactgaagttttccgcaagacgagtagaccaccaacttgtctcactcagtcgcgtttccatgaaagaacaagctgttaggcgcgcgagcgaggtacactccagctagcctagctcatcatgaattcagcgtcaggttagccaaccaaagccggacaaaactggagaaaccgtacgcctagaaaccctgaactcgctgctagtagttgggagggttcagttgctaggatttgataggaacatccttgtctgcaatgcatgcacagcacagcagagcacgggccccctagctcgcgaacgacgccatggcccatggtggggagcatgcagatcagtcagctgtgcagcagcaccagcattattgcggtgaacgggcagctgccgggcccgtcgatagaagtgaacgaaggcgacgatgtcgtcgtcaaggtcgtcaacaactcgccgtacaacgtgaccatccactggcatggtgtgctccagctcatgaccccgtgggcggacggcccgagcatggtgacgcagtgccccatccagcccagcagctcctacacgtaccggttcagcgtgccggggcaggagggcacgctgtggtggcacgcgcactcctccttcctccgcgccacggtgtacggcgccttcatcatccgcccgaggcgcggcaacgcctaccctttcccggcgccggacaaggaggtccccatcgtgctcggcgagtggtggaaccgcaatgtagtcgacgtcgagagcgacgccatcttggccggtcagcttcccgcccagtccgacgcgttcacagttaacggcaaaaccggcctgctgtaccagtgcgcgaacgagacgttcacggcggtggtggagcccagcacgagggtgctcctccgggtcgtcaacgccggcctcaactcgcacctcttcttcaagctggccggccacaacttcaccgtcgtcgccgtggacgcgggctacacctccaacctcaacacggacacgctcgtgctcgcgccgggccagaccgtggacgcgctcgtcaccaccgccgccgcgcccgggagctactacatggcggtgctggcgcacgacaccatgagcccgctcgcgttcgcggcgtcggacacgaccaccgccaccgcgatcctccagtacaacggcacgtcgtccaccaacccgcccgcgatgcccgccatgccgtccagctccgactccgggacggccaacgccttctacttcgggctgaggggcctgggcgcgcccgcggtgccggcgccggtggacgtgagcatgaccatcgagctgggcctcggccagctgccctgcgacccgtcgcagaccaggtgcaacgggaccgcggccgccgccgcgatgaacggcgtctcgttccgcctcccgtcccccgagacgtctctcctcggggcgcacgtcgacggcgtcgcgggggtcttcacggcagatttcccggacggtccgccgccgagcggcacggcgatgtcggtggggaccaagctcaagaagctcagctacaactcggtggtggagatcgtgctgcagaacccggcggccgtcccgacggagaaccacccgatccacctccacggcttcaacttcttcgtgctggcgcaggggatgggtaccttcgccccgggaagcgtggcctacaacctggtggacccggtggcccgcaacaccatcgccgtgcctggcggtggctgggctgtcatacgcttcgtcgccaacaatccaggcatgtggttctttcactgccacctggacccgcacgtgcctatgggcctgggcatggtgttccaggtggacagcgggacgacgcccggctccacgctccctacgccgccgggggattgggtgggagtatgcgacgcgcagcactacgcggccgcggcggcggtagcagcagcgccggtgccagttccggccccagccccagtcccagcaccaatcctagcgccagcaccagcagaatcgccgttgccacctccgcgcgcggtggaccacaagccgtcgcccaaccttcctcagcgcagggagcacacgggtacctctaattccgctgctggacggagagctaaggggcacctcgcttgtttcttgtgttctgtcctccttttctttcttcttcgtcaacacaaggcctagctcatgggaagctttggcgtgatacccgcgcagaatctgcagttttgttcgttcgtgtaagtaatatgaaattgttttttctttaaatcttttatacacgtgtatatggatttatattctgatgtaattgtgtgaccttttccttctccacgtgggaagttgtgcatagcaaagttcatgtttagggtttattggctctctgtattcatgatagacattgatacaaagtaatatcatacactacggtttgatttgaaagcatagcgtatacttgaat

SEQ ID NO: 116252 - DNA, 2312 bp, Zea Mays
cgcgcgcacactgaaatagctgtgcctctggctgcttcgtcttcctccccttccttgtcctctgcctctgctgcactctgctccacccccttttttctttcccccatccatggtgcagcttttgccggcgctggtggcgctcgcccttctcctcgtcagaccggtggcggatgcggcgatggctaaatacacgttcacagtggggagcatgcagatcagtcagctgtgcagcagcaccagcattattgcggtgaacgggcagctgccgggcccgtcgatagaagtgaacgaaggcgacgatgtcgtcgtcaaggtcgtcaacaactcgccgtacaacgtgaccatccactggcatggtgtgctccagctcatgaccccgtgggcggacggcccgagcatggtgacgcagtgccccatccagcccagcagctcctacacgtaccggttcagcgtgccggggcaggagggcacgctgtggtggcacgcgcactcctccttcctccgcgccacggtgtacggcgccttcatcatccgcccgaggcgcggcaacgcctaccctttcccggcgccggacaaggaggtccccatcgtgctcggcgagtggtggaaccgcaatgtagtcgacgtcgagagcgacgccatcttggccggtcagcttcccgcccagtccgacgcgttcacagttaacggcaaaaccggcctgctgtaccagtgcgcgaacgagacgttcacggcggtggtggagcccagcacgagggtgctcctccgggtcgtcaacgccggcctcaactcgcacctcttcttcaagctggccggccacaacttcaccgtcgtcgccgtggacgcgggctacacctccaacctcaacacggacacgctcgtgctcgcgccgggccagaccgtggacgcgctcgtcaccaccgccgccgcgcccgggagctactacatggcggtgctggcgcacgacaccatgagcccgctcgcgttcgcggcgtcggacacgaccaccgccaccgcgatcctccagtacaacggcacgtcgtccaccaacccgcccgcgatgcccgccatgccgtccagctccgactccgggacggccaacgccttctacttcgggctgaggggcctgggcgcgcccgcggtgccggcgccggtggacgtgagcatgaccatcgagctgggcctcggccagctgccctgcgacccgtcgcagaccaggtgcaacgggaccgcggccgccgccgcgatgaacggcgtctcgttccgcctcccgtcccccgagacgtctctcctcggggcgcacgtcgacggcgtcgcgggggtcttcacggcagatttcccggacggtccgccgccgagcggcacggcgatgtcggtggggaccaagctcaagaagctcagctacaactcggtggtggagatcgtgctgcagaacccggcggccgtcccgacggagaaccacccgatccacctccacggcttcaacttcttcgtgctggcgcaggggatgggtaccttcgccccgggaagcgtggcctacaacctggtggacccggtggcccgcaacaccatcgccgtgcctggcggtggctgggctgtcatacgcttcgtcgccaacaatccaggcatgtggttctttcactgccacctggacccgcacgtgcctatgggcctgggcatggtgttccaggtggacagcgggacgacgcccggctccacgctccctacgccgccgggggattgggtgggagtatgcgacgcgcagcactacgcggccgcggcggcggtagcagcagcgccggtgccagttccggccccagccccagtcccagcaccaatcctagcgccagcaccagcagaatcgccgttgccacctccgcgcgcggtggaccacaagccgtcgcccaaccttcctcagcgcagggagcacacgggtacctctaattccgctgctggacggagagctaaggggcacctcgcttgtttcttgtgttctgtcctccttttctttcttcttcgtcaacacaaggcctagctcatgggaagctttggcgtgatacccgcgcagaatctgcagttttgttcgttcgtgtaagtaatatgaaattgttttttctttaaatcttttatacacgtgtatatggatttatattctgatgtaattgtgtgaccttttccttctccacgtgggaagttgtgcatagcaaagttcatgtttagggtttattggctctctgtattcatgatagacattgatacaaagtaatatcatacactacggtttgatttgaaagcatagcgtatacttgaat

SEQ ID NO: 116253 - DNA, 1749 bp, Zea Mays
atgccgcgctcttggatgatcctactgctagttttgtgttccgctgcagtcctcgctcaagctgctactgtggagcataccttcaatgtggcgacgatatcctggccgcgcatctgccagccggggaatgtaagcatcacggcggtggacggagtacccggtcccgtgatcgaagccaacgaaggcgacacggtgctggtccacgtcatcaaccactctccgctcaacgttacagtccactggcacggcgtcttccagctgggcacgccgtgggcggacggcccgtcgatggtgacgcagtgccccatctgcccgggccaccgctacacgtacaggttccgcatcacggggcaggagggcacgctgtggtggcacgcgcacagctccctcttgcgcgccacggtgtacggcgccctcatcatccgcccgagcagcgggagcgcctaccccttcccggcgccggacgaggaaaagaccgtccttctcggcgagtggtggaacgccgagaccgtccctctcaccaacccagtcgccgacgcgtacacaatcaacggaaggcccggtgattcttacagctgcgagacgacggcgaagcgaatcgagaagttcgaggtgcgtcatgactccacctacatgctgcggattatcaacgctgcgctcaacacggcgttcttcctcaaggtggcagggcacacgttcaccgtcgtggcggcggacgccagctacaccacgcagtacgagacggacgtgatcgtcatcgcgccgggacagaccgtcgacgcgctcatggtggccaacgcgtcccctggccctggccgctactacatggcgatctcctcgtaccagagcgcggcccccctgcgcccagggagctacaacgctaacatcaccacggccgtcgtggagtacgtcggagcggcggcgtcggccggccagcaggcgccgacgccggcgctgcccgagatgccggaggtgaacgacacggccacggccaaccggttctacaccggcatgacggcgctcgtccgcccaggcaggcggaccgtgccgctcgccgtcgacacccgcatgttcgtcacgatcgggctgggcttcgtctcctgcgaccaggaccaggctccgtgcccggtcgtcgcgagcatgaacaaccagtctttcaagctcccagacgcagacaccatgtcgatgctggacgcgcggtaccgggacacgccggacggcgtgtacacgagggacttccccgaccagccgcccgtggcgttcgactacacgaaccagacggagcggctgctgctgggcggcgtcgccgcggcgctgctgttcccgggaccgcagtccacgaaggtgaggacgctggcgtacaacgcgacggtggaggtggtgctgcagaacacggcgctggtggggcgcgagagccacccgatgcacctgcacgggttcaatttcttcgtcgtcgcgcaggggttcggcaactacgacacggccgcgaagcagcacttcaacctcgtcaacccgcaggagcggaacaccatcgcggtgccgaccggcgggtgggccgtgatccgcttcgtagcggataacccaggaatgtggttcatgcactgccacatcgacgctcacctttccatcggcctggcgatggtgttcgagggagggtacatacaatcagaatcttcaaacttcaacttgcatggaaatttgattttcaacgcctacgaaaacgagtgcttgaagccttctaagcgttga

SEQ ID NO: 116254 - DNA, 1757 bp, Zea Mays
gacttaaaattttacattttcgaataagtattttgaataagacgaatgatcaaagtttttgaaaaaagtcaacgacgtcatatatttaagaacggaggtagtataactgtttttcactttgcttcatttgatgagccaagagcattgtagacctcacagtagagactggcttttcttttgtgcacggttggtagaactggaaattagtgagttctttatttctattggtaagcaacaaaggaacaaatcaattgtctgctaatatgaagtttttcaggttgaggccgcagaaacttcctattatctgaatcttgtagtttttggctttttgcattgtcttctaaaaaaatacttaacatatttttatcagttcaataatagattattttggaaatttatgcaatcgttttgcctataactagtacatccatggattggctgctcgaggagtgcattacttgcatcggcccggaccactgctccaggacttgggatttatggcccttccagagcttggccaagagaaaggttatcttagtgagagcttattcactttcatcttcatttccttttttctgtggagttttcacccttttgtttatcacagcaaacgcttttacactgttctactatggcgtagggtgctggcatttctagtggcttcacagtttttaaggattatgacattctattccactcaacttcctggtcccaattatcactgtcgtgagggctcaaaactggccactctcccaccaccaaataatgcacttgaagtgctcctgattaactttcctcgcggagtgctttttggttgtggcgatctgatattttcatctcacatgatcttcaccctagttttcgtgcgcacgtaccataaatatggctcaaacagattaattaagctcctttcatggctgatggctataattcagagtcttcttataattgcttctcgcaagcactacactgtggatgttgttgttgcttggtacactgttaatttggttgtgttctttgttgataagaagctgcctgaaatgccagatcgtacaaatggattatctttgcttccagtaaacacaaaggataaagacgggaggatgaaggaagaactccataagcttgagaaggacgggaggatgatggatgagttccataaattattaaatggaaacactgtcgatgctacagattggcgacaacgagtgcagattaatggaaagcacggagaagacacgaaccacactgtctctgatgccacccctactggaacatgatcagtagcttttctttgttatatcgtttttaacatccacaggggagtctgcgatgaaaaaggaaattgcgtgttgtgcctctgtatctgaaaggcttctcaggtacccgcaaggctgcaacatagaatgttttgttgtgctctccatggcacgatgacaggaaaaaacgaggtgttgaagtagtggtagaaactataatagaatcaggatctcttcgcttttctaagagaccgcagctacagttttgcatccttcagacatttcaaaaacgacggtactagagagaaattgatgtttgatgtaaatgttgattcgattcagctagtcctagctacaaaaaaaaatccatttgtgccaatgagtaatgactaacttatgctgattggtaatttaacgtgagcagctgtaatgatcgcttttgttaccactttgaaggtctttttagaatgaaggaattttacgagactcggtttattt

SEQ ID NO: 116255 - DNA, 2017 bp, Zea Mays
aggatagtagtttgaccccctccagtacgtccgcaccgcaaggcctctcgccgtccttggacattctccgtccgtcgcctttgcctggggcagataacaatatctgatatccctgggccttcgccgtccgggcccccctaccttctctcatccgtcctcacacaaagcagaagggggaggagttttaggggaggagggggcggcaggaggagccattattatttcttcttccagcggcaattcctggccaccaccgggcgcgctatattactccgggttcgtggacaagcatgcagaggggcgtgtccttccctggcggaatggcgaaggagtgcccgcccgccgagctctggctcccggacgagttcctggacgacgacttcttctccgaggaggagaaggcggcggtcgcggccaagagcgagagcgacgaggaggaagggatggacggcctctcgcgccgcgcggccgggctcgtcgtcgggggtggaggggacggttcccctgcaaaggcgcaagtgttagccggctcgccgcagtcgattctgtgcggcctgcatgcttccggggaggacagccccaacggcgcggcgtcgcaggtcagctcgccgccgtcgtcgccgctggagaagaccccggccgaccactgggacctgctcaaagaggcggccggccaggtggcccgcatgcgcacaactagcggcatcctggtggcaacgaacgcgggcgcacatcaaagacaccccgtcccgccgctggcgcagaagctctctgcgccggccgaggctccgaaggccgcgggtgccaacctccctcaggctcagccgaagaactcgatggaacatcgccggattcagattgctcgttttaatgcgctgaagcagcagcagctcctgaagcacatgcgggagcgggagctcgccgtcgctacggcggcggcgtggggcacgagcgttgccgggtctcatcgtgccgccgggtaccgtgcgccggcgccccatgtcctgagctcgtccgcgtggcccaccctccagaagcagcagcagcagcagcagcaaagggcggcgtccccggcgggcatgcgcgccgtcttcgtcgcccctcctggcgccaagcgcgagtgcgccggcaccggcgtgttcatcccccgccaggccggcgcccccgcggagcccaagaaaaggccagcagcgtgcgcccctgtccttctcccggcgcgcgtcgtgcaggcgctcaacctcaacgtcgaggacctcggggcccgtcccatctacccgggcggcttcgtcctcgaccacgatgcactggtgagccggagcaacgctctgctggcgagccgcgcgtcccagcagctccatggcgcttcgtcgcgcgaggtgaatctcccccaggaatggacgtactgagggcgccgattcgccaccgcaccgctgcaagatgactcgacgatcactccagattaacggggggtgtcaaaaaaaattactattgctattggtagcaataggtattataggtgttgttaggctagaagtaggaggcagcggtggtgtggcattacgcgccagcgttaggtgttcttttgtgcgggggtgatatattggttattttgggactgacggacgggttggtgatgagcaagagcgaaatcaatcatccgtggctctcgcaggtccgttgggggcggaggggagaaacagcaataataataataagtgggtgcttttgggggaggggagagaggggggtttggaactaatcctatgtttagctggttctggtactacgatggtttcccaagggaaaatcatcaagcattcagcagtctgtgaaagagatgtctcgtcactgtaagcaaataataataataataacaggagctccatatttccttctcttttttttttgttgttgtcccttttggtttgcagaaacgcacgcaccaggctctctcttgatccttttcttgccgttgcttcaagggtaaggaatcggcgtctttagggctgcggcttac

SEQ ID NO: 116256 - DNA, 705 bp, Zea Mays
aggatagtagtttgaccccctccagtacgtccgcaccgcaaggcctctcgccgtccttggacattctccgtccgtcgcctttgcctggggcagataacaatatctgatatccctgggccttcgccgtccgggcccccctaccttctctcatccgtcctcacacaaagcagaagggggaggagttttaggggaggagggggcggcaggaggagccattattatttcttcttccagcggcaattcctggccaccaccgggcgcgctatattactccgggttcgtggacaagcatgcagaggggcgtgtccttccctggcggaatggcgaaggagtgcccgcccgccgagctctggctcccggacgagttcctggacgacgacttcttctccgaggaggagaaggcggcggtcgcggccaagagcgagagcgacgaggaggaagggatggacggcctctcgcgccgcgcggccgggctcgtcgtcgggggtggaggggacggttcccctgcaaaggttgcttacctttttttttttctctctctctctctcccgttgtggtgctgccgtgtttggaagtttccgggttcgaatctcgctcagccctgatcgtttccacctctgtcgcgtgggggcaggcgcaagtgttagccggctcgccgcagtcgattctgtgcggcctgcatgcttccggggaggacagccccaa

SEQ ID NO: 116257 - DNA, 1087 bp, Zea Mays
atggtggactcgttcaagtcagatctcgttcctcttcccgtcgtctacgaccgctacgacgagccgaaccacaacgagatcgtcgaggtgctcgcgctactggagtacaacgaggaggctcgcatcaccgatgcgattgaaggactcatccgtgaggcttccagcatgactgttgcgctggagcccgtcgaacaccgccgacgccaggtgctaaccgcggcaggcgaggtcgagcagacaccaacgaaaggcattaccaacgaggtggaggccgaggaggcatgcgaactccctagagacgcgaccgacttctccgaccctgaagacactccgacctcgccatcgtccaggccctcgccgacacattcgtcgacggcaacgagctcgaccacccatcgaagtccagggaggaagtccagcttccacgcgcggtgtacttcgcacccgacaacgacagcccgcctcctccactccttgcagtcaccaaaccaggcggaggtggtggagtcatccgaggcggagtccgcgcgtcctcccgtcgtctacaacagccacgtcgagctcggcctctacagggtggggaacacgctcacgtcagatgtagaggtgaggctgcaggatgacgaggaagagcatgagcagcaggaagtagatgacggcgtggacgagcatggacgggaagctggtcttcatgttcatgaggtcgacggggcggtgccggccgggcatctgcagcacgccgcccgggcacaggagcgcgaacagcgccgtggcgatgatcgacggcgcccagtccctcatcgcctccctgctgtgctcaacgggcaagcagcagccaagcacaggagagggagaagcgaaccagtggaaggcaaaggcaggcagtcactgggccaggtgcacggatgcttaagacgcgcacggtactacggtagtggtacagactacggacggaaagcatggcatcgggcaccgagcacactacggctgtcgacgagggaatcggtggaatggttgggttgattgagaaggcgtcatcataacgccgaaccggagcttttgagcacggaaacggcgcctttttgcg

SEQ ID NO: 116258 - DNA, 82 bp, Zea Mays
cctgtccaagatggaatcgtagatcaagtagcttcatttcttccaataactatccgtctagacaagactcaatctagaaacc

SEQ ID NO: 116259 - DNA, 150 bp, Zea Mays
atgggatcgaggaacgggaacgtggtacgtggaacgctacaaaaactaggatttaacactactggaacgagattgttttcacgttcccggaacggaacgaacgttcccggaacgagaaacgtggctaagttcccagttcccggttactaa

SEQ ID NO: 116260 - DNA, 920 bp, Zea Mays
acagagcgccacgaggcgagcagtcgagtgttccctagagtccccgttcctccgccgccgcctgcaaccgcttcacgtgccctgatccatcgcaggtcccctttctgaccccaaatggagccgaagaagtcctctgctcagcaccagccccacgccatggaacccaagaagtcctctccacgcggcgccggggccgtcgccgccaccgccactgaagccgagtccccgttgagcagcttgttctacccgccggcgcccgcgatggtaaaccgcaatgggctccttccaaaagtcataccgcgtacgcaaaggacggtaaacattcaccaccttatgatacgtcatgttttgggtcatctgtgcattatggtggtcgagattatttctacggcagctctacaaccaagaaagcgacagaatcctccactgactacaaaggggacaagaaagatccagtcgcagattctcatggcgactggtggcaaggctcattttattactaagagaacctggtggcctctccttggagaacaaggaacagaaggagggcagtgaagctcggtttccttgattgctagcagtattatcttgtgtcatagtggacccgctttcgtccagcggtggtgccaatatttagaagcatcacctggcctgggcagatgtagtgtgcgtcttatagtctctgctttagatgtgcaatgtaacgaagctttagcacagtatgaactagaccgcataaaagaatccatgtccattccgccagtaatacgagcgggttggtatctgactccttagagtcaaaagtctgtacaattgtatcgtcgctccaaagcaaaaaaaaaacaataataatgtgctggagaagcggcgatgacttcacattgtacacctttaccagctggaatttgacagaagtttgg

SEQ ID NO: 116261 - DNA, 999 bp, Zea Mays
acagagcgccacgaggcgagcagtcgagtgttccctagagtccccgttcctccgccgccgcctgcaaccgcttcacgtgccctgatccatcgcaggtcccctttctgaccccaaatggagccgaagaagtcctctgctcagcaccagccccacgccatggaacccaagaagtcctctccacgcggcgccggggccgtcgccgccaccgccactgaagccgagtccccgttgagcagcttgttctacccgccggcgcccgcggcaaatgggaaagatcaggagttgtacagcattatttacaaagggcagagcgggagcgcacaagctggcgcgacaggtaatggtaaaccgcaatgggctccttccaaaagtcataccgcgtacgcaaaggacggtaaacattcaccaccttatgatacgtcatgttttgggtcatctgtgcattatggtggtcgagattatttctacggcagctctacaaccaagaaagcgacagaatcctccactgactacaaaggggacaagaaagatccagtcgcagattctcatggcgactggtggcaaggctcattttattactaagagaacctggtggcctctccttggagaacaaggaacagaaggagggcagtgaagctcggtttccttgattgctagcagtattatcttgtgtcatagtggacccgctttcgtccagcggtggtgccaatatttagaagcatcacctggcctgggcagatgtagtgtgcgtcttatagtctctgctttagatgtgcaatgtaacgaagctttagcacagtatgaactagaccgcataaaagaatccatgtccattccgccagtaatacgagcgggttggtatctgactccttagagtcaaaagtctgtacaattgtatcgtcgctccaaagcaaaaaaaaaacaataataatgtgctggagaagcggcgatgacttcacattgtacacctttaccagctggaatttgacagaagtttgg

SEQ ID NO: 116262 - DNA, 1019 bp, Zea Mays
acagagcgccacgaggcgagcagtcgagtgttccctagagtccccgttcctccgccgccgcctgcaaccgcttcacgtgccctgatccatcgcaggtcccctttctgaccccaaatggagccgaagaagtcctctgctcagcaccagccccacgccatggaacccaagaagtcctctccacgcggcgccggggccgtcgccgccaccgccactgaagccgagtccccgttgagcagcttgttctacccgccggcgcccgcgatgggtttcttcgcgtacaggcaaatgggaaagatcaggagttgtacagcattatttacaaagggcagagcgggagcgcacaagctggcgcgacaggtaatggtaaaccgcaatgggctccttccaaaagtcataccgcgtacgcaaaggacggtaaacattcaccaccttatgatacgtcatgttttgggtcatctgtgcattatggtggtcgagattatttctacggcagctctacaaccaagaaagcgacagaatcctccactgactacaaaggggacaagaaagatccagtcgcagattctcatggcgactggtggcaaggctcattttattactaagagaacctggtggcctctccttggagaacaaggaacagaaggagggcagtgaagctcggtttccttgattgctagcagtattatcttgtgtcatagtggacccgctttcgtccagcggtggtgccaatatttagaagcatcacctggcctgggcagatgtagtgtgcgtcttatagtctctgctttagatgtgcaatgtaacgaagctttagcacagtatgaactagaccgcataaaagaatccatgtccattccgccagtaatacgagcgggttggtatctgactccttagagtcaaaagtctgtacaattgtatcgtcgctccaaagcaaaaaaaaaacaataataatgtgctggagaagcggcgatgacttcacattgtacacctttaccagctggaatttgacagaagtttgg

SEQ ID NO: 116263 - DNA, 588 bp, Zea Mays
agcactattctggctgcccgatccacccccggatcaggcgcttggtgtccgaggcggattgctccaactgattctgcgcggcggattgctacaaaattgggaagagttgagggagccgttggagcatggaaaaaacacgaattcttcctaacatcactttttcgagtatttctagcagcgtcgttggagttgctcttaggggctgtttggttggaccgaacaatatgggctcgcctcgctcagcaagaaacagaacaagaacagggtaggtttggtttccttgccctgctaccttgatcacatatcctggtcacatatatccaaacacgctcttaaggtcaggtaggtcagagtttgagtttgcaatttgccctgcctacttcacagaatatgctttgggttttgcgtttcctacttctcatagaagaagctacacactcggcactccatttacaccttttttcagtagatcttctgatgttcagagcgtacacaataggcatattgttctgcccctttgtttcaccgtcattgcgcgcgcatctagagttggaattcattccttactgatggtgctgccttctgaaa

SEQ ID NO: 116264 - DNA, 2183 bp, Zea Mays
cgttattagctcgttttttctcttggcacgcgtgctcgacagactgactccatctgaccgggacacgtatagccgtgccagttgccgtccgttgcccaaactgtatccagccctctcggtctcggatagacagcgacggagaggagagcggcgggcggagagaagtggaggaagaagacgaggatggccacctatttcacgctcaacaccggggctcgcatcccctcggtagggctcggcacctacaaggccggacccggcgtcgtcgccgacgcgatcaccgccgccgtcaaggtcctagcctcaccatcgagcactttctgctccgagctttacatccgcgcgtgtgctgttccgtttgttttgacctgtgcccttgcttgagcccgggccttattcatcctgccttcttgcttgcttgcttgtaaactgccatggcaggccgggtaccggcacatcgactgcgcgccgctatacaagaacgagaaggaggtagctagccgccgcaatccacgttccaccctgcaattaagtatcttcgattcacatttgcgatggcagttcggttatagttgcgaccactaacgtgttcccagatcggcgttgctctgaacaagctctttgatgacggcgtcgtcaagcgagaagaccttttcatcacctcaaagatatggtactaccatggatactgtgttactgctctcgtgtccatcagtctcgtaacaacctgagcgtcaagctacacaggtgcagcgatctcgcacctgaagacgtgccgttggcgatcgacatcaccctgaatgatctgcagctagattatcttgacctgtacctgatacactggcccttccagataaagagaggcagcgagctcagtccagagaacttcgtccacctcgacatgcccaagacctggcaggcaatggagaggctgtacggctcaggcaaggctcgcgcggtaggcgtcagcaatttctcgaccaggaagctggccgatctgcttgccgtagcccgtgtcactccagccgttgatcaggtggagtgtcaccccggctggcagcaggcgaggctcagagcgttctgctgctccagcggggttcatttctctgcgtacgcgccgctaggcaggatgaaagccgtcgccagtgacccggtggtcgcatccgtagccgagagcttggggaaaactccggcacaggttgctctgcgatggggtatccagcagggccagagcgtgcttcccaaaagcgccaatgagtcgaggttgaaggagaacattgacctgtttggttggtccattcctgatgagctgtgcgccaagttttctgaaattgaacaggttaagcaaatcagaaatgacgcgtttgtgcacccccagagtatttacaaaacaatcgacgaactctgggatggtgagatctaaaatgaagatcattttcggtacgaaatcaatctgtaaccagagttgaaatttacgccaaaaaagtagggatatatgcttttgtcttccaaggggggaaaaggcacatgtttatcttaagcactactggcaacaggcatgtggtgtgggttgcattttcggcagggctgagtgacgtcagcatattgttgcattgcagcagatccaatgaaggggcccttgagtaaagcatagaacgaacaattttcatctgttgttgtcgtatgctcgtttcatcgatgactttgtatgtagcattaagtgtagttcttaaataaccgagaagtcatatcctggcctagccaaagcttccattaattcaggattcagcacatagccgatcataaagctagctttgagagctctttgttccggaaacgttacgaaacgatgagcaagcatcgacatttgccggcctttagatagcctcaggcggcgtgcatctgcgctcgcagaagctgatgaggatgtccgcacaccggaagacgggtggttcgtcgatgccgccggtgggggcatggttgtgatggtcatcaagctccaaaatcaatatagaaaatggtttaaagtcatttacctttcaatctctccctttttggttgatgtcaacacataaacaaagcaaatatcatattatgaaaattgtaactagtttgcaatttgctcaagtattcataagatactaagtacaaagcagttctaagtgaatatgagtgtttttgac

SEQ ID NO: 116265 - DNA, 1740 bp, Zea Mays
gtttcggcgtcgttattagctcgttttttctcttggcacgcgtgctcgacagactgactccatctgaccgggacacgtatagccgtgccagttgccgtccgttgcccaaactgtatccagccctctcggtctcggatagacagcgacggagaggagagcggcgggcggagagaagtggaggaagaagacgaggatggccacctatttcacgctcaacaccggggctcgcatcccctcggtagggctcggcacctacaaggccggacccggcgtcgtcgccgacgcgatcaccgccgccgtcaaggtcctagcctcaccatcgagcactttctgctccgagctttacatccgcgcgtgtgctgttccgtttgttttgacctgtgcccttgcttgagcccgggccttattcatcctgccttcttgcttgcttgcttgtaaactgccatggcaggccgggtaccggcacatcgactgcgcgccgctatacaagaacgagaaggagatcggcgttgctctgaacaagctctttgatgacggcgtcgtcaagcgagaagaccttttcatcacctcaaagatatgctacacaggtgcagcgatctcgcacctgaagacgtgccgttggcgatcgacatcaccctgaatgatctgcagctagattatcttgacctgtacctgatacactggcccttccagataaagagaggcagcgagctcagtccagagaacttcgtccacctcgacatgcccaagacctggcaggcaatggagaggctgtacggctcaggcaaggctcgcgcggtaggcgtcagcaatttctcgaccaggaagctggccgatctgcttgccgtagcccgtgtcactccagccgttgatcaggtggagtgtcaccccggctggcagcaggcgaggctcagagcgttctgctgctccagcggggttcatttctctgcgtacgcgccgctaggcaggatgaaagccgtcgccagtgacccggtggtcgcatccgtagccgagagcttggggaaaactccggcacaggttgctctgcgatggggtatccagcagggccagagcgtgcttcccaaaagcgccaatgagtcgaggttgaaggagaacattgacctgtttggttggtccattcctgatgagctgtgcgccaagttttctgaaattgaacaggttaagcaaatcagaaatgacgcgtttgtgcacccccagagtatttacaaaacaatcgacgaactctgggatggtgagatctaaaatgaagatcattttcggtacgaaatcaatctgtaaccagagttgaaatttacgccaaaaaagtagggatatatgcttttgtcttccaaggggggaaaaggcacatgtttatcttaagcactactggcaacaggcatgtggtgtgggttgcattttcggcagggctgagtgacgtcagcatattgttgcattgcagcagatccaatgaaggggcccttgagtaaagcatagaacgaacaattttcatctgttgttgtcgtatgctcgtttcatcgatgactttgtatgtagcattaagtgtagttcttaaataaccgagaagtcatatcctggcctagccaaagcttccattaattcaggattcagcacatagccgatcataaagctagctttgagagctctttgttccggaaacgttacgaaacgatgagcaagcatcgacatttgccggcctttagatagcctcaggcggcgtgc

SEQ ID NO: 116266 - DNA, 1225 bp, Zea Mays
aaagcctcatatcatttttggactgtccagattggtttggcgctgaagaagctatttgaagagggtgtagtgaagcgagaagatctgtttatcacctctaagctatggaatgatcatcatgctcctgaagatgtgcctgaggcactaaatgacagcctgaatgatttgcagcttgagtacctggatctttatcttatccattggccatttagagtcaagaagggaacaaataccagccctgaaaattttgttacacctgacttccctgctacttggggggcaatggaaaagttatatgatgctggcaaagctcgcgctattggtgtgagtaacttctcctcaaagaaattgggtgacttgcttgctgtagctcgtgtacctccagctgttgatcaggtggaatgtcatcctggttggcagcaaactaagctccatagcttttgtcagtcaactggtgttcatctaactgcttactcaccactaggttcacctggtacaacttggatgaatggtaatgtccttaaagaaccaataatcatctcaatagctgagaaactcgggaaaacttctgcacaagtggctctgcgctggaacattcagatgggtcacagtgttcttccaaagagcacgaatgaagaaaggataaagcaaaaccttgatgtttatgattggtcaattccagatgacttgcttgcaaagttctctgagattaagcaggctaggctacttagaggcaacttcattgttaatccagagagcgtttacaagacccatgaggagctctgggatggtgaactttaagaaggacgccgttgtccctcctgactcctgagcagggagcaagcagcgttccattagggctcgtcagatcatttcacctccaaagttgctcttttgaaatgaaggttcagtgctcggaagctctggtgccatcctgtatcacgaactattgagaaatttgtcggtgattttactttgtgctacgggatgtgctgctgcagtctgtcctagtgtcagttgatttttctggtaaaactgtgaccaaataagttaattcgccaggcatcattactattggaatttcatcgttttatctcctcactatttttttatgctccatgtattctctatgatgagaccctgttgagtagttcactcatatagtcacacaaaacactgttttacattatccacagagtaagctgctgaacgtgctaagtgctaa

SEQ ID NO: 116267 - DNA, 1157 bp, Zea Mays
aaagcctcatatcatttttggactgtccagattggtttggcgctgaagaagctatttgaagagggtgtagtgaagcgagaagatctgtttatcacctctaagctatggaatgatcatcatgctcctgaagatgtgcctgaggcactaaatgacagcctgaatgatttgcagcttgagtacctggatctttatcttatccattggccatttagagtcaagaagggaacaaataccagccctgaaaattttgttacacctgacttccctgctacttggggggcaatggaaaagttatatgatgctggcaaagctcgcgctattggtcaaactaagctccatagcttttgtcagtcaactggtgttcatctaactgcttactcaccactaggttcacctggtacaacttggatgaatggtaatgtccttaaagaaccaataatcatctcaatagctgagaaactcgggaaaacttctgcacaagtggctctgcgctggaacattcagatgggtcacagtgttcttccaaagagcacgaatgaagaaaggataaagcaaaaccttgatgtttatgattggtcaattccagatgacttgcttgcaaagttctctgagattaagcaggctaggctacttagaggcaacttcattgttaatccagagagcgtttacaagacccatgaggagctctgggatggtgaactttaagaaggacgccgttgtccctcctgactcctgagcagggagcaagcagcgttccattagggctcgtcagatcatttcacctccaaagttgctcttttgaaatgaaggttcagtgctcggaagctctggtgccatcctgtatcacgaactattgagaaatttgtcggtgattttactttgtgctacgggatgtgctgctgcagtctgtcctagtgtcagttgatttttctggtaaaactgtgaccaaataagttaattcgccaggcatcattactattggaatttcatcgttttatctcctcactatttttttatgctccatgtattctctatgatgagaccctgttgagtagttcactcatatagggggcgtttggtttctaggactaatgtttagtccctacattttattctattttagtacttaaaatgctaaatacggaaactaagactct

SEQ ID NO: 116268 - DNA, 1212 bp, Zea Mays
aaagcctcatatcatttttggactgtccagattggtttggcgctgaagaagctatttgaagagggtgtagtgaagcgagaagatctgtttatcacctctaagctatggaatgatcatcatgctcctgaagatgtgcctgaggcactaaatgacagcctgaatgatttgcagcttgagtacctggatctttatcttatccattggccatttagagtcaagaagggaacaaataccagccctgaaaattttgttacacctgacttccctgctacttggggggcaatggaaaagttatatgatgctggcaaagctcgcgctattggtgtgagtaacttctcctcaaagaaattgggtgacttgcttgctgtagctcgtgtacctccagctgttgatcaggtggaatgtcatcctggttggcagcaaactaagctccatagcttttgtcagtcaactggtgttcatctaactgcttactcaccactaggttcacctggtacaacttggatgaatggtaatgtccttaaagaaccaataatcatctcaatagctgagaaactcgggaaaacttctgcacaagtggctctgcgctggaacattcagatgggtcacagtgttcttccaaagagcacgaatgaagaaaggataaagcaaaaccttgatgtttatgattggtcaattccagatgacttgcttgcaaagttctctgagattaagcaggctaggctacttagaggcaacttcattgttaatccagagagcgtttacaagacccatgaggagctctgggatggtgaactttaagaaggacgccgttgtccctcctgactcctgagcagggagcaagcagcgttccattagggctcgtcagatcatttcacctccaaagttgctcttttgaaatgaaggttcagtgctcggaagctctggtgccatcctgtatcacgaactattgagaaatttgtcggtgattttactttgtgctacgggatgtgctgctgcagtctgtcctagtgtcagttgatttttctggtaaaactgtgaccaaataagttaattcgccaggcatcattactattggaatttcatcgttttatctcctcactatttttttatgctccatgtattctctatgatgagaccctgttgagtagttcactcatatagggggcgtttggtttctaggactaatgtttagtccctacattttattct

SEQ ID NO: 116269 - DNA, 1197 bp, Zea Mays
aaagcctcatatcatttttggactgtccagattggtttggcgctgaagaagctatttgaagagggtgtagtgaagcgagaagatctgtttatcacctctaagctatggaatgatcatcatgctcctgaagatgtgcctgaggcactaaatgacagcctgaatgatttgcagcttgagtacctggatctttatcttatccattggccatttagagtcaagaagggaacaaataccagccctgaaaattttgttacacctgacttccctgctacttggggggcaatggaaaagttatatgatgctggcaaagctcgcgctattggtgtgagtaacttctcctcaaagaaattgggtgacttgcttgctgtagctcgtgtacctccagctgttgatcaggtggaatgtcatcctggttggcagcaaactaagctccatagcttttgtcagtcaactgcttactcaccactaggttcacctggtacaacttggatgaatggtaatgtccttaaagaaccaataatcatctcaatagctgagaaactcgggaaaacttctgcacaagtggctctgcgctggaacattcagatgggtcacagtgttcttccaaagagcacgaatgaagaaaggataaagcaaaaccttgatgtttatgattggtcaattccagatgacttgcttgcaaagttctctgagattaagcaggctaggctacttagaggcaacttcattgttaatccagagagcgtttacaagacccatgaggagctctgggatggtgaactttaagaaggacgccgttgtccctcctgactcctgagcagggagcaagcagcgttccattagggctcgtcagatcatttcacctccaaagttgctcttttgaaatgaaggttcagtgctcggaagctctggtgccatcctgtatcacgaactattgagaaatttgtcggtgattttactttgtgctacgggatgtgctgctgcagtctgtcctagtgtcagttgatttttctggtaaaactgtgaccaaataagttaattcgccaggcatcattactattggaatttcatcgttttatctcctcactatttttttatgctccatgtattctctatgatgagaccctgttgagtagttcactcatatagggggcgtttggtttctaggactaatgtttagtccctacattttattct

SEQ ID NO: 116270 - DNA, 1808 bp, Zea Mays
aaagcctcatatcatttttggactgtccagattggtttggcgctgaagaagctatttgaagagggtgtagtgaagcgagaagatctgtttatcacctctaagctatggaatgatcatcatgctcctgaagatgtgcctgaggcactaaatgacagcctgaatgatttgcagcttgagtacctggatctttatcttatccattggccatttagagtcaagaagggaacaaataccagccctgaaaattttgttacacctgacttccctgctacttggggggcaatggaaaagttatatgatgctggcaaagctcgcgctattggtgtgagtaacttctcctcaaagaaattgggtgacttgcttgctgtagctcgtgtacctccagctgttgatcaggtggaatgtcatcctggttggcagcaaactaagctccatagcttttgtcagtcaactggtgttcatctaactgcttactcaccactaggttcacctggtacaacttggatgaatggtaatgtccttaaagaaccaataatcatctcaatagctgagaaactcgggaaaacttctgcacaagtggctctgcgctggaacattcagatgggtcacagtgttcttccaaagagcacgaatgaagaaaggataaagcaaaaccttgatgtttatgattggtcaattccagatgacttgcttgcaaagttctctgagattaagcaggtatctgtgtcctgagtacccttcacaatactttaatgaggataaagttgcttgatatttgttgattaataattgaactttataggataaaatacatttcaaaactttaccgtgttatgtgctcttcagaaattcatatgatttattgtgataaacaaatcacttaaagcattctaaattgctaggattgagtagcatttgcacttttttttagcttccttggagcttggagcaccactggtgctgtgacaggaatctagtaaaggtgtctacttatttttcaaagaaataaacacagctgcaatttttgttataaacatatcattacacatttaagtcgagttatgtttcagcgagctgcgctgtcccctgcccttagacacccacacgcagtagttgaaaatttggcctggtgctgtggtcacagttctctggcagcctatgatgtttttagaataataagataagattatcaaccccatgaccggattgccccttattctttttcataaccacgctcatccttgatctatggtgctctatgtacaaactccatgagaactagtattgcatcacacctattatctgtaacccccggccccagtggcgaaaccagactataatagaagcctgggcaccacatgcaaatcagcatgatgccactttctatctctcctttcgcaacgcatccagctcgatcccgatactgctgcacagcaacagaagcgaggggcacgccgtggtctagaggagcgtcaagtcctcgctgtgctgctcttggtgctctccaccatcttcgttttctctgtcttgtactcgtcacactacagctaaccaagcaccgtcagataagagttcaaacatctcgttgccgtcagcaaacactttagcagcgggatgtaccatcacgcagggcaagcagtgccttgccaacagcggagcccccgggcacatgcctaggctggctggaccgtggctccgccgctgcccggcccccttgtttatggctcgccaattctttcttgaaatgctgccacaagatttacttatgcttcatgccttgattactgaacctttccctctgagattct

SEQ ID NO: 116271 - DNA, 732 bp, Zea Mays
agttcctatagttaacaatgattaatcttcaagctgatgactacaagagaaaaatggtgaagtgttgatcagtagttcttgtgaatgtacgtacatactgcaaaatggggacatcctagtaatggtcaatcaactcatagcctcactgctggcaatttgcaggaatgctggttgggtaccaatgtttaaggtaaacacatgttttcatttctatttcctcaaattcacagactgcatcgataaacaaggtatcttgcaaaaaaaagtatatgtggcactatttgttatgaataagatgtccacactccatagggttgtccatatccaaccacacggcaggtagttcaacgcagacaacaaagcaagtaatcaggcaaaataatcaagctacatgcagatacggagcagatcacaatcccatgaccaccacactatgatcctacatgcagatacgggaacagaggtcaaaatgttcacgaccagagcaaacagtctgggacggtaccagaaggctgtgtagttggtgaacccgggcgcggaggccatggcgcagatggacgcggcggcgaagacgaactggcccgcccgcagcgccaggccgcccgacgtcccggggcgtcccgccacttccgtcatctagcccggcagcaggtcctctagccgcttcctctcaaacgacgccgccttgttgtgctggggcattcggtgctggggcctcgcaggaggatttgg

SEQ ID NO: 116272 - DNA, 1661 bp, Zea Mays
agagttgtatgttgtagacgggcgagtgcgacgagcggagaacgtaatgccagcgctacaccgctgacgtgtccgccccggctccgggtgaaggtcaaaaggggcaaagggcggggggaaaccgtgggccctatatagcgggccttctcgctggagctaggagaaatcgccaagccaagccaagccagaagcggcagcctcgcgcagcggtctggtctctctggtgggtgcccctcttcgccggtggccggaaagggtagtggagtgggaccgctcaaggagaggccggcgtccccaagtctcacttccgccgtccgcttcccccctgatcgaagctttgaaagaagttggggtcacagaggtggttttggctatcaactaccgcccagaggtaatgattaatttcttgaaggactttgaggataagcttggcatcacaattacatgctcccaagagactgagcccttaggaaccgctggccctcttgctctagcaagggacaagcttgcggatggatctggccagccattctttgtcctcaacagtgatgtcataagcgaatacccatttgctgaactcatcaaatttcacaagtgtcatggtggtgaggcaacaattatggtcactaaggtggatgaaccatcaaaatacggtgttgtggttatggaggaggcaactggcagggtggaaaggtttgttgagaagccaaaaatatttgtgggtaacaagatcaatgctgggatttacttactgaacccatctgtccttgaccgcattgagctgaggccaacatcaattgagaaagaggtcttccctcaaattgcagctgatcaacagctctatgcaatggtccttccaggtttttggatggatgttggtcagcctagggactacattactggcttgcgtctttatctagactcgattaggaagaaatcagctgccaagctagctactggagcacatgttgttggcaatgtgctggtgcatgagagcgccaagattggagaaggttgtctgattggtcctgatgtcgccattggacctgggtgtgttgtggaggacggcgtgaggctttcccgctgcactgtcatgcgcggcgtgcgtatcaagaagcatgcttgcatctcaaacagcattatcggttggcactcaactgttggtcaatgggcacggatagagaatatgactatcctgggggaggatgttcatgtgtgtgatgaggtgtacagcaatggcggtgttgttctcccacataaagagatcaagtcaagcattctgaagcctgagatcgtcatgtgagctctccagttttagctacagtacattcttaacttctttgacgaagggaggattgcagatccccttttataaacgatattgcttggtatcttcgatctaatgcaaacagcttcatacttggtctcttgttaaactattgacaatgtatcttgttttttgttgaaaagtttagtacttgagtgtcaatcatacgtattcgcttgctaaaaactattgacaatgtatcttgttctttgttgaaaagtttagtacttgagtgtcaatcatatttcagagtcattgtgatatactgagcttggaggttttggaccattgatctgcagaagttcaatacaataggaagaataagttaaaaaaa

SEQ ID NO: 116273 - DNA, 2092 bp, Zea Mays
caggtctcggtagtaaaccacgcaagagaaaataaaatgacagagagttgtatgttgtagacgggcgagtgcgacgagcggagaacgtaatgccagcgctacaccgctgacgtgtccgccccggctccgggtgaaggtcaaaaggggcaaagggcggggggaaaccgtgggccctatatagcgggccttctcgctggagctaggagaaatcgccaagccaagccaagccagaagcggcagcctcgcgcagcggtctggtctctctggtgggtgcccctcttcgccggtggccggaaagggtagtggagtgggaccgctcaaggagaggccggcgtccccaagtctcacttccgccgtccgcttcccccctgttggtcccgattttgtttagccttcctaggcgcgtgagatcaaaaatccatcggttccggttgccgccatagggttcggcactcggggcgcgcggggggagctttatttgtaccgaactaattcgaagggttcggttaagccccttgcagatcggttttactacccatttttcgattcttttgttgtgttctgatgcgggcttgacggcatcatgttatctggcttgtgatttgcggcaatagggatcgagggaggaaggaaaggaggtgcttcacaatgaaggccctcattcttgtcgggggtttcggaacccgccttcggcctttgactctgagcttcccgaaacccctcgtggattttgcaaacaagcccatgattctgcaccagatcgaagctttgaaagaagttggggtcacagaggtggttttggctatcaactaccgcccagaggtaatgattaatttcttgaaggactttgaggataagcttggcatcacaattacatgctcccaagagactgagcccttaggaaccgctggccctcttgctctagcaagggacaagcttgcggatggatctggccagccattctttgtcctcaacagtgatgtcataagcgaatacccatttgctgaactcatcaaatttcacaagtgtcatggtggtgaggcaacaattatggtcactaaggtggatgaaccatcaaaatacggtgttgtggttatggaggaggcaactggcagggtggaaaggtttgttgagaagccaaaaatatttgtgggtaacaagatcaatgctgggatttacttactgaacccatctgtccttgaccgcattgagctgaggccaacatcaattgagaaagaggtcttccctcaaattgcagctgatcaacagctctatgcaatggtccttccaggtttttggatggatgttggtcagcctagggactacattactggcttgcgtctttatctagactcgattaggaagaaatcagctgccaagctagctactggagcacatgttgttggcaatgtgctggtgcatgagagcgccaagattggagaaggttgtctgattggtcctgatgtcgccattggacctgggtgtgttgtggaggacggcgtgaggctttcccgctgcactgtcatgcgcggcgtgcgtatcaagaagcatgcttgcatctcaaacagcattatcggttggcactcaactgttggtcaatgggcacggatagagaatatgactatcctgggggaggatgttcatgtgtgtgatgaggtgtacagcaatggcggtgttgttctcccacataaagagatcaagtcaagcattctgaagcctgagatcgtcatgtgagctctccagttttagctacagtacattcttaacttctttgacgaagggaggattgcagatccccttttataaacgatattgcttggtatcttcgatctaatgcaaacagcttcatacttggtctcttgttaaactattgacaatgtatcttgttttttgttgaaaagtttagtacttgagtgtcaatcatacgtattcgcttgctaaaaactattgacaatgtatcttgttctttgttgaaaagtttagtacttgagtgtcaatcatatttcagagtcattgtgatatactgagcttggaggttttggaccattgatctgcagaagttcaatacaataggaagaataagttaaaaaaa

SEQ ID NO: 116274 - DNA, 1849 bp, Zea Mays
caggtctcggtagtaaaccacgcaagagaaaataaaatgacagagagttgtatgttgtagacgggcgagtgcgacgagcggagaacgtaatgccagcgctacaccgctgacgtgtccgccccggctccgggtgaaggtcaaaaggggcaaagggcggggggaaaccgtgggccctatatagcgggccttctcgctggagctaggagaaatcgccaagccaagccaagccagaagcggcagcctcgcgcagcggtctggtctctctggtgggtgcccctcttcgccggtggccggaaagggtagtggagtgggaccgctcaaggagaggccggcgtccccaagtctcacttccgccgtccgcttcccccctgggatcgagggaggaaggaaaggaggtgcttcacaatgaaggccctcattcttgtcgggggtttcggaacccgccttcggcctttgactctgagcttcccgaaacccctcgtggattttgcaaacaagcccatgattctgcaccagatcgaagctttgaaagaagttggggtcacagaggtggttttggctatcaactaccgcccagaggtaatgattaatttcttgaaggactttgaggataagcttggcatcacaattacatgctcccaagagactgagcccttaggaaccgctggccctcttgctctagcaagggacaagcttgcggatggatctggccagccattctttgtcctcaacagtgatgtcataagcgaatacccatttgctgaactcatcaaatttcacaagtgtcatggtggtgaggcaacaattatggtcactaaggtggatgaaccatcaaaatacggtgttgtggttatggaggaggcaactggcagggtggaaaggtttgttgagaagccaaaaatatttgtgggtaacaagatcaatgctgggatttacttactgaacccatctgtccttgaccgcattgagctgaggccaacatcaattgagaaagaggtcttccctcaaattgcagctgatcaacagctctatgcaatggtccttccaggtttttggatggatgttggtcagcctagggactacattactggcttgcgtctttatctagactcgattaggaagaaatcagctgccaagctagctactggagcacatgttgttggcaatgtgctggtgcatgagagcgccaagattggagaaggttgtctgattggtcctgatgtcgccattggacctgggtgtgttgtggaggacggcgtgaggctttcccgctgcactgtcatgcgcggcgtgcgtatcaagaagcatgcttgcatctcaaacagcattatcggttggcactcaactgttggtcaatgggcacggatagagaatatgactatcctgggggaggatgttcatgtgtgtgatgaggtgtacagcaatggcggtgttgttctcccacataaagagatcaagtcaagcattctgaagcctgagatcgtcatgtgagctctccagttttagctacagtacattcttaacttctttgacgaagggaggattgcagatccccttttataaacgatattgcttggtatcttcgatctaatgcaaacagcttcatacttggtctcttgttaaactattgacaatgtatcttgttttttgttgaaaagtttagtacttgagtgtcaatcatacgtattcgcttgctaaaaactattgacaatgtatcttgttctttgttgaaaagtttagtacttgagtgtcaatcatatttcagagtcattgtgatatactgagcttggaggttttggaccattgatctgcagaagttcaatacaataggaagaataagttaaaaaaa

SEQ ID NO: 116275 - DNA, 824 bp, Zea Mays
cacactacttctcacgatcctagctagccacctccctcgattcacaagtcacagggacaacggctggttagcttctgagatttctcaaaaccactctactaccaactagtgctctagcctctttcaagctaagttgtacccatggaaggcatcatcccgttcatcttcaaggtcatagcgcagtacaaagaagaaggacaggctgcctccttcggtggcatggcctccgacggttctgtcgaatcctccccgccggtgtcgtcgtcgtacgtgctcctgcctagtgactccgaccggcgccaccgcgacgagaggaacgacgacggccggccggtctgcccgacgtcgtccgtggactccggggccgtcaccacctgcaccgcgagaccgtctccgctccggtgctcgtcgacgctgcgccggcgagcctaggatggtgaattttgcaggtttggcaacaccaaccggtgcctcggaagataaaaccaagtggtatactctgggaaaggagctttttatgcctcgctagtcgcaatgagtcaggagtctcaaaggaggcttcgcaagttaatcatcaagggcttttgtagagtgaaaaataaacagcaaccaatatataaccggcatgtgcgcaacagcggtctgatgcatgtaatatacatcatggtcgtaggaaccgcgttgtacttctatatgattatcgagtagtcattaggtgcaaccatacaagtagctcttttggtccgttagacctagattcaatcgtatgtgcaatcgtggtttgttagagacttttttttataaaactataagctggtgtgaga

SEQ ID NO: 116276 - DNA, 1586 bp, Zea Mays
atgggccaaagttatgtgactgctgggaagcacgaggtgataacattgatgctttcatgctttcctgccccatgtgagaaagttcaggacctattactaaagatagaatattatacctctcaggagactccagaggcttttccacttcctagaggcgtcgcaatagtgcgggcagatgctggatgggctcactgtgttgcaataacagatgaaggtgatgtttatacatggggttggaaagagtgtgttccaactggaagggttattggagaccaatcttcagttggaaccaaggagaaggatgaaagacaaatggcaatggccactgaccaaggtgtgagccccaggtcgcaggtgtctaggacaagcagcggggcagcatctggtccttctgaaagcagaggcactgatgatagcacaaagcgacgaaggttgtcttcagcaaaacatggccctgagagctcgacatccagtgacgaaagtctttccgcacccccttgtgttgtgacatttaatacaggagtgaaaatagtgtctgtagctgctggtggtcgtcatacattagcactgtcagatttaggtcaggtatggggttggggatatggaggagaagggcaactaggtctgggctctagaatccgaactgtttcttctccccatcctgtaccgtgcattgaatcagcactatacagcaaggatcgcccatcagctatgaaaggtaacaaggctgctgaaggacatgtcagtaaagtcttgggaaattgtgtgagggccattgcttgtggaggtcgtcacagtgctgcagtaacagattcaggagctcttcttacatttgggtgggggctgtatggacagtgtggacaagggaatacagatgatgttttaagtccaacgtgtgtatcgtctatcctgggatccaagatgcaagacgttgctgcgggtctgtggcacactgtatgtacatccgtagatggtgatgtttattcctttggaggaaaccagtttgggcagcttggcactggttctgatcaggctgagactgttccaaaattggtagatgctaccagcctagagaataagaatgccagatctgtttcttgtggagctcgccatagtgctattataacagatgaaggcgaggtattctgctggggatggaacaagtacggccagcttggccttggcgactcaatggacaggaacgtgccttgcagtgttcctgtggacgcttaccaccccctaaacgtgtcctgtggctggtggcacaccttggtgctcgcggactcgcctacttgaaacctgacaaagaaattaccttagattgacaattttgttaggaactcgtaggctcgtgcagatgcggtgatgctgcatttcatcgtgtacatacatggcagtgcatgcagatatgtgtattcattctttggcggtgcactcttcaacctgtgcaacgtagacaaagcttgtatcgcaccgcgtatacagttgagtaggattgcctcgacaaattgtgcatttcctccgttgctgctaatgtacaaaattccacaagctagacagggcaaccgatgcgttcctcgttgcag

SEQ ID NO: 116277 - DNA, 2489 bp, Zea Mays
ctcgtctcatcgcgccgcatcgtttacctcaaggttgttttgttgcttccttgtcccgctctcaccagcaatcccgtcgatcacccagacctccacggcactgctccgtctcctccgttccgttccgaaccgcaagctcccaacccttccgcgatggacctcacctcgccgtcgcccgcggcgcgccgcgccgccgccatcgcgcgccacctcgccgcggccgccgcccccatcccggcgagcagccccctggaaccttcctgctgcctcagctacgtcccgccggagtccacggagcggccggcggcgtttgcgccggccgacctcaggcttctgctggacgggcacgacctgcccacgcgggactggctcttccgcgccatggaggagagcccccttttccgcagccggagttcgcggacgggatccagggtgttcgtggcgccggacttcaacgacggcaaggaagggcagcgggaggccaccatgcggcggatcgcgtacctgaatcggcgcggcgtgttccgcgggtggctcaccgaggacggcgctgccgccgagctccgcaaactagcgctcctcgactgcatcgccatctatgaccactctctcgccatcaagattggcgtccacttcttcctctggggcagtgccatcaagtttcttggaacaaagcgccaccatgacaagtggttggttgccacggaaaattatgatatcaagggttgttttgcaatgacagaactaggccatggaagcaatgtgcgaggaatagaaacaatagcaacttatgattcagaaacaagagagttcatcataaatactccatgtgaatcagctcagaagtactggattggtggagctgccaatcatgcaacacatacaatagtcttttgtcaacttcatataaatgggagaaatgaaggagttcatgcttttgtagctcaaattagggatgaagatggaactgtgttgcctaatatccatatagctgactgtggccataagattggactgaatggcgttgataatgggcggatttggtttcagaatatacgtgttcctcgtgagaacttgcttaatttggttgctgatgttttgccagatgggcgatatgttagcatgatagataatccagatcagaggtttgcagctttcctatctccgcttacacttggtcgagtaaacattgcagttaactcagtctacatttcaaaggtcagcctagcaattgctgtgagatacagtttgtcaaggagagccttttcaattgcaccagatgcccctgaaatgttgttgcttgactatcccagtcaccagcgacgccttctaccacttctagcaaaagtatgtctgatgagcagtgctggcaattttatgaaaaatatgtatgtaaagagaactcctgaaatgagcaaagacatacacatttactctagtgctctgaaggcgacactaacttggcagaatatgattacgattcaggagtgtcgcgaggcctgtggaggtcaaggtctaaagactgagaaccgcataggaattttcaaatctgaatttgatgtccagtccacatttgagggtgataacaatgtgctaatgcagcaggtaagcaaagcgctttatgctgaatttttgggtgcacaaaagaagcagcagccattcaagggattgggtttggaacacttaaatggctcgagccctgttattcctgataagctgacaagtagcatattaaggagctccaagttccagatggacctgttctgcttaagggagagagatttactgaagcagtttgtagaggaggtttctctccatcttgcacaaggcgaaagcagagaaaaggctttgatgctgagttatcaagttgctgaagacttggctagagcgtttactgagcgtacgatcctccaaatatttttggaggatgagatgaatgttccttctggttccctaaaggaggtactgggcttgctgagatctctatatgtcatggtgaacatagatgaatccacatcttttctaagatacgggcatttatcacgtgacaatgtagcccttgtgcggaaagaagtcctgaaactgtgcagtgaactcaggccccatgcgcttgctgttgttagttctttcggaatccctgatgccttccttagtccacttgcttttgactggattgaggcaaatgcactgtcaaccgggagccactgatctcaggtttccacatacgagccaggttatcctgtgaaagtactgaatattgatggcggggcatagataccgtataactacaggagcacttgttgtctcggaacaaattgttgtgaatcctgttttgtataatagttttcttgaatataagcgaacgtagcctaacaggccaaagtccatgtaatggggtttacaacagtaataacttgcagagtgatgtaagcgagttgttgagcagtaaataaaatactcttgtcccaaaatatagttctttttaaccc

SEQ ID NO: 116278 - DNA, 1435 bp, Zea Mays
gaaatttagatggttatatcatgttctgaccactgctttcattacttgcagtttgctcatatcaatgccttaacagataatgtcatatctacttactcgggccagattgagcgaatccagaacaacccaagttggatgaggaaatcttaccatttatttgtaggaatgcctatgcatttggtagttgttgcttatcttaattttagcctatgtattttacaacttacatcccatctctttgccatcttttgttcaggttgaagatcctgtagagagacctgataatgccgctagagcagttagtatgaaaggccttgacctcattgctattgcattcaatgatgcttgtcacaagtttaagtctctggaacatatcgatcggaatgaattattggcactgttgtgtacccctgttgttcgcttgaaacttggtgtgagagtcagagagaactcttacccaaaatctccaaggaataatgtgcatagcaggattagaggacagatgtggcgtgatcgaggccaagcacccagcgcgagagggtttactggaaccagatcagtccatgaaaatccactagcgaacactacagcacatgaaacagcagtgcaataccacaaccatgtgcagccgacaacagttcggcaaacagccatccgcaatcaagtaacaaatactgcagtgcatcagaccgcgccttaccagaaccatactgctcgacaggtgtatcctacttggtcccagacagctgaaccctaccagaatcataatcagcaggtatacgctactgggtttcaaacagggccataccaaagccataatcaagtccatgcttatagagcagggttgccacctggaggaatatatgagatccacaatcaacaggtgtataatgcagggttccaaaccgacggtccgcaccagaatcagcagcggcgaaagggatacccatcaaaccatcagaataacaggctttctgcgacggcagcgaggtacgagcccgttcgtggacagtttaacaacggatcgacatgggactcaaggtcccaagcaccgggcagtgcagctctgcgaaggtagccgtcagcatctcaggaggatagtagtaacaggcaaatcggctggattttgactgctgggcagctcttccttgtgtaaaaaattctagcacttctttactggtggacaactcttccttatgtaaaaattgctgttagcagtcggttcgtagtatgtgtcaattaattttttttaaggtgtgattgggtttatttatcgtgtctcagaaattcatcgcccttctccgtatgctcacgtatcatgtaaataaagtacaatagctggtccatgacacgcagaaatattcatcatgtaaaaagctgcctcacgccatatatgagcttttaagattttttaggaatcaattgttttttctct

SEQ ID NO: 116279 - DNA, 2360 bp, Zea Mays
cccgcctagttcatgtgctcatgcacccgcacatcattataaataccagttttgctgtttacccgttccaacttcgcctggcccgagaggccgagatcaatactagacctcgactcgagtctcgagtcacgtttccgccgttatctgcatcaacggggtcaggcgactgaacagtacaggcccttggccgccgccgccgccgccgccgtactccaggtgcccaggtcttcgtccgaccctttgccagcgacgagcacccaccacaccaggatttcatcatggttgattctgttcatgacaatattgtgctgaacaagtgtatcaaggacatccttgcactaatcaaaccagtagaggatgatagaagcaagcggttatccacaattcaggagctggaaaattgtatccattctcttgcatctctgtcaggtgctgctgtcaaaccgtttgggtcttttgtatcagatctttactcaaaatcaggtgacttagatttgtcagttcagtttgggaatggttcaaaccacccaataaacaagaaaaagaagcagaatgccttgagagatgttaggaaagctttactaagtcgaggtgttactggatacatgcagatgcagttcatcccacatgcaagagttccagtccttcaatatgtgagcaagcaatttggcatctcctgtgatatatcaattggcaactttgctggtcgaattaagtccaaaatcttctactgggtcaatactgtagatgagcggtttggtgatatggttttgctgatcaaggaatgggcaaaagcacaaaacattaacgatccaaagagcgggaccctcaactcttattcgctttgcctacttgtcctctatcattttcagacatctgagccaccaattctaccacctctgaatgagatttatgaagggaatattgcaggagatgttacagaagcagcactttttgatgagcaacatcttgatgaggtttgtgctgcaaatatagaaagatttagactccagaacaagggccgaagaaatgaaacttcaacttgtcgtctacttgggactttttttcagaagtttgctcatatcaatgccttaacagataatgtcatatctacttactcgggccagattgagcgaatccagaacaacccaagttggatgaggaaatcttaccatttatttgttgaagatcctgtagagagacctgataatgccgctagagcagttagtatgaaaggccttgacctcattgctattgcattcaatgatgcttgtcacaagtttaagtctctggaacatatcgatcggaatgaattattggcactgttgtgtacccctgttgttcgcttgaaacttggtgtgagagtcagagagaactcttacccaaaatctccaaggaataatgtgcatagcaggattagaggacagatgtggcgtgatcgaggccaagcacccagcgcgagagggtttactggaaccagatcagtccatgaaaatccactagcgaacactacagcacatgaaacagcagtgcaataccacaaccatgtgcagccgacaacagttcggcaaacagccatccgcaatcaagtaacaaatactgcagtgcatcagaccgcgccttaccagaaccatactgctcgacaggtgtatcctacttggtcccagacagctgaaccctaccagaatcataatcagcaggtatacgctactgggtttcaaacagggccataccaaagccataatcaagtccatgcttatagagcagggttgccacctggaggaatatatgagatccacaatcaacaggtgtataatgcagggttccaaaccgacggtccgcaccagaatcagcagcggcgaaagggatacccatcaaaccatcagaataacaggctttctgcgacggcagcgaggtacgagcccgttcgtggacagtttaacaacggatcgacatgggactcaaggtcccaagcaccgggcagtgcagctctgcgaaggtagccgtcagcatctcaggaggatagtagtaacaggcaaatcggctggattttgactgctgggcagctcttccttgtgtaaaaaattctagcacttctttactggtggacaactcttccttatgtaaaaattgctgttagcagtcggttcgtagtatgtgtcaattaattttttttaaggtgtgattgggtttatttatcgtgtctcagaaattcatcgcccttctccgtatgctcacgtatcatgtaaataaagtacaatagctggtccatgacacgcagaaatattcatcatgtaaaaagctgcctcacgccatatatgagcttttaagattttttaggaatcaattgttttttctct

SEQ ID NO: 116280 - DNA, 109 bp, Zea Mays
ctactttaaacaactctaagaatcaaataagtgatatgaaaattaagaagtattaccttgttttgcaaggtaacaccactttgccttctgcctccaatatcagatatgc

SEQ ID NO: 116281 - DNA, 1691 bp, Zea Mays
attgccccgaaaccttcgtgcccgtttcgcctcgcgcctgcgttgctctgctatttccatttccattgcacccatttccggggtcgcctgcgttgcttcgcgtgggagcgtgattcgtttaggcctctcgccaatttcggagggcgacggcgacgtgctttcggcgggcgggcagagaaaatctagagtcttgggtttgccagacgcgcctttgtgggagacagacacttgctctcgcctccaatggccgagatctgctgcgaggaagccaagtcgacgccggcaaccgccgtggctgcggcttcagtctccgccacggccgcagcggccgcagccgtggcagtggcctcctcggcgttagagaggaggcgacgcaggctggagatgaggaggttccgcgtcgcgagcgatcccgaggagctggtcgcggaggacgtccgcgctgccaagcggcagaggctggcgcgcacgctgtccggctcctgccccgacgcgggctcggactccgacaggccggccctgcccaggtacggggtcacctccgtctgcggccgacggcgcgagatggaggacacggtctccatcaggccggacttcctgcccggcaccagcaagcacaacttcttcggcgtcttcgacggccacggctgctcccacgtagcgacgatgtgccaggacaacatgcacgaggttgtcgcggacgagcacacgaaggctgcctctggcgaggagacggcgtggaagggcgtgatggagaggagcttctcgcgattggatgagcaggccgccagctgggcgaccagccgcagccgcgacgagcctgcctgcaggtgcgagcagcagatgcccttgcgctgcgatcacgtggggtccaccgccgtggtcgccgtcgttagccccagccacgtagtcgtcgccaacgccggcgactcgcgcgccgtcctctcccgcggcggcgtccccgttccgctctccgtcgaccacaagcctgaccgacctgacgagctggctcgcatcgaggcggcgggtggccgcgtcatttactgggatggtgcccgtgttctcggcgtcctcgccatgtctcgagccataggggataggtacctaaagccgtttgtgtcgtcggagccggaggtaacggtgacggagcgcaccgacgacgacgagtgtctgatcctggccagcgacggcctgtgggacgtcgtgaccaacgagatggcgtgcgaggtcgtccgggcgtgcttccgtagcaacggtccgccggcgccggccgctcgcccgaacggcgtggccctcccggcagccggcgcgggcgccgaggacggatcggcggttgtcaagggtgtgggcaaggaggactccgacaaggcgtgctccgacgcggccatgctgctggcaaagctggcgctggcccggcggagcgccgacaatgttagcgtggtcgtcgtggatctccgccggggcatatgattctcggagcgaagcagagcagggcaaaatcatatgctccatgcttgaaactagctcttctgaaatccacgctaatttctcccccattttgaccatccttctattttgatgtagtattagtagtagatcctgatcagatgaatataatagacgcttttcttctctcagacgaggaattaaagccagtcaggcagtatcaaggaacaagaacagcgaattgt

SEQ ID NO: 116282 - DNA, 590 bp, Zea Mays
aatcttatcctcttctcattctcctttctccctcttgtgtcttccaccaggaacaagccgccgccgcacgcctccgcttgctcccacccgcgcccgccggtgcacccgccccggccccgcccgtcgcggctgcccccaccccgcccgcccctaccaccggcgcggccgcctccggccccggccccaaacgctgcacccaacagccccagccgtcccactcccagggtccatctcagtcgccgtcgcagaccacgcagcaggcgtcaccccagcagcagcaggtggcggcggtggcagcggcataggcacaagcacagacccaggcggcatgggtacgaagccccgagatggagatggcgctgcaggacgccatgcgggtctgcaatccggacgtcaatacgcccttccagtccatcgaggacgctgtcaacaggtacacaatgtttgctaacgtcatcgacttgagccaggtgagggttcagcgtggaggtttgtcgaggtctgctgctcgtagctcccgtcgctccactcaagatccagcaaaagtggagcaactgcgcgaagaacttaggcgaaatcctcttcgctag

SEQ ID NO: 116283 - DNA, 322 bp, Zea Mays
gacttggttgctgttgcgcggtggtgggctcttcctcagtataggaacagtcatataactgaagactttgaggaggtgcaggtgcagagccgatggtttgggatccttgatgtggtctaccgctcataggaggaggcttgggcagcttgtggcagcaacgtgttgcacaagattacaaacaaagggaagagctgcgtgcacgacaaggctatcgttgccaacctctactccgtcaagatttgtgctaggcaacgatggtgtgttgcttcaaggtcttggctgaacgatcagacatcctatctatatctgtggccaacaaacg

SEQ ID NO: 116284 - DNA, 1109 bp, Zea Mays
atggaggttgtgttcgaggtgctgaagagcctagaggacgttgaggagctagaccccgagtggctgcatgatcctcacaagctgcacgcgtgcgtggagaaggacacctccttgtcggactcgtgcggcgtcggcccattcaggctggtggtgatggcgcccgaaggcatgcagagcaggagcagatcaccgtattcttcaattggagcaagagcaaggtggtcagatctagatcgaaagtcagttgactggacaaatggtatgacgaggatgtcgaagatctacatgaacgaggtaaccgaagctgttcatgcgtggaagggcttcaccatcttgaaaagtacagctagagaggggtcaattgttgatggtagctccatacttggttaaacgtaagaagcagcattttcatcatcttgaaaagtacaatgtcgacttgattcttgattgcaatggatttatctgggttggtgagcatgttgtggtgggtgaaaaaccaaaaacgacaggaggtcagcaggggttcagcactgaagcagaaaatttcaccccattagagacaaggaagcatatttgccggcttgccaattctgtacgtgtgctctcagccctaggattcactctgaccgtcgaactgataatcgaaaccatggaagcaagtgtgtcatcaaatgtagagataaatgacatgctcggggcagagttttatgtccagacagcagagagggaggctaagcgtcgagctgatctgttgagaaagaagaatggggcaaattgagtaggtagcgccctcatccttgctgattggggctgcctgatttgcggagaacagctccatctgcatgagatgtgtagcagtgccataatacttatctgatggtatctaaggcaaaattagtaaacatattctatgtacacctttacgagtagcaattagcaaatatgtaaggggttcgctccgctctgatgctgtacttgcatttgatcatggtgcctggtgccggcagtgttgtgcctggcaggtctttgatccgttcgttgctgaagtcgatacacttctgagttgaaaaacaagacgttcttcctattgaatattccagtaacatgaa

SEQ ID NO: 116285 - DNA, 1002 bp, Zea Mays
atttatgttatccccacgtgacggccggccctcgaccccacggcgcccgctccctcgtactcgttctcgtcaacccgccgcagggacatgaaagacgacgacgacgacggcggcgctggctctggcgcgcgcggccgcgtgctcgagtcggagcacggcctccccacgcgagggccggcccacgatcccacggcgcccgtccccttgtcctcatcctcgtcaacccaacgcagggaccggccggcccacgaccccacggcgcccgccccctcgtcctcatcctcgtcaatccgccgcagggacatgaaagacgacgacgacggcggcgctggctctggcgcgtgcggccgcgtgctcgagtgggagcacggcctccccacggcggaggagctgacgccggtctcgcacccgctcatccctccggcgctcgctgccgcgttcggcattgacgtcccgcgcaccgccttcccctcatccgccttcgactcccctgccctcgcgcgcaagccccccaatactcgcctgtccttgggctgctacggcgaggacgatgatgagaaggaggaagaggggaagagcgaggtcgccgcctacacaaccggcgcgtgcggaggcgggaagagcgaggacgccgcatccgcatccggcgcgtgcagaggcgggagggctgagaagaaggcgaggatagcgtggacgccggagctgcacaaccggttcgtcgcggcggtggagcacctcggcgacaagggcgccgtgcccaaggccatcgtgcgcctgatgaacgtcgagggcctcacccgcgaaaacgtcgccagccacctccagaagtaccgcatctacctcaagcaacaagcgcgcagccccgcagggccgcagcctcctccggcatacagtccctccgactccaggccccaacaaccctctgacacctccacccggagcacctgcgacatcgagaagctggaacgcgacaaagaattttgggctttggttgcaaactag

SEQ ID NO: 116286 - DNA, 264 bp, Zea Mays
atggcagtactcgacgtccactatctcctgacgcagatcgaccatatgcttcccactaccgatcgccgcctccagcgtcgactctgtcagcagccggtccacgatcaacgcgagatggtcgcccatcagtcctgcgagcacgtgatccatggtaagaataaccagaggcagaccaagaagccaaacccaatgaacgaggagcacgcggttgcatgcaatggggatccaaatgtccaaggaaaccgggcaactgctcccttatga

SEQ ID NO: 116287 - DNA, 231 bp, Zea Mays
ttctcaaattggtggtgccaaagtatcaagaaagtggagaagagtctaagaaaaggtcttaattccttgatcattttggttgcttgggagatttggaagcaccgtaatgcttgtgtttttgagggggttgtgccctgcacccagcgagttcagagtgctgtgattgaggagggcaacgtctggtgtttggctggtgcatcagctctgcaggacctcctgctgcgccagctc

SEQ ID NO: 116288 - DNA, 108 bp, Zea Mays
atggcctctgccgagcctccgcccatcgccgacgtcgcgcaggagacagctcaccaggccctggtcgccgtcgccgatgatgtagccaaggcagtcgtcgtcgcctaa

SEQ ID NO: 116289 - DNA, 931 bp, Zea Mays
atgctatgcgcttcctccacatacaagaccaccgcagatcaaaacacacatctctctcactcactcactcgcctcactccactggacatccatccatggagctcttcgcagcagcagcatcagccgaggatcagaagccgtgcagcagcaggctgttcagcaggaagaggagcggcggcaaggcgggcatgggcgtgcgcggcgccgacaagggccggtcgtccttctccgggcggtgcgcgcggctcgtcaaggagcagcgcgcgcggttctacatcatgcgccgctgcgtcacgatgctggtgtgctggcgcgagtacgcctgacgcctgagccctcggtgtccctgatgcaatggcgccggacatgatgcggagccgcatgcaggacgcgagcagcaagccgaggggagaggaggaggaggaggggaagccgccgccgccgccgagcaggtcaagagacgctcgatccgcctccgcggtcttaattagggaaccacgaacgaaccttgtgtaaagagaagattattattttttttattattttctctcctgctttaatgctctcgtagtcttgttcctttagcacctcgatcgagccttacgttcttccttccgttcggtgcggggcggagatttgcagtctcacggcgcttctgctgttccaatgtaacgtgagcatctctagtatacaggaactggagctgtagctgtagtttagctagttgctttgcttggcggtgctgtggcgtctgcgcccccttgccttggcgcggtgcgtgagagccgtcctcatcgcgcatcggagtgcgattcgactgctgctcctcttgctactatttgtttacattttcctcccctccactgtgtaatccgtaatcctgaaaaggcggccagaaagaaaaaaaacaccgctagttctcgctgccaaa

SEQ ID NO: 116290 - DNA, 2249 bp, Zea Mays
caccaactaggccaaccaccaccgtgctgtgaccccctaccatgcaggccacgaacccggcggccatcatggcgcctatatagaacccagcactcattccatagcaaagtgcaccacttcacttgcttcaaagcgcaaacacacaagaagggcggagctgttgtcatcctgacaatgggcgcgcgtcgtggtctccggcgaggccaagccgccgccgccgccttctccgcatgtcccttcctcgccctcgccgtcgtcctcctcgccttgccggagctcgcagccggcgacacccactactacacgttcaacgtgcaaatgaccaacgtgacacggctgtgcgtgactaagagcatcccgacggtgaacggggagttcccggggccgaagctggtcgtgcgggaaggcgaccgcctcgtggtcaaggttcacaaccacatcaactacaatgtctcgttccactggcacggcgtccggcagctgcgcaacgggtgggcggacgggccgtcgtacatcacgcagtgcccgatccagggcgggcagagctacgtgtacgacttcaccgtcacggggcagcgcggcacgctgtggtggcacgcgcacttctcctggctgcgcgtgcacctctacggcccgctcgtcatcctccccaagcgcggcgagggctacccgttcccgcgcccctacaaggaggtgcccatcctcttcggcgaatggttcaacgcggacacggaggccgtcatcaaccaggccctgcaaacaggcgccggcccaaacgtctccgatgcctacaccttcaatgggcttccaggcccgacatataactgctcgtctaaagacacgtacaagctgaaggtgaagcccgggaggacgtacatgctccggctcatcaactccgccctcaacgacgagctcttcttcggcatcgccaaccacacgctcaccgtcgtcgaggcggacgccagctacgtcaagccattcaccgtcagcacgctcgtcatttcaccggggcagaccatgaacgtgctcctcacgacggcccccagccccgcctccccggcctacgccatggcgatcgcgccctacaccaacacgcagggcacgttcgacaacaccaccgccgcggccgtcctcgagtacgccccgacgacgaccaggaacaacaccctgcctcccctaccggccctgccgctgtacaacgacaccggcgcggtgtccaacttctcgcgcaatttccgcagcctgaacagcgcgcgctacccggcgcgcgtgccggtggcggtggaccggcacctgctgttcaccgtggggctcggcacggacccgtgcccgtacaccaaccagacgtgccagggccccaacggcaccaagttcgcggcgtccgtcaacaacaactccttcttccgcccccggaccgcgctcctcgaggcgcactaccggcgccgctacgccggcgtgctcctggccgacttccccacggccccgccgcacccgttcaactacacgggcaccccgcccaacaacacgttcgtgcagcacggcacgcgggtggtgccgctccgcttcaacgcctccgtggagctggtgctgcagggcaccagcatccagggcgccgagagccacccgctgcacctgcacggctacaacttcttcgtggtcggccaagggttcggcaacttcgacccggtgaacgacccgcccgggtacaacctcgccgaccccgtagagcgcaacaccatcagcgtgcccaccgccggctgggtcgccgtccggttcctcgccgacaacccgggcgtgtggctgatgcattgccacttcgacgtgcacttgagctggggcctgtccatggcgtggcttgtcaacgacggcccgctgccgaacgagaagatgttgcccccgccatccgacctcccaaaatgctgatgacgactggtcgtttatcacccgatcgaggggtagatgggcatttaggaaggttctcctgcttcctgcacgtctgcctacttcctttccttacgatgtttggaactatttggtttggactatttaattaccgtgtgccgatttttggcgagtgcttggatttcgcgatcctcgctgaatccccttttgaaacatgttaatctgtatctatgtaacgacaacgtttgttctgcggttacttgttctttttttaccccctttctgaacattcagcacgcattggtgtattcacatggtcaaatacaatgtaacaatgatgtctgtat

SEQ ID NO: 116291 - DNA, 734 bp, Zea Mays
actcgctggatcggacggcgcggggtccgccacgtcaccgattccggcccaccttgcggagcacggagccgtccacttccgtccttcggaagcccgatcctccctcccgccgccgcctcggccccctccttatatgccccgccagccgcgtctcttccctcgcaaacccacgtttcaaaaaaaagagaggaaagcaaagttccttcttccctcgaaaaaaaaaatcagtctcgccatggagagcagcgttggcatagagaaggccgcagcggtggcggttggtgcaggtgtgggcgggggaggtggagggtacggctgcggcgggtgggagacgccgaagcgcgaggagtgccgcatcccggcgacgctgccgtgccccgcggcgccgaggaaggccgtgccggacttcgggaagcggcgcagcccgcccaagaacggctacttccagccgccggacctggaggcgctcttcgcgctcgcgccgcgccgccaggccttctgcgcgtgacttggcgcggacttgattttttggggagggagttgtagatagcttgccggtctcgctctgttgtactctttctagtgggggtgtttagtggccgcgggtgtattagggaggcagtagggtggttttagggagtagtaggtaggtaggtggtggactcttaaatcataagcatactgtttggttaagctgatgaaatccttatatatgtttcctgtcacttctgcgt

SEQ ID NO: 116292 - DNA, 3170 bp, Zea Mays
gcaaacactggttcacgtccgtccacctctctacgcctttcctcttatcctcccgtctcgcgccgtcgcgcgtctcgggtctctcttctctctctcggctctcgcctccctcccggtccgggtcgcacgcaggtacgcactcttgacgagctcgcgcatctccacgagcggagccgcggcgcggctccgtacggccactgatccgtcggattagtcagcgcgtttcagctcgtggacatggatatcttcttcgggttccagttctcattcttctagctgtatttccctgcattcgccaggtcgcagccagcagtgcatttttatgcgccgcgctggtggttttggggcgcggagtccatatccatggtcatggacgctggcctgcacgagccgtgcgcgctgctgccgggatccaagcgcgacagccacatgctagtctacccccaaatcgccgccgccgctaatgggttcacggcgcaggagctcgagtcgctgctgttcctgtcgtctgatgggattactttggctgcgggcagtggcggtggcggcggcggcggaagctatctgaatgtcgcgcctaccactgtggtcccgcccgccccgaccaaccgcgcgtcgccgccgagggatgtgtccgccgcgccgccctcggtggggcagccggatgattcggaggcgttctcggacatcgtcctgggctacatcaaccgcatgctcatggccgaggacatcgacgataagttcgagcactacccggagcaccccgcggtgctcgccgccgagaagcccttcctcgagatcctcgccgagcggccctcgagctccggtggcagcgcggtggagagcccgggcggcagcagtgtggggaactcttgctacagcgcgcgctcttgcacctgcgccaccgccacggcggcgtccgacgcctttggcgccgtgctgacgccggcgctcgacttcccgtcggccgcgttcctgcagccaccacagctgtaccaggatctaagccctgagggcagcgtggtggatgcaggcggcgcgtggccgtacgactcgacggaattctaccagctgcacagcaacccgtcgtcgttcgcgtcatccaacggcagctgtgctacaatatcagacggctttgagtcgttgctgagctcgcctggtgtcatgccagatgttggcttcaccgattttgccgtgcaaagccagcaggctatgcagttctgccgtgggttcgaagaagcaagcaagtttctgcctgacgagagtaagcttgtgattgatcttgagaagccagcatctgttacaagcttggtggctaacatcaaaggggagaacaggtttgcagaggtcaaggcagagaaggccgatgttcaggcagaaattcacagaggaaagaagcatttctatggtgatgacttggatgcagaggaagggaggcgcagtaaacattcagcacccgctatcgacactgatcaccttgtgcgggagatgatggacaaggtcttgttgtgcaatggcgagacatgttcaaaaggcgtcaaggaactccgtgaagccctgcagcatgacgtggcaaagaattcacacggggttcatggaaaagggtccggacatggcaagggccgtggcaagaaacagccgaagaaggaggtggttgacttggagactctcctcgtccactgtgctcagtctgtggccaccgatgatcgacgtggtgcaactgagctcctgaagcagatcagacagcatgcatcgcccaatggcgacggtgaccagcgtttggcgcactgcttcgccaacggccttgaggcgaggcttgctggcaatggaagtcagatttacaagtctcttataatgacgaggtttccctgcaccgatgtgctgaaagcctaccagctttacttggcagcttgcccattcaagaagatctcccatttctttgccaatcaaaccattatgaatgctgtggagaaggcgaagaaagtccacatcgtggactatggtatatactacggctttcagtggccgtgcctcattcaacggctctctaccaggcctggtggccctccgagactccggatcacggcaatcgacacgccgcaccctggttttcgcccagcagagcgcatagaggagaccggaaggtatctaaaagattatgctgagaccttcaatgtgcccttcgagttccgagccattccatctaggttcgaggcggttcagatagaggatctccacattgccaaggacgagctgctgatcgtgaacagcatgttcaaattcaagacactgatggacgagagcgtggtggctgagagtccaaggaacatggtcttgagcacaatcaggaagatgaacccacatctgttcattcatgggatcatcaatggctcctacaacgcacccttctttgcgtctcgcttccgggaggccttataccactactccgccatctttgacatgctggagacgaacatcccgagggacaacgagcagaggctgctcatcgagtcagcactgttcggtcgagaggcaatcaacgtaatctcctgcgagggcctggaaaggatggagaggcccgagacatacaagcagtggcaggtgaggtatcagagagctgggttcaggcagctcccgatcaaccaggacatcatgaagcgtgctcgcgagaaggtcaggtgctaccacaaggacttcctcatcgacgaagacaacaggtggttactgcaagggtggaaaggacgcatcgtgctggcgctctcaacgtggaagccagaccacaggtctccctagcttcctcgagggcggctacatggttgcagatcgagcactgcactgtagatggaggcctgttcgtatctttggatgcttgggctggttgttcctgggctgcaacatatagctaggctaggcttgtgctattcgaactactaaagcatgttttgcactgtctcatataatagtgatgccatcaagggtccctgcatgttaggttatggttcagttttggacaggaacagttagtgcattctttgatgggacaggctaggtatgttagttagtagttacgcggtagaccctagggttgtttcatgcatggatcagtcttatggattcttgtattatatttgttccccccattaaccagtgctgtcaaagttttgggcttc

SEQ ID NO: 116293 - DNA, 2722 bp, Zea Mays
gcaaacactggttcacgtccgtccacctctctacgcctttcctcttatcctcccgtctcgcgccgtcgcgcgtctcgggtctctcttctctctctcggctctcgcctccctcccggtccgggtcgcacgcaggtcgcagccagcagtgcatttttatgcgccgcgctggtggttttggggcgcggagtccatatccatggtcatggacgctggcctgcacgagccgtgcgcgctgctgccgggatccaagcgcgacagccacatgctagtctacccccaaatcgccgccgccgctaatgggttcacggcgcaggagctcgagtcgctgctgttcctgtcgtctgatgggattactttggctgcgggcagtggcggtggcggcggcggcggaagctatctgaatgtcgcgcctaccactgtggtcccgcccgccccgaccaaccgcgcgtcgccgccgagggatgtgtccgccgcgccgccctcggtggggcagccggatgattcggaggcgttctcggacatcgtcctgggctacatcaaccgcatgctcatggccgaggacatcgacgataagttcgagcactacccggagcaccccgcggtgctcgccgccgagaagcccttcctcgagatcctcgccgagcggccctcgagctccggtggcagcgcggtggagagcccgggcggcagcagtgtggggaactcttgctacagcgcgcgctcttgcacctgcgccaccgccacggcggcgtccgacgcctttggcgccgtgctgacgccggcgctcgacttcccgtcggccgcgttcctgcagccaccacagctgtaccaggatctaagccctgagggcagcgtggtggatgcaggcggcgcgtggccgtacgactcgacggaattctaccagctgcacagcaacccgtcgtcgttcgcgtcatccaacggcagctgtgctacaatatcagacggctttgagtcgttgctgagctcgcctggtgtcatgccagatgttggcttcaccgattttgccgtgcaaagccagcaggctatgcagttctgccgtgggttcgaagaagcaagcaagtttctgcctgacgagagtaagcttgtgattgatcttgagaagccagcatctgttacaagcttggtggctaacatcaaaggggagaacaggtttgcagaggtcaaggcagagaaggccgatgttcaggcagaaattcacagaggaaagaagcatttctatggtgatgacttggatgcagaggaagggaggcgcagtaaacattcagcacccgctatcgacactgatcaccttgtgcgggagatgatggacaaggtcttgttgtgcaatggcgagacatgttcaaaaggcgtcaaggaactccgtgaagccctgcagcatgacgtggcaaagaattcacacggggttcatggaaaagggtccggacatggcaagggccgtggcaagaaacagccgaagaaggaggtggttgacttggagactctcctcgtccactgtgctcagtctgtggccaccgatgatcgacgtggtgcaactgagctcctgaagcagatcagacagcatgcatcgcccaatggcgacggtgaccagcgtttggcgcactgcttcgccaacggccttgaggcgaggcttgctggcaatggaagtcagatttacaagtctcttataatgacgaggtttccctgcaccgatgtgctgaaagcctaccagctttacttggcagcttgcccattcaagaagatctcccatttctttgccaatcaaaccattatgaatgctgtggagaaggcgaagaaagtccacatcgtggactatggtatatactacggctttcagtggccgtgcctcattcaacggctctctaccaggcctggtggccctccgagactccggatcacggcaatcgacacgccgcaccctggttttcgcccagcagagcgcatagaggagaccggaaggtatctaaaagattatgctgagaccttcaatgtgcccttcgagttccgagccattccatctaggttcgaggcggttcagatagaggatctccacattgccaaggacgagctgctgatcgtgaacagcatgttcaaattcaagacactgatggacgagagcgtggtggctgagagtccaaggaacatggtcttgagcacaatcaggaagatgaacccacatctgttcattcatgggatcatcaatggctcctacaacgcacccttctttgcgtctcgcttccgggaggccttataccactactccgccatctttgacatgctggagacgaacatcccgagggacaacgagcagaggctgctcatcgagtcagcactgttcggtcgagaggcaatcaacgtaatctcctgcgagggcctggaaaggatggagaggcccgagacatacaagcagtggcaggtgaggtatcagagagctgggttcaggcagctcccgatcaaccaggacatcatgaagcgtgctcgcgagaaggtcaggtgctaccacaaggacttcctcatcgacgaagacaacaggtggttactgcaagggtggaaaggacgcatcgtgctggcgctctcaacgtggaagccagaccacagatcgagcactgcactgtagatggaggcctgttcgtatctttggatgcttgggctggttgttcctgggctgcaacatatagctaggctaggcttgtgctattcgaac

SEQ ID NO: 116294 - DNA, 111 bp, Zea Mays
ctaaattctatccactaaaaaatattttctgtccttttacagcacgttctaaaagattatattctctatatcttcttaatctccagcaacgtctcctaaattcggtcatct

SEQ ID NO: 116295 - DNA, 396 bp, Zea Mays
tttattttcttttttttttctggaatacgcaggagagctgcgtatcattgcattaatagaaagaaaagagagggggatagaaacccggtacagaacacacacacaccacttatactttattgtcagctggtgaaatgtgtaagagtaaaatttggtttgttttcgccaagaaatatgtcaggggattgtctgaacatcattgatgtcatgttaaagtgtcactttacaatatttatcagtacattgtgtggtgttttcatttgcatgccataattgacttgtgcaatgatgcattatagatcagtagatagcaaagccgattttgcacatacctggctacgacgccactgttcacgaatcctagcagcttcttgaagaatccttagttcttcctct

SEQ ID NO: 116296 - DNA, 807 bp, Zea Mays
gtcagccatcttcgttagttacatagagccgcgccgccgcaagagaggagagagcgcctccaacgccacctggaggagaggacagcgcgccagggagggggaggaggaagaagaacatggggaagggcgtcctggaggtgcacctcgtcgacgccaaggggctctccggcaacgatttcttagggaagctggacccctacgtgatcatgcagtaccggagccaggagcgcaagagcagcgtcgcccgagaccaaggaaggaacccgtgctggaacgaggtgttcaagttccagatcaactcggccgcggccaacgtgcagcacaagctcatcctccggatcatggaccacgacaacttctccagcgacgacttcctcggcgaggcgacgatcgacgtgacggacatcgtcagcctgggcgccgagcgcggcacgtaccacctcaacgcggccaagcacaacgtggtcctcgccgacaagacgtaccacggcgagatcaaggtcgccatcaccttcacctccacccagacccaggttcaggaagatggaggagcaattggaggatggaggcacagtagctttaatcagtgaaagtgataggcgtcgtggactctctcaagttctttggttgcttggtggtgtttcgggttggatgtagtttttgtttatgtccacgagcaatctgtgcctaacatttctagggttcaattcaatgattcaatccaaccatatctcgttggaaatcatgtctgtactgaagaccggtcaaacccgttgatcgactccctaagcttcttgattctgtgtc

SEQ ID NO: 116297 - DNA, 2374 bp, Zea Mays
gttcctccgcgctcatcactgaccttctcacgggcgagaggtttttttttgaaagcatcgtctccggtctccctcttcaacttccccgaaacgaaagcttacttttttatactaacttctagggtttcaggactaacctccctcccttcgcgccatctcccgcggtgctgcctcctctggcgccgattcgccgctgggagccccaattctataacccctctgttcgatctgggatccgctagattcgttggggcggtgatgagggcgatggcggaggtgatgcaggaggggtgcgtggagaatcggcagccactggcggcttcgagctcgtccgtgtcggatggcagcagctgtggcggcggagagcgggcggggacgtcgccgccggtgtcaagctccgggaattgcatctccgttctgagacgaacaagtggaccgataagaagaactaagggtggctggacactgaaagaggatgaaacactgcggaaggcagttgaagctttcaagggtagaaattggaaaaaaatagctgaattttttcaggacagaactgaggttcaatgtttgcatcgttggcagaaggttcttaatccggaacttatcaaaggcccttggactcaagaggaagatgaaaaaatcattgaccttgtgcgcaagtatggaccaacaaaatggtctatcatcgcaaaatcattgcctggccgcataggcaagcaatgccgagagaggtggcataatcacctgaatccagaaataaggaaagatgcttggactcctgaggaggaaagggcccttattgatgctcatcaagtgtttgggaataaatgggcagaaatagcaaaagttcttccgggaaggactgataattccataaagaatcattggaacagttctttgaaaaagaagttagaagcctatagtaacagcagtgttctttcagtttcaaagctgtttgttcatgatgatttcaaggataaaatgaagcccgtggctactgatggtcatcttgatctgaaccaaatgccaagcattggttccaaagattcctctggaagagcttatcattccattgtgagcccactttcacaggcatacaatttggactcaagctgcctctctctttctataccaaccatgcagcctctaacttcacatgaaatgtcatcactaattgatggttctgctgttactttggtggtacaatgtctggaaagtgactctgtccgtgacaaggaccaagaaattgactctgttcaagagaagggtgttgaggttagctcaacacctgatcctgttggggttgaattagaatctgcaccagccaaaagaggtgcagaattatcttcaaagaacgagttgcattctacccttggtcctctttgttatcagattttaaacatggaagatgtgatcccaatcagtaccccactctgttctgaacataatggtgcacatcaaacatcacaacaatgcatgtcacccaatggttatacttctctctctccaacgattggaaaagtatcaagtcagctaactgttgattcaattttgagaatggctgctgatagctttccatgtactccttcaatactaaggaaaagaaaacgtaataaagcaacacctggttcaggtaatgagttgaagacgggtggagtaaacaatgatagcttttacactcctaatggaactaatgggaaggacactactccacggtcatttaaaactgctgcatccttctcatcgctgggttctgttgatgggctattgacttctgtaaggagttttgattcttcaccaccctatcagaaaaggtcaaaaagaatggctatcatcaaatcagttgagaaacagctagatttttcagcagatggactggatacttctggttctgagattatgaactctccttgtcataattcccaaggcgtagattctaacaggatgtagcgcatacaagtgatttgaatgtaatttaattccataatgtgcaggactttatggaatcccttccgaactaaccagcctcatgcaaatgtcgtggttcaagctaaatccaaatcaatcaccttcagcggagataaagagcttcctgcaatggaaatgacgtacggaacacaggccaacagtttaccctgtcatctcatgtaatgagagtgtacaaaatactgtctaaattgaaagcacattccatagaagattacattgtttcctacatattgtgaacttacagctaggagttgagattgtagaagcccacagatgtgtacaaaaaaaagggaaaaaaaagcaaagtcaatttcctgtccttccggtctataaattaatatatgaaacatatataatctgcagaacgtaaaacagtaagaaactg

SEQ ID NO: 116298 - DNA, 2292 bp, Zea Mays
gttcctccgcgctcatcactgaccttctcacgggcgagagggtttcaggactaacctccctcccttcgcgccatctcccgcggtgctgcctcctctggcgccgattcgccgctgggagccccaattctataacccctctgttcgatctgggatccgctagattcgttggggcggtgatgagggcgatggcggaggtgatgcaggaggggtgcgtggagaatcggcagccactggcggcttcgagctcgtccgtgtcggatggcagcagctgtggcggcggagagcgggcggggacgtcgccgccggtgtcaagctccgggaattgcatctccgttctgagacgaacaagtggaccgataagaagaactaagggtggctggacactgaaagaggatgaaacactgcggaaggcagttgaagctttcaagggtagaaattggaaaaaaatagctgaattttttcaggacagaactgaggttcaatgtttgcatcgttggcagaaggttcttaatccggaacttatcaaaggcccttggactcaagaggaagatgaaaaaatcattgaccttgtgcgcaagtatggaccaacaaaatggtctatcatcgcaaaatcattgcctggccgcataggcaagcaatgccgagagaggtggcataatcacctgaatccagaaataaggaaagatgcttggactcctgaggaggaaagggcccttattgatgctcatcaagtgtttgggaataaatgggcagaaatagcaaaagttcttccgggaaggactgataattccataaagaatcattggaacagttctttgaaaaagaagttagaagcctatagtaacagcagtgttctttcagtttcaaagctgtttgttcatgatgatttcaaggataaaatgaagcccgtggctactgatggtcatcttgatctgaaccaaatgccaagcattggttccaaagattcctctggaagagcttatcattccattgtgagcccactttcacaggcatacaatttggactcaagctgcctctctctttctataccaaccatgcagcctctaacttcacatgaaatgtcatcactaattgatggttctgctgttactttggtggtacaatgtctggaaagtgactctgtccgtgacaaggaccaagaaattgactctgttcaagagaagggtgttgaggttagctcaacacctgatcctgttggggttgaattagaatctgcaccagccaaaagaggtgcagaattatcttcaaagaacgagttgcattctacccttggtcctctttgttatcagattttaaacatggaagatgtgatcccaatcagtaccccactctgttctgaacataatggtgcacatcaaacatcacaacaatgcatgtcacccaatggttatacttctctctctccaacgattggaaaagtatcaagtcagctaactgttgattcaattttgagaatggctgctgatagctttccatgtactccttcaatactaaggaaaagaaaacgtaataaagcaacacctggttcaggtaatgagttgaagacgggtggagtaaacaatgatagcttttacactcctaatggaactaatgggaaggacactactccacggtcatttaaaactgctgcatccttctcatcgctgggttctgttgatgggctattgacttctgtaaggagttttgattcttcaccaccctatcagaaaaggtcaaaaagaatggctatcatcaaatcagttgagaaacagctagatttttcagcagatggactggatacttctggttctgagattatgaactctccttgtcataattcccaaggcgtagattctaacaggatgtagcgcatacaagtgatttgaatgtaatttaattccataatgtgcaggactttatggaatcccttccgaactaaccagcctcatgcaaatgtcgtggttcaagctaaatccaaatcaatcaccttcagcggagataaagagcttcctgcaatggaaatgacgtacggaacacaggccaacagtttaccctgtcatctcatgtaatgagagtgtacaaaatactgtctaaattgaaagcacattccatagaagattacattgtttcctacatattgtgaacttacagctaggagttgagattgtagaagcccacagatgtgtacaaaaaaaagggaaaaaaaagcaaagtcaatttcctgtccttccggtctataaattaatatatgaaacatatataatctgcagaacgtaaaacagtaagaaactg

SEQ ID NO: 116299 - DNA, 2163 bp, Zea Mays
gttcctccgcgctcatcactgaccttctcacgggcgagaggtttttttttgaaagcatcgtctccggtctccctcttcaacttccccgaaacgaaagcttacttttttatactaacttctagggtttcaggactaacctccctcccttcgcgccatctcccgcggtgctgcctcctctggcgccgattcgccgctgggagccccaattctataacccctctgttcgatctgggatccgctagattcgttggggcggtgatgagggcgatggcggaggtgatgcaggaggggtgcgtggagaatcggcagccactggcggcttcgagctcgtccgtgtcggatggcagcagctgtggcggcggagagcgggcggggacgtcgccgccggtgtcaagctccgggaattgcatctccgttctgagacgaacaagtggaccgataagaagaactaagggtggctggacactgaaagaggatgaaacactgcggaaggcagttgaagctttcaagggtagaaattggaaaaaaatagctgaattttttcaggacagaactgaggttcaatgtttgcatcgttggcagaaggttcttaatccggaacttatcaaaggcccttggactcaagaggaagatgaaaaaatcattgaccttgtgcgcaagtatggaccaacaaaatggtctatcatcgcaaaatcattgcctggccgcataggcaagcaatgccgagagaggtggcataatcacctgaatccagaaataaggaaagatgcttggactcctgaggaggaaagggcccttattgatgctcatcaagtgtttgggaataaatgggcagaaatagcaaaagttcttccgggaaggactgataattccataaagaatcattggaacagttctttgaaaaagaagttagaagcctatagtaacagcagtgttctttcagtttcaaagctgtttgttcatgatgatttcaaggataaaatgaagcccgtggctactgatggtcatcttgatctgaaccaaatgccaagcattggttccaaagattcctctggaagagcttatcattccattgtgagcccactttcacaggcatacaatttggactcaagctgcctctctctttctataccaaccatgcagcctctaacttcacatgaaatgtcatcactaattgatggttctgctgttactttggtggtacaatgtctggaaagtgactctgtccgtgacaaggaccaagaaattgactctgttcaagagaagggtgttgaggttagctcaacacctgatcctgttggggttgaattagaatctgcaccagccaaaagaggtgcagaattatcttcaaagaacgagttgcattctacccttggtcctctttgttatcagattttaaacatggaagatgtgatcccaatcagtaccccactctgttctgaacataatggtgcacatcaaacatcacaacaatgcatgtcacccaatggttatacttctctctctccaacgattggaaaagtatcaagtcagctaactgttgattcaattttgagaatggctgctgatagctttccatgtactccttcaatactaaggaaaagaaaacgtaataaagcaacacctggttcaggtaatgagttgaagacgggtggagtaaacaatgatagcttttacactcctaatggaactaatgggaaggacactactccacggtcatttaaaactgctgcatccttctcatcgctgggttctgttgatgggctattgacttctgtaaggagttttgattcttcaccaccctatcagaaaaggtcaaaaagaatggctatcatcaaatcagttgagaaacagctagatttttcagcagatggactggatacttctggttctgagattatgaactctccttgtcataattcccaaggcgtagattctaacaggatgtagcgcatacaagtgatttgaatgtaatttaattccataatgtgcaggtatgtatcttgaacatcattaactgtgcattcctcactttaaggtgcatatttgtgtagaacagtagaatttaagttttgccaaccaaaatctctgggcaattagttctgcttttgtgtatctttttccatagtataattaatttattcttccatacctttcaaggaa

SEQ ID NO: 116300 - DNA, 2079 bp, Zea Mays
gttcctccgcgctcatcactgaccttctcacgggcgagagggtttcaggactaacctccctcccttcgcgccatctcccgcggtgctgcctcctctggcgccgattcgccgctgggagccccaattctataacccctctgttcgatctgggatccgctagattcgttggggcggtgatgagggcgatggcggaggtgatgcaggaggggtgcgtggagaatcggcagccactggcggcttcgagctcgtccgtgtcggatggcagcagctgtggcggcggagagcgggcggggacgtcgccgccggtgtcaagctccgggaattgcatctccgttctgagacgaacaagtggaccgataagaagaactaagggtggctggacactgaaagaggatgaaacactgcggaaggcagttgaagctttcaagggtagaaattggaaaaaaatagctgaattttttcaggacagaactgaggttcaatgtttgcatcgttggcagaaggttcttaatccggaacttatcaaaggcccttggactcaagaggaagatgaaaaaatcattgaccttgtgcgcaagtatggaccaacaaaatggtctatcatcgcaaaatcattgcctggccgcataggcaagcaatgccgagagaggtggcataatcacctgaatccagaaataaggaaagatgcttggactcctgaggaggaaagggcccttattgatgctcatcaagtgtttgggaataaatgggcagaaatagcaaaagttcttccgggaaggactgataattccataaagaatcattggaacagttctttgaaaaagaagttagaagcctatagtaacagcagtgttctttcagtttcaaagctgtttgttcatgatgatttcaaggataaaatgaagcccgtggctactgatggtcatcttgatctgaaccaaatgccaagcattggttccaaagattcctctggaagagcttatcattccattgtgagcccactttcacaggcatacaatttggactcaagctgcctctctctttctataccaaccatgcagcctctaacttcacatgaaatgtcatcactaattgatggttctgctgttactttggtggtacaatgtctggaaagtgactctgtccgtgacaaggaccaagaaattgactctgttcaagagaagggtgttgaggttagctcaacacctgatcctgttggggttgaattagaatctgcaccagccaaaagaggtgcagaattatcttcaaagaacgagttgcattctacccttggtcctctttgttatcagattttaaacatggaagatgtgatcccaatcagtaccccactctgttctgaacataatggtgcacatcaaacatcacaacaatgcatgtcacccaatggttatacttctctctctccaacgattggaaaagtatcaagtcagctaactgttgattcaattttgagaatggctgctgatagctttccatgtactccttcaatactaaggaaaagaaaacgtaataaagcaacacctggttcaggtaatgagttgaagacgggtggagtaaacaatgatagcttttacactcctaatggaactaatgggaaggacactactccacggtcatttaaaactgctgcatccttctcatcgctgggttctgttgatgggctattgacttctgtaaggagttttgattcttcaccaccctatcagaaaaggtcaaaaagaatggctatcatcaaatcagttgagaaacagctagatttttcagcagatggactggatacttctggttctgagattatgaactctccttgtcataattcccaaggcgtagattctaacaggatgtagcgcatacaagtgatttgaatgtaatttaattccataatgtgcaggtatgtatcttgaacatcattaactgtgcattcctcactttaaggtgcatatttgtgtagaacagtagaatttaagttttgccaaccaaaatctctgggcaattagttctgcttttgtgtatctttttccatagtataattaatttattcttccatacctttcaagg

SEQ ID NO: 116301 - DNA, 564 bp, Zea Mays
atgacggaaggaggtgtacctgcagagcacgccgacgaggaggagaaggaggtgtacctgcagaacacagccacggccgacgaggaggaggactgcagagcacgccggggccggagtccgagcgcggctcggccaccgcgttgtcccacagtagtccagaagcccctagccccatgcaccgatgcgcgtcctgccacgtgtgtgaagtgcccggagtggtgcgcattttgcttagagaccgatggttgtggtctgttctctttggtccttgtaaccttgtttgatgttatagttggtcgttgggcgagacgaagaaagctagatctgacctctaggcgtgagctgactgcatgcgctcgcggctgctcgcgggccccagctgtcatagactgcatgcggagtgcaaatacggagtctgctggaaacgaggacggatacggagaggagagagaaactgttggccgtgctaaatacggatacagagagggagtctgctggagttggtctaagagaggcgcggagcagagagcaacgacctactcgaggttgcagaagccctcatag

SEQ ID NO: 116302 - DNA, 1635 bp, Zea Mays
atgctaaaaagcatgttcaatgtttgaaagtagatgcgctgcgatttcgctcgcctgcgtcgtgatgggggacgaacacggacacggcgctgaatgcgatggatgaggtgccctaactgccctttgctgctgtccgctctgactcagtgactcctgcggtcctgccgcccgcaaacaactagtcagacccggaaggaggcacgcgagctccgatggcggcgagcacggccgcggttgttcgtcgtctctgcgtggccgcggaggtgcggtctgctctggctgtgctcgcccgcgggacgaagtccggcgacgcagcgctggacgtggccgcgtgcaccgcgctggtccacgtctgttgtcagagcggcgacgttgcggaggcacgtagagtgttcgacgtaatgccgcgcctgggcgtggcccctaacgaggtcacgtacacagcattgatcaatggctactttgttcgtggacacagagagatgggtttcgccttgtttgcggagatgaggagagacggagtcgagccaaacctctacacctacaactgcttgatcggtgaatggtgcaggacaggggagttcaagagcgcccgactcctattcgacgaaatgcccgtgaagggtgtcgtgcataatgttgtcagctacaacatcttaattgcaggcctgtgcaggcacagcaagctgaaagatgccgtccagctgtttgaagcaatgagaagggagggtatccgtccaagcattgtgacgttcaatcttctaattgatggctatggcaaggctgggaagatggctaatgccttacatttcttcaatcagatgaaggcggcagggctgccacctagtgtggtgacatacaacgagcttatatgtggattctgtcgtgttagagatatagcccgtgcagtcagggctttcttagacatgaaggagcgcggtttggcacccacaaaagtgacgtacaccatactcattgctgcatttgctaaggaaaatgaaatggacagggcattcatgatgctttcagagatggagaaggctgggttggaagtggatgtgcagagttatggtgttctcttgcatgcgctctgcatggaagggaagatgatgcatgccaggaaactgtttcagtcgatggatctgaaaggtgtcaaaccaaacagtgtgttatatgacatgatgatctacggatatggacgggaagggagctcatataaggctttgagattgatcatggaaatgaggaagaatggtttgattccgaatgttgctagctattgcctaacgatccgtcttctctgcaatgaagggaagtgccaggaagctgaggctttgattgatgacatggagcatgctggtttgcaaacaagtgagactatctgcagaatactactcgatgctaaggcaagattgcatggttctactgatgattcttttacttaaaatagtcaggcacattgtttctgttatctgccagggtataggttactatagttatcttgtggaagtggcaaggtggtaggaaaagaaagattgatagagaggttaaagatctactgaatcctgtcttgtaccaacattttggtgttttattgaacttccccgcacaatgagcatggttggttggtcccta

SEQ ID NO: 116303 - DNA, 636 bp, Zea Mays
gtgtgaaacagagcagcgcaccgcaagcccccgtcgttgttttcccttttgacttcaccgagtctgctccttgcctccttaattgtcgcgcatgatcatgttttctcgtccgaaggcgtgatttttcgaggtcgatgatcgtggatttgcctccggaggcgtcgatttggtccccagggacctgtctagggacaggcgtattacagtctgtcatgatcaagcaaatcctcgaccagcttccccagaagatggccaaggcccacgagaaggagctggccagcgcgagctcgtcgctgcctagcccgacatcctacttttgtaggatcatctattcacccctctaggtgctctcaataccagatgccaaagagtccggcttcatctctgaatttatcggtagttcaagctggcgtgtaggtcccatccttcttgaaaggataaaagttgtttcttttgggaaaaaaaactatagcggcgtttggaggtaaaaaacataattttattgttacatgtggcatggttcatgcacatggatttacgggatttacctctgccccgccccctggtttggtacgtgactacaaactatatagatttttttgtgtcaaatttcaactggcatgagttaaatgattg

SEQ ID NO: 116304 - DNA, 1710 bp, Zea Mays
ccctgttgaagttttgtcacggtcgccgtcccgtccctccttttgaacgtttcaaaggggatctcagggtcagagcgcatcagcacacagacagcgcggtgctctccagtccccaccaattaagctcagggtctagtgagcagccagagagcctcgtcccgttcccacccccattgcttgctctgactgctccgccgtgcgtgcgtcacccgcgctcgggaggtgagtggtttggttgcgcagccaactgccggcccggcaccgtaccgcttgttcgcttctgaggttgtgcggagtggttgctggcctggccgtggccggcataccgataaaggcgagagacaaggcgttgtctcactctcatccgtcgtccgtctcgtctcggctttctcgcctcctcggcggcagcggtgttccactcccatcgcgtcgggacatagaaagggggagcgcgggcgacacgcgagcgttagttgccatggacgcgcccttcttccacgagctcaggcggcaggcctcctcctacctcaccggcaagatccgctccgcgcggctggcgctcaccgacgtcaccccgacgcagctgtaagtattcggtttctctgattacctgtggcgcgccgcgcccaggcgttctctctgattacctgtggcgtgcgtgtagcatgacggaggaggcgacgaacggggacgcgtcgccgccgaacgtcaagacgatgggcctcatagcccggcaggcgttcgaggtcgacgagtacgtcaggatcacggacatcctgcacaggcgcttcgcgagcttcgaccccaggcaggggcaggggcagtggcagtggcgggaggcgtacaaggcgctgctcctcctggaccacctcctcacgcacgggccccgcagcgtcgcggtcgagttccagaaggacagggaggccatcgagcggatggccaccttccaacacatcgacgagagaggcttcaactggggacggacggtgacgagcaagtcggagcgcgtgctcaagctgctggagcgcggcccgttcctggaggaggagcgcgagcgggcacgcaagatcgcgcgcgagatcaagggcttcggcagcttcaacctcagcagcgcctcccacgccgcgccacagccaccaccaggtgacgagggaagccgcggctacggccggagcaactcgcagttcgagcagcggtggaggcacaaggacggcgacgacagcgacaaggagaatctgatccagagcccggagccagcacgggtcgcgcgggaagtcgaggccgagccggaggagccgcaccaccacccgttccacgggctcgggcaaaaacagcggccggaggcgatgctgctcctgagccagtgacgggatcagtcggttcgtgtcatggtgatatgaaaaagaaccgtgtgctctgctcgactcaactagcttttctccattcctcaaggctgcaggggtcggaggcagtgatgggatcagtcagtactttactgacactgcttggtgcaccatgcatgagaactttgatgtctcatgtagtagtcatgtctgcttcgccttgtaaataattctatgcttcagttcggatgccaggatgtaatacgagtctacgactctacgagacaacataaggctgtctccaacaatagcccgtaaattgttctgtccgctacatatagcgttttcttccgtccggtctccgccc

SEQ ID NO: 116305 - DNA, 1946 bp, Zea Mays
ctattctatcacagacttctccatccattcatgattcatgcatccgtgcagcatcataaactgcttagtcatcatactgaaatgaggcagcacgctgcacgttggtttggttgccgccagaatacatgccacggcgtggccggacgacgccgcacagccactcgagcgcgcaaagaatagagcccgcaccgccacggcgccacctgcccatgcgcgtgcgccacgcgcaggcaggagcaggagcaggagcaggacgcaccacctgacctcagccgcgcccaccaccgccatgggccctgcctcctgtgctgtgctgggccgccacgacggaatgcgagcggattcaaaattcaaatgcccgtttctccctgttgaagttttgtcacggtcgccgtcccgtccctccttttgaacgtttcaaaggggatctcagggtcagagcgcatcagcacacagacagcgcggtgctctccagtccccaccaattaagctcagggtctagtgagcagccagagagcctcgtcccgttcccacccccattgcttgctctgactgctccgccgtgcgtgcgtcacccgcgctcgggaggtgagtggtttggttgcgcagccaactgccggcccggcaccgtaccgcttgttcgcttctgaggttgtgcggagtggttgctggcctggccgtggccggcataccgataaaggcgagagacaaggcgttgtctcactctcatccgtcgtccgtctcgtctcggctttctcgcctcctcggcggcagcggtgttccactcccatcgcgtcgggacatagaaagggggagcgcgggcgacacgcgagcgttagttgccatggacgcgcccttcttccacgagctcaggcggcaggcctcctcctacctcaccggcaagatccgctccgcgcggctggcgctcaccgacgtcaccccgacgcagctcatgacggaggaggcgacgaacggggacgcgtcgccgccgaacgtcaagacgatgggcctcatagcccggcaggcgttcgaggtcgacgagtacgtcaggatcacggacatcctgcacaggcgcttcgcgagcttcgaccccaggcaggggcaggggcagtggcagtggcgggaggcgtacaaggcgctgctcctcctggaccacctcctcacgcacgggccccgcagcgtcgcggtcgagttccagaaggacagggaggccatcgagcggatggccaccttccaacacatcgacgagagaggcttcaactggggacggacggtgacgagcaagtcggagcgcgtgctcaagctgctggagcgcggcccgttcctggaggaggagcgcgagcgggcacgcaagatcgcgcgcgagatcaagggcttcggcagcttcaacctcagcagcgcctcccacgccgcgccacagccaccaccaggtgacgagggaagccgcggctacggccggagcaactcgcagttcgagcagcggtggaggcacaaggacggcgacgacagcgacaaggagaatctgatccagagcccggagccagcacgggtcgcgcgggaagtcgaggccgagccggaggagccgcaccaccacccgttccacgggctcgggcaaaaacagcggccggaggcgatgctgctcctgagccagtgacgggatcagtcggttcgtgtcatggtgatatgaaaaagaaccgtgtgctctgctcgactcaactagcttttctccattcctcaaggctgcaggggtcggaggcagtgatgggatcagtcagtactttactgacactgcttggtgcaccatgcatgagaactttgatgtctcatgtagtagtcatgtctgcttcgccttgtaaataattctatgcttcagttcggatgccaggatgtaatacgagtctacgactctacgagacaacataaggctgtctccaacaatagcccgt

SEQ ID NO: 116306 - DNA, 2170 bp, Zea Mays
agtggcaactcagaatattatttcttttaactgaacttagtacaaaatctaaacatgagggttaaaaagacacccataacacagaagctagaataaactagtcttcagcaagtcttcgtcgctgaagagacatagtatggcacaaagatagcttaggtcaaaagtagatcattagctccgtagtgagggggtcgcagagagaccctaacttcatgttcttcaggttcattccctcgttttgggaccatgatctccagcactgaggcagcctcatcaaaacaagcctccagcttagcatcttcagggatacgagtagctagaggtatttcacgaatgaaatcaccaggagggcaatgctctggggaaggatcggcaagcgcgaacatcctgccatgtctccttatatgttgcatcctagcagtactaacacaaacgatcttcacaatgccatgagtcagagtgttcctccacgaaaccttcaccctctgctgatcaacaaacggcaagctgaccattattaagtagccctggtcatcctcatagatagacttggcagcagtcactggcccacaggcgtttctcatcaccccagtaaactcatggagccacgcagcaggctgcgttggtgagtgcatctccacatcttgttgtgtcttctgagggcaagaattcagtgggaagaatacttcctcatccatggcctgtggggacaattccttcctacgcttgctgctaactggagagagatccataccatcttcgcctgaatgattggacggtgacgacagattcaagcctgttttctttgggttttgggtgccgttgctcttcatgacagggtgtggcttctcaagctcaagctctgaatttggaatggtcctccatgtcccgaaatcactggcttcctgtgggatgatgaaattgagctccctcccagtcaggtccgcccacctcctaaggtctgcctcggtgagccctacaagatttggtgacctgaccacctcaatcccatggatacattgcgggtttgacagcccccggtagtgcttacgctgcatccggtgcgaccgcacaaaccccctgtcgacgctgaaggggaactgcggctccccgggccgggagtggccgttcatgtagctcctcagctgcatcttccccagagcattctccggccgctccttgaacacccacatgtacatgttctccatgtcgtgctgcaccaggaacatatcaaggcggaggtcggacttgtcgaagcccgagaccccgccgctgttgtcccggacgaccttgtccttgcacttgtcggacagcaggggcttgaaatagaaggtgaagaagaaccaggcgccccagatgctgtccccgcgcttggcggccttccggctcccggccttgggggcgcagctgagcacggcctcggcgctgtagacctgcgggccgaggccgacgtccagcatgtcgcagaggtcggtctgccacggctggttgatgtcgggcggaggcgcgccggagggcgacacggcgtgggcgcgggcgccggcgccgacgccccctccgatgagggtctgcaccatgacgccgacggcgcggtcgtccggcgcggagaggtggccggacgggtccatggagaggagcgtgcaggggccgtggtggccgccgccgccgccgccgccgttctccatggacagggtggtgacgaggtcttcccccatggctgcttgctcgcggcgcggggtggtggggggtgctaacggcggcctccgcctcctgtggtccctcgctccccagccgctatctaatcggtggcctcatgatccctccgcactccaggaaggcgtcccacagcaaccagtcatgcacccattccatgaaccccaccatcaatttttgaccacagatctttgaccagcctcctcctcgtcccccgggccaaaatccacacgacccacagaatgccgcgctcgacggaacgaagaaaccggaacaagaatactcttctaagctagaaaatgaagggacagacaacaggggcggggcggggcggtgtgttagccgactgttacctccatcagagatgatgagccttcgtcgttaatgcgagggagtggtgggcagcggagagatgcaggggcaagtgcgcggggaggaaggcgacgacatgaagggg

SEQ ID NO: 116307 - DNA, 1947 bp, Zea Mays
atggcgaagggcgagggtccggcgatcgggatcgatctcggcaccacctactcgtgcgtcggcgtgtggcagcacgaccgggtggagatcatcgccaacgaccagggcaaccgcaccacgccgtcctatgtcgccttcaccgacaccgagcggctcatcggcgacgccgccaagaaccaggtggccatgaaccccaccaacaccgtcttcgatgccaagcggttgatcggcaggaggttctctgacccgtcagtgcagagtgacatgaagctatggccgttcaaggtcatccctggccctggtgacaagcctatgattgtagtctcctacaagggtgaggagaagcagttcgctgctgaagagatctcctccatggtgctcatcaagatgaaggagattgctgaagcctacctcggctctactatcaagaatgcagtggtgacagtgccggcctacttcaacgactcgcagaggcaagccaccaaggacgccggtgtcattgcgggcctcaatgtgatgcgtatcatcaacgagcccactgctgctgctattgcctacggtcttgacaagaaggcgagcagctctggcgagaagaacgtgctcatcttcgaccttggtggtggcacgtttgacgtgtcgctcctcaccatcgaggagggcatcttcgaggtgaaggccactgcgggtgacactcaccttggaggcgaggatttcgacaatcgcatggtgaaccacttcgtccaagagttcaagcgcaagcataagaaggacatcagcggcaaccctcgtgcactgcgccggctgcgcacggcgtgcgagcgcgccaagcgcacgctgtcatcgaccgcccagacgaccattgagatcgactccttgttcgagggcatcgacttctactctacaatcaccagggctcgctttgaggagctcaacatggacttgttccgcaagtgcatggaacctgtggagaagtgcctgcgcgacgccaagatggacaagagcagcgtgcacgacgtcgtgctcgtcggtggctccacccgcattcccaaggtgcagcagctgctgcaggatttcttcaacggcaaagaactctgcaagagcatcaaccccgacgaggctgtggcgtacggcgcggctgtacaggccgccatcctcagtggcgagggcaacgagaaggtgcaggacctgctcctactcgacgtcacgccactgtctctcggcctggagactgcaggtggcgtcatgacggtgcttatcccgaggaacaccacaatcccgaccaagaaggagcaggtcttctcgacgtactccgacaatcagccgggcgtcctgatacaggtgtacgagggtgagcgcgcgaggaccaaggacaacaacctcctcggcaagttcgagctctcgggcatccctcctgctccccgcggcgtgccccagatcaccgtcaccttcgacatcgacgccaatggcatcctcaacgtctctgctgaggacaagaccaccggccagaagaacaagatcacgatcactaacgacaagggccggcttagcaaggaggagattgagaagatggtgcaggaggctgagaagtacaaggccgaggacgaggaggtcaagaagaaggtggacgctaagaacacgctcgagaactatgcctataacatgaggaacaccatcaaggatgacaagatcgcctccaagctctcggcagatgacaagaaaaagatcgaggacgccgtcgatagcgccaccagctggctggacagcaaccagctagctgaggtggacgagttcgaagacaagatgaaggagctcgagggcatctgcaaccccatcatcgccaagatgtaccaaggcgctggcgcgggcatgggcgatgcggctggcatggacgaggatgccccgtctggtgggagcggtgctggtcccaagatcgaagaggtcgattaa

SEQ ID NO: 116308 - DNA, 1406 bp, Zea Mays
ggagagtggagacagacacagacatttaaatcgtggacagttcggggaccgggccgcaaataaccatcctccctagctttcccgttccagccgtcgcgttgagttgctgccgcctcccccggtccccccacctcccgccccggcgcccctctctctctctctcttctgccgcacagagcccaaatcgcggcggatccctcgctctccagggagccgctgcggcgccgggttttgtacaccgacttgtttgcctacctccagctcctcctcggcgacccatggctctcctcgcccccgccatctccggcgaggttggtctgcggctcttattggcaccgctaagctctaacatagtcatgcgtacagccagcattcttcgaaactggtataacaaggagtaacgaggatctctataaaacaatttggtttcatgcccggaagatcaaccatttgtgctgttgggattggtctacctgtatactccactttcagagctatagagaagaaggatgaacaagagaaagagcggatgcttttgtattgggcagcatatggatcttttagcattgctgaagtgtttgcagataagcttctttcaagtgttcctctctattatcatgtgaagtttgctatccttgtgtggctccagttcccttcaaacagtggatcaaagcatgtatacaaaagatacctgcgcccatttttcctgaaacatcaagcaaaaattgataggtttctgaatattctgtcaaaggaacttacgaagtttgtgagcagccatgaagatgaaattcgttttatagaaaatatggctatcagaggggctacaacagcaaaccacatcgtaaatggcctcgaccaacctgaagaaacacaagcggttaatacaattgaaggtccaaatacaactgtgacagaagaagctggtgtgtcgggaactgaaacttaagcaaaactttctatctctgctcatgatcccagacgctgcttcaaaattgttgttgaggtcacccagcttgtttggattgtgaatactactgttcctgaaaggctagatctagaggcaatgttttagctttaactagatattcatatagcaagtaaaatcggtgttggacaaatttattacagtgtaaaaatgacccggtgtggaatgcagttcccagcaatgttgtcatttttcacgtgggaataatttgaagtctgcgatgaagaatctttctaaagcatgaattcgtgttggttagcaattagcatgctttagaatataaacttgtgcgtgcttgatcttgtagatcaatggtgcatcataattcattcaaatttggtgacttcgttcttcattatagcttgtgaagaatgatttaatgatagatcaacttattctgtcttaaaaaaacaaaaaa

SEQ ID NO: 116309 - DNA, 1326 bp, Zea Mays
ggagagtggagacagacacagacatttaaatcgtggacagttcggggaccgggccgcaaataaccatcctccctagctttcccgttccagccgtcgcgttgagttgctgccgcctcccccggtccccccacctcccgccccggcgcccctctctctctctctcttctgccgcacagagcccaaatcgcggcggatccctcgctctccagggagccgctgcggcgccgggttttgtacaccgacttgtttgcctacctccagctcctcctcggcgacccatggctctcctcgcccccgccatctccggcgaggttggtctgcggctcttattggcaccgctaagctctaacatagtcatgcgtacagccagttgtgctgttgggattggtctacctgtatactccactttcagagctatagagaagaaggatgaacaagagaaagagcggatgcttttgtattgggcagcatatggatcttttagcattgctgaagtgtttgcagataagcttctttcaagtgttcctctctattatcatgtgaagtttgctatccttgtgtggctccagttcccttcaaacagtggatcaaagcatgtatacaaaagatacctgcgcccatttttcctgaaacatcaagcaaaaattgataggtttctgaatattctgtcaaaggaacttacgaagtttgtgagcagccatgaagatgaaattcgttttatagaaaatatggctatcagaggggctacaacagcaaaccacatcgtaaatggcctcgaccaacctgaagaaacacaagcggttaatacaattgaaggtccaaatacaactgtgacagaagaagctggtgtgtcgggaactgaaacttaagcaaaactttctatctctgctcatgatcccagacgctgcttcaaaattgttgttgaggtcacccagcttgtttggattgtgaatactactgttcctgaaaggctagatctagaggcaatgttttagctttaactagatattcatatagcaagtaaaatcggtgttggacaaatttattacagtgtaaaaatgacccggtgtggaatgcagttcccagcaatgttgtcatttttcacgtgggaataatttgaagtctgcgatgaagaatctttctaaagcatgaattcgtgttggttagcaattagcatgctttagaatataaacttgtgcgtgcttgatcttgtagatcaatggtgcatcataattcattcaaatttggtgacttcgttcttcattatagcttgtgaagaatgatttaatgatagatcaacttattctgtcttaaaaaaacaaaaaa

SEQ ID NO: 116310 - DNA, 2023 bp, Zea Mays
ggagagtggagacagacacagacatttaaatcgtggacagttcggggaccgggccgcaaataaccatcctccctagctttcccgttccagccgtcgcgttgagttgctgccgcctcccccggtccccccacctcccgccccggcgcccctctctctctctctcttctgccgcacagagcccaaatcgcggcggatccctcgctctccagggagccgctgcggcgccgggttttgtacaccgacttgtttgcctacctccagctcctcctcggcgacccatggctctcctcgcccccgccatctccggcgaggttggtctgcggctcttattggcaccgctaagctctaacatagtcatgcgtacagccagttgtgctgttgggattggtctacctgtatactccactttcagagctatagagaagaaggatgaacaagagaaagagcggatgcttttgtattgggcagcatatggatcttttagcattgctgaagtgtttgcagataagcttctttcaaggtatgaacatctgacattatttaagtgtttgacattttaattgaagaagtattttttgtcatgatcatgaatagcaatgccagtattcattgagcactggtctggttgtaatattttgttctgcagccttgcgttattagactccatgtattctccttatcttttaaggaagaccttctggatagaattatttctttaggagtgatgcattgagagtttctttattttaagaaaatctttcagtaacttgctacatttttttttgtttttgtgctttacatttgaagtgtcattctgtttgtcttcatgacattcttatttcataacattgtgtgcgcacttgattattttactttacatttgccataagcaacacacctttttgtgctatcgtttgacatcagttaagtgtttttaatcttaccttagaatttaaaaactatttggacatgtgtctgctgctgttctccagtgttcctctctattatcatgtgaagtttgctatccttgtgtggctccagttcccttcaaacagtgtaagtttcccttgccccttccatcccccgtctaaatttcatatactgttcaactttaccattttaccactgtgatatggtttttgctcaaatgcacgatattagtggcacttgttctttgaattcaccattttctacttcatgaggtttgttgctgcgacccataacctatttctagatcttgtagtgggagtttgtcatgaactttccatcagctttatatatgttttcctttctattgcttatgaagtactgcatactcttggctttcttttaaacatcatatccatgttttcttgtgataagactcatactgccttttggacaaaaaatgtgtaactattatattgcttgctgtatctttgatgattgtttggatcgaattcgtgtcctttaatttcagggatcaaagcatgtatacaaaagatacctgcgcccatttttcctgaaacatcaagcaaaaattgataggtttctgaatattctgtcaaaggaacttacgaagtttgtgagcagccatgaagatgaaattcgttttatagaaaatatggctatcagaggggctacaacagcaaaccacatcgtaaatggcctcgaccaacctgaagaaacacaagcggttaatacaattgaaggtccaaatacaactgtgacagaagaagctggtgtgtcgggaactgaaacttaagcaaaactttctatctctgctcatgatcccagacgctgcttcaaaattgttgttgaggtcacccagcttgtttggattgtgaatactactgttcctgaaaggctagatctagaggcaatgttttagctttaactagatattcatatagcaagtaaaatcggtgttggacaaatttattacagtgtaaaaatgacccggtgtggaatgcagttcccagcaatgttgtcatttttcacgtgggaataatttgaagtctgcgatgaagaatctttctaaagc

SEQ ID NO: 116311 - DNA, 503 bp, Zea Mays
aaaaaatattccgaaccggggcgcatccccttgtgctagctacccccacgacctcgagttctagaagccgtctgctccgccatctgctcgtcctcgatgatgacttcaggctccgcttagactttcaatcttgggcgacagagcacagaggcgccatcgtcagcggcagaagatgccctcttatcgatagtagggaggcaggctcagggacacaaaggtgatgtggttctcgtcgacgtccggtcgtggaagcgcgtgttcgtgacggcggccgcggaagcgctaggatgagctgcccctagatgcattgtcgaacgagtgcctcttcgatatcctacgccgcgtgcagggcacccccacgacctgcgcatcagcttgcatctcctgccgctggctcatgcccctcgcctgtttgtgcctcgtcgccctcgccgtcccaaacctcaactaggagtaccttagcgaggatgacgggggcgatctaatggaataggacgagaatt

SEQ ID NO: 116312 - DNA, 126 bp, Zea Mays
cgcacgggtatggcaaatgggagaaagtcacacgaaaagcaccccaaaccaagagaaatcttgagaccaaccagggtgccgtttggttcccaaaatgtaacgtaaatggtaacggtaacggtttgc

SEQ ID NO: 116313 - DNA, 1053 bp, Zea Mays
ctgcgctacaccacgcgcctaatgtcgccaccgctgcgctctaggtctatcctcaccgcccaccgctgccgtagcagcaagcgccaccacctccgcgtactatgtctggatctccgagcccacctccatcgaggagcgccgccgcctcgtgctccaacggcttcacctccgacccgtcgcctcccccgcctcgcggctggcctctgcctcctgctccagcggcattcagcgccgccggtatgggcgatattcgtcgctctggtggaccgcgcgacggcagtggcggagagcaacttaactaggaagtacttcgccacggcggtgatggacttgcagcaacggttcacgtcggagttcgttgctggcatctcgcgagatgcccccgacccatcatccatttcacgcgccagcaagaaagtagataagaacacattgcattttcagtttttgatgtcgaacacaatcgttcagctctacttttctgtgcaagtaaccacaatactttattacccatatgcatgatcttggtcgtgtgaatttcacagagctttcaaccatacatcttctggtcatctgttctgcactttaaacagaagatgtcccgtcctggataactttgggaagccagccatcatagccccagacatcataaacccatggtggttgctccttgaagaagctgtgaagagtgctggcaacaagcttggcaagttagagatattcccagcctctactgacgcttgctacttctggcagattagattaccagcatttggtttttcatctatggcgaacaccccgatactgctccatgagaccatgaccataacgtggtttgtgtcattggttttggtttggccttctgatgccattaaggtatatctgttagacaactattcctagtaggctatcagcagatatagaaactcatcccaggatatcaatcctgtggttcactgcccgattacccagatcatgtttctataaactgggtactctgtggctatatattgtaacacgtttgttcatcttaatcaagccgtgtattctcca

SEQ ID NO: 116314 - DNA, 750 bp, Zea Mays
atcatatcgagatttcaatggtccacagggatgttttacagttctggtttgcatagtgcacaaatgtttattaatcaggttatattacctatgcattatgcagaaatgggtcatctctgtgttgtggctaggctgattacgctagggcagaattattgcatagactgcaggaaattctgcatctagatgtttctattaatttaaaggttccaaaactaggagaaaacatcacaaaactacaatatactattggatgctgccttgaaaaatgttgaaaaagcatacaggtgttacggtaaagaactgtggaactcctaatttctcttgtcgggatttggatgcatcttctgttttggacaaagtcttaagtcgcttggaagacaaacttctgaactttattgtccttggtgcttgttggaagggatctctagttctggtgagtttatctattcattggttctcaaagcatgtttgaatttgcatcaaacatcaaccacaagtatcattatatacttatctgaggtggtaaattcagttttcttctctcattgaccgatgtcgactgtttatattatgttttaatcataataaggtttacaaattaatatagttacttagattgtccttacaagcattttcatgcgccaatagccataattaggaaaaaatatgattcaacgatacatctcacaattcatgctgctgaatttaggtgctcatatgctccatattgattttctgtcactattt

SEQ ID NO: 116315 - DNA, 2947 bp, Zea Mays
aactctgctctggcactcgtctaatcgaccacaggcggcggcggcgccagcgccgcgcagccatgctgctcgaccccaagtccccaacgccacgccacgccaccccattgccgctgcgtaggcagcgtagctgccgctccagcacggcgccttcccgtcgcctgttgcccaactcgtcatgtggtagcctggtaggctggtagcccaaggcgcagggccctgtcactcgcgcgcaacttgctcgacggaatgccgcatcgggacgtcatctcggccacggccgccatcggcgcgctaacccgcggcggccgacaccgcgacgccctcgcactgttctcccgagttctcgccgacggcgtcgcgcccaacgagttcactttcggtaccgtcctgcgctcggccaccgcgctccgagtccgagccccgcgcgtcggcgtgcagctccacgcctgcgctgccaagctcggcctctgctccaacgtcttcgtcggcagcgctctcctcgaccactacgccaagatgggcgccatgacggaggcccagcgcgcgctcgatgacacccgcgagccgaatgtggtctcctacaccgccctcatcgccggtttgctgaagaatgggatgtttgatgaggcagaccgattgttccggcgcatgccagagaggaacgtggtctcgtggaacgcgatgatcggcgggtacagtcaagccggtctcggtgaggaggctgtcaatctgttcctggaaatgtgccgaggaggcgtctcaccgaacgaaagcaccttcccctgcgtgctcacctctgttgccagtgcagggacacttggcgtaggcagaagcattcatgcatcagccatcaagttcttgggcaagcttgacgtttatataggtaattctcttgtgagcttctatgccaggtgcggtagcttggaggacagtgttttggctttcaaaaaaatcaatcggaaaaacgtggtctcctggaacgcactgatctgcgggtatgcgcagaatgggaagggggaagaggctttggacgcttacagaatgatgagagcaacgggcctcaagccagataacgtcactcttctcggcttgctgtttggttgtaaccatactggtctagttgatgaaggttatgcattgttcaagaccgcagagagggagcaaccgggcatactgaaacctgagcattacgcttgtgtggttgatctactatctcgtgccaagcggttcgacgaggccagaaggtttcttgaggagctcccctttgagccaggcattgggttctggaaggctttgttagggggctgtcagattcactggaacagcaagctggctgagagcgttgcaaagcgcattcgtgcattggatccaaaggacacatcttcctacattcttctgtcaaatgtatactctgcgtcaggaagttggcagagtgtgtctatggtcaggtgggagattaaggagaaggggctgaagaggatcaccggctgcagttggattgaggtccaggagaaggtccatgtcttcttcaatggagactgtaggcatcaccagagtgatgaaatttattcgatgctcgaatcatgtttttattccatggaagatgaaggtgaacactcaattgtgtgatgataaccaatgagtacccaagtgtgtcaaatgtggtttacttgtcatcatctttttaatcttacatgtggaaaacactagaccgtactgaacttcggtgatgttgctggaagaatgaataatcagattccagccatcatgcactgctgtagcaacaataaaagtcactccctcgatcccaacggcaaaggaaaggtgcaagttcatgccctaaagacgagaacaaacgaaggtgggcctccggtcagatacatgttgccagaaatcgtccaagctcccgctctcttgccatttttgttggtagattcaattagaagtccatgaacgcacattacatgaattatgaaaaactggccacaaggcaaacattgccacagaccagattttgcatagcactgccagctgatttgttatctgtactatctcacaatcctttgataaatgttatttatccccctgaacaaattacatgattcaggtgattgaaccccagtgaatacgaagcaagatattggcgccaaaaattgtacggctgtagcaaccccaaattaaaacagcgcctcctcaaggtttgaagcaaattatatcagcacaatttggaatatattagaaatttccacactacattgttcctcgagcaacctattagcactggcctaaaagtacgaggaaacgaaacagagccgtcgctccgtgcggcggcgatctaagaggaagtaaacttggtaacggccttggtgccctcggagacggcgtgcttggcgagctcgccaggaaggacgaggcgcaccgaagtctggatctcccgggaggttatggtgggcttcttgttgtagcgggcgagcttggcggcctcggcagccagcttctcgaagatgtcgttgatgaaggagttcatgatggacatggccttggacgagataccaatgtccgggtgcacctgcttgagcaccttgaagatgtagatcttgtacgtctcgacgctcttcttggccttcttcttccccttcttctcgccgccctccttgcccggcacgcgcttctccgccctgggcttcttctcggccttctcctccgtcggcttcttctccgcgggcttcttctcggccttgggcgccatcgggaattcgatcaaatggagcggcgaacgcgggatgggaagcggcggattgggaatttgttgattggaggtgacgagcgctggtggctttggctgtgtgctatgctctggatggagaatgcgctgggattatatagaaaggtgaggcgggatgtgattggtggaagcggtggcggcgcggatcgctgagatggc

SEQ ID NO: 116316 - DNA, 859 bp, Zea Mays
aatttttagttcgctggagctgcagaaccagcaaaacgtcggtttgatctctcgatggtcatgacgcttacgagagacgaagcagaggggagcaaggatatgcagggcgtccgggcgcacgccgaggagctgtccacgctgtcgtcggcggtggcggcaggcaccgacggcacgccgcggccgccgtcctcgggcgccgcagcccgcagggccatggcggccgagggcgtgttcgagtgcaagacgtgcagcaagcgcttcccgtcgttccaggcgctcggcgggcaccgcaccagccacacgcggctgcaggcgcggacgatgctcagcgaccaggcggcggccgagagggacagggcgcgggcgcacgagtgcgccgtctgcggcctcgagttcgccatgggccaggcgctcggcggacacatgcgccgccacaggggcgaggcgccgccgccagccgcgcagccggcggaccgggacatgccggacctcaacctgccgccgttggacgacggtaacggcagcgccgatggccaaggtccacggcggtcggaagacgatcgcggttcttccaagcctcagctgctcaacctgctcgtatagcgtagcgtgcacaaacggatgcgtgcgtggtgattcggagttgtaaatgattggtgactgaagttttagaaccagaacatgcatgaaatggaattcttcgatggttagcttagtttagcttcatagtttgatcctggattcagtcagttttttttttcctttctagagctattgcctattggtcggttcaatccatttgttgtatgtaaaattgtcttgatggttcggtggaataaagttagaacacccagtttaa

SEQ ID NO: 116317 - DNA, 1525 bp, Zea Mays
aattttcaggtgtagcctattcacccctcctctaggctactttcaagatgttaataattcatatttaatttcagctcattatctaactaccaactaccgatttgccattagataattaatttttaccactaatagatgcaatcagatcccaattgttcccagaagcggccatagtagttatttgttcaccaaactaattgcaaacgtcatcctaggcaatcataacgtgttcattctacgcaatcataacgtggtcaatacgcataggagtagcgtagcaaattatggagatactcccagcttcagtcaaaccttcggtgatgcagtaagaccttcacggtagcatataacgcaaccgtgttggaaacttgtactagtgcttttgtaatgctgcttttgaaccaagctcgtgcaacgatagatagccagacaaatggaatccagaatcacgtggtcaaacggtaccaaatcccaactggtatagggtccccaggtcagccttagtcagcattacatcgttcacggttctgtgtcaaagcagagcggttgtaagcgtagcgtgacacgccgctgagggaaaacacgaaaaaggccatatacaataggaaactgcaagatacgtgtgccgtgcttgtgtcgtgcacttttgctgcaaatgtaaaggttagaaggtacatgaagccattccattgatcaggttagcggtcgtaagagaacaaagaattaccccaccattgctccagcagaaaatataaaaacagaagtccaaataaaataccaatgtaatatcgtaatttcattccgagacatgccaaccaccaaagctcatatagaaacaaaggaagcgaacaactgcattccaaacctgaagtcgttttagattttctagattcataagtgtgtgtgtctatcaatctatctatctatctacacacgcatacatctgcatgcttgcgcatctgtgcgtgtagacgtggtgtacatatctaaatacatagctttgctatgcacttaaaaaaaggtcaaaacaacttacaattcaggatggaggaaatattttttgaaagcagcacatcatcttttttgcgaaaaaagaaactttagaaaaaaaacataaatatggtatccaaaagtcacctaagttttgtccatgtaaaactttctgaagtttgactaggttttagaacatattagcaacatttgtatctccaaataagctcatttttaaaatacagtcaatgactaatctaattatacttaaaaataacaatccctttatatatttggtccaataaaaaatattgattcctcaagaagtgataatgatacctttgtgagagtggggatagcttttatatcaacaatttgtctagtcaagtggtaaactcaagctcagtgaaaaccaagcttgaccgtgagacttattataagatataaagacaaatctcaagcaatatttgccatacaaaacaagttgacgtacttgttttatttcttgaaagaatcagaaattcaagaggaaaag

SEQ ID NO: 116318 - DNA, 612 bp, Zea Mays
aattttcaggtgtagcctattcacccctcctctaggctactttcaagatgttaataattcatatttaatttcagctcattatctaactaccaactaccgatttgccattagataattaatttttaccactaatagatgcaatcagatcccaattgttcccagaagcggccatagtagttatttgttcaccaaactaattgcaaacgtcatcctaggcaatcataacgtgttcattctacgcaatcataacgtggtcaatacgcataggagtagcgtagcaaattatggagatactcccagcttcagtcaaaccttcggtgatgcagtaagaccttcacggtagcatataacgcaaccgtgttggaaacttgtactagtgcttttgtaatgctgcttttgaaccaagctcgtgcaacgatagatagccagacaaatggaatccagaatcacgtggtcaaacggtaccaaatcccaactggtatagggtccccaggtcagccttagtcagcattacatcgttcacggttctgtgtcaaagcagagcggttgtaagcgtagcgtgacacgccgctgagggaaaacacgaaaaaggccatatacaataggaaactg

SEQ ID NO: 116319 - DNA, 103 bp, Zea Mays
aggaatttaggagtattttatttgcaacaggagtatgggtgtgcatgacagagtttggtcaacaaatgagacacgtgcgccgtatactttgcacgaagctaag

SEQ ID NO: 116320 - DNA, 2175 bp, Zea Mays
gggaggcggcacccacgtgaccggctcgaccccacgccgccctccctccctgcctggcatgcgcatgcgcccgatcgcgccatgtctccctctcctcccgcgcctctatttctaccgccccgccggcgctacccgccgcccgcgctctccatccatccccgtcccccgcgatcgccgagctctacctcctccagcacacgtcccgcggcagcatccgtcagagaagctagctagcgcttcgatccccgatccgtgtcgtagacgacagcggggccccccggcggccggttgtttctcgcagctcggccggcggcggccatggacgacgacgcctcctcgtctccggcggcttcgtacatcagactggtgcagcatctgatcgagaagtgcatctgctacaagctgaacaaggaggagtgcatggagacgttggagaagcacgccaagatcatgcccgtcgtcacgtccaccgtgtggaaggagctagagaaggagaacagggagttcttcgagacgtacaagaaggatcggggaggaggaggaggaggccccaggaacctgcaggaagcggcggctgctggtcaccatcctcctccgcgtctccaagtccaacagagctgctgctcacaagagccggcgctggagcagaagaagcacccaccatctgatggagtacaggaacataatcgcgtcgtcgtggagaaggagaagaggaagcaggacccaccatcggcgtcggcgtcggctgatggacaggaacagcgcgtcgtggagaagaaggagaagaggaaggacccgccgtctgatggacaggaacggcgcgtcatggcgaaggagaacagccggaaggatccttccgcttcttccaagagatcaaacaaggacaacgactagagctctcgctcgctcgatcagccgtgccgctcctgtggctacgatcgaatgtggtcgatgcaggagatctcaggacgatcgaagattctcgatctacaggcgccgccgtaccgcgagcagggggagggagcgacggacggtgttgcgctgcatgcgtgtgggccctgcacacgtggcggccgggcgaatattcacccggcttagcgtgtttgaaggacacgacacgactggtggaggtggtggtggttactgtcagaagaaagaggccgttcttgtcccggtggtcggtctcgcgtctcgacgtacgtacgtgctctgctctggcgatccgtcgaacagacaggacggccgggcgccggggccaaggccaacaaagcacgcgagatttcttcctcccccaggcccagccaccctccttttggcgccgggcgcttctgagcaggacgtctacggtggctggcaaattcccaggcgtgcgcgtgacgtcttgtttggtcggagcagcctgcaacagcgcacgcagtacacagccggtccaagaggctcggccgggctcactcctgtcatgttgacatgtagctaggcacgtgcacacgtacttgtgaccgctacacaggccggtatgcatgccactcgctgtacgcgtccacaagaatcgagcccggcttttgtgcttcgggagtttggaaccaagtcgagtgtcgggcacgggggctggtagagctgacgtgctcgcatcgttgtctgctgctggccaccggccgtgctctggctgcgtggtctactctactgctcttccgtcgttttggccgtgctttccccccgggctgtacgcgtacgtcgttttcagctacccgccgccgatcgagccatgtttcaggcacgctactccaagcaagcaagctagctactgacggcacgggggtttcatgctagtatcacagatcacacacacacacacacacacacacggcagcagaaatggggtggaccagacattttccttcccgtacaaaacattcagctaataagtgccttttcccaagtcctaggaggacggtgtacctttccccctctcggttttggagtgctatgtacaacgaatatcctgggcgaaaatggattacgttagactgaaaattagaaaggtttcagctgaagtgactttgtagtagctacagacgagatgatgatctgtgaagaggtttagttgcttacatgaacagatgcaggggcctatgcagtttcgttttcagatgtgatgcatcaataatagtgtcg

SEQ ID NO: 116321 - DNA, 1414 bp, Zea Mays
gctctccatccatccccgtcccccgcgatcgccgagctctacctcctccagcacacgtcccgcggcagcatccgtcagagaagctagctagcgcttcgatccccgatccgtgtcgtagacgacagcggggccccccggcggccggttgtttctcgcagctcggccggcggcggccatggacgacgacgcctcctcgtctccggcggcttcgtacatcagactggtgcagcatctgatcgagaagtgcatctgctacaagctgaacaaggaggagtgcatggagacgttggagaagcacgccaagatcatgcccgtcgtcacgtccaccgtgtggaaggagctagagaaggagaacagggagttcttcgagacgtacaagaaggatcggggaggaggaggaggaggccccaggaacctgcaggaagcggcggctgctggtcaccatcctcctccgcgtctccaagtccaacagagctgctgctcacaagagccggcgctggagcagaagaagcacccaccatctgatggagtacaggaacataatcgcgtcgtcgtggagaaggagaagaggaagcaggacccaccatcggcgtcggcgtcggctgatggacaggaacagcgcgtcgtggagaagaaggagaagaggaaggacccgccgtctgatggacaggaacggcgcgtcatggcgaaggagaacagccggaaggatccttccgcttcttccaagagatcaaacaaggacaacgactagagctctcgctcgctcgatcagccgtgccgctcctgtggctacgatcgaatgtggtcgatgcaggagatctcaggacgatcgaagattctcgatctacaggcgccgccgtaccgcgagcagggggagggagcgacggacggtgttgcgctgcatgcgtgtgggccctgcacacgtggcggccgggcgaatattcacccggcttagcgtgtttgaaggacacgacacgactggtggaggtggtggtggttactgtcagaagaaagaggccgttcttgtcccggtggtcggtctcgcgtctcgacgtacgtacgtgctctgctctggcgatccgtcgaacagacaggacggccgggcgccggggccaaggccaacaaagcacgcgagatttcttcctcccccaggcccagccaccctccttttggcgccgggcgcttctgagcaggacgtctacggtggctggcaaattcccaggcgtgcgcgtgacgtcttgtttggtcggagcagcctgcaacagcgcacgcagtacacagccggtccaagaggctcggccgggctcactcctgtcatgttgacatgtagctaggcacgtgcacacgtacttgtgaccgctacacaggccggtatgcatgccactcgctgtacgcgtccacaagaatcgagccc

SEQ ID NO: 116322 - DNA, 975 bp, Zea Mays
gctctccatccatccccgtcccccgcgatcgccgagctctacctcctccagcacacgtcccgcggcagcatccgtcagagaagctagctagcgcttcgatccccgatccgtgtcgtagacgacagcggggccccccggcggccggttgtttctcgcagctcggccggcggcggccatggacgacgacgcctcctcgtctccggcggcttcgtacatcagactggtgcagcatctgatcgagaagtgcatctgctacaagctgaacaaggaggagtgcatggagacgttggagaagcacgccaagatcatgcccgtcgtcacgtccaccgtgtggaaggagctagagaaggagaacagggagttcttcgagacgtacaagaaggatcggggaggaggaggaggaggccccaggaacctgcaggaagcggcggctgctggtcaccatcctcctccgcgtctccaagtccaacagagctgctgctcacaagagccggcgctggagcagaagaagcacccaccatctgatggagtacaggaacataatcgcgtcgtcgtggagaaggagaagaggaagcaggacccaccatcggcgtcggcgtcggctgatggacaggaacagcgcgtcgtggagaagaaggagaagaggaaggacccgccgtctgatggacaggaacggcgcgtcatggcgaaggagaacagccggaaggatccttccgcttcttccaagagatcaaacaaggacaacgactagagctctcgctcgctcgatcagccgtgccgctcctgtggctacgatcgaatgtggtcgatgcaggaggtacggtacatctatcgatcgagagagagagctgctctctctagctatctatagactatatatatatcagcatcggtcgccagtgtgattatgtgtgtaggaggctgcatgaccatgtgtattatgggtagacagattgattaaacctagtatgatcc

SEQ ID NO: 116323 - DNA, 976 bp, Zea Mays
gctctccatccatccccgtcccccgcgatcgccgagctctacctcctccagcacacgtcccgcggcagcatccgtcagagaagctagctagcgcttcgatccccgatccgtgtcgtagacgacagcggggccccccggcggccggttgtttctcgcagctcggccggcggcggccatggacgacgacgcctcctcgtctccggcggcttcgtacatcagactggtgcagcatctgatcgagaagtgcatctgctacaagctgaacaaggaggagtgcatggagacgttggagaagcacgccaagatcatgcccgtcgtcacgtccaccgtgtggaaggagctagagaaggagaacagggagttcttcgagacgtacaagaaggatcggggaggaggaggaggaggccccaggaacctgcaggaagcggcggctgctggtcaccatcctcctccgcgtctccaagtccaacagagctgctgctcacaagagccggcgctggagcagaagaagcacccaccatctgatggagtacaggaacataatcgcgtcgtcgtggagaaggagaagaggaagcaggacccaccatcggcgtcggcgtcggctgatggacaggaacagcgcgtcgtggagaagaaggagaagaggaaggacccgccgtctgatggacaggaacggcgcgtcatggcgaaggagaacagccggaaggatccttccgcttcttccaagagatcagaacaaggacaacgactagagctctcgctcgctcgatcagccgtgccgctcctgtggctacgatcgaatgtggtcgatgcaggaggtacggtacatctatcgatcgagagagagagctgctctctctagctatctatagactatatatatatcagcatcggtcgccagtgtgattatgtgtgtaggaggctgcatgaccatgtgtattatgggtagacagattgattaaacctagtatgatcc

SEQ ID NO: 116324 - DNA, 2348 bp, Zea Mays
cggagggccaatttgcaaggaacgaagaaaaatgcaaccttgcgctgttccgctcgtttattcttcatccctgtccaccttcccacacacccaccaggccaccaccaggtcaccaaccacgcacgcgcctccgcctgcccgctctcccgccatgaagcagctccacaagtcttcccctacccacgcgccatcgccggcgcacgcaccggctcccaaggccgccaagacggcgcgcccaggtccgcgctcctggatcggctacgtcctccgcgagcagcgcctcctcttcgtcctgctcggtgcgctcatcgcctccaccttcttcctcctccggccctacctctcgctctccccgtcttcccacctccccgacgcccgcccgctcttctccttcgccacccgctccggtgttcccgccggcttccgcccgccgcagcgccgcgtcgtcgtaacaggcggggcagggttcgtcggcagccacctcgtcgaccggcttctggagcagggggacagcgtgatcgtggtcgacaacttcttcaccggcaggaaggagaacgtcgcgcaccacctccggaaccccaggttcgagctgctccgccacgatgtagtcgagccaatcctcctcgaggtggaccggatctaccacctcgcgtgccccgcgtcgcctgtgcactacaagtacaacccaatcaagacgatcaagacaaatgtcatgggaactttgaatatgttgggtctggcgaagcgaattggtgcaaggtttttgttgactagcacaagtgaagtttatggtgatccgcttgagcatccacagaaggagtcatactgggggcacgttaatcctataggtgttaggagctgttacgatgaggggaagagaacagcagagactttaactatggactatcatcgtggtggtggtgttgaggtgcgtattgcccgtattttcaatacatatggtcctcgtatgtgcctcgacgatggtcgtgtggtcagcaattttgttgcacaggcactgcgaaggcaaccgatgacagtctatggtgacggaaaacaaactcgaagtttccaatatgttgctgatctggttgctggactgatggctctaatggagagtgatcatattggtcctttcaacttgggaaacccaggagagtttaccatgttggagctagcacaggttgtgaaggaaacaattgacccaatggcaaccattgaattcaaacccaacacagctgatgatccccatatgagaaagccagatatcaccaaggctaagcaactgctacattgggagccaaaggtctctctcaaagaaggccttccgctaatggttcaagatttccgtcaaaggatctcggatgagtaatcaaagcaattcttttttccccgaatgtgccatgcacgtgtttgtaatcagagcaatcgtatgatactggtcaccggtttgattctgaacgatgctgcaactacagtcaggagctcttcaccaactggaggcctggagccctgtagtacgatgtactgtgtacacaacagactgtagaatcacgcaggccccatttggagtgtggggattccatagtatttctacgacatagtactatttctgtgaaatagctgaaaagttcatgggttcgtgttggtttttttatatatatcttggtgaggcagaacagaagcaatcaattgttttttttgtgcatgtgtgaaattcctgaattgtgggtggtgagagataggatacaatgatgtatttcaggagcttttgtaacacttgaacattcatcatgtgaaaaatgtaactgaatgtgttggccagctcactgttgtcgttgcacattcaactggcaatccacaacttcattccccttcctcaaaatgtttgacagataaagtgaaaattggcattgtcttatatacagtacctgagcaattttcttggatacacctgccatcagaagctgactttcaagacatcgaagcttgcaacatagtaggtgtttctgcaaattccgtagccttctacgtacttgagatgcacaatgaaactaagcgctctgttcgagctgacgttcccacccatttctgttacgtcagcaactctgacaaaggcaaagccggtggcttcactgtgggtaccgcctcgtccctccgacaagcgcgatgtgggactcctgatcgtcgcggcggccggcggacgccgaagaacctgagggaccaaggaaatggcacctctatttcccgaggctgtcggctgcgccatcgccggcaaacgaggccttcacggctacccctccatttccatagtctggttgccctgccttttgcacctgggacacatcacc

SEQ ID NO: 116325 - DNA, 2876 bp, Zea Mays
cggagggccaatttgcaaggaacgaagaaaaatgcaaccttgcgctgttccgctcgtttattcttcatccctgtccaccttcccacacacccaccaggccaccaccaggtcaccaaccacgcacgcgcctccgcctgcccgctctcccgccatgaagcagctccacaagtcttcccctacccacgcgccatcgccggcgcacgcaccggctcccaaggccgccaagacggcgcgcccaggtccgcgctcctggatcggctacgtcctccgcgagcagcgcctcctcttcgtcctgctcggtgcgctcatcgcctccaccttcttcctcctccggccctacctctcgctctccccgtcttcccacctccccgacgcccgcccgctcttctccttcgccacccgctccggtgttcccgccggcttccgcccgccgcagcgccgcgtcgtcgtaacaggcggggcagggttcgtcggcagccacctcgtcgaccggcttctggagcagggggacagcgtgatcgtggtcgacaacttcttcaccggcaggaaggagaacgtcgcgcaccacctccggaaccccaggttcgagctgctccgccacgatgtagtcgagccaatcctcctcgaggtggaccggatctaccacctcgcgtgccccgcgtcgcctgtgcactacaagtacaacccaatcaagacgatcatatccttcacgactggatctcgccggttgattttgcttacattgaaagcgactcgttctgatcccatcgtcttcttctcttttttgtatttctggtggcgggtggcgggtggcgggtggcggggcgggtgggttagtgtcagataggaatggaggaaaattggggatccgtagggaagaataatgttttgttaaatgcgatcactcagactgcatcatctgtatgttctcaaactggatttctttctttcttaaagcagccaaaaagttaaaacgattatggctagagatccgtttagataaacatcatttgcttgctctggttttattgaacaacgttagagatcagttgatgctttgctcaagattcttgaaataattacctctcagtatatgagttcagttatttgcacatgcacgaatatgaggggaaggatgtcgccattttttgcagcatgtgtccattcagtatccatatagatggtgtgtttcttttgtctcgaatttggacttcttaacactttgtacaagacaaatgtcatgggaactttgaatatgttgggtctggcgaagcgaattggtgcaaggtttttgttgactagcacaagtgaagtttatggtgatccgcttgagcatccacagaaggagtcatactgggggcacgttaatcctataggtgttaggagctgttacgatgaggggaagagaacagcagagactttaactatggactatcatcgtggtggtggtgttgaggtgcgtattgcccgtattttcaatacatatggtcctcgtatgtgcctcgacgatggtcgtgtggtcagcaattttgttgcacaggcactgcgaaggcaaccgatgacagtctatggtgacggaaaacaaactcgaagtttccaatatgttgctgatctggttgctggactgatggctctaatggagagtgatcatattggtcctttcaacttgggaaacccaggagagtttaccatgttggagctagcacaggttgtgaaggaaacaattgacccaatggcaaccattgaattcaaacccaacacagctgatgatccccatatgagaaagccagatatcaccaaggctaagcaactgctacattgggagccaaaggtctctctcaaagaaggccttccgctaatggttcaagatttccgtcaaaggatctcggatgagtaatcaaagcaattcttttttccccgaatgtgccatgcacgtgtttgtaatcagagcaatcgtatgatactggtcaccggtttgattctgaacgatgctgcaactacagtcaggagctcttcaccaactggaggcctggagccctgtagtacgatgtactgtgtacacaacagactgtagaatcacgcaggccccatttggagtgtggggattccatagtatttctacgacatagtactatttctgtgaaatagctgaaaagttcatgggttcgtgttggtttttttatatatatcttggtgaggcagaacagaagcaatcaattgttttttttgtgcatgtgtgaaattcctgaattgtgggtggtgagagataggatacaatgatgtatttcaggagcttttgtaacacttgaacattcatcatgtgaaaaatgtaactgaatgtgttggccagctcactgttgtcgttgcacattcaactggcaatccacaacttcattccccttcctcaaaatgtttgacagataaagtgaaaattggcattgtcttatatacagtacctgagcaattttcttggatacacctgccatcagaagctgactttcaagacatcgaagcttgcaacatagtaggtgtttctgcaaattccgtagccttctacgtacttgagatgcacaatgaaactaagcgctctgttcgagctgacgttcccacccatttctgttacgtcagcaactctgacaaaggcaaagccggtggcttcactgtgggtaccgcctcgtccctccgacaagcgcgatgtgggactcctgatcgtcgcggcggccggcggacgccgaagaacctgagggaccaaggaaatggcacctctatttcccgaggctgtcggctgcgccatcgccggcaaacgaggccttcacggctacccctccatttccatagtctggttgccctgccttttgcacctgggacacatcacc

SEQ ID NO: 116326 - DNA, 2345 bp, Zea Mays
cggagggccaatttgcaaggaacgaagaaaaatgcaaccttgcgctgttccgctcgtttattcttcatccctgtccaccttcccacacacccaccaggccaccaccaggtcaccaaccacgcacgcgcctccgcctgcccgctctcccgccatgaagcagctccacaagtcttcccctacccacgcgccatcgccggcgcacgcaccggctcccaaggccgccaagacggcgcgcccaggtccgcgctcctggatcggctacgtcctccgcgagcagcgcctcctcttcgtcctgctcggtgcgctcatcgcctccaccttcttcctcctccggccctacctctcgctctccccgtcttcccacctccccgacgcccgcccgctcttctccttcgccacccgctccggtgttcccgccggcttccgcccgccgcagcgccgcgtcgtcgtaacaggcggggcagggttcgtcggcagccacctcgtcgaccggcttctggagcagggggacagcgtgatcgtggtcgacaacttcttcaccggcaggaaggagaacgtcgcgcaccacctccggaaccccaggttcgagctgctccgccacgatgtagtcgagccaatcctcctcgaggtggaccggatctaccacctcgcgtgccccgcgtcgcctgtgcactacaagtacaacccaatcaagacgatcacaaatgtcatgggaactttgaatatgttgggtctggcgaagcgaattggtgcaaggtttttgttgactagcacaagtgaagtttatggtgatccgcttgagcatccacagaaggagtcatactgggggcacgttaatcctataggtgttaggagctgttacgatgaggggaagagaacagcagagactttaactatggactatcatcgtggtggtggtgttgaggtgcgtattgcccgtattttcaatacatatggtcctcgtatgtgcctcgacgatggtcgtgtggtcagcaattttgttgcacaggcactgcgaaggcaaccgatgacagtctatggtgacggaaaacaaactcgaagtttccaatatgttgctgatctggttgctggactgatggctctaatggagagtgatcatattggtcctttcaacttgggaaacccaggagagtttaccatgttggagctagcacaggttgtgaaggaaacaattgacccaatggcaaccattgaattcaaacccaacacagctgatgatccccatatgagaaagccagatatcaccaaggctaagcaactgctacattgggagccaaaggtctctctcaaagaaggccttccgctaatggttcaagatttccgtcaaaggatctcggatgagtaatcaaagcaattcttttttccccgaatgtgccatgcacgtgtttgtaatcagagcaatcgtatgatactggtcaccggtttgattctgaacgatgctgcaactacagtcaggagctcttcaccaactggaggcctggagccctgtagtacgatgtactgtgtacacaacagactgtagaatcacgcaggccccatttggagtgtggggattccatagtatttctacgacatagtactatttctgtgaaatagctgaaaagttcatgggttcgtgttggtttttttatatatatcttggtgaggcagaacagaagcaatcaattgttttttttgtgcatgtgtgaaattcctgaattgtgggtggtgagagataggatacaatgatgtatttcaggagcttttgtaacacttgaacattcatcatgtgaaaaatgtaactgaatgtgttggccagctcactgttgtcgttgcacattcaactggcaatccacaacttcattccccttcctcaaaatgtttgacagataaagtgaaaattggcattgtcttatatacagtacctgagcaattttcttggatacacctgccatcagaagctgactttcaagacatcgaagcttgcaacatagtaggtgtttctgcaaattccgtagccttctacgtacttgagatgcacaatgaaactaagcgctctgttcgagctgacgttcccacccatttctgttacgtcagcaactctgacaaaggcaaagccggtggcttcactgtgggtaccgcctcgtccctccgacaagcgcgatgtgggactcctgatcgtcgcggcggccggcggacgccgaagaacctgagggaccaaggaaatggcacctctatttcccgaggctgtcggctgcgccatcgccggcaaacgaggccttcacggctacccctccatttccatagtctggttgccctgccttttgcacctgggacacatcacc

SEQ ID NO: 116327 - DNA, 976 bp, Zea Mays
tcatgttgagttcactggttgtaaagccattccgaagggcatagccatggatcgccaaagcgaggatgttaactacgaagaggagtttgtcgtgaatccccggggcaacaagctgttcgtttgcagctggacaccacagcaggatcgccagccaaaagctctgatcttcatctgtcacggaattgcagcggagtgcagcatatcgatgagggacacggcggctcgattggtgcgggcaggatatggcgtttacgggatagatcacgagggacacggcagatcatctgggagcaggtgctacgtgccaaacttcggcaacatcgtcgcggattgctccagtcatttcacaagcatctgcgagaaaccacagaacagagggaagaggaggttcctgtacggcatctccatgggcggaagcgtggcccttctcctccaccggaaggcaccgggctactgggacggcgccatcttgctcgctccgatgtgcaagatctctgatgacatgaggcctcacccgatcgtggtcagcgctctgacgatggtttgtgctgttgcgcctggttggaaggtcatacccacacctgatatcattgacaaagtctgcaaagatccagagatgagaaaagaggttcgttccaatccgtatatatacagaggaaagctccccctgaaaacttgccatgagctcctgatggtcagccttgatatcgagaagaacttggatcaggtgacgatgccgttcctggtcctgcacggcggggatgacgtcgtgaccgacccttcagtcagcaagctgctattcgagaaggcaccgagcaaggacaaaaccttcaagctgtaccccgggatgtggcatgcgctgacagccgaactccctgacgacgttgagcgtgtgtatgcggacattatcacttggctagaggaaagagcggtcatttgtgcagctagcgtttctagtgccacaccacgtgtctga

SEQ ID NO: 116328 - DNA, 76 bp, Zea Mays
ccgtcgtatctgcccatacccggcccgctaaacgggccgtgccggcccgggcccgtaaccgaccgtgccgggccgt

SEQ ID NO: 116329 - DNA, 1421 bp, Zea Mays
aaggagtataagccgattgataaacccctctctagctacagggatccttctgctttaaagcatgccgaaacttcttccactcccttcctaaaacacaacaaccacctctaccaagaccaaccaaaccacaaaactcgagtcaccaaacacacgaagcataaggcaagagcgatggcaaaacatggcccccaaatccatgaccaaccaatccaagaagaggactacatagacatggatctgagctcaccagcagcatcgggagcggccaccaccaccgcaagcttgttctgctacaacagtgccatggcagcctcgccacaacactcgcgggagtttgaattccacatgtcggctccacctgacctgtgggagcccgtggcgtccccagcagatgagctcttctacaagggcaagctgctaccgctccatcttcccccacgcatacagatggttgagaagctacttgagagcgcgtctgagaagggcttactttcagcaagcactgccccagcaacaccataccagtcagcagcaaactcatgttatgccagcagcggtgagctcgctgcagagtactacttccatgagtgcatatccactggtagtgatgctgccgaggaggcggcagcctgtgagaagaagccatggtccaagaagctcaagttcatcaggcacctcaacctcggcctcaagcttaaggcgtcgaaagcttatctgaagacaatatttgctagtaaaggagggaatccaggtggcaagaatggtgtacctggagcaaatgaactgtccagcacacagttcaatacctggaggaagaacccatttggccacatcggaagcaagaggtacatagcctcacccatcagcaatagcaccacggtaggaggcaagtttaaagagggcgagtgtggccatagaagatccttctccagcatcatcatccgatactcgtcatcaaacaagacatcctctgtttcgtcgtcgtcgtcatgttcttcgtcaaactcatcatccttctcaatcccaagctcaaatggctctggcggtgttggaccagtgctgaggaggagtagcagtgcaagttcagagatggacaatccaattcaaggcgcaatagcatactgcaagaagtcacagcagctcgcctcagtgaggaagagtgcaagtgacgcagggttccgtttcatgtcatcatcagcatcaaaaatagcagcggaatccgaagacgctgatggtatatttgagattacccgaaatacaaatgtaaattcagtgtccccccaataattttgtactcttttgatcttgagctttctgtagatatgatatatgtctgatgttatggccttaaggaatatcaatgtaagcaatttctgttcaaggacaaacagttttatatgcaacaacaaatattgaaaaat

SEQ ID NO: 116330 - DNA, 773 bp, Zea Mays
gtctgttgccggcccacagaccataggattgtggctgccactcaccacggcccattcagtcgtaaccctagcaggccgccacgaccacgaggtgcatccatgagaggagatcgaaggaaactccaattccagtcgcccccatccgttgctcatctcaccagaagcgaagccggaggagggaggaaggagatcacgagcagccagagccggaggccgagaggatgaagacgttcgacccgtggccggtcttcttccaccgggagtggaagcgcaactgtcccttcctcacggggttcaccatcaccggcttcatcatcaccaagatgacagccaacttcaccgaggaggacctcaagaactccaagttcgtccagtaacacaagaagcgctgaccaaccggaaacatttttagtctattagctcagcgggagctctcacctcgaacaaaaaaccaagcaaaaaatctttggaccaaacctccaagacttgatgcttgtcctattgaatcgaaattttggggcacctatgctcagcatgatctcctttcttgggctgaagcagagttcttgcattggtggattcccaaagattgccctctcacgccttcttcgaaggcaactattgcagctgcatttagtacagatgggagagtacttgcatctacacgtttgtattttttgttaggagtttatggacctgctgataaagtaattgatatattatcaaactatgttgtaggaagaggagctggaagcaaggatcagattgcttga

SEQ ID NO: 116331 - DNA, 100 bp, Zea Mays
gtccatctgtcggtaaaactgattatgcgtggcgcaaagtctgtcgggaaaaagtagcatcagatcgtttgtcggtaaatggatgtcacgatcctatagc

SEQ ID NO: 116332 - DNA, 2781 bp, Zea Mays
ataaccatcccgcagacccccacaggccacagtccaatcggcggccctctcgcccgtcctctcctgtaagccaagccacacttcctgcggccggaccggacgcctggactcgcaagtcgcaccagcctacttgttacttaagctcggctcgctcgcttttgcaccagtgagcagaccggcagagaaactgcagctacgtgcttgcatgaaatggcgcccgccgtgcaggaccgcctcccgttcctagcctcgcccccggcgcccccgcccgcgcgggagaggggccggaacccgtccctcgccgagatgctccgcctcgtcggcgccgccaccaccaccgtcgacacggcggacgacgacggcaccgcgtcggtgttctcgctcccgctcgcgctcgccaccactcccggacgtgacgcggtggcggggggcgcgagcgcgacgaccatcgcgcgcaccgtgcacttccgcctggcgttcagcaacctgacctacagcgtccgcgccaagcagcgccggcgcggccccagcctgcccctgcagagccgcgtcaccgccgccgccgccgcggcggcgcccgacgcgcgcgcgccgcgcacccgggcgctgctggacggcgtctccggggaggcgagggagggcgagatcctggccgtcatgggcgccagcggctccggcaagtccacgctcatcgacgcgctcgccaaccgcatctcccgcgacgcgctcaagggcgccgtcacgctcaacggggagcccctcgtcggcgacatcatcaagtccatctccgcctacgtcatgcaggacgacctgctgttccccacgctcaccgtcaccgagacgctctccttcgccgccgagttccgcctcccgcgggcgctgccgccggccaagaagcgcgcgcgcgtgcaggcgctcatcgaccagctcggcctccgcgcggcggccgacaccatcatcggggacgagggccaccgcggggtgtccggaggagagcgccgcagggtctccatcggcaccgacatcatccacgaccccatcctcctgttcctcgacgagcccacgtcggggctcgactccacctccgcgttcatggtggtcaaggtccttcgccgcatcgcggagagcggcagcatcgtcatcacatccatccaccagccgagccagcgcatcctcggcctcctcgaccgcctcatcctcctctccggcgggcagacggtcttcagcgggccaccttccgccctcccgtcctacttcgccgagttcggcttcccggtgcccgacgacgagaaccgcgccgagttcgcgctcgacctgatccgcgagttcgagtcctcgcccacgggtaccaagccgctcgtcgacttccaccgcacatggcagcacatgcacgcgcggagccatggccaaggctcggcgggcgctgctggtcagacgttggcggcaacggcaccaacgatgccgctcaaggaggccatcagcgcgagcatttcgcgcgggaagctggtgctgggctcggacggcgtggccggagaggccgcgtccgtgcgcacctacgccaacccgttctgggtggagatgaaggtgctgacgaagcggtcagcgatcaacacgcgtcgcatgcccgagctgttcctcatccgtctcggagccgtggtggtcacgggcgcgatcctcgccaccgtcttcttccggctggaccagtcccccaagggggcgcaggagcggctgggcttcttcgcgttcgccatgtccaccatgttctacacctgcgccgacgcgctgccggtgttcctccaggagcgctacgtcttcctgcgcgagacggcctacggcgcgtaccggcgcgcctcctacgtgctctccaacgccatcgtctccttcccgccgatcgtggtgctctccctcgccttcgccttcaccaccttcttcgccgtcggcctcgcgggcggcgtgtccgggttcgcgttctacacgctggccatcctggcgtcgttctgggccgggagcggcttcgtcacgttcctctccggagtgataccgcacgtgatgatcggctacaccgtggtggtggccatcctggcctacttcctgctcttcaccggcttcttcatcaaccgggacaggatcccggcctactggatctggttccactacctgtcgctgatcaagtacccgttcgagggcgtgctgcagaacgagttcgggcgcggcggcgagtgcttcgtgcggggcgcgcagatgttcgacaactccccgctggcggggctgccggacgccgtgaagggccgggtgctcgcgtccatcagctcggcgctcggggtgcggatcggcgccgacacgtgcgtggtcacgggccgcggcgtgctgcaccaggcggcggtgacgcagctcggcaagtgggagtgcctgctcgtgaccatggcttggggtttcctcttccgcatcctcttctacttcagcctcgtgctcggcagcaagaacaagagaaggtgatcgcgccacggtacggactagggatacgcgagcgcgctcgcgcgcgccgttgtacatttgaatggtgggaactcgcaggccatggtccacggggagaaagtatgcgtgcagaaggaggtgaaggaagacattaattaggtggtggtgattgtacctgtttttttttgccttcttctttggtgatttgttgatagaaacaagtggtttttcaagtatacatatgcttggatccactagcttttcgttcttttttatgtgctcaaagtcgaaagattacaaaagtga

SEQ ID NO: 116333 - DNA, 878 bp, Zea Mays
actcgtctcatctcttccatacgaccataccctacctccaaattcccaattctcaacctctcctccgagttcgagtgaccatgtcggggcgcggaaagggcgggaaggggctgggcaagggcggcgcgaagcgtcaccgcaaggtcctccgcgacaacatccagggcattacgaagccggcgatccggaggctggcgagaaggggtggcgtgaagcgcatctcggggctcatctacgaggagacccgcggcgtgctcaagatcttcctcgagaacgtcattcgcgacgctgtcacctacacggagcacgcccgccgcaagaccgtcaccgccatggacgtcgtctacgcgctcaagcggcagggccgcaccctctacggatttggcggctgaggggtcaggggtgtcccccagctgctgctggtcgttgcagaagtcttgggtcgcggtcacgaaatggagtgaggcgagagtattcttgcccatgtgcttagtttcgtaggcttatcactctagactctagtgccttggtccagtagtagcatacgacttgtactgcatttccttgttctgaacctctaaatatgatgagatgtggattcacttgatctcacaaacaaccagttaattcggatcaaatttgtactgactttctcgatcatcccagtttttcatctaaaagagcatttgtcaattgtgcagtgtcatcttggtgaacaagctgcttccaatctgtgaacaatgtctagtagtaagcaaccagtgccgttttggtaacttttgtgtagacgtggtaatggatcaagatccaaatgtttcttcataatttgtttgcgcccctaattaatttgagttttaaaataaatagaaatagaaccc

SEQ ID NO: 116334 - DNA, 267 bp, Zea Mays
atgtcggggcgcggaaagggcgggaaggggctgggcaagggcggcgcgaagcgtcaccgcaaggtcctccgcgacaacatccagggcattacgaagccggcgatccggaggctggcgagaaggggtggcgtgaagcgcatctcggggctcatctacgaggagacccgcggcgtgctcaagatcttcctcgagaacaccgtcaccgccatggacgtcgtctacgcgctcaagcggcagggccgcaccctctacggatttggcggctga

SEQ ID NO: 116335 - DNA, 261 bp, Zea Mays
atgtcggggcgcggaaagggcgggaaggggctgggcaagggcggcccggcgatccggaggctggcgagaaggggtggcgtgaagcgcatctcggggctcatctacgaggagacccgcggcgtgctcaagatcttcctcgagaacgtcattcgcgacgctgtcacctacacggagcacgcccgccgcaagaccgtcaccgccatggacgtcgtctacgcgctcaagcggcagggccgcaccctctacggatttggcggctga

SEQ ID NO: 116336 - DNA, 914 bp, Zea Mays
atgactggtatcgtgagccgtgaatttgaggtgttggccccgcatgaccaaaattacctcacgtgggcatctgatgtgcaaattgtgcttgggggcaagaagctcaaagtagcaatcggacttggccaaaaagatgaagtggccaccgacgagcaaaatgaccaagcattgcatttctgcggcatcatctctcgccaacactaaaaaatgagtacatgtcagagagaaaggcaagcattgcagcaacattttgagaggttaaaatacacagtcttgccccaagcacagcaagattgggctcgccttagatatgctgactttaaaattgtgggagaatacaatgcagcattgcaccgaatatgcaccaaactatctctttgtggtaaggtgataacaaatgaggaaaagattgaaaaaaccttgtctaccttccacccaagtgccatccaatctgctcgcaactatcgacaggacacatacaagcagtatagcgatcttatcgatataatgcaagtaaacgaggcacaagatgatgctttgaagacgaacttcaatgcttatccaaatggaaagggcattagcgctgaagttaatgtcgcctcgtacaagataagaaagcctatcagagaaatagaggcaagcatggtgctggcaagggaaagaaagaaaccacaatcaatcccatcaatgctcacagaaagaaaacaagcaaagagaagccacaacataagccatacggacttcaagaccaaacatgctacaaatgtggcgtgtggggacattagtctaaaatatgccaatcaccaaagcatgtcatagaagcatacaaggcaaagaacatgcacaaacaaaaacctgaggcccacttcactatggcaaccaacaatgaagccgtggaagaagaccccacactt

SEQ ID NO: 116337 - DNA, 6555 bp, Zea Mays
gcttcctcttgcccccccaccccaccccaccgccaccacccacccctcgcccgcaggtgggcccagcctccatcctcctcctctgagagcgagccggcggcggcgagcggcattgcgggttatctggtggagcgggacatggcggggtacggggaccggcgatcgccgccgctggagggcatcaccgtcgacggggccagcagggcccaatcgcccggggcgggtgcgggggcgggggcggggaggctgccgccgccgccaggaggcttcgcgcgcgggctcatgaagcagccgtcgcggctggcgtccggggtgcggcagttcgcttcgcgtgtgtcgatgaaggtgcccgagggcgtggccgggatgcggccgggacggatgacgcggatgcagtctagcgcgcagatggggctccgtggcttgcgcttcctcgacaagacctccggcggcaaggagggatggaaggccgtcgagcgccgcttcgacgacatggccaagggcagcggacgactccagaaggagagcttcggcaagtgcatcggcatgggggactccaaggagtttgccggcgagctgttcgtggcgctggcgcggaggcggagcctggagccggaggatggcatcaccaaagagcagctcaaggagttctgggaggagatgaccgaccagaacttcgactcgcggctgcgcattttctttgacatgtgcgacaagaacggcgatgggatgctcacggaagatgaggtcaaagaggttattatactgagcgcgtcagcgaacaagctagccaagctgaagggtcacgccgcgacctacgcgtccctgatcatggaagagctcgacccggacgaccgcggctacattgagatttggcaactggagacgttgctccggggcatggtgagcgcgcaggctcccgagaagctgaagcggacgacgtcgagcctggcgcggacgatgatcccgtcgcggtaccggaacccgctgaagcggcacctgtccaagacggtggacttcatccacgagaactggaagcggatatggctcgtgacgctgtggctggtcgtcaacgtcgccctgttcgtgtacaagttcgagcagtacaagcgccgaaccgcgttccaggtgatgggctactgcgtctgcgtcgccaagggtgccgctgagatcctcaagctcaacatggctctcatcctgctgcccgtctgccggaatacgctgacgacgctcaggtccaccgcgctcagccatgtcatacccttcgatgacaacatcaacttccacaaggtcatcgcgctgtccatcgcgatcgccacagcgatccacacgctcgcacacgtgacctgcgacttcccaaggctgatcagctgcccgacggacaagttcatggccaccttggggtccaacttccactacaagcagccgacttacctgggcttgctggagagcacacccggggttaccggaatcctcatgatcatcataatgtccttctccttcacgctggcaacacattccttcaggcggagtgtggtgaagctgccatcgccgctacaccaccttgccggtttcaatgccttctggtacgctcaccacctgctggtccttgcgtatgtcctgctggtggtgcactcctacttcatattcctcaccagggagtggtacaagaagacgacatggatgtacctgattgtccctgtcctcttctatgcctgtgaaagagtcatcaggaaatttcgtgagaacaactaccatgcgggaattgtgagggcagcaatttatccgggagatgtgctctctattcacatgaagaagccacagggtttcaagtacaagagtgggatgtatctgtttgttaaatgcccagaagtctcgcccttcgagtggcaccccttctctataacttcggcaccaggcgatgactacttgagtgtgcatatccgtacgctgggtgactggacatccgaactgcggatgctttttgggaaggcttgccaggcacaagtaacttccaagaaggctacccttacaagacttgaaactacagttgtggcagacgcccagacagaggacactaggtttcccaaggtctacatagacgggccatacggtgcaccagcacaaaattacaggaaatatgacattcttctgcttattggccttggaataggagcaactcctttcatcagcatactgaaggatatgttgaacaacctaaaatccaacgaagaggtggaaagcatccacggctctgagataggcagcttcaagaacaatggtccaggaagggcttacttctactgggtcaccagagagcaaggatctttcgaatggttcaaaggagtcatgaatgaggttgcagggagcgatcacagcaatgttatagagatgcacaattacctgaccagcgtgtatgaagaaggtgacgcaaggtcagctctgattgccatggtacagtcacttcagcgtgctaaaaacggcgtggatatcgtctccggcagcaagattcgaacacattttgcaagaccaaactggaggaaggtattctgtgatttggccagcgcacacaagaactctcgcataggagttttctattgtggatctccgacgctcacaaaacaactgaaggatctttcgaaagaattcagccagacaaccacaacccggttccatttccacaaagagaacttctgagacgtgtacccgaagatccgatggactggaaacataattgtatagggaaaaaatacgatagcattggcatagcagatttagttttacaagttttgatgtatgcggggttgtacaaaatatgtgtagaaagctagatgtcaccatcatacatagattctgaaatgcttgcagctatatatattgcattgcataagtgaaaccacttgcttcctaggataaccgagttctagatctcctgctttgaacacgcaaattttctcttttcagtctttctgcccgagctgtcattgcattgcgaataagggtgctattctgtttcctagaagattcttgtgtatcatcttgcactggcacaagtgccacagaacctggtgtgtcttcagcgccctgagaatttccaggtgcattcctgttctttggaggcctgcctctttttttaggctgcttatcagcagataaagatgtatcttttcgaggcctgcccctcttcctaggttgattactagcctgcaagccgtccactctaactatcgccatcttattgtttgtatcatttccctgggatagtgtaactatatgtgatgttttctccatactgtcatccactgtagcatatattttccttggtctacccacctttggtttggagtcagaaactgatcccttaagtttgcacttgtcgataacaagtgttttaagtggaacagttatgtccaatggcagtagaactttctcaagttcacgccattcaagatcttcctggtctccatcatcataaatgacggtgtaccagttgctttcaatgtcatacttggccactttcccgacgaaatatgtgtctccaaaaagcttacgcactttcctcccttctaaccattcaccaaaacgaggatcaacatgagattctgcgtcattttttactgcagattgagaaccagttgtgcaatcaaaaggaaaatctggaacgccattgataatgatggcaggctctttaggaactttgattatagatgtagtttctgactcttgcttgccatcagccccctccatggttttctatatggaaaatatggaagaatcaggaaacagattcatatatgctaacactaagaaagagttcaatcaagagttaacagtacaagcagcaatgaaccaagtaatccatggttcacaaactattatattgtgcaggatatagatgactgatgactctgaagttaatggaaaacactacttattggaaaacacctaggaagaactgatacaacatgggactttcttacaccaatggtgggtttcaacatggacactggtacataccagtgaaatacatgcataattgtgttagaaaatgaaaattacagtggatcctaaacctcaaaactaacactggtactttctgtcaagcaacaatataaaaattgtactaggatataacttagcaaccaacacgtcaagcttgaactggtggtttccaattggacttctggttaatgaatcaacttccacagaatcaaatacaaattctaaacataataatgatcatgacatcggctttaattttgctattatagtttcagattcaaactaaattgagactaattactaggcattccaggaaaaaggatgtgagaagtagcaggtatgtgaaagctgatctgctttactatcccaacttctaaccttaactcactactcagataatcattagaattcagctttgtaagtctgctcgagaaatgagtacatgaaatttctgattggatcagacacaaaataggttaaaaattcagtggaataatctaaagatgcccacattgaacacacaagtacatggtgggttgaacatgctcttctatgcattctccaatcaaacaaataagctatttaatacaaataatgagttagataaaattccatcattttctctgtaggcttatgtcaatcaaacaagtaaatatgacacaacaggattcaggaactgtgctaccaaaacacgataccagtccagcagttgcccatggtctgatgacaagcacccactgcaaccagcattcttaatgatgataccattttacagtccacatccctcaccaaaatgtagcgctgtttcagaagaaactgactggacaagctattacactagtacaactggtaactgtagaaatcaggtccatgacagctcagtggctcagtgctatagatctaaaagagtcagagcttagagtgaccactgtgaacagatcacttcagatcttaagttcagtttgaatctttagttgaactgacagagacaatgtcatgtcaatataataccaagcttcaacatcatctctgcccacaggtaggttaaggtgtagtaaacaacaatccattaaataaatattgaaatatgaagatcctgaattctatggtacatacatatgaacatcgtacacccgggcattgtgcccccaatcaccaagaaattatactgccattcgtgccccccaaacaagaaggggggacctggcagcggtagagcctaccgtttgtaaccggaaggtcccaggttcgagccacaacctcttcgtattatgttgtgggtaagcttggcgcttaaagatacccttccccagacccacaaaaccccgcaaagtgcgggaagcctacaacactaggtacacacccttttttttattcgtgctccccccccccccccccccccccccaaacaaacatggaaaaaacccgaaaggatttgattggcttatcaatcccatcaatggagtccactaatagttgctcaagtcacagcaaataaaaactcaatctcattggagcaatccactcaagcaaactagggtttccttaccagcaaggtaaggaaacaattaaaatccagttcagaaaaatctcaagcagaagtcagtgcagcagatgggaggaactgagaagaaaatgtcaggagataaacgatcccttcacggtagttgaaggaaggagaaatctatcctctactcgtcattcccctgatgcccacattgaacatgcaagtacatggtgggttgaacatgctcttctgtgcattctccaatcaaacaaataagctatttaatacaaataatgagttagataaaattccatcattttctctgtaggcttatgtcaaacaaacaagtaaatatgacacaacaggattcaggaactgtgctaccaaaacacaataccagtccagcagttgcccatggtctgatgacaagcacccactgcaaccagcattcttaatgatgataccattttacagtccacatccctcaccgaaatgtagcgctgtttcaaaagaaactgactggacaagctattacactagtacaactggtaactgtaaaaatcaggtccatgacagctcagtggctcagtgctatagatctaaaagagtcagagcttagagtgaccactgtgaacagatcacttcaaagcttaagttcagtttgaatctttagttgaactgacagagacaatgtcatgtcaatataataccaagcttcaacatcatctctgcccacaggtaggttaaggtgtagtaaacaacaatccattaaataaatattgaaatatgaggatcctgaattctatggtacatacatatgaacatcgtacacccgagcattgtgcccccaatcaccaagaaattatactgccattcgtgcccccaaacaagaagggcggacctggcagcggtaaagcctagcgtttgtaaccggaaggtcccaggttcgagccacaacctcttcatattatgtgggtaagcttggcacttaaaatacccttccccagacccacaaaaccccgcaaagtgcgggaagcctacaacac

SEQ ID NO: 116338 - DNA, 1625 bp, Zea Mays
gcattatttcgatactgttaagaaaatcaaggatagctgataaccgtactgagttgattaaacaggaggtggaaagcatccacggctctgagataggcagcttcaagaacaatggtccaggaagggcttacttctactgggtcaccagagagcaaggatctttcgaatggttcaaaggagtcatgaatgaggttgcagggagcgatcacagcaatgttatagagatgcacaattacctgaccagcgtgtatgaagaaggtgacgcaaggtcagctctgattgccatggtacagtcacttcagcgtgctaaaaacggcgtggatatcgtctccggcagcaagattcgaacacattttgcaagaccaaactggaggaaggtattctgtgatttggccagcgcacacaagaactctcgcataggagttttctattgtggatctccgacgctcacaaaacaactgaaggatctttcgaaagaattcagccagacaaccacaacccggttccatttccacaaagagaacttctgagacgtgtacccgaagatccgatggactggaaacataattgtatagggaaaaaatacgatagcattggcatagcagatttagttttacaagttttgatgtatgcggggttgtacaaaatatgtgtagaaagctagatgtcaccatcatacatagattctgaaatgcttgcagctatatatattgcattgcataagtgaaaccacttgcttcctaggataaccgagttctagatctcctgctttgaacacgcaaattttctcttttcagtctttctgcccgagctgtcattgcattgcgaataagggtgctattctgtttcctagaagattcttgtgtatcatcttgcactggcacaagtgccacagaacctggtgtgtcttcagcgccctgagaatttccaggtgcattcctgttctttggaggcctgcctctttttttaggctgcttatcagcagataaagatgtatcttttcgaggcctgcccctcttcctaggttgattactagcctgcaagccgtccactctaactatcgccatcttattgtttgtatcatttccctgggatagtgtaactatatgtgatgttttctccatactgtcatccactgtagcatatattttccttggtctacccacctttggtttggagtcagaaactgatcccttaagtttgcacttgtcgataacaagtgttttaagtggaacagttatgtccaatggcagtagaactttctcaagttcacgccattcaagatcttcctggtctccatcatcataaatgacggtgtaccagttgctttcaatgtcatacttggccactttcccgacgaaatatgtgtctccaaaaagcttacgcactttcctcccttctaaccattcaccaaaacgaggatcaacatgagattctgcgtcattttttactgcagattgagaaccagttgtgcaatcaaaaggaaaatctggaacgccattgataatgatggcaggctctttaggaactttgattatagatgtagtttctgactcttgcttgccatcagccccctccatggttttctatatggaaaatatggaagaatcaggaaacagattcat

SEQ ID NO: 116339 - DNA, 3792 bp, Zea Mays
gcttcctcttgcccccccaccccaccccaccgccaccacccacccctcgcccgcaggtgggcccagcctccatcctcctcctctgagagcgagccggcggcggcgagcggcattgcgggttatctggtggagcgggacatggcggggtacggggaccggcgatcgccgccgctggagggcatcaccgtcgacggggccagcagggcccaatcgcccggggcgggtgcgggggcgggggcggggaggctgccgccgccgccaggaggcttcgcgcgcgggctcatgaagcagccgtcgcggctggcgtccggggtgcggcagttcgcttcgcgtgtgtcgatgaaggtgcccgagggcgtggccgggatgcggccgggacggatgacgcggatgcagtctagcgcgcagatggggctccgtggcttgcgcttcctcgacaagacctccggcggcaaggagggatggaaggccgtcgagcgccgcttcgacgacatggccaagggcagcggacgactccagaaggagagcttcggcaagtgcatcggcatgggggactccaaggagtttgccggcgagctgttcgtggcgctggcgcggaggcggagcctggagccggaggatggcatcaccaaagagcagctcaaggagttctgggaggagatgaccgaccagaacttcgactcgcggctgcgcattttctttgacatgtgcgacaagaacggcgatgggatgctcacggaagatgaggtcaaagaggttattatactgagcgcgtcagcgaacaagctagccaagctgaagggtcacgccgcgacctacgcgtccctgatcatggaagagctcgacccggacgaccgcggctacattgagatttggcaactggagacgttgctccggggcatggtgagcgcgcaggctcccgagaagctgaagcggacgacgtcgagcctggcgcggacgatgatcccgtcgcggtaccggaacccgctgaagcggcacctgtccaagacggtggacttcatccacgagaactggaagcggatatggctcgtgacgctgtggctggtcgtcaacgtcgccctgttcgtgtacaagttcgagcagtacaagcgccgaaccgcgttccaggtgatgggctactgcgtctgcgtcgccaagggtgccgctgagatcctcaagctcaacatggctctcatcctgctgcccgtctgccggaatacgctgacgacgctcaggtccaccgcgctcagccatgtcatacccttcgatgacaacatcaacttccacaaggtcatcgcgctgtccatcgcgatcgccacagcgatccacacgctcgcacacgtgacctgcgacttcccaaggctgatcagctgcccgacggacaagttcatggccaccttggggtccaacttccactacaagcagccgacttacctgggcttgctggagagcacacccggggttaccggaatcctcatgatcatcataatgtccttctccttcacgctggcaacacattccttcaggcggagtgtggtgaagctgccatcgccgctacaccaccttgccggtttcaatgccttctggtacgctcaccacctgctggtccttgcgtatgtcctgctggtggtgcactcctacttcatattcctcaccagggagtggtacaagaagacgacatggatgtacctgattgtccctgtcctcttctatgcctgtgaaagagtcatcaggaaatttcgtgagaacaactaccatgcgggaattgtgagggcagcaatttatccgggagatgtgctctctattcacatgaagaagccacagggtttcaagtacaagagtgggatgtatctgtttgttaaatgcccagaagtctcgcccttcgagtggcaccccttctctataacttcggcaccaggcgatgactacttgagtgtgcatatccgtacgctgggtgactggacatccgaactgcggatgctttttgggaaggcttgccaggcacaagtaacttccaagaaggctacccttacaagacttgaaactacagttgtggcagacgcccagacagaggacactaggtttcccaaggtctacatagacgggccatacggtgcaccagcacaaaattacaggaaatatgacattcttctgcttattggccttggaataggagcaactcctttcatcagcatactgaaggatatgttgaacaacctaaaatccaacgaagaggtggaaagcatccacggctctgagataggcagcttcaagaacaatggtccaggaagggcttacttctactgggtcaccagagagcaaggatctttcgaatggttcaaaggagtcatgaatgaggttgcagggagcgatcacagcaatgttatagagatgcacaattacctgaccagcgtgtatgaagaaggtgacgcaaggtcagctctgattgccatggtacagtcacttcagcgtgctaaaaacggcgtggatatcgtctccggcagcaagattcgaacacattttgcaagaccaaactggaggaaggtattctgtgatttggccagcgcacacaagaactctcgcataggagttttctattgtggatctccgacgctcacaaaacaactgaaggatctttcgaaagaattcagccagacaaccacaacccggttccatttccacaaagagaacttctgagacgtgtacccgaagatccgatggactggaaacataattgtatagggaaaaaatacgatagcattggcatagcagatttagttttacaagttttgatgtatgcggggttgtacaaaatatgtgtagaaagctagatgtcaccatcatacatagattctgaaatgcttgcagctatatatattgcattgcataagtgaaaccacttgcttcctaggataaccgagttctagatctcctgctttgaacacgcaaattttctcttttcagtctttctgcccgagctgtcattgcattgcgaataagggtgctattctgtttcctagaagattcttgtgtatcatcttgcactggcacaagtgccacagaacctggtgtgtcttcagcgccctgagaatttccaggtgcattcctgttctttggaggcctgcctctttttttaggctgcttatcagcagataaagatgtatcttttcgaggcctgcccctcttcctaggttgattactagcctgcaagccgtccactctaactatcgccatcttattgtttgtatcatttccctgggatagtgtaactatatgtgatgttttctccatactgtcatccactgtagcatatattttccttggtctacccacctttggtttggagtcagaaactgatcccttaagtttgcacttgtcgataacaagtgttttaagtggaacagttatgtccaatggcagtagaactttctcaagttcacgccattcaagatcttcctggtctccatcatcataaatgacggtgtaccagttgctttcaatgtcatacttggccactttcccgacgaaatatgtgtctccaaaaagcttacgcactttcctcccttctaaccattcaccaaaacgaggatcaacatgagattctgcgtcattttttactgcagattgagaaccagttgtgcaatcaaaaggaaaatctggaacgccattgataatgatggcaggctctttaggaactttgattatagatgtagtttctgactcttgcttgccatcagccccctccatggttttctatatggaaaatatggaagaatcaggaaacagattcat

SEQ ID NO: 116340 - DNA, 116 bp, Zea Mays
agtaattgctaattcatgtccagtatccgagtgaagcaaatcatttatttaattaacagttgttgtttaataaaaacacagaaactatattaattaagttgttacattagaggacg

SEQ ID NO: 116341 - DNA, 507 bp, Zea Mays
atggtcgtcctgggcgttgcactaaagggtgaggtcgaggtcgcatcagctagcgtaggtagaagctggatcgaggaggacgagaaccagagaaagggtgttctagacacccttcgccaaggcatggcgtttggtgatgatggtggcctcgtactccaaagtaggggtggctacagggtgcacaggaagaggctcgaggcagggagagccaaccaggtggcgctcagcattggcaagctgcctagcaagggtatcggcaacaatgtgtccatgctcccaggcaagaccgcaagagcagcaacacgttcgcgctcccaggcagcaactatagcacccttggcagccgtgagagtcgcaacgatggtggagtgggcagccgcagcatcaggggttgagagggtggtcaatggaggcgcaaagtggagccccaaggcaaaggaagaagtgtcaagagtcccgcaaggggcaccacgcgcgagggcacgccagcagcgtggggggcgatag

SEQ ID NO: 116342 - DNA, 1663 bp, Zea Mays
acgagaccacataccaggccaccaccatctctagaaccttcctcctcgcctccgtctttccctcccccagctcaggcaggaccgcaggagccagacccaaacccacgaaaccctcctgcctcgccgccgcttcctcatcctcccgccgcttagtcccggacccggaccaaccttcgtgaggacgggaattggactaagggggtaggatgccgccaaagaaagcggcgccatcgaaggcggagctggccaagaagcagaaggtcgtggaggacaagaccttcgggctgaagaacaagaataagagcaagaacgtccaaaagtacgtccagtccctgcaccaggccgtccagcccaagcctgactcgaccaagaccgccgccaagaagaagaaggaggaggagaaggcgcgcgagaaggagcttaatgatctgttcaaggttgccgtcagccagcccaaggtccctgttggtgttgatcccaagtcaatattgtgtgagttcttcaaggctggccagtgccagaagggttttaagtgcaaattctctcatgacctgaatgtccagaggaagggtgaaaagattgatatctatacagacaagcgtgatgcagaaaccatggaggactgggatcaggaaactcttgagaaggttgttgaatccaaaaagatggagtatcagcaaaacaaacctaccgatattgtctgcaagtactttcttgatgctgtggagaagaaacagtatggatggttctgggtttgcccaaatggcggcaaagagtgccattacaggcatgcccttccgcctggatacgtactgaaatcacaaatgaaggccttactagaggaagagagtgagaagatagctattgaagatgagattgaagatcagcgtaaaaagacaaagactacaacccctatgacaacggaattgttcatggaatggaagaggaggaaggcagaagaaagagaagctggtcaggctgccttgaaagcagagagggctaagaatgatcgcatgagtggccgtgagttgttcatggctgacgcaagtgtgtttgttgatgatgctgaagcatacgaagtatatgagagagaggagtctgaggccaatgaagaatcgaccaataaaagtcagaatccaggtccaagttcatcaacatctaatggcaaggaggttgaggagcctgacgacgatgatatcgatgttgacgatgacttagacattgatgaattgaatgaacttgaagcaagcctgtcgagaacttccatccaaattcgagagcctggcgagggaacatcatcttgagcagtactacaatggaagattgttgcgaagttgctctccatttttgcgcttccatccgatctagtcgcttttgcaaacaaagaaccgtggagcacagatgcaagtggaatagatctcttagccttgttcactagctatcttgagggagcaacgatcaacaaatgacgaccagtattatgatcacacatgacaattgatgtttgctgtgtgccttattttttttatcttgtgccctttgtgggaaatatgttgctacttgtgaataacaggactaaacagtttgttagctttccgcagactcaacagaattttgaagtgaacactacgatgaatctcaatgatatttgcgtttcagacat

SEQ ID NO: 116343 - DNA, 79 bp, Zea Mays
tccacagatgcgcagattttggtcgcatctccagagcctggcccgagctccttttttgcatcgcgagacacaggcgctg

SEQ ID NO: 116344 - DNA, 760 bp, Zea Mays
acacatactattggtctcatcaaagtccgtgacccctatccttttggggtggacccaagctggcgtggaagttggtctgagctaccgtttctaaattaattaaagatgaagatgtctatactaatgggtgttgcctagatgaacctgggggttgtattaagttattttgacgcacgatttcatggaaatgcccttgacataaggtatcaattcataccacagatgattttcctgaatagcctttttagttacttagcactcctgattcttatcaagtggtgcacgggctctcaagctgatctttatcatgtcatgatatatatgttccttgatcccgctggagatcttggagaaaatcaactgttttggggccaaaagaaactccagatattattgttacctctagctctggtcgttgttccatgcatgctcttcccaaaaccttttatcttgaagagacttcataaggagagatttcaaggtcacacctatcgcttcctagggacatctgaaatggatccagattctgaacctgattccaaccgaacacgtcatgatgatttcaatttcagcgaagtttttgtgtatcaaatgatacattccattgaatttgtacttggtgtggtttcaaatactgcatcttatcttcgcctttgggctctgaggtttgcctcttgtgtattgtgatgttatgctggttgttgcatgtttttaactttccccgtttcaactcctcacttctgtgtattaattgttggtt

SEQ ID NO: 116345 - DNA, 681 bp, Zea Mays
atgacctcggatttggcgccctcgagcgccgccgcaagcttgccgtgccgcaggtcggactctgtctttatctggtccatgagctcgtacgcgcactgcgtctcgacggtgctaaggatcttctcttcttggtacctctcctccgcggcctccagctccgccctcagctcggcggcctccgactccgagcccgagcagttgcagcggtcgcttgcggccttcgacgacgtctccgcgatctcgtcctcaagagccttgaccgtggcacgcgactcctcgagctccttcaccacgaggctgaacgagtccatcagcttggacccgtcggtgagcagcgaatcgatggtggcccggctcgcctccagctgctgcttgcactcctcgtgcatcgcgcgcgcctgcgcctcggcctcctcgcttgccttgagcttggccctgagctcgttgatggtggccagcgcctccaccacgtcctgccggcggtcggcgcgcgccgtggcggcgagctggacgcggaggcggtgcacctcgcccatcgccgcggcaagcgcggtcgagtccgcggcgtgctgcttctgcatggcctccagctccgactgccacgagcggtcgcgctcctgcgacagacgacgcagctccaggaggcgggactcctcggccgacgagagctcggcgagctga

SEQ ID NO: 116346 - DNA, 1069 bp, Zea Mays
actttccgagaatcacttctatcagctggtgccggaatcacactggttgattcagtggtcgcagcgtcaaagttaggtcctaatccgccccttggctttgcattgataaggccaccaggacatcatgctgttcctcaaggtcccatgggtttttgtgtctttgggaacattgcagtggcagctcggtacgctcagcatcaacatggactaaagcgtgtgatgataatagattttgatgttcaccatggcaatgggacgtcagattcattttatgatgatccagatatcttcttcttgtcaactcaccagcttggaagctaccctggtactggtaagatcaatgaagtcggacagggtgatggtgaaggcacgacactcaaccttcctctgcccggtggcgcaggtgactacgcaatgagatgtgcatttgatgaggtcattgctccatcggcccatcgattcaagcctgatataatccttgtatcagctggatacgacgcacacgcgctggaccctctggctggccttcagttcacaacaggcacgttctacatgctggcatccagcatcaagcaggtgaccaaggaactctgtggtggccgctgtgtcttcttcctggaaggcgggtacaacctgcagtcgctctccagctccgttgccgacacgttccgtgcattccttgatgagcccagcctcgcagcacagtttgatgatccagcgatacttttcgaagagccgactcggaagatcaaggaagcaatcgagaaggccaagagcatccactcactctaggctgtcagctaattttccccccaatccccagaaatcccggaggggtagccctaaattgggaaaaggtgctgtcagcagtgtgcactgcagaactgcaagatcttgtggcaattggcattttgcaggtaggtagtgcatagtttgaacttggaaggcatggtcattttaatttagccaattctcaccagaaaatggaattaccgttctctcaatactagctgtatatattgaccaaaagttatgtgctacattattaattttaaaactatgctaaaga

SEQ ID NO: 116347 - DNA, 300 bp, Zea Mays
aggggttggggacacatatttatagccctaggggctgcactaccacaccttctcacacacactacacaacaagattgtcctctagatgctaaagagactacagaggacagtcaaaagcgactgttgtcctctagatgctaaagcgactacggaggacagtcaaaaagcgactgttgtcctctagatgctaaagagactacagaggacagtcaagctgtcctctagatgctaaaggactacagaggacagtcaaaagcaggctgtcctctagatgctcaagactcaagacttattccatca

SEQ ID NO: 116348 - DNA, 495 bp, Zea Mays
ctgctcgccagccttttgtcctccatccagtttcccctgcccccggctggccggcatactagatactaccctctgtcggtgtcttggttccccgtcctatcgcgtgcgctctgtggaccgtggtggcgactactgggtggccgccgccacccccgctcggccgccctacgccaggtgctcaccgtcttcgggaccttcgccggcaacgaacactcaccagggaggatgttgcccttgtttagacactgctgtgcctttggaagtcatcatcctcatcccttaatttggaggaacatcttccaaacatcgcgaagagaacaaaaacaaatcaggagttgggatgcacagtgctcagcaaatcaggatcaagcttctatagagaaatgcaatgctccaaagaatttaccaatacctgataattcacttctcgatgctcgtattctctattgtacctctcctgccctgggtcataacaaagtaagcaattcaggttcc

SEQ ID NO: 116349 - DNA, 1340 bp, Zea Mays
agggaacaaggaacatgtcgtttaggacgaaaacccgatagagaacatctgagagagaggctacactagatacccaattatgtgtggaggaaggtttaatgaaatccacgtagttaaccgaccgagatcttgagtggacatacttgtgaggggttctaacgaggactaaaaaagattacgatttacgcgcttctcaatatctagttagaaatatttaaattggcaacgtgagtaggttcccttaaaattacacagcaactgaaagaacgccacaacattttctagctttctttaagagagaagcatctatagtcctcctgacatcccgaggccactccagccacaaaaaaggacccaagatgcaggcgctgggcctgggccgcgggtgcagccccctccatgccagccactgccgctgcaccgcttcttcctatcctccggctccaccccgtcctcgcaatcgcaacatcacaaggctaacctgcatcgccgccgtgcgcgccagcgctgcccagtccgcgcagatggaacgcaggcaggaggcgaaggttgtgaagctgcgggcggtggaggccacgcccgagtccttcgcttcgttcgggcaggtcatcggcgcctcccccgacggcgacgagttcggcccccacgacgcccagctcgatctcagccgcggcatcccaaggttctacatcatgcggttgcagaaccggccgctgaaattctctaccatcacccaccacgccagcgtgacccagtgcctgggctccgtcggcggccaggactggtacctcggggtggccaagccgtcgatcgtggatggggcgtccgagcagagtggcccggagggaaggaagttcttgcagtctgccgcagggcactattacctgcctcctgatccagccgaggtctgcgtgttccgggtttctggccccaagtttctcaagctgaacaaggggacctggcatgccgggcctttgttcaaggcggacgccgttgatttctataatctggaactgagcaacaccaacgttgttgatcataccacacaccatttcaagaaacatgatgggataacatttgtggtggaggactaaaaaaagaacatctctcaatccgaataccactgacaagaccgctggctgatcttgtccatgtttgtagtgaacaaccaacatgtaaagtgtcatgtagaaatgcgcatctgaggtccttgttcaaacttgtgtatcgtgctttgttagaaccgaaataaaggcaaaagttcgcccctgctttctaggcgttcgaaactgattatcagtactgatctgccaatgatattgccaccaaaaagttttttt

SEQ ID NO: 116350 - DNA, 2034 bp, Zea Mays
atggcaaaaatctcctatccatctctcattccctcccacgcggccacacgccgacacccaatgccgcccactacagccccggccgctgccgcggcgctcccatcaccttctcaccgcaggctccccgccgcgaaatccgtctggctgaaccccaacctcccctcttctcaccccctccaccagcgccacaagtccgccgccgagctccaacaacggcagcacgatgaccgtacgatcgacgtcccggccctcgtcaccgcgctctcggccgcgcggacggctcccgacctggcagccgtgctcgccacgcaccgacccgtctccgcgcgcctcctcggtgcgctcctctcccgcctccccgacccccgccgcggcgtcgcgctgctcgacctcctcgcgccggacctccccgcccccacgctcctcatcccatataacctactgctccgctctgcttgccgcgctggcgagctccgcctcgcctccggcctcctcctcgagatgcgggagaggggcgtgacccccgacgcgttctcgtactccaccctcctcgccgcgctcacccgtgcgggccacctcgaccacgcgctcaccttcctgccgctcatggaggatgacgccgtggctccggacctgatcctcttctccaacctcattcacctcgccctccgcggtggcgacgcgcccaaggcgctggcgctgttctcccggctgcgtgccgcggggatcaggcccgacctcaaggcatacaacgcggccgtcgccgcctactgcaagtccgaccttctccgcgacgccaagcggatgctgctccacgacatgccggccgacggcgtcgcgcccgacgcggagacatactcccccatcctcgcggcgctggcgcgaagggggcggcacctcgcggccgtgtcgctgttctcgcacatgcgcgccgtggcgcgcgtcaagccggacatctcggtgttcaacatcatcctcaacgcgtacgggcagctggacctcgcgcgcgaggcggaccggctgttctggtccatgcgccgggcaggcgtgccgccaagcgtggtgacctacaacaccatgctccgtgtgtacggcgatgcagggctgttcggcgaggcagttcacctgtttgacctcatgcgcagcacttcagatggcaacggtggcgctggtagcagcgtcaaaccgaatgtggtgacgtacaacaccatgattaccatctacggcaagtcgctggaggacgagaaagctggaaggttggtgcaggagatgcaggccattggcgtccagcctgatgccatcacttactccactatcttgtccatatgggtgaaggccgggaagctcgaccgcgctgccaggctgtttgagaagctgagggaagctggcacggagatcgacccagtgctgtaccagacaatggtagtggcctatgagcgtgccgggcttgtctcacaggccaagcgtttgttgcgcgatctgaaagacccggagggcatccccaaggagacagccattaaaatcttggccagtgccggtcgtctggaagaggccgcatggctgttccgtcgtgcggtcaacaccggtgagatcaaggactcatcggtgcacagagcaatgatggacttgtacgcgaagaaccggaggcaccgtaatgtgatcgaggtgttcgatgaaatgaggaagttgggccagttgccagactcagagatcattgccaccgcgatgaatgcttatggcaagctgaaggagttcgacaaggccgcggcgctgtaccaggcaatgagggaggcaggttgtgtgttctcagaccgggtgcactttcagatgattagcctccttggcgctcagaaggacttcaaggcgctcgaagtgctggttggcgagctaagccatgacccaagcatcgacaagagggagctttatcttgtggctgcaggcgtttatgagagagcgtacaagtttgataaggcatcccagattataagccagataagaagctccaacgaattcgatgtccagaaactcagataa

SEQ ID NO: 116351 - DNA, 2306 bp, Zea Mays
atgaattgtgaacttgtggtctttgtgatcttttgtcaactttgttgaattatgaagtttaatatgtttaccaatcgtattttagatttcgactgttatcggtgtattttctgcaataaacttttgtttccgatgtttctgaaatactgatatcgtttccgtttttggagttaccgttttcgattttattttcgataaaaaatataaaaacggtaacggttttagtgtttaccgaccgtttccatccctacatatgaccatctataccaccaatggcaaaaatctcctatccatctctcattccctcccacgcggccacacgccgacacccaatgccgcccactacagccccggccgctgccgcggcgctcccatcaccttctcaccgcaggctccccgccgcgaaatccgtctggctgaaccccaacctcccctcttctcaccccctccaccagcgccacaagtccgccgccgagctccaacaacggcagcacgatgaccgtacgatcgacgtcccggccctcgtcaccgcgctctcggccgcgcggacggctcccgacctggcagccgtgctcgccacgcaccgacccgtctccgcgcgcctcctcggtgcgctcctctcccgcctccccgacccccgccgcggcgtcgcgctgctcgacctcctcgcgccggacctccccgcccccacgctcctcatcccatataacctactgctccgctctgcttgccgcgctggcgagctccgcctcgcctccggcctcctcctcgagatgcgggagaggggcgtgacccccgacgcgttctcgtactccaccctcctcgccgcgctcacccgtgcgggccacctcgaccacgcgctcaccttcctgccgctcatggaggatgacgccgtggctccggacctgatcctcttctccaacctcattcacctcgccctccgcggtggcgacgcgcccaaggcgctggcgctgttctcccggctgcgtgccgcggggatcaggcccgacctcaaggcatacaacgcggccgtcgccgcctactgcaagtccgaccttctccgcgacgccaagcggatgctgctccacgacatgccggccgacggcgtcgcgcccgacgcggagacatactcccccatcctcgcggcgctggcgcgaagggggcggcacctcgcggccgtgtcgctgttctcgcacatgcgcgccgtggcgcgcgtcaagccggacatctcggtgttcaacatcatcctcaacgcgtacgggcagctggacctcgcgcgcgaggcggaccggctgttctggtccatgcgccgggcaggcgtgccgccaagcgtggtgacctacaacaccatgctccgtgtgtacggcgatgcagggctgttcggcgaggcagttcacctgtttgacctcatgcgcagcacttcagatggcaacggtggcgctggtagcagcgtcaaaccgaatgtggtgacgtacaacaccatgattaccatctacggcaagtcgctggaggacgagaaagctggaaggttggtgcaggagatgcaggccattggcgtccagcctgatgccatcacttactccactatcttgtccatatgggtgaaggccgggaagctcgaccgcgctgccaggctgtttgagaagctgagggaagctggcacggagatcgacccagtgctgtaccagacaatggtagtggcctatgagcgtgccgggcttgtctcacaggccaagcgtttgttgcgcgatctgaaagacccggagggcatccccaaggagacagccattaaaatcttggccagtgccggtcgtctggaagaggccgcatggctgttccgtcgtgcggtcaacaccggtgagatcaaggactcatcggtgcacagagcaatgatggacttgtacgcgaagaaccggaggcaccgtaatgtgatcgaggtgttcgatgaaatgaggaagttgggccagttgccagactcagagatcattgccaccgcgatgaatgcttatggcaagctgaaggagttcgacaaggccgcggcgctgtaccaggcaatgagggaggcaggttgtgtgttctcagaccgggtgcactttcagatgattagcctccttggcgctcagaaggacttcaaggcgctcgaagtgctggttggcgagctaagccatgacccaagcatcgacaagagggagctttatcttgtggctgcaggcgtttatgagagagcgtacaagtttgataaggcatcccagattataagccagataagaagctccaacgaattcgatgtccagaaactcagataa

SEQ ID NO: 116352 - DNA, 2659 bp, Zea Mays
gtgcgcctctgcaatcctctgtctctctttcctctgacttcgctgcctcctcgtccgtctcgcccggtcctctcactcgaagactctcgcttcgcttccaagttcaccccaatggcgacgcaaccgcttacatcaccgcgcgcttgagcgagagaccgatagcccccaccaaccgcgcgccttcgcggagcatggcggcgccggggctggacaaggtcatggcgttcctcaccgaccacggcttcgccggcgcggcctccgcgcttcgtgacgacgtccttgaacgcaccgccgccggggacgaaagccacgacgccgcattagatccccacctcccgccgctccggatgcccgcctccgccggcggtgccggtgccggtgccggtgccggcgctggcgctggcacgccgacgcccgcgagccccggttccagctccggttcggcgtcctcatcagctttcgtaagcttgcgctccacaccctcagggctgttgaatccgtatggactatggtcgccgcggcattcgcagtcggacgcgtcttcatcggagatggagtttggtacagcgcgccagtacgacaccaccgacctcttcttccaagaggattggctctacgacgatcacctcttccctagcaagctggacgatgaggatgacgaaggcaaagaggaggacaaatttgtactggatgctcacgatggttcggagcaggttgaaataggcaagcttggtgcaggccataaccaccgtcacgaacacatcggtggtgaccgatgcgagggttgtgctgaggtgtacatatgctcatcgccactctgtggttgttgtggagggggactcaagaatgatgggcttgatgtggccaggagctcaagctccactgtgtatgggagatacaagatcatggatgaccagacagagatattggatgattgtgcgcaggatgcgtttcagttgaagcagagtagagatattatgtttgaatgcggtatgacgagggatcctggacgaggatatgatgattcagggctgagtgttgtggagaaggagcttcaaatactcagttcatttgatactgttgtgaatcacggtacatatgatttcacggaaaatggtgagctcaatggcagctgtgacaaaaatctgaaaagcagcattcataaagaatatccgaaaggtcataggatacagccattccctgaaagtggtgatcttgatgaagctgatgagtttcgacatgttggatcattaaatacagatgttcaacattctactgctcttaaagctgaggaagatgccgagacaaatattgatcttgctctctctgattttcaccgagaatatgaggtatttgaattgagaattatccaccgcaagaacaggactggatttgaagaaaacaaagatttccccatcgtcttaaattcggttgttgctggaaggtattatatcactgaatatctaggctcagctgcattcagcaaggttgtgcaagcacatgatcttcgtacaggaatggatgtttgccttaaaataattaaaaatgataaggacttcttcgaccagagcttggatgagataaaacttctgaagttcgtgaacaaatatgatccactagatgaacaccatgtgttgcgcctctatgactacttttaccatcaggaacacctttttattgtcactgaactactgcgagcaaatctatacgagtttcagaaatataatcaagaatctggtggtgaggtgtattttactttgcctaggatacaggttatagctcggcaatgtttggaggccttggtttacttgcaccgtctgaggatcattcattgtgacctaaagccagaaaatattcttatcaagagctacagtagatgtgaaattaaagtcattgatctgggaagtagttgcttcttgacagacaacttatgtctctatgtccaatcacgctcttatcgagctcctgaggtcattctaggcctaccttatgatcagaggattgatatttggtctcttggttgcatcctttctgaattgtatactggtgaagtattatttcctaacgagcctgtgtccgtaatgcttgctcaaatgattgggataaccggcccaattgacatggaaatgctagaattgggacaggagacacagaagtatttcactgatgattatgacctttttaccgagaatgaggagacagatcagctagagtatttgatcccggagaaatcctccttgcgacaacacatacaatgtcctgattcagagtttgtcgattttctgtcttatctactgcaaattaaccccaggaaaagacctacagctgacgaagcactacagcatccatggctttctttctcgtactaatgagaagccatccggtgctttcttcacatataaagaatagccctccttttctgggtgcaggattcttctttttttgtgtcttcagggtaattcttgcgtttcctttttctgggtccaggattctttttttttgtcttcagggtaattcttggtgtgaagtgtgaacccctgccctggagtgattcatgagtgtatgtaaatatcagaaaattttccgcggagtaactgtacagttgtaagcccactcttgtactcctgatcatgaatgataacatgggaatttcaaaata

SEQ ID NO: 116353 - DNA, 1495 bp, Zea Mays
gcacttcttcctcgctctcagcagcatgcgccgatcgttaattcttttcactgtttgcatgcatataggctgcgcgcggcggcagggaagggacgatatagatacacacagatggcggactgcatgcaggagtggccggagcccgtcgtccgcgtgcaggcgctggccgagagcggcctgtccgtcatcccgcgctgctacgtcaagccgccgtgcgaccgccccgccgtgtccccggcggcggcaacgacagtccaggagaccacggagccctcggacatgagcattccggtcgtcgatctcggcgcgctgctggcggcggacggcggcgccgccgtcaccgaggccgtcgccgccgcgtgccgggagtggggcttcttccaggtggtcggccacggggtgcgccccgagctgttgcgcgcggcgcgggaggcctggcgcggcttcttccgccgcccgctcgcggagaggcagcgctacgccaactcgccccgcacgtacgagggctacggcagccgcctcggcgtccagaagggcgccgccctcgactggggcgactacttcttcctccacctcgcgccggaggcggccaagagcacgcccaagttctggccggccgtgcccggcaactgcaaggaggtgtccgaggagtacggacgcgaggtggtgcggctgtgcgagctgctgatgcgggtgatgtcagtgagcctagggctggacgaggcgcaccttcagcgggcgttcggcggggcgggctgctgcggcgccaccctgcgcgccaactactacccgcggtgcccgcagccggacctgacgctgggcctctccgcgcactcggacccgggcgtcctcaccgccctcctcgccgacgagcacgtccgcggcctgcaggtccgccgtagcgccggcgactgggtcgacgtgcgccccgtccgcgacgccttcatcgtcaacgtcggcgaccaagtccagataatgagcaactccgtgtacaagagcgtggagcaccgggtggtcgtgaacgccgaggaggagcgcatatccctcgccatcttctacaaccccaagggcgacgtccccatctccccggcgccggagctggtcacggccgcgaagctgccaccgctctacccgacgatgaccttcgacgagtacaggctctacgtgaggagtaagggcgccaggggcaaggcgcagatcgaggctctcaagggccaggcatcaccagaaaattaattaattcgccaccatgcacctgcagcctacgtacattaattacagtacgtacgtactagcttgctagttaataaacaactgcgtgtgtatcctagctaatggcaattgctaatataatctggagttagttggctacatgctatgagttggctggctccaccggcggaccaagtataatcttatctgaaataacacatgcatgtgtaagaccaacctactaccttcggtaccacttagtacatatataatgatcgcatgc

SEQ ID NO: 116354 - DNA, 1534 bp, Zea Mays
caaagcatcaaggggccggcccaagcacaccgcaggctcagccgtccacctctttctctcactctctcttcaagaactactcgaggtctagctagctaattgacccagctgcgcgcggcggcagggaagggacgatatagatacacacagatggcggactgcatgcaggagtggccggagcccgtcgtccgcgtgcaggcgctggccgagagcggcctgtccgtcatcccgcgctgctacgtcaagccgccgtgcgaccgccccgccgtgtccccggcggcggcaacgacagtccaggagaccacggagccctcggacatgagcattccggtcgtcgatctcggcgcgctgctggcggcggacggcggcgccgccgtcaccgaggccgtcgccgccgcgtgccgggagtggggcttcttccaggtggtcggccacggggtgcgccccgagctgttgcgcgcggcgcgggaggcctggcgcggcttcttccgccgcccgctcgcggagaggcagcgctacgccaactcgccccgcacgtacgagggctacggcagccgcctcggcgtccagaagggcgccgccctcgactggggcgactacttcttcctccacctcgcgccggaggcggccaagagcacgcccaagttctggccggccgtgcccggcaactgcaaggaggtgtccgaggagtacggacgcgaggtggtgcggctgtgcgagctgctgatgcgggtgatgtcagtgagcctagggctggacgaggcgcaccttcagcgggcgttcggcggggcgggctgctgcggcgccaccctgcgcgccaactactacccgcggtgcccgcagccggacctgacgctgggcctctccgcgcactcggacccgggcgtcctcaccgccctcctcgccgacgagcacgtccgcggcctgcaggtccgccgtagcgccggcgactgggtcgacgtgcgccccgtccgcgacgccttcatcgtcaacgtcggcgaccaagtccagataatgagcaactccgtgtacaagagcgtggagcaccgggtggtcgtgaacgccgaggaggagcgcatatccctcgccatcttctacaaccccaagggcgacgtccccatctccccggcgccggagctggtcacggccgcgaagctgccaccgctctacccgacgatgaccttcgacgagtacaggctctacgtgaggagtaagggcgccaggggcaaggcgcagatcgaggctctcaagggccaggcatcaccagaaaattaattaattcgccaccatgcacctgcagcctacgtacattaattacagtacgtacgtactagcttgctagttaataaacaactgcgtgtgtatcctagctaatggcaattgctaatataatctggagttagttggctacatgctatgagttggctggctccaccggcggaccaagtataatcttatctgaaataacacatgcatgtgtaagaccaacctactaccttcggtaccacttagtacatatataatgatcgcatgc

SEQ ID NO: 116355 - DNA, 369 bp, Zea Mays
atgcgcagcgggcagcggcacgaagatgccaacgacgaggatgatacccgtggtgaccacgacgttccaagcgacgatgaagagggcgcacacgcacccggaaggtggaggtggagggccatgaagaaaacccagtgtgcggaggaggccctcgaggacatcgacgacgacgtggaggtggagcccggcgacggcgagcgcgggtgctgtggtgacccacgggacacggcacgctgccgacgcagacgccgatcgtgggccgtgggtgtgactgccatgtgccatccctactcccgtgtgggctaccgctctcactccctcatggcccaacagcgaagacgcttaacaacgaatcaggagaaggaataa

SEQ ID NO: 116356 - DNA, 1415 bp, Zea Mays
ggcggacacggcgagtcagcacagcaacagcgcacagcagcacacggtatccgtcccgggccggagccaactccccaagccagtccagtccttccgtccacccatccatcgtccccgcctgcacctcgcgagcatccaaagctgtacttgcggcaagttctcgcaaaatcctactcccaccgccgactcgtacctccgctcccctcctccccaacccttccacgcttgcttctccgggagggaaggcacacgggaggtcgccccgccacccatcgcaaaagccacgcgccaccaaactcttttttccctcacccagtcgctttcgcgttcagcgcgagctgagccagccagtgggtcggtcgctggaggcggagccataaaggcgtcagcgacggcagcatgatgagcggcagatcgggcgggagggacgccgagggcgagtgggaggttcggcccggcgggatgctggtgcagcgcagggacggtgaggcggccggccccgtcatcaggatcagggtctcccacggcgccaacttccgcgaggtcgtcgtgccggcgcaggctaccttcggtgagttgaagaggatccttgttcagactactggcttggagcctgagaggcagaggctcttcttccgtgggaaggagaagagtgacagagagttcctgcacacggcaggtgttaaggatggagcaaagctgcttctgctcgagaagcctgcccctgccaacatagagcagaaggttgagcctgtgattatggatgaaagcatgatgaaggcatgtgcggctgttgctcgtgttagagttgaagttgataagctgtctgctaaggtgtgtgacttggagaagaatgtactaggagggagaaaggttgaggataaagaatttgttgtcttgacggagctgcttatgatgcagctgctgaaactcgatggcattgaagctgaaggagaagcaagggcacagaggaaggctgaggtgcgccgagttcagtcccttgtggagaccttggataagctgaaagcaagaaatgcaaaccccttcagcgatcataataaggctgtttcagtaacaacgcagtgggagacgtttgagaacggcatgggcagcttgagtgctccacctccccgtgtttcttcaacgcaagctaacactgactgggagcagttcgactaggctcagatgaagctgttgatgtatcatgaaatctgtgagatcggtatggacattcctttccgaggcagcgaggtgttgtgtatatgcaccacgtttgataacttttggcgtcccaagtgcctgtgattctgtgaatgttaccagatcgtgccactgccatactaccatgtgaattgcatcgctcattgagggtcatatttcaatatgctcctgccagtgccattcgcgtgctattt

SEQ ID NO: 116357 - DNA, 236 bp, Zea Mays
gtagcagttccccataatagaatagaccatatttttttctgtttaggctgatgcttctatttgtgtgactgaaagtgccatagcttttttctgaaatgtttcttgtttgtttgacctataccttttctgtctagatttttgcttactttttagtcttcatgtaccacctgtctgagattgatgaactgagacaaaaaccattcaaaagaaatggcccagactttgatgctaaataa

SEQ ID NO: 116358 - DNA, 3841 bp, Zea Mays
  misc_feature (3841)..(3841): n is a, c, g, or t
cttgcacttgcccgttcaacggctgcccagcccagggaagaagagaagggtgtgagaagcatccaggggattggcatcgtcccctcctcaccaaatccgcagccccccggtgctgactccccgcccccggccggggctcgccacaaacccataaagaccgccccgacgatccggcttcccccgctttctgagttctgatcgcggtcgcggcacgccatcgaccggtctgtccaagcgaaaacacagtagtccggctccggcgcacagggagatcgagagagagagagggctatactaggcactagctaggatcagccagcgcgggcgccatgagcttggcggggcggcgcaagtcgtcgcacgcgggcgcgggagccggcgccggcgccggcgccctcgacgcgtccgccacgaagcacgccacgacgtcgctgcgcaagggcgggcggctgccggtctacgtggcgagcgtcttcttcttcctctgcgtggtggtgatgtacggcgaggacatccggtcgctgacgatcgagccgctcacgcgcgtgcccgcgccagcggtgccgggcaccacgggcgctggtgggcggcaagtcgtggtggtgccccggcgagacatctccgcttctgagaagcccgccgccgtgctgcaccgcggcgagcaggagaagccgaagaagcacgcggtgaccacgacgacgacgacgacggcgccgccggtggctgtcgagaagccgcagcagaaggtggtcgccaccgccgccgccaagagcgagaggaatacggccaagaaggcggcggcgaagaagaagaagaagccgcgcaggcagcagcgcgcggcgaagaagacggtggtgccgcccgcgctgggcgtgccggagacttgcgacctgtccaaggggcggtgggtgttcgacaacacgagctacccgctgtaccgggaggaggagtgcgagttcctgacgtcgcaggtgacgtgcatgaagaacgggcggcgcgacgacacgtaccagaagtggcggtggcagcccaagggatgctccatgcccaggttcgacgcgaagctgttcatggagaggctccggggcaagcggttcatgttcgtgggggactcgctgaaccgcaaccagtgggagtccatggtgtgcctggtgcagtcggcgtccccgccggggaagaagtacgtcacatgggagggccagcgcgtcgtcttccacgcctgggagtacaacgcgacggtggagttctactgggcgccgttccttgtggagtcgaactcggacgaccccaagatccacagcatccagcaccggatcatcaaggcggacacgatcggggcgcacgccgagaactggcgcggcgtggactacctcgtcttcaacacctacatgtggtggatgaacacgctggacatgaaagtcatgagaccgggcgccaagagctgggaggagcacgacgaggtggtgcggatcgaagcgtaccggaaggtgctgacgacgtgggcgagctgggtgaacgacaacgtcgacccggcgcgcacgtccgtcttcttcatgagcatgtctcctctccatatcaggtaccccggcccacttcctactacctagtagcagtagtagtagtacttgaagctcttcaacaaacaacggctcttaattaattaacgtcgcgacgcgtcacgcacgcgtgtggggcgcgccagatccattgttcgtttcgcgtagcaaagggtaaggtacagtacatggctgcgcgcgcgtgcgtggtgcactggtgctggtgcctgccgaagatccgcatcgagcttgtcccgctcgagagagaccgtgcagatcctatcctagtacagggcatggtttagtggcggagtgagcgcggtgggtggtcccgtgccgtgggcgaaacggccagcgcgttcgcgcgtggtctcttctgtctctccttttggagtcgagagggaaagggtgcgtcgggacgagtactggtcgttatcttgggggacgggtttggaaaatgtcagagtagtagatcacccgcccggcgcccggcgcccgctggtgttttggttggggggggggggggggggcggcggactgactcggtattaccatctcaagggtttgacgttttcagcccacgtgtaatacgctgcatgcattgcatagtggtagctgctcacatggagtaccgatcccaatgaggagcatatatatatatatatagcggatcgatcactgctactgtactccagcgctacggtaacagatggtagacgcgactttttagacgtcactttacttggaccagcaccttccctcagctctaaatctcaataatttgttagggggaggggtccgaatccattttttctgtagtagtagtgtgttccggtactacaactctaggacagttgcgcgtacctgtctcatcacatgggggggggggggggcgatcgtttgcacgaaccaaccagacgtgccgaagcttccaattagattctcctttggccgcccggcagctgtgcgcgatccgtgattagccactggcacctttctttgtcccgcgccttgccggaattttaggatctcattacagaagaagagttttttttttcttttttaaaaaagttggtccagttatcaaattaacctcttcagtctgtccgcgaccaccttgcggcctcaaggctacttgcatctgacactttgcctttttttttttttttttttgctttctagttgcgtactattgcagtctcacttgatcccccttcttgagagtcagcacccagttcttttaaattcatccgtctccggtagcatctttagcatacgaaatgccagtgcttaactactgctgcctcgccttgcatcgcacgcacgcactgagaaaccaatgggacacacgcggccggccccgctactggtaggatcaaaatggaatggaaggttgcgttggttacctgtcgatcgacacggacaaacaacaatctggccagctggcccggggatgacgccgtacgaaagctctcacctaaaacgctgaggaacgaaaaactaaaaatttaaggagtggggggctgggggctatcagggaagtgattagatgctgaggttccgtgaagcaaaccgctttgaattgtccgtcctgtactatacactactactactacttcttcttcttctttttttaaactcggagattctcccgtttgtctttggcggttgttttatgcaagaaggtattggagtggctagacggaagcgacgtagagaggttcgtgttgtcactagcccggcttagtttggtattggagtagctggacggcagcgcgctgtacctagagaggttcgtgttgtcactaatagccggctgcagcctgcagagatgtgtgcttctggtggtgttttttgtcctttgaagtagacatatcggcggtagtatcaaggagaaccgttcggcgcgcctagctcagaaagattcaccgaaatcgtggactgttcccctcctccattcgcggatgcgtccacggacggagcctgcgggtagttggaggcatgtcacgtcgaaagatacggtcgaggctccgcgaaccacacaagagaacaagtgacgatcgctgccaagactcctcacttgccatacagagtaccgcacaacgcatgtttcgcaattcacgtcagacgtagaaatccggatcgattttttttttcaccggctcatttgcattcctttattattatatatacatatatatcaagtttacaagttcggcttactgaaaagtcacctgacgatcgatgctctggtgtgtttgtaacaacaacaaacaacagcccgn

SEQ ID NO: 116359 - DNA, 1775 bp, Zea Mays
ggtgtgagaagcatccaggggattggcatcgtcccctcctcaccaaatccgcagccccccggtgctgactccccgcccccggccggggctcgccacaaacccataaagaccgccccgacgatccggcttcccccgctttctgagttctgatcgcggtcgcggcacgccatcgaccggtctgtccaagcgaaaacacagtagtccggctccggcgcacagggagatcgagagagagagagggctatactaggcactagctaggatcagccagcgcgggcgccatgagcttggcggggcggcgcaagtcgtcgcacgcgggcgcgggagccggcgccggcgccggcgccctcgacgcgtccgccacgaagcacgccacgacgtcgctgcgcaagggcgggcggctgccggtctacgtggcgagcgtcttcttcttcctctgcgtggtggtgatgtacggcgaggacatccggtcgctgacgatcgagccgctcacgcgcgtgcccgcgccagcggtgccgggcaccacgggcgctggtgggcggcaagtcgtggtggtgccccggcgagacatctccgcttctgagaagcccgccgccgtgctgcaccgcggcgagcaggagaagccgaagaagcacgcggtgaccacgacgacgacgacgacggcgccgccggtggctgtcgagaagccgcagcagaaggtggtcgccaccgccgccgccaagagcgagaggaatacggccaagaaggcggcggcgaagaagaagaagaagccgcgcaggcagcagcgcgcggcgaagaagacggtggtgccgcccgcgctgggcgtgccggagacttgcgacctgtccaaggggcggtgggtgttcgacaacacgagctacccgctgtaccgggaggaggagtgcgagttcctgacgtcgcaggtgacgtgcatgaagaacgggcggcgcgacgacacgtaccagaagtggcggtggcagcccaagggatgctccatgcccaggttcgacgcgaagctgttcatggagaggctccggggcaagcggttcatgttcgtgggggactcgctgaaccgcaaccagtgggagtccatggtgtgcctggtgcagtcggcgtccccgccggggaagaagtacgtcacatgggagggccagcgcgtcgtcttccacgcctgggagtacaacgcgacggtggagttctactgggcgccgttccttgtggagtcgaactcggacgaccccaagatccacagcatccagcaccggatcatcaaggcggacacgatcggggcgcacgccgagaactggcgcggcgtggactacctcgtcttcaacacctacatgtggtggatgaacacgctggacatgaaagtcatgagaccgggcgccaagagctgggaggagcacgacgaggtggtgcggatcgaagcgtaccggaaggtgctgacgacgtgggcgagctgggtgaacgacaacgtcgacccggcgcgcacgtccgtcttcttcatgagcatgtctcctctccatatcaggtaccccggcccacttcctactacctagtagcagtagtagtagtacttgaagctcttcaacaaacaacggctcttaattaattaacgtcgcgacgcgtcacgcacgcgtgtggggcgcgccagatccattgttcgtttcgcgtagcaaagggtaaggtacagtacatggctgcgcgcgcgtgcgtggtgcactggtgctggtgcctgccgaagatccgcatcgagcttgtcccgctcgagagag

SEQ ID NO: 116360 - DNA, 237 bp, Zea Mays
atgtatatcatcgtcctagacttggttccttctcgtatggccacaaatccaaatccaacacaacatatgcatttctgtagtacttgtctgctaaacatatgtgaacgtaagccaggcattaacggattaaccctacagttagcaagagtaaataagtccctaataagaacatttgtaccttttttaggaactaacaaagttgatatcttcacccaaggaaactaccaaagtatgtaa

SEQ ID NO: 116361 - DNA, 348 bp, Zea Mays
atggagcacgacaagcaccgaggcgaggtccctaaggagcacgaccaacacggcgagcaagtcatcgacgttgagctgcacggcgagcaagacgtcgagctgcatggcgagcaggtcgtcgacgttgagcttcacggtgagcaggaagtcaagctgcttgacgagcatgaaaagggcgaaaaaagagaaaatgatcccgccatgcatgcaaaaacgatggaaaaaattgtgcaatgcaggcgtcaggtgagccatgtgagctcgcttacagcaatagcaaaaactgggcaacagaagacaaacaggctcaactgctacatcttcatagttcgttgccaattgccatag

SEQ ID NO: 116362 - DNA, 638 bp, Zea Mays
aattctgatatggtccacattagacagttctcgggtgttcttgcttggcccttctcagcactattgtctactacactccaaaatgtgcttttaaccaggcggccagacctgctgtctattgtacctcagtctggtttatgggggagctttctcatatctcatcagagtttgacaatgttgttcaagttgtgctggaaaactataaaccttagaagatacaaaatgatgatcagggtaccaatgatgctgacagccagttggtgcaggaagaccagaaggctaagcacccccttcccctttcattatcactgcgtccccctcttgggagagcatagttaatgttaagggagaagtcagcctaccagaggaagatgctagagatcccaaattttggtccagaatctgtgtgcacaatatggccaagctttctagggaggcaaccacattccgtcgcatcttgggatgtcagttattgagtccctctctttggatataaaagaaggtcataccttggagcactttcatggaatttgatggccactgttgcggatgataaatatagcgcaacaaactattatttttggatctcttgtagttgtcgtatttgatattgtataccagaaaatattttcttagaa

SEQ ID NO: 116363 - DNA, 1292 bp, Zea Mays
gcaaaacacagcatgtctgcgtgcttcctcccgtcagcccccgatctgaaaatcgaacaaatccccgcctcttcgtccctctctccgacttccgctcgcacacctcccctcatgtggctgccctgggtgaagacgcggccttcatccgccacctccacctccaactctccctccaccgcgctcgtagctgccgcctccccgcgcctgtccttctcctcgccctccctcaaggacctccaggcactgctcctgtcggacgccgcgacaccctccccgccgcctgccgcgccctgttccccctcctcctccgtccgcgtcttccaccgggtccgcgtcgccgcctctgccctccgtgcgctccgcaccctccaggcgccgccgtcctccggcggcggcgccgccttcgaggcggaccgccgcgtcgtgctctacttcacctcgctccacgtggtccggagcacgtacgaggactgccgcgccgtgcgagccatcctgcgcgggctccgcgtcgccgtcgacgagcgcgacctcgccatggacacgcgctacttccaggagctcgcggcgctcctcccgcgccccgtggccccgcggcgcgtcacgctgcctcaggtcttcgtcggaggccgccacctcggcggcgccgacgaggtccgacgcctgcacgaggccggcgagctccggcgcgtcgtggccggcgccgtcgccgcctccctcgccacatgcggccggtgcggcggcgagcggtacgtgctctgcggcagctgcaacggcagccacaagcggtacagcgccaagggcggcagcggcttccgcacctgcgccgtctgtaacgagaacggcctcgtccgatgccccgactgctcgccgccggacgtctgactgacggtccagatccgagaggtcacgacgtgataactattagatgcttccttcttcttcctagttccaaatttgagataagaaacgagccgtgtgtagttgttaatcttaattggtagctagtgttgattggttgctaaatatgaatatggccatttgcagtttttctagcgtttgctaatcaacgcctctaaaggtggctgttgcacttgcagtaagatttaacagcagtttgttccttattacattttttcgtactccgtacgctggaggcagacctgaggtctatttgataaataattttggataaaaggatgcgactagttagcgtaagttgagttgtaattgaagtgtatcttttccatagttgcgtgaaattgcaaacaatctagttgtgtgaaattgaccgt

SEQ ID NO: 116364 - DNA, 1725 bp, Zea Mays
agaaaccgccattcggatagcacgggcgcacctgccgaccggcgaaacccagccgcatactcgcgcccattctcgccgcgcacgatgctccgtctccccaccctcaccgcccttaaaccctcaacccccgccatcagcttgaaccgtgtcggctgcagccatggccgccgccgccgcaagctcatctttgtctcatccgctcctccgccgtcttcttcgtcttcacggcctccgaagccgacgtcgaacccggaaccaccaaagcccacacatgaggcccgcaaccggaacccggatggatccaccgaggcagggttccccacaaccaagccccggaagccacgccgtgggcgccgcagcgagtcggcggccgtggaggacttcgtccgcaaccgccttgagcaggtctttgcctccatccaggagcgcaaccccgacgtcctcgagggcaaaggcgacatcctgaagccgaaggccgatgtggagcgattaccagacgacgagggagagggagaaggaggagaacagaagcccgtggtggaagaggaggacccgagctggccgctggatgccgatgtcggatgggggatccgggcctcagagtacttcgacaagcactcgatcagaaatgtcacagtggacggggtggagatcgattgggaaggggacgtcgacgaggggtgggtcaaggaaatcaattgcttggagtgggagagcttcgcattccaccccagccccttagtcgtcctagtcttcgagcggtacaacagggctgctgacaattggaagtttcttcaagaattggaaaaggctgctaaggtgtactggaatgctaaagatcgcttacctcctcggacagtcaaagttgatataaatattgagagggatttggcatatgcacttcaagcaagagaatgtccacaattattgttccttaggggaaacaagatcttatatagagaaaaagagataaggactgcagatgagctggttcaaatgattgcccatttctactacaatgcaaagaggccatcttgcgttaatcctgaggccgttgcttctttctagttcttgtatagaattgttgacatagtgttttcatcctcaaccggtgtgttggtgctagtttttgactggaagaagaagctcccttattcaatcattttccaggacatggtgctcggatagtttggaattgatatgactaaacgaaaaccaagaaaaacatctcaatgctggttgggaaagtgtgaactaaatcatgtatcattctgattagtagtgtagtgtaacaaaatacaactttcaggggagagtgcttagatcatttttatcggttagctatattagatgatttcaaagttgactgcaaactttgtcatggagcaaaacttaggtgctgtttggttcacgaaatataacgtaaagggtaatggtaatggtttacacttgattacgggcggtaacaagtttgaatagtccggtatcaaattttagtacggtatctgattacggttggactaaaacaaacatgatttaacgtaatcatttacccattacgttacaaatatttgaaccaaacggtaccttatttcggttccctcttatagtgagaggaaaatatattttggtgtaggttgaacgcgtactcttgtggtgttttaactcttttcccgtgctagaaactgggactacattcggatgaagaactggttaattcgtgtc

SEQ ID NO: 116365 - DNA, 1212 bp, Zea Mays
agaaaccgccattcggatagcacgggcgcacctgccgaccggcgaaacccagccgcatactcgcgcccattctcgccgcgcacgatgctccgtctccccaccctcaccgcccttaaaccctcaacccccgccatcagcttgaaccgtgtcggctgcagccatggccgccgccgccgcaagctcatctttgtctcatccgctcctccgccgtcttcttcgtcttcacggcctccgaagccgacgtcgaacccggaaccaccaaagcccacacatgaggcccgcaaccggaacccggatggatccaccgaggcagggttccccacaaccaagccccggaagccacgccgtgggcgccgcagcgagtcggcggccgtggaggacttcgtccgcaaccgccttgagcaggtctttgcctccatccaggagcgcaaccccgacgtcctcgagggcaaaggcgacatcctgaagccgaaggccgatgtggagcgattaccagacgacgagggagagggagaaggaggagaacagaagcccgtggtggaagaggaggacccgagctggccgctggatgccgatgtcggatgggggatccgggcctcagagtacttcgacaagcactcgatcagaaatgtcacagtggacggggtggagatcgattgggaaggggacgtcgacgaggggtgggtcaaggaaatcaattgcttggagtgggagagcttcgcattccaccccagccccttagtcgtcctagtcttcgagcggtacaacagggctgctgacaattggaagtttcttcaagaattggaaaaggctgctaaggtgtactggaatgctaaagatcgcttacctcctcggacagtcaaagttgatataaatattgagagggatttggcatatgcacttcaagcaagagaatgtccacaattattgttccttaggggaaacaagatcttatatagagaaaaagagataaggactgcagatgagctggttcaaatgattgcccatttctactacaatgcaaagaggccatcttgcgttaatcctgaggccgttgcttctttctagttcttgtatagaattgttgacatagtgttttcatcctcaaccggtgtgttggtgctagtttttgactggtaaatattttatccgaaagtttactcttttgccaattgtaaacagcaatagtgccggttattcatctatttagca

SEQ ID NO: 116366 - DNA, 206 bp, Zea Mays
tgtgaataggctggaggaatgtgtgtagctatattggtgccaacaggtgaggagagggcatcaattaccattttaccagaactcacttgtttcccaagctcatctatctctttcccactgctatttgttgttcttcctcgaatgtattctggctatgaacattgtggagatttctgaactctgattacagctaccccgtttcccaa

SEQ ID NO: 116367 - DNA, 105 bp, Zea Mays
ggaagcacgagtattggaggttctggatttgccccctttgtgatcgcaagaagttcgtggacactgggttgctattgtcacacatgtgcaccaggcacccaaggg

SEQ ID NO: 116368 - DNA, 1396 bp, Zea Mays
ttaaacggggtacactgtacatagttgttgtttagaagctgtcagtcagctttacatagtcctggattgtgagctgaggtacccatacctcattaaaatcaagtatttaactttattcagaggacatatgatgtgcttgcatgattcttagggtttatatttgatactacacttagtttcagcttttatttacacagattcttcttttcctaaattagtcataatttatgtcctccatctgtggtactccctctgccccaaattaaaatttgttttagattattaatggattcatacaacacttgatgtatgtgctttatatatgtgtctaaattcatcatcacctatttgaatatagacattgaaacctagagctaaaacgaatagtattttgggactcagggagtaactggtaagacattgatcatgactgtttccttaaatcagatttgcagcatcaattatcaatcgaccgttgtgggttatgaatgttgtacctgttgatcagccagatacattgcacatcattttcaacagaggtctgattggggtatatcatgactggtgtgaatcttttaacacatacccacgaacttatgatcttattcacatgagttatctcttagggccccttacgaaaaggtgccacatcattgaagttgcagctgaaattgacagaatacttagacctggtagatggtttgtgctgcaagacactatagacatgataagaaagatggaccctgttctcaggtctttgcattacaagactacaattgtcaaacatcaatttcttcttgccaccaagggtttctggcgccctggcagtataggttcttagtcatgatgattccggcttccacccaaaatggtattggctccatggactcattgtgttgattcttcttattctttttacgtcgattcttctcatagcatagattagatgcttcattgaagccccatatcaagttgagtttcatgttccaattttcccgctttgttttactattttaaaaatgttttggccttggtcatgcaaatttctgtttgttattgcaaacaggttaaatcaataggttagtgctaaaaattctgttaggcgaattctattttttttcaatatatatttagctataaacttctactgtatgacatcaatattgtccatttagccatgattcttgccttcttgcaaaagaacaagtataacctttgaattatttctttactactcaattttatgcttcctccatcacataatataagggattctgagtttgttcaaagttgaactattctaagttagaccttgtctgtactatccgttataagttgcttttacttttttggtatgtgcattttgctatgtatctagacatactttatctctagg

SEQ ID NO: 116369 - DNA, 2728 bp, Zea Mays
accgcatacggccgtgcgcttcctttccttcccccgccgccgcagatcttccccgcagtcccggttcccgttcaccacctccgaaccagaggaggaatggccatctactccttcctttctgttcgcaagcgcccagttgttgtcgtcgccgccgtcaccctcttcattgtcgtatcctctctcttcctcctcttcagccccgcaccgacagcgctcccgtttttctcctcctcctcttcccacctctcctctcaagcttcaattgctgccgtctcctctaacgcatttccacctgagaccccaacctctgttgtctccaactgggtcagcagcaacacttctgctgatcgcgtctctgctgacgcatctccgcccgtagtcggaaccgccatcgcgtctgatgcggtcagcaacagcacggctgacccgcctaggccagataccaccgccgctgctggcgacgcgaaggctgatgtgtcccaaccagatcacggcatgccccctgccgccactgaagcgagtggatcggcaggcaacggtgagacagccgcgggagtctcgagcgagagggatgaggaggggcaaggcggcggcggcgccgtggaggagctaccatcgtgggagctgtgcaaggtggggaagggggtggcggccgcggactacatcccctgcctcgacaacgtgaaggcggtcaaggcactcaagtcgctgcggcacatggagcaccgggagaggcactgcccgacagatccgaggccgaggtgcctcgtgccgctgcccgagaggtaccggcgtccggtgccgtggccacgcagccgtgacatgatttggtataataatgttcctcatccaaagttagtggaatacaagaaggaccagaactgggtcaggaagtctggtaactattttgttttccctggaggtgggactcaattcaaaaatggcgtggcttcatacattaaattcattgaacagattttaccaaacattcaatggggaatccatacaagaactgtccttgatgttggatgtggtgtggccagctttggtggatatttgcttgataggaatgtcattaccatgtctgttgcacccaaagatgagcatgaagctcagatacagtttgcactggagcgtgggattccagcatttttggcagtgattggaacacaaaagcttcctttccctgataattcatttgatgtcatccactgtgcaaggtgtagggtccactggtggaaaaccattgttggagctcaatagagtactcaggcctggagggtattacatttggtctgcaacacctgtctatcgcaaaaacccaagagatatagatgattggaatgcggtggtagctctgaccaaatcgatctgctggaggacagtggtaaggtctcgagatatcaataagatcggagttgttatataccaaaagccgacatcaaattcatgctcccttgagagaaaaaataatgaaccacctctgtgctctgagagtgatggatcacgtttcccttggtataaacctctcgatagttgcctctttcctgcagttccgagttcaggtgaagggaatagttgggccgtctcgtggcctgaaagacttaatattaagcactcggctacatctaacaattcttccattcagtttcctcaagaaaaaattgattctgatacaagttattggaaggaccttgtttcagaaatatatctcaacgaatttgcagttaattggtctagtgttcgcaatgttatggacatgaatgcgggttttggaggatttgcagcatcaattatcaatcgaccgttgtgggttatgaatgttgtacctgttgatcagccagatacattgcacatcattttcaacagaggtctgattggggtatatcatgactggtgtgaatcttttaacacatacccacgaacttatgatcttattcacatgagttatctcttagggccccttacgaaaaggtgccacatcattgaagttgcagctgaaattgacagaatacttagacctggtagatggtttgtgctgcaagacactatagacatgataagaaagatggaccctgttctcaggtctttgcattacaagactacaattgtcaaacatcaatttcttcttgccaccaagggtttctggcgccctggcagtataggttcttagtcatgatgattccggcttccacccaaaatggtattggctccatggactcattgtgttgattcttcttattctttttacgtcgattcttctcatagcatagattagatgcttcattgaagccccatatcaagttgagtttcatgttccaattttcccgctttgttttactattttaaaaatgttttggccttggtcatgcaaatttctgtttgttattgcaaacaggttaaatcaataggttagtgctaaaaattctgttaggcgaattctattttttttcaatatatatttagctataaacttctactgtatgacatcaatattgtccatttagccatgattcttgccttcttgcaaaagaacaagtataacctttgaattatttctttactactcaattttatgcttcctccatcacataatataagggattctgagtttgttcaaagttgaactattctaagttagaccttgtctgtactatccgttataagttgcttttacttttttggtatgtgcattttgctatgtatctagacatactttatctctagg

SEQ ID NO: 116370 - DNA, 1217 bp, Zea Mays
ttttcttgaactgtcttaaccagtggttacatcagtggtcaatagtcaaggcaattatgatttgtgcaatcttgggtcttggttactgatgcatcggcttcagaggggatttatgctatgatctttttcataccatatatgttaatcatcttgttccccttcttcaggtataaacctctcgatagttgcctctttcctgcagttccgagttcaggtgaagggaatagttgggccgtctcgtggcctgaaagacttaatattaagcactcggctacatctaacaattcttccattcagtttcctcaagaaaaaattgattctgatacaagttattggaaggaccttgtttcagaaatatatctcaacgaatttgcagttaattggtctagtgttcgcaatgttatggacatgaatgcgggttttggaggatttgcagcatcaattatcaatcgaccgttgtgggttatgaatgttgtacctgttgatcagccagatacattgcacatcattttcaacagaggtctgattggggtatatcatgactggtgtgaatcttttaacacatacccacgaacttatgatcttattcacatgagttatctcttagggccccttacgaaaaggtgccacatcattgaagttgcagctgaaattgacagaatacttagacctggtagatggtttgtgctgcaagacactatagacatgataagaaagatggaccctgttctcaggtctttgcattacaagactacaattgtcaaacatcaatttcttcttgccaccaagggtttctggcgccctggcagtataggttcttagtcatgatgattccggcttccacccaaaatggtattggctccatggactcattgtgttgattcttcttattctttttacgtcgattcttctcatagcatagattagatgcttcattgaagccccatatcaagttgagtttcatgttccaattttcccgctttgttttactattttaaaaatgttttggccttggtcatgcaaatttctgtttgttattgcaaacaggttaaatcaataggttagtgctaaaaattctgttaggcgaattctattttttttcaatatatatttagctataaacttctactgtatgacatcaatattgtccatttagccatgattcttgccttcttgcaaaagaacaagtataacctttgaattatttctttactact

SEQ ID NO: 116371 - DNA, 1165 bp, Zea Mays
ttaaacggggtacactgtacatagttgttgtttagaagctgtcagtcagctttacatagtcctggattgtgagctgaggtacccatacctcattaaaatcaagtatttaactttattcagaggacatatgatgtgcttgcatgattcttagggtttatatttgatactacacttagtttcagcttttatttacacagattcttcttttcctaaattagtcataatttatgtcctccatctgtggtactccctctgccccaaattaaaatttgttttagattattaatggattcatacaacacttgatgtatgtgctttatatatgtgtctaaattcatcatcacctatttgaatatagacattgaaacctagagctaaaacgaatagtattttgggactcagggagtaactggtaagacattgatcatgactgtttccttaaatcagatttgcagcatcaattatcaatcgaccgttgtgggttatgaatgttgtacctgttgatcagccagatacattgcacatcattttcaacagaggtctgattggggtatatcatgactggtgtgaatcttttaacacatacccacgaacttatgatcttattcacatgagttatctcttagggccccttacgaaaaggtaaatgaactagccttttaattgtgaagaactcttactgtgtatattctgacattctcgtgtcccaactttatagcaagcaagctttttcattttttttatcttaggtgccacatcattgaagttgcagctgaaattgacagaatacttagacctggtagatggtttgtgctgcaagacactatagacatgataagaaagatggaccctgttctcaggtctttgcattacaagactacaattgtcaaacatcaatttcttcttgccaccaagggtttctggcgccctggcagtataggttcttagtcatgatgattccggcttccacccaaaatggtattggctccatggactcattgtgttgattcttcttattctttttacgtcgattcttctcatagcatagattagatgcttcattgaagccccatatcaagttgagtttcatgttccaattttcccgctttgttttactattttaaaaatgttttggccttggtcatgcaaatttctgtttgttatt

SEQ ID NO: 116372 - DNA, 2077 bp, Zea Mays
accgcatacggccgtgcgcttcctttccttcccccgccgccgcagatcttccccgcagtcccggttcccgttcaccacctccgaaccagaggaggaatggccatctactccttcctttctgttcgcaagcgcccagttgttgtcgtcgccgccgtcaccctcttcattgtcgtatcctctctcttcctcctcttcagccccgcaccgacagcgctcccgtttttctcctcctcctcttcccacctctcctctcaagcttcaattgctgccgtctcctctaacgcatttccacctgagaccccaacctctgttgtctccaactgggtcagcagcaacacttctgctgatcgcgtctctgctgacgcatctccgcccgtagtcggaaccgccatcgcgtctgatgcggtcagcaacagcacggctgacccgcctaggccagataccaccgccgctgctggcgacgcgaaggctgatgtgtcccaaccagatcacggcatgccccctgccgccactgaagcgagtggatcggcaggcaacggtgagacagccgcgggagtctcgagcgagagggatgaggaggggcaaggcggcggcggcgccgtggaggagctaccatcgtgggagctgtgcaaggtggggaagggggtggcggccgcggactacatcccctgcctcgacaacgtgaaggcggtcaaggcactcaagtcgctgcggcacatggagcaccgggagaggcactgcccgacagatccgaggccgaggtgcctcgtgccgctgcccgagaggtaccggcgtccggtgccgtggccacgcagccgtgacatgatttggtataataatgttcctcatccaaagttagtggaatacaagaaggaccagaactgggtcaggaagtctggtaactattttgttttccctggaggtgggactcaattcaaaaatggcgtggcttcatacattaaattcattgaacagattttaccaaacattcaatggggaatccatacaagaactgtccttgatgttggatgtggtgtggccagctttggtggatatttgcttgataggaatgtcattaccatgtctgttgcacccaaagatgagcatgaagctcagatacagtttgcactggagcgtgggattccagcatttttggcagtgattggaacacaaaagcttcctttccctgataattcatttgatgtcatccactgtgcaaggtgtagggtccactggtggaaaaccattgttggagctcaatagagtactcaggcctggagggtattacatttggtctgcaacacctgtctatcgcaaaaacccaagagatatagatgattggaatgcggtggtagctctgaccaaatcgatctgctggaggacagtggtaaggtctcgagatatcaataagatcggagttgttatataccaaaagccgacatcaaattcatgctcccttgagagaaaaaataatgaaccacctctgtgctctgagagtgatggatcacgtttcccttggtacattttcttgaactgtcttaaccagtggttacatcagtggtcaatagtcaaggcaattatgatttgtgcaatcttgggtcttggttactgatgcatcggcttcagaggggatttatgctatgatctttttcataccatatatgttaatcatcttgttccccttcttcaggtataaacctctcgatagttgcctctttcctgcagttccgagttcaggtgaagggaatagttgggccgtctcgtggcctgaaagacttaatattaagcactcggctacatctaacaattcttccattcagtttcctcaagaaaaaattgattctgatacaagttattggaaggaccttgtttcagaaatatatctcaacgaatttgcagttaattggtctagtgttcgcaatgttatggacatgaatgcgggttttggagggtaagcaaaaactggtttgagatctttatgcaaaattaatttagactagttgattgtatcagctgttacaacaacataccttttgaaatgtctaactttcacttcttctgcctggatcttgtttga

SEQ ID NO: 116373 - DNA, 231 bp, Zea Mays
tttttttattattcttttattcctttccaaattcaaaacttcaactctaaaagaaattatttttgtggcaaatttgtaatttggttagatattaaatttgaacttgccaatataaaattttattaataagttttattttgtgatttatatagtatttctctccttctattctatttattcaaagtaggtattaaatcctcaatttgaatgttgatttatttgtcaccaaat

SEQ ID NO: 116374 - DNA, 1140 bp, Zea Mays
ttcccagcccagccatctagagtaacccttaactatcgcatcaactcaccgaaccacacagtaacaatagatgatcaatctcctacggataaaatagtgtatgctactgtatatgtgtagcacctcccctcctaacccaatctccacctctcctttgcagagagaaacaactcgatcgatcgatcaagaagaccggcgaggctctagctccagaccgacaatgccgtacgcagccacaaggacgtcgccgcagcagcacagccgcgtggccagcaacgggagggccgtggcggcgtgcgcaggccacgcgggcgtgccggacgaggtggcgcggcaccacgagcacgcggtggccgcggggcagtgctgctctgtgatggtgcagtccatcgcggcgccggcggacgcggtgtggtcgctggtgcgccgcttcgaccagccgcaggggtacaagcgcttcatcaggagctgccacctggtggacggcgacggcgtcgaggtggggtccgtgcgggagctcctggtcgtgtccgggctgcccgccgagaacagccgcgagcggcttgagatccgggacgacgagcggcgggtgatcagcttccggatcctgggcggcgaccaccgcctcgccaactaccgctccgtgaccaccgtgcacgaggcggcctcagagggcgggccgctcaccatggtcgtcgagtcctatgtggtggacgtgccgccggggaacaccgtcgaggagacgcgcatcttcgtggacaccatcgttcggtgcaacctccaatccctcgaggacacggttatcaggcagcaggcgatggcggcaccggcagcgccgcacaacgaccacaaccacagctgatcgccgccgggcccggccggctggacaccctcgcagtgggggctgccggtttcttcggaggcttcatctgccatttatgatgttttctttcgccgttggtattctatagtttcaccaataagaagaataggtactgtgaactttttaaaggttgaggttgttcgtcttccctttcttaaactctaaaaacgacaataaagtattgtatgatacaccaccaataatattaagaccagtaaagtagtatagttctaatatatatgtgtaagtttgtgtat

SEQ ID NO: 116375 - DNA, 1356 bp, Zea Mays
cagcgctcccacataccgaacacacttcctgtggtctttagtatctcccctcccactgtcgccgcagtcgtcgccgtatagcacactatcttcgcttctgggatatctatgtgaggtaggggactactaccactcttcaaatcatatcgatagtaacctcttttacaaggtttgttgagtggaaaaccatataatctgacaccttcgccacctctgtctcatcaccttttgttgttgcctctaccattagagaccatacccctaccttagtagctatcagatctgtttcccccgacccactcaaaatattgaaccactacttccaatccctaaacctaatgacacctgagcgctacccatcataggatcgccatcatccattgaataaaatagaagagagaaacaactcgatcgatcgatcaagaagaccggcgaggctctagctccagaccgacaatgccgtacgcagccacaaggacgtcgccgcagcagcacagccgcgtggccagcaacgggagggccgtggcggcgtgcgcaggccacgcgggcgtgccggacgaggtggcgcggcaccacgagcacgcggtggccgcggggcagtgctgctctgtgatggtgcagtccatcgcggcgccggcggacgcggtgtggtcgctggtgcgccgcttcgaccagccgcaggggtacaagcgcttcatcaggagctgccacctggtggacggcgacggcgtcgaggtggggtccgtgcgggagctcctggtcgtgtccgggctgcccgccgagaacagccgcgagcggcttgagatccgggacgacgagcggcgggtgatcagcttccggatcctgggcggcgaccaccgcctcgccaactaccgctccgtgaccaccgtgcacgaggcggcctcagagggcgggccgctcaccatggtcgtcgagtcctatgtggtggacgtgccgccggggaacaccgtcgaggagacgcgcatcttcgtggacaccatcgttcggtgcaacctccaatccctcgaggacacggttatcaggcagcaggcgatggcggcaccggcagcgccgcacaacgaccacaaccacagctgatcgccgccgggcccggccggctggacaccctcgcagtgggggctgccggtttcttcggaggcttcatctgccatttatgatgttttctttcgccgttggtattctatagtttcaccaataagaagaataggtactgtgaactttttaaaggttgaggttgttcgtcttccctttcttaaactctaaaaacgacaataaagtattgtatgatacaccaccaataatattaagaccagtaaagtagtatagttctaatat

SEQ ID NO: 116376 - DNA, 1075 bp, Zea Mays
cagcgctcccacataccgaacacacttcctgtggtctttagtatctcccctcccactgtcgccgcagtcgtcgccgtatagcacactatcttcgcttctgggatatctatgtgagagagaaacaactcgatcgatcgatcaagaagaccggcgaggctctagctccagaccgacaatgccgtacgcagccacaaggacgtcgccgcagcagcacagccgcgtggccagcaacgggagggccgtggcggcgtgcgcaggccacgcgggcgtgccggacgaggtggcgcggcaccacgagcacgcggtggccgcggggcagtgctgctctgtgatggtgcagtccatcgcggcgccggcggacgcggtgtggtcgctggtgcgccgcttcgaccagccgcaggggtacaagcgcttcatcaggagctgccacctggtggacggcgacggcgtcgaggtggggtccgtgcgggagctcctggtcgtgtccgggctgcccgccgagaacagccgcgagcggcttgagatccgggacgacgagcggcgggtgatcagcttccggatcctgggcggcgaccaccgcctcgccaactaccgctccgtgaccaccgtgcacgaggcggcctcagagggcgggccgctcaccatggtcgtcgagtcctatgtggtggacgtgccgccggggaacaccgtcgaggagacgcgcatcttcgtggacaccatcgttcggtgcaacctccaatccctcgaggacacggttatcaggcagcaggcgatggcggcaccggcagcgccgcacaacgaccacaaccacagctgatcgccgccgggcccggccggctggacaccctcgcagtgggggctgccggtttcttcggaggcttcatctgccatttatgatgttttctttcgccgttggtattctatagtttcaccaataagaagaataggtactgtgaactttttaaaggttgaggttgttcgtcttccctttcttaaactctaaaaacgacaataaagtattgtatgatacaccaccaataatattaagaccagtaaagtagtatagttctaatat

SEQ ID NO: 116377 - DNA, 1780 bp, Zea Mays
gctgcgccgcgccatcctcttctctgaattgccctgaagacttaggaggctcacaaatctgaagcttatatagatctgcacaggcttaaggagtgtttgcttcgtagcattagtgattggcatggatgaaaccctgcaagcactcgatgatctgatctcccagttcctgagcctggaccggtccctctggtccagttctgacgatgccgaggccttcttagaagccgtggacgaactgacttccaccatccatggcctcgagagcacctcagcggaccatgcgctccttgagagctttgacctccttctagagcgatgttccgcgaggctcaaggatgagttccagcgtctggtgggcacatccggcttcagcgacgacgaccatggtgaccgcagttccaagagaagccagaatgaagacgccaacgaccacacctttgtagcccagccagtcagaaactttgacatcatcgtcgatgccttgccggagggcgtagtcaccgaggcaaaccgagtcgcgagaaggatgattgctgccggttttggcgatacgtgtgcggagacctacgcctctgcacgccgcagcttcattgacgagagcattgctcgacttggggttgacgctcattgggaagaagaagaattgtgcaataagtcaacaacagcatgggaggagctcgagactcggatcatgcgctggatacctgcaacacgcgttgtgttccacatcttgatcccgagcgagcgtcacctgtgcgactgcatcttcgaaggattcacatcctacgctgaccttgccttcgccaccgcatgcagacctttcctccaacccctgtccttcgctgaagctatcgctgctgctgccggacataggccggagagtctcttccgcatggtcgacatgtacgatgccttaaccgatatccttcctgtccttgacgaagccttggatcacgaggtcgtggctgctcctcgtgaacgtcttggactgtcaatcaagggcatatttgtggctctagaaaagctgatacgcggtgacccgtgcgagtcttcgccgccagatggtggactgcatccgataaccaggtacgtgatgaactacctcatggcagcctgcgtgtctcgccacactctggaggaagtgatgctcgtggagttcggtcgtgctgatgaaacatgtccagtcgaccctgaccgtcccacgtcgtcactggcgatctgctttgcttggatcgtggacgtgctgatagcgaatctcgagtccaaatccaggatctatggtcacgctcctcttggctgtgtcttcctgatcaacaacgggatctacataatcaagaaagtcagtggatgcgagcttaagatcttgctgggcgaggattggaccagggtgatgtctgcgaaggttcaccagtgggtgctggagtaccgccgggctacctggggcagggccgtagcaatacttgagactgacagaagacctggcagtagttcgagtagtgttatgctagagaaactgaaccgcttccatacctttctggaagccatctgccaggtgcagtcacggtgggtactggtggataagcagcaggcagtggatctgagcgttatggttgaggagctggttgctccggtctacagggacacagttgagatgttgaaggcaacagaggatgtaggggtttcgtatgtgcgacctgaggacgtgaagtcacggattcagaggttgttcaaagcaatggccaagtcatagtagagtggctttcctggctgctctatgctc

SEQ ID NO: 116378 - DNA, 1944 bp, Zea Mays
atggcggagaacggcgaggagaagctgctcgccacggtgcagcacatcgtccagacccttggccgcaccgacaccatgacggaggatatactcaaggtcttctccaactatgacggccgcctctcgcttgacaagctatacgccacgcgcgccgctgctgcggcggccgcggtcggaggggctggggagcgctccgtgccagcctcgccgcccatgccgccccctccagtggcgccgtcggctgccgcggccatgcccccggtgacgtcgctggagcggaccgtgcgcacgctggaccggcagatctcgcagttcgtcgccatggataggctcatatgggcggactcagcggacgcggacgcgttcctagaggcggtggacgacctcatcggaaccgtgcaggagctggatgccgccgggaccaaccgcgggctgctcgaccgcgccgacgagctgctgagccggtgcatggcccggctggaggacgaatttcgggctctcatcgagcgccccgacgacgcggcgcctcaggttaccggtgggttcgggtccgatgaaagcgaggaggatgagtacgacgcggatgacggctttggcgacgagccaatcccaatcgcgaggccggtctcggacttcgacatcgttatagatgctcttccgccgggctcggtctctgatgttcaccagattgcccggcggatggtggacgctggctttggccgcgagtgcgccgaggcatacgcggccgcacgccgcggtttcatcgacgagagcgtcgctcgccttggcatccgttcccgtacggtcgacgaggtccactccttaccatgggaggagctcgagtttgacattgctcgctggatcccagccttcaagatggtgtttcgcatcctaatccccagcgagcgccgcctctgtgatcgtgtcttcgaaggccttgctccgtacggcgaccttgcctttgttgctgccgtgcgcacccaggcgcttcagcttatttcattcggagatgcagttgctgctgccagccgcgcgccagaacggctcttccgtgttattgacatgtatgaagcagtacgagacctcctttctgacctcgatcctgtcttctctgatccctactctgcagctctacgtgctgaggtatcagctgtatgcaacactcttggctcctcaatcaagggtatattcatggagctggaaaatctcatccgccgtgacccagcccgtgttgctgtgcctggtggtggtatacatcctatcactcggtatgtcatgaactatctccgtgctgcttgtggttcacggcaaacattggaagaggtgatggaaggtgacttgggtgctgttggcacagcggctattgctgtcgaccctgatcgccctacttcgtcgctagctgtgcacatagcttggatcatggatgtgcttcacaaaaatttggagaccaaatcaaagatatacagggatccaccacttgcttccatattcttgatgaataatgggaaatacattattcacaaggtcaatgacagtgagcttggggttttgcttggtgatgaatggatgaagcagataatgagcagggtgcgcaggtggagtgtggagtaccagcgtggggcctgggcaaaagtcatatcagtgctgcagaccggaggtcctggcgttggcagtatcactgcaaaatccatgcttcagaagatgcagatgttcaacagctacctggaggagatttgcgcggtgcagtcagattgggtgattgcagatgagcagctacgagcagatgttaagtcagcgatagtggattctgttatgcctgcatatagaggcttaattgggagattgagatcatctcctgaagctgcccgagacttgttcatcaaatacaccccagaggatgttcaggaacgcatccaacatctatttgaaggggtggccaagtga

SEQ ID NO: 116379 - DNA, 2027 bp, Zea Mays
tctcatcgcaaactcggaaaccttgagaggaaagccaccagcagcaagcgaagaccaccagcagcagcgcagcggcgacgtgtttcgctctcgccatggcgtcgtcgtcctcgtcccggctgctgctcctcctcctcccgtgcctcgcgctcacgctgctcggcgcggcagacgccgaagtgcaccaccacgagttcgttatccaagagacgccggtgaagaggctgtgcaagacgcacaacatcatcacggtgaacgggcagtacccggggccgacgctggaggtcagggagggtgacacgctcgtcatcaacgtcgtcaaccgggcgcagtacaacgccaccatccactggcacggcatccgccagataaggactgggtgggcggacgggccggagttcgtgacgcagtgccccatcaggcccggcggcagctacaagtaccggttcaccatccaggggcaggagggcacgctgtggtggcacgcgcacagctcctggctcagggccaccgtctacggcgcgctcatcatccgccccagggagaacaagacctacccattcgccaagccctcgcgagaagtccccgtcatcctcggtgagtggtgggatgcgaacccgatcgacgtcatccgggaggcgcagaggaccggcggcggtcccaacgtctccgacgcgttcaccatcaacggccagcccggcgacctgtacaaatgctccaacaaagagactacggccatcccggtgaaggccggcgagacggcgctgctgcggttcatcaacgccgcgctcaaccacgagctgttcgtcaccatcgcgcagcacaagatgacggtcgtcgccaccgacgcgtcctacaccaagcccttcaccacctcggtgctcatgctcgcgccgggccagaccaccgacgtcctcgtcaccatggaccagccgcccacccgctactacgtcgccgcgcgcgcctacgtctccggccagaacgtggccttcgacaacaccaccaccacggccgtcctcgagtacgactgcggctgcgcctccgacttcggccccaagatacagccggcgttcccggcggcgctaccggccttcaacgacacgtccgccgccaccgccttcgccgccgggatcaggagccccgaccgggtcaaggtccacgagaacgtcgacgagtacctcttcttcaccgtcggcctcggcctcttcaactgcaagccgggccagctctgcgccgggcccaacaacaacacccgcttcgcggccagcatgaacaacgtctccttcgtcttcccgcagaccgactccctcctccacgcgcactactacaagatccccggcgtcttcaccaccgacttcccggcatacccgcccgtgcagttcgactacacggggcagaacgtcagccaggccctgtggcagccggtccccgccaccaagctgtacccgctcaggttcggctccgtggtgcagctcgtcctgcaggacaccagcatcgtcacgcccgagaaccaccccatccacatccacggctacgatttcttcatcctcgccgagggcttcggcaacttcgaccccaagaaggacgtcgagaagttcaactacgtcgacccgccccagaggaacaccgtggcggtgcctgtcaacggttgggcggtcatccagttcgtcgccgacaaccctggtgtgtggctcatgcattgccatctggacgtgcacatcacctggggcctggcaatggctttcctagtggaggacggctatggcgaactgcagtcgctggagccgcccccagttgatcttcccatgtgctagtggaggacggatatttgtgttgaggaagaaagcctggtcacgttgtatgttaattgttactcttttttggtggaggggggcgtgttcgtgatcttaaattcttaggggacttaattttccagcttgttggtttgaagtttcttctgtaaatctatgtaattttcaatgacattcagcatattatttgagaataaattatttctttgtacaaac

SEQ ID NO: 116380 - DNA, 2169 bp, Zea Mays
tctcatcgcaaactcggaaaccttgagaggaaagccaccagcagcaagcgaagaccaccagcagcagcgcagcggcgacgtgtttcgctctcgccatggcgtcgtcgtcctcgtcccggctgctgctcctcctcctcccgtgcctcgcgctcacgctgctcggcgcggcagacgccgaagtgcaccaccacgagttcgttatccaagagacgccggtgaagaggctgtgcaagacgcacaacatcatcacggtgaacgggcagtacccggggccgacgctggaggtcagggagggtgacacgctcgtcatcaacgtcgtcaaccgggcgcagtacaacgccaccatccactggtacgtacgtcgttgaagctcgtttttctcaaccgtgagtgacatgacatgacatgacatcgatcgtctggtctgtctatactctctcccgttcatggccggctgtctcgatcaatgcgcgctgcatgcatggcgtgtgcaggcacggcatccgccagataaggactgggtgggcggacgggccggagttcgtgacgcagtgccccatcaggcccggcggcagctacaagtaccggttcaccatccaggggcaggagggcacgctgtggtggcacgcgcacagctcctggctcagggccaccgtctacggcgcgctcatcatccgccccagggagaacaagacctacccattcgccaagccctcgcgagaagtccccgtcatcctcggtgagtggtgggatgcgaacccgatcgacgtcatccgggaggcgcagaggaccggcggcggtcccaacgtctccgacgcgttcaccatcaacggccagcccggcgacctgtacaaatgctccaacaaagagactacggccatcccggtgaaggccggcgagacggcgctgctgcggttcatcaacgccgcgctcaaccacgagctgttcgtcaccatcgcgcagcacaagatgacggtcgtcgccaccgacgcgtcctacaccaagcccttcaccacctcggtgctcatgctcgcgccgggccagaccaccgacgtcctcgtcaccatggaccagccgcccacccgctactacgtcgccgcgcgcgcctacgtctccggccagaacgtggccttcgacaacaccaccaccacggccgtcctcgagtacgactgcggctgcgcctccgacttcggccccaagatacagccggcgttcccggcggcgctaccggccttcaacgacacgtccgccgccaccgccttcgccgccgggatcaggagccccgaccgggtcaaggtccacgagaacgtcgacgagtacctcttcttcaccgtcggcctcggcctcttcaactgcaagccgggccagctctgcgccgggcccaacaacaacacccgcttcgcggccagcatgaacaacgtctccttcgtcttcccgcagaccgactccctcctccacgcgcactactacaagatccccggcgtcttcaccaccgacttcccggcatacccgcccgtgcagttcgactacacggggcagaacgtcagccaggccctgtggcagccggtccccgccaccaagctgtacccgctcaggttcggctccgtggtgcagctcgtcctgcaggacaccagcatcgtcacgcccgagaaccaccccatccacatccacggctacgatttcttcatcctcgccgagggcttcggcaacttcgaccccaagaaggacgtcgagaagttcaactacgtcgacccgccccagaggaacaccgtggcggtgcctgtcaacggttgggcggtcatccagttcgtcgccgacaaccctggtgtgtggctcatgcattgccatctggacgtgcacatcacctggggcctggcaatggctttcctagtggaggacggctatggcgaactgcagtcgctggagccgcccccagttgatcttcccatgtgctagtggaggacggatatttgtgttgaggaagaaagcctggtcacgttgtatgttaattgttactcttttttggtggaggggggcgtgttcgtgatcttaaattcttaggggacttaattttccagcttgttggtttgaagtttcttctgtaaatctatgtaattttcaatgacattcagcatattatttgagaataaattatttctttgtacaaac

SEQ ID NO: 116381 - DNA, 500 bp, Zea Mays
atgaaaattcttagcatacacaataatgagctaaccactaagctagaaaacattggtagcaccccagaagtatctttgattgaaatacctaaaattgttaagaaagatgcttctacttcttgctttgatttaattgataactctaacccctacaatcaagttattgttaagaatgttgttatagaaacatgttcggacgagattgcaatggagaatgagcaactaaagcaagaggtggctcgccttggaaagaccttgtatgacaagaaaggcaaagccaaacaaatccaacctccacatgataacaccactgcggcagtgaacaagcctgtggagggcgaaactgtgatttgtagactatgccacaaagaaggccacaagtctttccaatgcaaggtgaagaccagggataagcaaaagtaaaagctcaagcaaaaaccaacaagcaaaatctccaacatctacatcaacaaggtgaacaaaaaggttgttacaccata

SEQ ID NO: 116382 - DNA, 363 bp, Zea Mays
atgcgcaggcgcttcagggtaccccctccatccgggtccgagtcgccgatcttccgccttgagggcctcgcgggtcgatttcgggagcttgaaacagaatccttctgccaggccttcgtcgtcgccacgtctcactttgagggggggatcgagctggaggccctaagcgaaggttattgcgacgcctggaacgattttgatcttgccagcatggtgaaggccacagagccttttgctcggaagctaggagccgccctgcttggcaatatcccgcccaaggaagtcaaggaggatctacgccattgtaatgtttatatggaaggatggcccttccttttctcggcgccctacttaactttgtga

SEQ ID NO: 116383 - DNA, 2248 bp, Zea Mays
acaaatccaaagcagttcccacctcatcgccttcctccttccaccgttccctgcccgccaaccaggacgtacacgccggacacacgtcacagccttgaagcctccctcccacacaaccccaagccccaacacaaacacacacacacgatcggtctcgtcgcagcgcagcgccgcgccgcgggtttgatcgtcacgagtggcgacttccttcccctccctctttcgccgatgaccacctcgtcctccgggagcatcgaagcaccggcgaactccagacccggctcgttctcgttcgcgagcacgagcacgagcttcacgaacatgctggggggatctgcggacgcggccggcggggcgtcgaggtacaaggccatgaccccaccgtccctgcccctgtcgccgtcgtccttcttcagtaacatccccgacggcctcaaccccgccgacttcctcgactcgccggcactcctgagctccagtatcttcccctcgccgacgacgaacgcattcgcctcgcagcagttcagctggctggtgacgccaggcgcggagcaaggcggcaaggacgagcagaggcagtcgtacccagacttctcgttccagaccgcgccgacggccgaagatgccgtgcggacgacgaccttccagccaccggttccagcggccccaccggttgaagaggcgtacagaggtcagcagcagccatgggcctaccagcagcagcaagctgcaggcatggacgccggatccagccaggctgcctacggcgggccgttccaccaggcagcctcgtcggacgccgccgcgatggcgccgcacgtgccggcgagcggcgggtacagccaccaggcgcagcagtcgcagaggcggtcgtcggacgacgggtacaactggcgcaagtacgggcagaagcaggtgaaggggagcgagaacccgcgcagctactacaagtgcaccttcccgagctgccccaccaagaagaaggtggagcggtcgctggacggccagatcaccgagatcgtgtacaagggcacgcacaaccacgccaagccgcagaacacgcgcaggaactccagcagcgcggctgcggcgcagctgctgcagggcggcgacgcgtccgagcactcgttcggcgggatgtcgggcacgcccgccgcgacgcccgagaactcctccgcgtccttcggggatgacgaggtcggcgtgggctcgccgcgggccgggaacgccggcggcgacgagttcgacgaggacgagccggattccaagagatggaggaaagacggcggtgacggcgagggtatctccatggccggcaaccgaacggtgcgtgagccgagggtcgttgtccagaccatgagcgatatcgacatcctcgacgacggctaccggtggaggaagtacgggcagaaggtggtgaagggaaatccaaacccaaggagctactacaagtgcacgacggtcgggtgccccgtgcgcaagcacgtggagcgcgcgtcccacgacctgcgcgccgtgatcaccacgtacgagggcaagcacaaccacgacgtgcccgccgcgcggggcagcgccgcgctctaccggcccgcgccgccgcccgcggacaccgccggccaccactacctcgccgcggcgcggccgggcgtggcctaccagacggggcagcagtacgggttcggtgaccagctgggctcgttcggcctcagcggcgcgccggcgcagagcggcggcggcggcttcgcgttctcttccggcttcgacaacccgatgggctcgtacatgagccagcaccagcagcagcagaggcagaacgacgccatgcacgcgtcgagggccaaggaggagccccgggaggacatgtttttcccgacgtcgttgctgtacactgactgaaggacaaggacggcaggacatggcgtggtgtggtgtccataaactgttcctttggcacacggattgttgttgttgttgttgttgttgtatctaggataggttgaacagatttctttatttgtttggaggcctccatgttggcagtggcagatgcttgccgtgccgcaggggtgtctcccttaacacgtgaaaggggggaaagaaagggatttaggatactagagtctaggacacgtggcaattacacagaaggggtaaagaagttttgttcctcaaagacaaattcacacatgagacttgttgtagtcaggattggacataatttcatgtcacagaacatttgttaagattc

SEQ ID NO: 116384 - DNA, 102 bp, Zea Mays
atgtatgtttgtctaaaaattcttaatatatattttgctatggtttgtaaacatactgcagtagaaataagcactcaaagttcatgtcaaaacagtgctctt

SEQ ID NO: 116385 - DNA, 1727 bp, Zea Mays
ctgctaccaatttgtcggtcttcaggcccatctccctcattaatgtcttgccttttaagcactctttcgtccccaactttacacctctacatgtctcatatctctctgtctgtccaacgatccctctcctttgtcatctccgtctccatctcccaagcaccggagaggagagctagcatgcctggatgtccacggagagggagagactcgatgagatcgggaagatcaagcgagagccggatacagccgccctcgctgtcgctgccgcatccgcctccaccgtgccggccgacaaccacatcccacgccgcctcggccacggcggtgccctcaacaccttgacgccgtgcgccgcgtgcaagctcctccgccgccgctgcgcgcaggaatgccccttcgccccttacttctcgccgcatgagccccacaaattcgccgccgtccacaaggtcttcggcgctagcaacgtctccaagatgctcttggaggtggtggagggggagagggcggacacagcgagcagcctggtgtacgaagcgaacctccggttgcgggatccggtgtacggatgcatgggcgccatctccattctccagcaacaggtgaacgcgctggaggccgagctggaggcagtgagggccgagatcctcaagcacaggtaccggcaggccaccggcaaccgtctcatggacgacgtgcgtgccacggccagcttcgtcttggctcctgcgtccgctccgatgcacgttaatgacgttgtatcagtggtggaggcaggccaagaggtcaccgccaccggcggcgcgtcgggggtgtacattgcggaagccgagcagccgtcaagtactaataactatagctcccttaacccaagtgagcatcctgcatactttggttgacaataagcatggatttatttaacattttggtgggatcacagtagtagaaagtttggatgaataaactgtgtgcaagtttaattatatatacaagttttctagaaataggttatagatgtggatatgtatattgggtgactaaaaagttcatccaatattatggaatatatgtaccattattttcttgtaatagcccattgcgtgttgttgattagttattagtttgaccaagtaagcgcgtctttatcctatatataaatagtgcaaccatcagtaggccggggtttgtcactcagaattttaagcaaattccacagttgctaacaccaaacgcgtgtgcatctcaaacacgctgcttcggtggattagttcatgcataggcaatgatattccttaatttgctttcaatttacaatagattttatggatttatttatctttgtccaggagaatttccatcgaggttgatattccatctttcctaaaaacaataaagaacttgcttcgaaggagttgaagaatttcaaatttaaccaaatattatgcaaacaagatacctatatttttatatgtaataatatatcaccaggtgacttacaaaatctattttttataacgaacttatttaaaggtacaaatgttcatattattttgtataaatctagtcaaaaatattttgatattgtttgactccttaggaagtaagattttcattctttgttgggacggaagtaaatgataaatgggcatgcatgttttgtagtcaaaactatttttttcagcacttagttttcaggccgtactatctatgaagaccgttcttctatg

SEQ ID NO: 116386 - DNA, 1794 bp, Zea Mays
ggtttttctcccccaccccgctcgccgccgcaggcgactcgccactctaactcgctgcccgccgaccatgaaggcactcctctcccacagttcgactccatctggacccccctcgacgtcaccggtgtccgcacccttaccatctcgttcgtcgtctttcaggtcgacgtgaggtgagacgctattgccgtcgagccagagctgaaggtggtggttcaggcgacggttgtgcgggttgctgaactcgttgtacatatgtgcaactcatttgaagtggctcggtttagggtttagggtttccaccatagatgcttggtttgttgattcgatttgatatgattggcgacgtcgttctttgatacaaccccattattctttcctttactgcctcgttttagagggtttgctagtttgcctgtcataaacaacaacaatgagattatcaagttgcactgatccattttcctttgattccaccccataatggttcttgtgattcgtttcctacatggggttcaaatctcggcccaagttctacttgtcgtgtttagggtcaggcatcagtttcaacaagtatatgtggacaccgctatttgttcctcggatatgtgctattgtttggttttgtgccttattcaatttatatttgtataccttacttcccatgcatttagttggactattaggtaaccaatcattgttgcacatattactgaattcctcgacgacttatttgttcccagtgttcttcacttcttctcgtattgttattgtttggttactaattctcgtattgttattgttttgttactaatacttacccacaaatcagtttaaggcctaaaccaaggttagtcccaaacaatgcagtgttaggttgtctaatgtcttggtgagtagtgtgttcataattttgcaggcgttagtttgtaatggcttctttgcttctagtgtcattgttagtccattattatcattaaaattaactcacaatcagaaggatttgtactctttggaaaccattagtcgcaagttcggtgaagtgctcgaggcacttttctggatgtcaaacgatgtaattaggccaaaggatttagacttcactgagatatacccgagactaagggagactaggttttggtcacaattcaaggactgataggggcgatcgatggtagtcacttccctgcaagtgtcccaatgtcagagcaagcaaaatacattgggaggcacgggtacgaatcacagaagagaattattgccttatcgattccgggtacccaaactggaaaggatacctggcaccatacaagggatagaagtaccacgtgtcagaatggcagcatggacaacaaccagttggtgtgaaggaggtctttgactatgcacattcatcattaaggaatgtgatagaaaggtttggtggcataccagactggttcgacgtgcacaggataactatgccaaaaacaggctccctatgtaactgatctggtggcacatcagactagtctgatgcatgttatgttagtttagccacagaatagggtccgcataaccggtttggtgcacactggactagttcagtgcacacagagactctaagtttctactaagtgtgtttttatttggtttcttctccaaactatggtggcctcttataggttacctagcactagttttatgcaagagtggaccaccacactaaactagacatgcctaggtcaagtcacccatctataaccccctttatagtacgactaaaaataagtaaatgcccttactctatactaa

SEQ ID NO: 116387 - DNA, 1709 bp, Zea Mays
atgcgcgttagggtttttctcccccaccccgctcgccgccgcaggcgactcgccactctaactcgctgcccgccgaccatgaaggtcgacgtgaggtgagacgctattgccgtcgagccagagctgaaggtggtggttcaggcgacggttgtgcgggttgctgaactcgttgtacatatgtgcaactcatttgaagtggctcggtttagggtttagggtttccaccatagatgcttggtttgttgattcgatttgatatgattggcgacgtcgttctttgatacaaccccattattctttcctttactgcctcgttttagagggtttgctagtttgcctgtcataaacaacaacaatgagattatcaagttgcactgatccattttcctttgattccaccccataatggttcttgtgattcgtttcctacatggggttcaaatctcggcccaagttctacttgtcgtgtttagggtcaggcatcagtttcaacaagtatatgtggacaccgctatttgttcctcggatatgtgctattgtttggttttgtgccttattcaatttatatttgtataccttacttcccatgcatttagttggactattaggtaaccaatcattgttgcacatattactgaattcctcgacgacttatttgttcccagtgttcttcacttcttctcgtattgttattgtttggttactaattctcgtattgttattgttttgttactaatacttacccacaaatcagtttaaggcctaaaccaaggttagtcccaaacaatgcagtgttaggttgtctaatgtcttggtgagtagtgtgttcataattttgcaggcgttagtttgtaatggcttctttgcttctagtgtcattgttagtccattattatcattaaaattaactcacaatcagaaggatttgtactctttggaaaccattagtcgcaagttcggtgaagtgctcgaggcacttttctggatgtcaaacgatgtaattaggccaaaggatttagacttcactgagatatacccgagactaagggagactaggttttggtcacaattcaaggactgataggggcgatcgatggtagtcacttccctgcaagtgtcccaatgtcagagcaagcaaaatacattgggaggcacgggtacgaatcacagaagagaattattgccttatcgattccgggtacccaaactggaaaggatacctggcaccatacaagggatagaagtaccacgtgtcagaatggcagcatggacaacaaccagttggtgtgaaggaggtctttgactatgcacattcatcattaaggaatgtgatagaaaggtttggtggcataccagactggttcgacgtgcacaggataactatgccaaaaacaggctccctatgtaactgatctggtggcacatcagactagtctgatgcatgttatgttagtttagccacagaatagggtccgcataaccggtttggtgcacactggactagttcagtgcacacagagactctaagtttctactaagtgtgtttttatttggtttcttctccaaactatggtggcctcttataggttacctagcactagttttatgcaagagtggaccaccacactaaactagacatgcctaggtcaagtcacccatctataaccccctttatagtacgactaaaaataagtaaatgcccttactct

SEQ ID NO: 116388 - DNA, 1717 bp, Zea Mays
gtttttctcccccaccccgctcgccgccgcaggcgactcgccactctaactcgctgcccgccgaccatgaaggcactcctctcccacagttcgactccatctggacccccctcgacgtcaccggtgtccgcacccttaccatctcgttcgtcgtctttcaggtcgacgtgaggtgagacgctattgccgtcgagccagagctgaaggtggtggttcaggcgacggttgtgcgggttgctgaactcgttgtacatatgtgcaactcatttgaagtggctcggtttagggtttagggtttccaccatagatgcttggtttgttgattcgatttgatatgattggcgacgtcgttctttgatacaaccccattattctttcctttactgcctcgttttagagggtttgctagtttgcctgtcataaacaacaacaatgagattatcaagttgcactgatccattttcctttgattccaccccataatggttcttgtgattcgtttcctacatggggttcaaatctcggcccaagttctacttgtcgtgtttagggtcaggcatcagtttcaacaagtatatgtggacaccgctatttgttcctcggatatgtgctattgtttggttttgtgccttattcaatttatatttgtataccttacttcccatgcatttagttggactattaggtaaccaatcattgttgcacatattactgaattcctcgacgacttatttgttcccagtgttcttcacttcttctcgtattgttattgtttggttactaattctcgtattgttattgttttgttactaatacttacccacaaatcagtttaaggcctaaaccaaggttagtcccaaacaatgcagtgttaggttgtctaatgtcttggtgagtagtgtgttcataattttgcaggcgttagtttgtaatggcttctttgcttctagtgtcattgttagtccattattatcattaaaattaactcacaatcagaaggatttgtactctttggaaaccattagtcgcaagttcggtgaagtgctcgaggcacttttctggatgtcaaacgatgtaattaggccaaaggatttagacttcactgagatatacccgagactaagggagactaggttttggtcacaattcaaggactgataggggcgatcgatggtagtcacttccctgcaagtgtcccaatgtcagagcaagcaaaatacattgggaggcacgggtacgaatcacagaaggtaaaagtgttatgttcacatgtctgttttctatgtgtgtcactataaaaggtaatgcatgataacactaacaattacaattgcagagaattattgccttatcgattccgggtacccaaactggaaaggatacctggcaccatacaagggatagaagtaccacgtgtcagaatggcagcatggacaacaaccagttggtgtgaaggaggtctttgactatgcacattcatcattaaggaatgtgatagaaaggtttggtggcataccagactggttcgacgtgcacaggataactatgccaaaaacaggctccctatgtaactgatctggtggcacatcagactagtctgatgcatgttatgttagtttagccacagaatagggtccgcataaccggtttggtgcacactggactagttcagtgcacacagagactctaagtttctactaagtgtgtttttatttgg

SEQ ID NO: 116389 - DNA, 151 bp, Zea Mays
tgtgtttgttgtatattgcccagcgctagctagctgcctagctgtgtataaaactttattcttgtgttcatcgtgtttagggatcatgattcatgaagttcacgagtttggaaatatccggttaacgttcgtaatatattatgcatgcgca

SEQ ID NO: 116390 - DNA, 930 bp, Zea Mays
gacgtcgcatccttcccacctacagcgcaagtacactaccggaacacacgagcgagtgcttgctgtgctgacatcagttggagagagcgatcggtcgagatgcctcccggtcccggcgtcgcagaccaggcgccgccgccgcggagccctctccggggcaacggcgccatgccgccgcagagcccgctccgcatcaagcaggacggcaagttctacgagcggctcctcaccagggagagctccgcggccaacctgtcgttccggtactactgggcggagccgggcgcggtgccgttcgtctgggagtcgcagccgggcacgcccaaggacgtcgcacggacggccgccggcgcgctcccagccatcacgccgccgccgtcgtaccttctccggcacggcaacgtcgcggtcggtaggcaggtggcggccgcctcggtggcacgccgtgaccagaagagcggcggcagggcggcggcgaggagcggcaagaagcggcgctgcaggctcaagaggatcaggatcggcttcgtcgccggcatcttccggcggctcagcctcgggaagaggtggcggcagcgcccggcgccgccggccaaggtgtggtcgtcatcgtcctccagtcggtggctcttctcctcggtggccacggagacgggcgagcacagcctccaccaggtccaggatgagatcgccgttcccgcgcacccgaaacagcacaggaccgtgccggtgccgtgcaggtgcagctttcccgccatgtggctgctgcgcttccgcaacagcttcggccacggctgggcgtagaagatctcgatcgctctcagcgtgggtggcgacaaggaatcgcaagtcagaaagtggtttatgttatggttacgaaataggttaacgatttctatcgctgccagtacgtgaggccaagtaattaag

SEQ ID NO: 116391 - DNA, 4267 bp, Zea Mays
cgccgttgcggaattgcggagcgcgccgccaaaacaaacgcgtcctgctgccggaatcagaagatcccgaggggttctgatctgagggcccaccatcctctctacacggcacaggaacccaactactactactacaatcgttgccagggagctcaaccgactcgggaccaaaatcggctgctgttgctggctgggacgaaatcggaggcatccgcctttctcgagagatcgagctccgcgccggagcaggcgggccaggcggtgccgctgctgcctgctggtgggtttacaacatagggatggagtcgagatccatccggattcgacattcgaggtcttctgctttgctgttttaaacctgtagaggcagaggacttgggaatgctgaaaaatgtgcctgcaaaccgacgggggaattttttgtgcaaacaagattcgacctctgttcaagcagatattgttggcttctcatgagtatgggcttcatgctgatactgcccttattttcaatgatttaaagcacagtagattgaaggcctttatatttgttggccatcaccttggagacgacggttaaaatcttctacattctttgataagtggtgtggcgcttgttcattattctatcgttgcatagtttgatacgatggatgggaggaggacaattttgatgggacgatatgaaattggtaaacagctgggacaaggaacctttgcaaaggtcttttatgctcgtaatcttactactggcctggctgttgccataaagatgattaacaaggacaaggtcatgaaggttgggctcatggagcagataaagagggagatctcaataatgaggttagtgaagcatccaaatattcttcagctttatgaggttatggctagcaagagcaaaatttattttgttctggagtatgctaaaggtggtgagcttttcaacaaaattgctaaggggggaaagctcagtgaggatgctgcgaggaaatatttccagcagttggtcagtgctgttgatttttgccacagtcgaggtgtctatcaccgtgacttgaagcctgaaaaccttctacttgatgagaatgaaaaccttaaagtctcagattttggcctaagtgctctagctgagtccaagaggcaagatggtctcctgcataccacatgtggaactccagcttatgttgctcctgaagtgctgagtagaaaaggttatgatggtgcaaagtctgatgtgtggtcttgtggagtaattctttttgtgcttgtggctggttaccttcctttccatgacacaaatttgatagagatgtacaggaagatttccagagccgagtttagatgccctcgttttttctcaactgagctgaaggatctgctacataaaatccttgttccagatccaagcactagaatttctatctcgaggataaagaggagtgcttggtacagaaaaccggttgaagcacatgcaaagaaaaatgaggcagaaacaagcgagaatacttgtacgggtgaaggtacaacttctgtctcaacagagtgcagtacgtctgagggaaatcaagggccattaagcctcccaaacttgaatgcatttgacatcatctgtctctcaacaggttttaatctttctgggttttttgaggataagtatggtcgcagggaagagagatttactaccagacagcctgtaacaacagtatttacaaagctgaaggagcttgccaaacgcctaaagttgagggtcaagaagaaagaaaatgggaccttgaaattggcagctccgaaggaaggaaagaagggtatgcttgagcttgatgcagagatttttgaggttgctccttctttgctcttagttgagttgaaaaaaaccaatggggacacgctggagtatcaaaagctagtgaaagaggagataaggccggcactgaaggatattgtttgggtttggcaagatgatcaacaccagtgctcacaatcaccagagtctctattatcaccaccggagacacaggatgaattgcgattatcattgcctcagcaagagggtcaagacttcttagaagccccattgccatcactatcgcttgaccagttgaaatcaccaactgccccagagcaagcagagcaactgccacaaccagaacagttgcaaacgccaatcgctccagaggagcaaattaactagctctaacagccagctggtaattcatatgcccctctcagccatagttcatagttctattccggtttttactctttgttccggcttttctatttcttctggaattgtaaagctgtatgcctgtatgtactgcagaaatgccatgtattccagtttgaaatgatataatacatcatacatccgatgttaaaccaaaattttggaaagaataatattcattgaccagcactattgagttgtatgaatttatgaccgaaaagtcttcatgattggtttcctctactatcacagctgtaagcagatttattgctgtggattttggctgttatgatcgtattctaagttcgtcgcggagatttgtttccctcgcgtagtgctctgtgtgtcttaggtttgagccttgctaattgccatgttgattagatagatagtgtggcaaaaattcttcacgcttcggtttgcttactgcagatgccaaaaaagcaaaggaaaaaggtcccgacaaaaaagaaaggatttgcatatcgtagtacacttgctgtccatgtcctgcagaggaacgtctctcctggagacatacaaaggcatccagatatgtccccatcgaagaaacagttaacaaacaacaatgattcgctgtactggtcaagagcgctctcccctcttcctcttgtagctggtgtggaggctgagctgcatccggtctctgttggccataagagcatggatgcagaaatgaaacagccacttgagggatccatgtccctgaacatcgacagcgaaggtgaaccccacattggaaatggatcgatcgtcgtcgagaaccctgcatctgacctggtgaagtcagaatctgaccgaataaaaaccttttaccagacggtcctgtcggctatcatggtgttcgtcacggcagcgctatcaagctacaaggacatgaagcctctttactcgaccacaagccacggcaaagctcacctcagcaacctcctagtcgacgagggcctattcatattcatgaccttcttgtgtgctatggtcctaatgatgtctgagttcgtcgtgcaccagcatggccggcggggccatgtctggtgctgggttcgcaccattctcgttgcagtcaccggtgtgatgctaatcgtggctgacacaatcctcctcatcgtgacgaaccgaagcaacatgttgctgtcagttcttcttgtaccggaggtgttgcttttcggcgtggccgtgagcgttggagcatggatgcaagagagtttacccagctcggagcttggcagcaggtacgattccgccatgaagggaacctttgatatagctacagttggcaccattgtctcgttcacgcttcaggggggcatcgtctttggctacctgaaaaccccagacagtaatcaggtcaagcatgacccgccgctggacctcgctgcgtgctacgccacctcgacgctctccctgaccggaatgacaatgtgtgccatgccgctggcatatctccccaacggcatgctggaggttctcgtcagagtcgtcgagaggcttaggagtgctgtgctggccgctctggcgatgatggcgctggtcgtctcagtggagttcctggatggattcgtcgtggtctccttctttcccgacgccgtcacgattgccctgtactacgtggtgaagctgttctcggcatgtcaaccccgagaggagatctcacagctggacttcaccttccggatcgttgccgccgcggggttcacgctaatgactggactctatgcggcttttacggggacagatcactatggcttcaacctcaagaccgctatgttcatcctgttgcttgcagttgtgtcgagcttgagccgtctggcaatcccacttcacatgcctgaggcgggagtgggaggagtcatcgagttcggcattgttagtatagctctctcttttcccctgctggcgcttctggctgccattccattggtgttcaaggtcttcgtcgaccattacatcaatcgctagtctttgggttgtctggcgcaattcttcctgtggtacagtgccagtaatgaatgatgcgttttt

SEQ ID NO: 116392 - DNA, 2360 bp, Zea Mays
aatactaaagcccactttcattgtatatttagagccgcagatgaagaataaggagccagatgaaactacgatggtacagttgatcaaccgctcaccattatcactctctgatcaaagaatcgtgacagcctaagcaaagtttgtacatgaggagaagagggggaaaatcgtttaatctgagcttttatcctatctggcattgcccatggctggacttgattatgacgccatcatagccggaggcacgacgctggcggccgggcacacgctgccccgctcaccgtcagcggccgaggcggcggcccaccggcggcatatcctgccgagcgacgcggccttgcgacgcgcccgctccgttccggtgcccatcagctcccagatggcccactccacgccgggcacggccatcacctgcattaccacccgcgcgcccagccgccggcacaggagcaccagcgccgccgtcgcgttctccctggcccactccgtgccgcgccgcatctcggccaccagacgcgccacggcgccatcgatgcccacgatcgcctccgcgccgccgcgcttcgccaatgcggccagcactgccgcggcggtctcctcttcgctgatcgcagacagggctacctgcgcgacgccggcgctcacgagctttccgacgttctccctctcgccggccagcgacagcagcgcggccagcgcgtctttcttggtgcttgtcgggccggtgcggaccagatgcaccagcttctccacgatggataggttccggccgagacggcggcggtaggtatggacggacgccaggctgagaacggcggccgccgcattctcctttgcgcgccacgtcgcgccggcgctcataatgtgggcgaccgcctccacggcgccctcggcgtgcatgatgcgcttcttgttggcctcgaggatggagaggttgagcagcgctgtgacggcgttcagctggagcccggcgtcctcggagtagagcaggggcaccagcagcggaacggctccggcctccccgacgaacgcgcggctgtcggcgccggacttggacagcagcctgatgtcgtgcacgacgcggttggccgcgtcaggggagaaagagatggagagcttcttcacgaggaacgacgccgtcatgcgcgccgcctccaacgccgccttgttcgcggccaccgcctgggccggctcgctcctgctcgccgcgctgctttccatggcgacgccgttctcccggcaccacttagcgatgaggttcttgagcgccttgttgggcacaagctccaaaacggtaaggacctgccctgtcttggggcacgttgacttgccggagtcgaaccaccgggagatggagtcccggtcgtatgtctggccgctggcgacgacaacggggtcgcgcatgatgtcgagggtgatggggcagcggaagtccggcggcggcgccgggggctccccttcttcgtcgacctcggggtccggcctggaatccgaaggccggggcgtggcgctgaacaggacgcacttggcgtaccgtagcagaccgacgagcgcgatcatggcgtccgtccacctctccgaggcgcggtcaccgatctcccgctcgaggctctcgatctctttgctgcagctgggcgggtcgttgatgcccgcctcctccaggatctcctgcagcctctcccgatccggcacgatctcgcgctcaatttcctgtatcagcgagagcactctggccttgagggcctgctccgcctgggcagacggcgcgaaccgcctgcactggcgcgacgcgaggtccagcaggtccatgacgtcctcggcaaggcccagctcgacgacggggaggaggtcgagcagggttgccaggtcctggtgaagctcccgcacctcctcctcgatctcgtccgagtgaagcagcagccgcatccggctccgcgcggcgcagtcggtggccagggcattgaagcgctgcagcacgaagagcacctcgcgcaggcacagcgacgcggaccgcggcagatcgccggtggcggcgcacaggaccaggtcgtcgaacgcggcggccaggagcttggaacgcctggtgatggacgcgagcgcgccgcgcaggaacggggccggcgtctcggcggccgcggacaggtcccgcgcgaggcggtgcagcgagcgcagcagctccccgtcggacggcgacgcaggcgccggtgccatggactccgccgccgaccacgaggaggaggagcagccgggcggtgacggcgcggaggtcaacaccgatcttggattgggcatggccattggaacagcgcagtatagtaaacggtagtaaactaacacctacagaaacggctggtttttag

SEQ ID NO: 116393 - DNA, 817 bp, Zea Mays
gggcgaacctgtaagaaccactttcacctgaactcctgaagcaaaagcaatggccatgagagcgcttccgctgaccccttccaggagctcctcgtttggagctcaccaaaccaggccgagcggcggcggccccagatcagtgagagcttatgcgaagggagacgaggagggcgacaagcagtccctcttcggaagcatcaccgaggcgctggacttctcgcaggtccggtcggagaaggacgccgagctgctgtacgaggccagggagtccaccagaggtggagggaggatgacgagggagcagtacggagcacttaggcggaagattggtggcacctaccaggatttcttcaagtcatatgttgaagtcgacgggcaatacgtggaggagggttgggtcgacaagacctgcaagatctgcaagaaggacacaaggggggagccgaggcaggttgacaagctaggaagatacgctcacgttgcgtgcctggagaaccccaaaccgacgaactttttcgccaaaatcttcgccagatgaactatgctgcgtccgtcgaaagcgttgtctcgctcgctcgtggttagagagtacaatatataggtagtgttgttgtggcttcaaaggggacaagattgtgcacaattttccaaatggattggtatgtactgatgagcatcagcgcgttccatagttccgactccctcttcagtgtattcaagtcgaccatgaacccacgacccacaaagatcaagaacaaactactgaaaatatttagatagttcgactccttcacgacaagcaaattagtagtactct

SEQ ID NO: 116394 - DNA, 985 bp, Zea Mays
gggcgaacctgtaagaaccactttcacctgaactcctgaagcaaaagcaatggccatgagagcgcttccgctgaccccttccaggagctcctcgtttggagctcaccaaaccaggccgagcggcggcggccccagatcagtgagagcttatgcgaagggagacgaggagggcgacaagcagtccctcttcggaagcatcaccgaggcgctggacttctcgcaggtccggtcggagaaggacgccgagctgctgtacgaggccagggagtccaccagaggtggagggaggatgacgagggagcaggtgtgtatcatgcaaagcaactgcggctcgataatgttatgttatcatccgtaatctgatttatttgttgtttgatttgcaatgaagtacggagcacttaggcggaagattggtggcacctaccaggatttcttcaagtcatatgttgaaggtatcttatctacacctttcccgtgagaatatttaaacgccaagtgaacaggcccgtatattgcctactggtattcagattagcactgcatcactgaataatccgtgtagttttttttggaaacaagtgtagtatgatgaaagattgaaagtagtgtccactgaaaatatattatcgcacacatccttttttattcctaacaagagagaatatcaagttatcgacgattgacgaccaaccaaattggtttcgaatttcagtcgacgggcaatacgtggaggagggttgggtcgacaagacctgcaagatctgcaagaaggacacaaggggggagccgaggcaggttgacaagctaggaagatacgctcacgttgcgtgcctggagaaccccaaaccgacgaactttttcgccaaaatcttcgccagatgaactatgctgcgtccgtcgaaagcgttgtctcgctcgctcgtggttagagagtacaatatataggtagtgttgttgtggcttcaaaggggacaagattgtg

SEQ ID NO: 116395 - DNA, 2266 bp, Zea Mays
agcgccgggcctgtcctgtcctgtacacgcacgagcagttggcgtccgctacttgcgcgcgacgagcatgtgcgcctgattcgtatggggcaaccgccgtcgtgtagcggcgcgatcgtggtcggcgggggtgtagcgacgagcgcttctttctcgcccagcccccaccctcccctttatctcttttgtctccaattgcctgctgcccctccactccacgaaagttattaacgattccaactgccaggatcactgaccgttgctgggcgctggcctataagtacctggcctccgcgccccactcccttcacagccaagctagcaactctctcgagtcgattcctaagcagctagccagtgactcgatcttagcgtgctacaatggcggcagctgctagtgccctgctcctcctgctctgctcagccttctgctcccttgcccaccgggcggccggcgtcgactacggctcgtggcagagcgcccacgccacgttctacggcggcggcgacgcgtctggcacgatgggcggcgcgtgcggctacgggaacatgtacagcacggggtacggcaccaacacggcggcgctgagcacggcgctgttcaacgacggcgccgcgtgcgggtcctgctacgagctgcgctgcgacaacaacgggcagtcgtgcctgccgggcaccatcaccgtcacggccaccaacttctgcccgcccaactacggcctccccagcgacgacggcggctggtgcaacccgccgcgcccgcacttcgacatggcccagccggccttcctccagatcgcgcagtaccgcgccggcatcgtgcccgtcgcctacaggaggtgaggtttacttattatatttctcgtcggtttcgagctctcgtcatctcacgcactgaacggccggtcccagagatgagagagagagagagacgtgtgtgtggtgtggccgtgcgcgtgtcggtttctaaaattcagagttcggaccacgaccaaatatgtaagcaacggctggggttcaggccatgttacgtgggccagcaggcagattatctttcctttttctttttggttcggcttgttccgtcgtgcgccatgcatgcacgacagcgactcggcctgctgtttccgagtagattattaggcgtcacactgaccatattatgagcttccatgttagttgttagttgttacagtagctttagtctgatacaacgccatttccgcaagttgcaaaacgtcacgctcagcgacacttgtgcgctgtcatgctattagctgcacgccatgtgcggccgcttgaacttgaacctgttgcatgcgtgcgctttttgctcatcaccttttgcactcctcgtaccacgcattttgttgatagggtgccgtgcgtgaagaagggcgggatcaggttcaccatcaacggccactcctacttcaacctggtgctggtgaccaacgtggccggcgccggggacgtgcagtccgtgtccatcaagggctccagcaccgggtggcagcccatgtcccgcaactggggccagaactggcagagcaactcgctcctcgacggccagagcctgtccttccaggtcaccgccagcgacggccgcaccgtcaccagcaacggcgtcgctccggcgggctggcagttcggccagaccttcgagggcgcccagttctagctactactactccatcgacgagtgtgactgtgagcaagagagaaggagaaaccttcttcgctgtagtaaagaagaggctcccgccattccgaggctgcttattattagcacccgcttaggcatttccttctcttattattaccataggattgagctgtttattttctgcaccagtgattgtagcaatgggttaagcaaaacaaaaacctgcaaggctgattattgtagggctgcaggggagtggtgtcgtgcaacttattgtgttgttacgctgtactagcagcaacccccgaatctggccacatggtggtgggagatgtttgtggggattgcaccttttgggaccgtgaacatcaatgcttgtttatggtttattacatgcagtatatatgatatatatatgctcgtggtttgatcctcggtttgtacgaccccctatttttgtcttcggtcgatccgtctctttaccaacttgcagaggcagcatgtgcatgtgtggtctgatgtgtggtcagtttgaagctttcagaactcagagaacgaaaaaaaggaaagatgaattgttctcagctggccaactcaagt

SEQ ID NO: 116396 - DNA, 1703 bp, Zea Mays
agcgccgggcctgtcctgtcctgtacacgcacgagcagttggcgtccgctacttgcgcgcgacgagcatgtgcgcctgattcgtatggggcaaccgccgtcgtgtagcggcgcgatcgtggtcggcgggggtgtagcgacgagcgcttctttctcgcccagcccccaccctcccctttatctcttttgtctccaattgcctgctgcccctccactccacgaaagttattaacgattccaactgccaggatcactgaccgttgctgggcgctggcctataagtacctggcctccgcgccccactcccttcacagccaagctagcaactctctcgagtcgattcctaagcagctagccagtgactcgatcttagcgtgctacaatggcggcagctgctagtgccctgctcctcctgctctgctcagccttctgctcccttgcccaccgggcggccggcgtcgactacggctcgtggcagagcgcccacgccacgttctacggcggcggcgacgcgtctggcacgatgggcggcgcgtgcggctacgggaacatgtacagcacggggtacggcaccaacacggcggcgctgagcacggcgctgttcaacgacggcgccgcgtgcgggtcctgctacgagctgcgctgcgacaacaacgggcagtcgtgcctgccgggcaccatcaccgtcacggccaccaacttctgcccgcccaactacggcctccccagcgacgacggcggctggtgcaacccgccgcgcccgcacttcgacatggcccagccggccttcctccagatcgcgcagtaccgcgccggcatcgtgcccgtcgcctacaggagggtgccgtgcgtgaagaagggcgggatcaggttcaccatcaacggccactcctacttcaacctggtgctggtgaccaacgtggccggcgccggggacgtgcagtccgtgtccatcaagggctccagcaccgggtggcagcccatgtcccgcaactggggccagaactggcagagcaactcgctcctcgacggccagagcctgtccttccaggtcaccgccagcgacggccgcaccgtcaccagcaacggcgtcgctccggcgggctggcagttcggccagaccttcgagggcgcccagttctagctactactactccatcgacgagtgtgactgtgagcaagagagaaggagaaaccttcttcgctgtagtaaagaagaggctcccgccattccgaggctgcttattattagcacccgcttaggcatttccttctcttattattaccataggattgagctgtttattttctgcaccagtgattgtagcaatgggttaagcaaaacaaaaacctgcaaggctgattattgtagggctgcaggggagtggtgtcgtgcaacttattgtgttgttacgctgtactagcagcaacccccgaatctggccacatggtggtgggagatgtttgtggggattgcaccttttgggaccgtgaacatcaatgcttgtttatggtttattacatgcagtatatatgatatatatatgctcgtggtttgatcctcggtttgtacgaccccctatttttgtcttcggtcgatccgtctctttaccaacttgcagaggcagcatgtgcatgtgtggtctgatgtgtggtcagtttgaagctttcagaactcagagaacgaaaaaaaggaaagatgaa

SEQ ID NO: 116397 - DNA, 915 bp, Zea Mays
agcgccgggcctgtcctgtcctgtacacgcacgagcagttggcgtccgctacttgcgcgcgacgagcatgtgcgcctgattcgtatggggcaaccgccgtcgtgtagcggcgcgatcgtggtcggcgggggtgtagcgacgagcgcttctttctcgcccagcccccaccctcccctttatctcttttgtctccaattgcctgctgcccctccactccacgaaagttattaacgattccaactgccaggatcactgaccgttgctgggcgctggcctataagtacctggcctccgcgccccactcccttcacagccaagctagcaactctctcgagtcgattcctaagcagctagccagtgactcgatcttagcgtgctacaatggcggcagctgctagtgccctgctcctcctgctctgctcagccttctgctcccttgcccaccgggcggccggcgtcgactacggctcgtggcagagcgcccacgccacgttctacggcggcggcgacgcgtctggcacgatgggcggcgcgtgcggctacgggaacatgtacagcacggggtacggcaccaacacggcggcgctgagcacggcgctgttcaacgacggcgccgcgtgcgggtcctgctacgagctgcgctgcgacaacaacgggcagtcgtgcctgccgggcaccatcaccgtcacggccaccaacttctgcccgcccaactacggcctccccagcgacgacggcggctggtgcaacccgccgcgcccgcacttcgacatggcccagccggccttcctccagatcgcgcagtaccgcgccggcatcgtgcccgtcgcctacaggaggtgaggtttacttattatatttctcgtcggtttcgagctctcgtcatctcacgcactgaacggccggtcccagaga

SEQ ID NO: 116398 - DNA, 155 bp, Zea Mays
tctacctatatccattttagtagtactcactcctgtacataaagcctgcaaaaaaagagggttcggttgtttatggaaccctggcaaatttgctttcgcgcacaatgtaaaactcagctagctctgctaagctccccggcgtagctcgacacagc

SEQ ID NO: 116399 - DNA, 220 bp, Zea Mays
atggaatgtgtaattcaggcccagcagttcaagaaacagggagtgaagattcgcaggaagacatggttacagaacatgaaaattaagttggtgattcttggaatccttttgctccttgtaatcatagtatgggtatctgtttgtcagggctttgactgcaccaagcatgaaacataatagaaatggtacaacactgctccctccattttaaattataaca

SEQ ID NO: 116400 - DNA, 462 bp, Zea Mays
atgaaccagccctggaagacgccgctgtggcccaggtcctccacgacgacggtgatcagctactggtcctggcggctgctgatcctaggcctgaaattcccctcgatggaactcgaacggaaggccgagggaggccgcaaagtcggcgaggcaccgtgcccgatcttccccaacacaaccatgcagtccgagccatcaccgtcgtcaggtcgatcacgaagagatggtactggtaggtggagcatgagggcgagcagctgtgacgaaattcttcaatttgcccccgtattagacacttctggcaacagaatacggcgacacgtgctgggacactacgaaattgtgcgtgttgatttctgttgttgcataaatcaaactcccggtgacctgctcgatcctgatttggttcggctcgccggcaaaggggaaaatggaacaaagtggtatcggacttccggttga

SEQ ID NO: 116401 - DNA, 393 bp, Zea Mays
atggctgccaagcaggctcagccgtctcaggctttgctgcctcggctcctcctatggagccatcgctcaacgccggtggctgccgccgaacaggcgtggcggcggcaagaggatgcctggcgggcatggttctggtgctgtggcatttcctgcgtcttgggatggccatttcgcatggcccacatcctggtaggcggccttcggcaccttttaagcatattgggccggcccatcaggcgtcccaccactcgcgcccagcacacctccgcaattgttctacgatgggctcgtggtgcctggacagcctccgacggcgccagggatgtagcctccgacagcgcccctgcctgggccccctctgaggaggcccgactccaccaccagatttcctag

SEQ ID NO: 116402 - DNA, 106 bp, Zea Mays
ccctttcttctcgtttggtagaattcacgagccattgtcactcatcgtctgcgcgaccactgcgacggtttcacgctgcgccttccctcccgccaccactggccca

SEQ ID NO: 116403 - DNA, 1035 bp, Zea Mays
aagcctcgagccctcaagagtcaagagagtgagtgtgtacttgagccaaatagcaggcgcaccgacccaagaagcagaagcaccagtgcgagagcggcagcagccatgacgctggacaccccggccgccgtggtcctggagctgatgaccatggggcagcagtccgcgtcgcacctcggggacctgctccgggccgcgtcccctgcggcggcgtcgccgcaccaggagctcgccgccgagatcctccgctgctgcggccgcgtcatcgacgcgctcagggccgccgggcgcaagcggaaggcggccgagtaccaggacgcagcagcagcgcgatgcgcctggtcgtctccacctcctcctccgggaccgccagccaagagggcgcgcggcgcagaggcgaccatggaggtgaccagcggcacggcggtggacggcttcatctggaggaagtacgggcagaaggacatcaacggacacaagcacccgaggctctactaccgctgcgcgcacaaggaccagggatgcaacgcgacccggcgggtgcagcagacgcgggagcagccggcggcgtacgagatcgcctactacggggagcacacgtgcaggggcgcgtggcagcagggaggagcggctgcggcggcggtggcccctcccgccgtcgtcgacttcggctccagctcctgggggtccgcggcggacaccagcagaagctcgccgtcgcagggcgggtggtcgtcgccgtcggcgtcgtccgaggccggggtcgggttcgggccgcagctggcgcacgagtggcacgacacggccgctccggaccccgtgacggagttcctggacggctgcttcggctgggaatccgtgctccaggaccgctttgacttcggcggtctcagtgacgtcgctacgtttcagcagtagattgagtatattagcagcagcagcagcagtagatctggacatgtgtcgtcgacgtcgctgtagtacgtgagaacagtcagtccgaccggaccgagcgacagccccatcaggagggtt

SEQ ID NO: 116404 - DNA, 882 bp, Zea Mays
acggcagtgttgagcgcgccgcaggggctccaagcttagctagctagcaggagtaggagaggaagaagaagagggtcgtcgccgccgcgcatgaagagggagcagtcgttgtcctttgagttcggggatcccagtgcccaagatgctatgggatctgcctcggagtcgtcttacagttacagccctcccggcggagctgtctttgggctctccccaccggagtcctcgccgcgcagcggccggaataataacagaaggagggatagaccttcatgggtcagacttacggacacaccttattttgatggtcacctgtggaggaaatatgggcaaaagaaaatcaaggatgctgagtaccctaggctatacttcagatgttcttaccgtgaggacaggcactgtctagcctcgaagctgctgcaacagaagaacgatgacgacccaccattgtatgaggtgacctacacgtatgagcacacgtgcggcgcgccacccgtctcgtttccggatatcgtggctgagccgccggtgtccacggatggtctggtgcttaggttcgattcccccagcagcgacgcatggatgcaacagaacggacgctaccactcgacatctcggagcgcgttcatgatgctgagctttggttccagtagtcagacgcacgatcaacaacctgctgtgttccgctctgacttggaggctggattgtcgtcttttccaaccgaggggctaccgccggcgccaccacctgcaaatgacgatgacggggacatgttgtcgaaattgaactccttcgcatatgatttcgacaatcaaatgcacttcggcgatcacacatatttacctcataatagcagtaattatgatcatgatgatcactga

SEQ ID NO: 116405 - DNA, 81 bp, Zea Mays
aggattggtggagacgtagaccgcgctgatgttatcgcagtagacgagggtggcacgttggagagggttgtggagctcttg

SEQ ID NO: 116406 - DNA, 3303 bp, Zea Mays
atgcagaccgaggaggggaagtcgcggttcgggcggtgcccgtactgccgcgccatgatctaccaggacctcagcgcgatcatcttctactgcagcaggtgccgcacgcccatccgaggcaagaacccgcaacccacggacgagaccgagtacgcgctcgctcagctcgagatcctctccgccgacaccgcgtccgtgttctccgacgacgcggagccgccaaatccgaggtcagcctgggccgtcgacgacgacggtgggcggccgccgctgcagagcaggcgatcgagcggcggcagtgacgcgggatcgggcaccgaatccgactccgacgcgcccgcgccggctacgtcttacacgagccggtcgtcgccgctgagctcacaagaactcgaggtggcgacggtgttgtcaggaatccagccgtccgaccttacgaggacgccactcagcgacccggcgttccagaaggacctcctgcaggcgctggacaacctccggaagctcatcgccgccgtggaccacccgcgaagcatcgacgggcactggcaaggcgtgacgatgcctcggctgagcgcgtcctgcaacgacgagagcagcggcaagcgtacaataacaaggcgcagctcccggctcatgcgccgcctggagtcgcagctcacgcgggcgttgcccgccgagcgcccgcgccggaacgcgagcacttcgtcctcctcttcggcatcgagcagccggcgcgatggtaccaggccgcgggcgcaccaatgccgcccagtgctgggcggcgcgccgttcgttgtctgcggcgagtgttcggagatattgcagctgccgcccgccctgccggccggcagagccaccacgctgcagtgtggtggctgcggcgaagcgttccaggtgacgttgccgacgatcggctcggtggacctacccaagaagatcttttcagcgccgcagcctgctgtcttcgtcggacaggacgccgaggagtatccgctcgcgagaagcagcaacctgagcggtgaacaaccacggcctgcggggccgctgcaccgcgtgctggggtacagctccgtaagctcggttctacgcagtcggcggtacaaaatgcccacgctatctcactcggacccgatccaacgtttgcgcaagtctatcactctattggcagcacgggcccgcccgccggacaaacatatgatcgaacacctgaccgtctcccaaatgacaaatgacagcccatggagcatggccactgaatcttccgccgtcgccttcgctggcgacgcaaattccaccgaatcatggagcgcgcgggtgcgcaccctgacgcgcctcggacggcacaaggagtcgatagctcttttacgtcatggcggcccctcgccgccgccccacgcgcttgcgctcccggcctcggtcatctcctgcgccgcgctatccctccccaccggcgttgcccagatacacgcgctcgccgccaagcgcggcctgctccccgccgccgacgcctacctgctctccgcgctgctgaccgcctactcccgcctcggctgcctccggctcgcccaccagcttctcgacgaaacgcctattgagtccacatcccacaccacgctccgcaccgcgttcaactctctcatctccggctgcgcccgccactctctcccggtggcttgcttcgctctcttccgccgcatgcgcgccatcgcggtccgcttcgacgcggtgaccctcctcgcgcttgtccctgccgcgccactgagcgtggtgccgcaggtccacgccctcgctgcccaagtcgggctcgccaccgaaacttctgtggccaactgcctcatgtccacatacgcgcgcggtggcgcgttcggcgcggccctcgcccggagggtcttcgacgagatgccgctggcctcccgcgacctggtgtcgtggaacgctgtgctatcagcccacgcgcagaacggcctggctgtggacgccctcgatctctaccgccgcatgcgtagccccgaaggcagcggggtggagccggacgccgtgacgatcgtcggcgtgctctcctccgcagcgcacctgggcgcgcgcggtgtgggtttcgatgctgagcactacgtggtccagaggctcccgggcttccgcaccaacgtgcagctgtgcaacgcgctaatcaacttccatgcgcgctgcggtagcctgccccgagcgcagcaactgttcgacgaaatgcccgcgaaaagcatcgtgtcatggacggcgctgattactgggcacggcatgcacggaaatggtggcgtcgccgtcagcctcttcgaaaggatggtgtccgaaggcatccacccggacaacgtggcaatggtcggcgtcctctccgcatgcagccacgccgggttgtacgacgaggggcgcatgtacttctcaacaatggagagcgtctacaagctgcggcccacactggagcactacacctgcattgtggacctcctcggacgtgctggccgcctggaggaggctcgagagctcatctcatcgatgcccatgcctgccgacggtgccgtctggggcgcccttcttggtgcgtgcaagatacacaaaaacgtggagattggggaggaggcctttgcgcgcgtcgtcgagctggagccgaggaacgtgggatactacgtgctcatgtcgaatatatacaccgacacggggcagctggactgcgtcgcgagggtacgggcggtgatgaggaagcgcgggctcaagaaggagcccggatgcagctacgtcgagcacaacgggagggtgcacctcttcatggccgacgaccactcgcacccacaagcgaggaggatctacgagctggtgaccaggctggagctgatggtgaaggagaagtcgggagtgcgggagagcgtggtggcggtccccaagggacgcatggagaaggaggctgcacagccgctggttgggtttcacagcgagaagttggcggtggcgtttgggttgctgaacaccgaggccggcagtgagattgtggtgatcaagaacctaagggtttgcggggactgccactcgttcttgaaggcggtttcggccactaccaaccggtcgttcctggtcagggacgcgagccgattccatcgcttcgatggtggggtttgctcctgcaaggattactggtgaagggcctggtgctgggctgctgggtgtgtgagaccattttttgcctttgaacaaggcgctaaatgggatgcgcacgtgctgatacagacgtgatacaaagtccaaactacaacgtcctcactcccgggggac

SEQ ID NO: 116407 - DNA, 1598 bp, Zea Mays
tgtattccggaattacccccggcctaccttgcatattcttcagttatcggttcacgacgcacccaccgaggccaaaggccaccaccattccttccccaactctgcaggctgctcgtcgccctccctccacgccggacgcgccccgatccagatccaggggcgtaacatggcatcaaaacgtatcctcaaggaattaaaggacctgcaaaaggaccctccaacgtcatgcagtgcaggtcctgctggtgaggatatgttccactggcaggcaaccatcatgggtcctcctgatagtccatatgctggaggtgttttcttagtgaacattcatttccccccggactaccctttcaagcctccaaaggtatcttttaagacgaaggtcttccatccaaacatcaatagtaatggaagcatatgtctcgacattcttaaggagcagtggagccctgctttgacaatctctaaggttttgctttctatctgctcgctgcttactgatcccaacccagacgatcctcttgtccctgagattgctcacatgtacaagacggatcggcctaagtacgaggcaacagcccgcagctggacccagaaatatgccatgggatgaaaatgaaatgaagtcgaaactccatattcggcattactgcttaaatgcagacgattgtggtgttgccccatgaaactgtctgtggggacgtatgttcttccattccttgtcgcccgtgtgcattctgatccatctaaggatcgaatgctagtccaacatcaacctaccattgccgtcgataatgagatgacttgtgctttctgttataactatgctagtgttgatgttatttggtaaatgattctcattgagggcttgttcaggcctcagggactggagtctggaggggatgagagcgattttgacttgtagttgtagaggagctctgctgcccatggcctgctctagggccctgcgggctgcggcagccaaccgagggcatggtagtggggaaatacccagggaagaatcattcttttaatcatccagatctatcaatttgcgaattcaataaaaaacggactgatcttcggaatacaccattatctttcgaagtgcgtagtcaatactatgttatattatattcaaagaaacaagtaaaagagtaaaggcttctcccttcaataccacacttccaatctaaattccaaggggttatgtggatgggggatttggagattcttgaaagaatgttttggcttcttcctattacgcttcaacacagaagaagattgttaaaaggtgctggaaggaggatatatttttccaattgtttcaattgtttcttgattgagtaaaaaagggatatatgaagttcgttctcttcctctgtgcatctcccttatgggtaaatccccataataaagggacaactttcgtgtagtttgtgatttgatgttactgtttagattttctctctgagaaagatttcttttaatggatctcctcttgttcctgtggccctcaattgcttctcttctggtctatccaatccaactcacatgtcggcgtcttagcaactgaaaactgtggccatgtttgcttg

SEQ ID NO: 116408 - DNA, 557 bp, Zea Mays
tgtattccggaattacccccggcctaccttgcatattcttcagttatcggttcacgacgcacccaccgaggccaaaggccaccaccattccttccccaactctgcaggctgctcgtcgccctccctccacgccggacgcgccccgatccagatccaggggcgtaacatggcatcaaaacgtatcctcaaggaattaaaggacctgcaaaaggaccctccaacgtcatgcagtgcaggtcctgctggtgaggatatgttccactggcaggcaaccatcatgggtcctcctgatagtccatatgctggaggtgttttcttagtgaacattcatttccccccggactaccctttcaagcctccaaaggttagcatcactttattatagagttaaattttcttttctttttttgttttctttattggaagatgaaaagtgttgttctgtcagtctacgaataggtttctagctgagttggttaggtggctctattagtactcctgaagtcttgggtttgactcttcatgagagtgagtttaggctggaggtaaaaaaataa

SEQ ID NO: 116409 - DNA, 783 bp, Zea Mays
tgtattccggaattacccccggcctaccttgcatattcttcagttatcggttcacgacgcacccaccgaggccaaaggccaccaccattccttccccaactctgcaggctgctcgtcgccctccctccacgccggacgcgccccgatccagatccaggggcgtaacatggcatcaaaacgtatcctcaaggaattaaaggacctgcaaaaggaccctccaacgtcatgcagtgcagggtagaagctcatggtacaaaatacttattgtgctatagaattttgtcatgaacgtatacacgagtatttttttttctgttatagatctctgtactttgagtgaacctaaatataactggaggtattcatgggtttggttctcacaggaattcattttgagatgtttcgttgaaaaatcagttatgaatatatatactgtagtttgttagaaggacaggcctgatgcagtggtgacaagcctttccactgagccaaaggtcttggggttgatgcagcctctctgcaaaaatgcaggggtaaagcttgcctcggttatttcttccccagagcccactcatgtgggagccgccagcactggatatggcatttttaccgtagtttgtcagctgggaatgctatttgttgtaatcacagatttatctatgcatacaagtttttttttgtcattcttgctctgcgataccgtggaatggttgttgatatctcatgttgtaatagctgacattggtgtttgattttcaaaaagaagcattccagaatagagca

SEQ ID NO: 116410 - DNA, 2219 bp, Zea Mays
aagcaagtctcagccatgcaacatcttacagtgatagccttcgtggctgcttctctcattgcaagcattccacatgccaaaagtgctgatctgaactctgacaaacaggctcttctcgcatttgctgcatcactgcctcgtggcaggaagctcaactggagctccaccacacctgtctgcacttcttgggtgggggtgacatgcacgccagataagagccgtgtacatacactgcgcctacctgctgtaggactttttggtccaataccatcagacacccttgggaagcttgatgccctggaggtattgagccttaggtcaaatcgccttactgtcgacctccctcctgaggtaggatctattcctgccctccattccctctaccttcagcataataacctgtctggaatcataccaacttccctctcttccagcttaacattcttagacctgtcatacaacacttttgatggagaaattccattgaaggtgcaaaatcttactcaacttactgcattgcttctccagaataactcactttctggacctattcctgacctccaacttcccaaattgagacatttgaatttgagcaacaataacctcagtgggccaataccaccttctttgcagaggtttccattaagttccttcttagggaatgcttttctgtgtggctttcctttggaaccatgttttggaactgcacctattccttctccagtatcaccaccatcacccaataagatcaagaagagcttctggaaaaagatcagaactggtgtgataattgcaattgctgctattggaggggtattgttgcttattttgattctcatgctcgtgatatgtattttcaagagaaagggacacactgaacctaccacagcttcgtccaaaggaaaagctattgcaggtggaagggcagaaaatcctaaggaagactacagcagtggtgttcaggaagcagagaggaataaattggttttcttcgggggtagttcatataattttgacttggaggatttgttgagagcttctgctgaagtccttggaaaaggaagttatggaaccacctacaaagctgttcttgaggatggaaccacagttgttgtcaaaagattgaaggaagtggtggttagcaagaaggactttgaacagcagatggagataattggcagggttggccagcatcaaaatgtcattccattgcgggcttattattactccaaggatgagaaattgttggtgtttgattatgtcccatctggtagccttgctgttgttttgcatgggaataaagctgatggaagggctccattgaactgggagacaagggtcaagatatctctggacgtagcccgtggaatcgcacatcttcatgctgagggaggagggaagttcatccatggcaacatcaaagcgtcgaacgtccttctatcgcagaacctcgacggtcgcgtctccgagttcggcttggcacagatcatgaccactccacagacgtccctgccacagcttgtcggataccgagcaccagaagtcctcgagacgaaaaaaacgatccagaagtccgacgtctacagctttggtgtcttgctccttgaaatgctaaccggaaaagcccctctcaggtctcccggtcgcaaggattccgtagagcacctcccaaaatgggtgcggtctgtggttcgcgaggagtggaccgcggagatcttcgacgtggacctgctgaggcaccccaacgtcgaggacgagatggtacagatgctccagatcgcgatggcgtgtgtggccgccgaccccgagcagcggcctaggatggacgaggtgatcaggaggatcacggagatccggaattcttactcttcttcttctgggacaaggacgcccctggaggacaggccagagaccgcgcaagcaccgtgatagtagtttagcaagagatgttagctaggttgcatagtgaattggttatagagcttcggcaaagttgatagccacctgcatagcgcagtttccgtcggttccatatcgtttccagtaaatctgttgtgcattttcttttttccgtcggttccagtaaatctgattgacagtccatgccattgtattgctaagttaaatcagtatctcttctgattttcataggatagtgtcgttctgtaatttgacataatctcctgaggccgtgattaatgatttgaatttcccttcta

SEQ ID NO: 116411 - DNA, 225 bp, Zea Mays
atggatgggcacgctacgccgcaaacctcccccgcagtcgcttccttcgcccacacgcccgcgcgctcggaatactccgaggagggtgctccaggcgaaccaagggtgacggtaccgccgccggagaaggtacccgtcgatccgccctctcccgcgattcgtttgtcttgctccgggcggcgagcagcagtgggggtcctccacgcggatccgccttccagcttc

SEQ ID NO: 116412 - DNA, 77 bp, Zea Mays
ctttcagagaagggctatgacgcagcacgtgcccccgctctcgcccctcttgaggaactcctcgtccgtcttgaggt

SEQ ID NO: 116413 - DNA, 1201 bp, Zea Mays
aggaaagacaggccgccactcaccttctctttgctggtggagttcttcctgctagcgctgtgtgggataactgcgaaccagggcttctacctcctgggcctgtatcacctgtcaccaacctacgcctctgcgatacagaacaccgtccccgcgatcaccttcgccatggccgctgtcctcaggctagagcaggtggacctgagcaggaggcatgggctggccaaggtggtgggcacggtggtgagcatcggaggggccaccgtcataaccctgtacaagggcctgccgctgctccatcacagtgatgtgcacgtcaagtcgtctccggtgacgctgtcctcctccagcggcagccccatcctcaactggactctcggctgcgtcttcatcctcggccactgcctctcctggtccggatggatggtccttcaggtgccggtgctgaagaggtacccagccaggctctcggttctgtcactgacctgcatcttcgggctcctccagttcctggccattgccgccttcaccgaggaggacctgagcaggtggaaggtccgctcaggaggggagctcttcaccatcctatacgctggccttgtggcatccggggtagcgtttgctctgcagatctggtgcatcgacaggggaggcccgctcttcaccgccgtcttccagccagtgcagaccgtggccgtcgccgtcatggcttccgccatcctcggggaccagctctacacgggagggatcattggagctgtgctgatcgtcatcggcctctacttcgtgctgtggggcaagagcgccgagaagaagggcgccaggaacctgctgcaggatcagctggcgcagggagcagacgtgacgcggcacctgctcggcggagaagcttcggcgaaagatgaagaagcagccccggccatgctggcgtgatgatcgtttagtcgtctgtcaattggagcacagcgtagtcctgttgcatttgggaccgtatgagtcgtgtgatttcagctgttccaatctggcaaccaagaacaagtgtgcatgggttgccggtgtggaacagtgtgtagccatgctgctgtgagtctgtactctgttgctgtaatgttctgtgcaagcgtaggtaaggtgtataactataaaatcacttcatccataattcgtaccaatctaggtgtggtcacaaactaattggagcttc

SEQ ID NO: 116414 - DNA, 1501 bp, Zea Mays
aaaaaacctactccaccttccgccgctataaaccctacgaagagcggaagagggtaaaagggtggccagctagccgaagaaacacccagacgaagcggccgtttttggcatctcgtatgtgcaacttcgctggaaccctcctcgactgattttaccgcacagcagaaaaggagataaaacacgacaaaaattgaaggaaaacgcattcacatcttctcttcgtccgccgccgccgcctctcttcattggtagcaccttaatccgaccccagtccagcccgccgccatggaggcgctgacggccacggacaaatgcttctccccggccagggcgatgttcccgatgccgattgtgaggccacctgcatcaccagaccatgccagtcagtatctggaggacttgttgcaggagcaacagaagctcgggccattcgtgcaggtgctcccaatctgcggcaggctgttgaatcaagagataatgagaacatcaaacctgctttctaactttggagttagaggaaatgagaggttgccaccaattgcaagtccgaaccacatgcatccattgccccggggacctgatttctgtggaaacggtttcggtccatggaatgagatgcatcctgagagaagtggttttcctaggggagccatgggttggcaaggtgctgtacagaaccattcctcctacattgtcaagaagatcgtgcgattggaagttccaacagatgcttaccccaattttaacttcattggccgtttgcttgggccgaggggacactcactaaagagaatcgaagctactacaggttgccgtgttttcatcagagggaaaggctccataaaagatcctgtgaaagaggaacagctcaagggaagacctggctatgaacacttggatgatccaacacatatcttgattgaggccgaattacctgctgatgttattgatgctagactggcacaagcacaggagatactagaggagtcgctgaaaccagtggatgagtcacaagacaacatcaagagacaacaacttcgagaacttgccatgttgaactctgtatatcgagagggtagcctgcatcagaacggcagcgcctctccgttcagcaatggggcacaaaacagtgacagggaggagattcagctctgatccttcccggaaactctcgcgttagtcctgctctcatgacagacatagcttctctgatgctcaagctcccgtgatggtattggaattcatgccattgctaactggtgaattttgatatcccttgtgacattgacctgcggatgagaagactagcgagaaaaaactcccccatggctgtgtacttaggatatttcgtttattgcttgcgcccactattagtgcagagatgtctaagttctagtattttgagctctttgattatctataaagttatgactccgcaaaatatttgattatgatagtatttgtcgacataaaatttatatcttaagacgcattttgtgtg

SEQ ID NO: 116415 - DNA, 1665 bp, Zea Mays
tcatccgacctcgacccagctgcaaccaactgccttctgcaccccttggcgtttcatctcctctctcacctcttcgagttcctcaaagtttccatccgaaccataagtgttggcgagcagaacccatcccccgctgcctgattcctctgccatcatcaacatcctagctgcttgttgtgctctctccttatcaccatgcatccggcacgccgcaaggtatgtcctccatgcaccagcaccaacatcaccagcctcttctattacctttcttgcttcatccaacctccctgctcgtccaagcatgtcggtgacacaagcatagtgctctagctgtggctccaatccaaactcctctttcatcctcattagaaaacccttcccttcctcgacaagcccagagtggctacaagctgacaatgctcccagcagcgttatctcatctggaaccaggccttcttctatcatctggtggaacaacatcagtgcctcccggccacgcccatgcgacgcatacccatcgatcataatgttccatgatgccacatcccgtaggcgtgtccaatcaaacacacaacgagcctcatccagcccaccgctcttcgtgtacatgtccgccagcgcattgcaagcaaacacgtccagtgctccatcacaggccagtccactcgttacgatgtatccatgcaccaccctcccaaccttcagggctgcagtctgtgcacatgcggggagaacagcggcaacagtcactgaatcaggcaaaagtgtggtacgtctcatccttgcaaagagacacatcgtccccgcgtgatcagccgagtactgatgtgctgacagcatggagttccagctgaacagatccttatcagtatctggcagcccctcaaacaccatggttgcatcgtgcacctggtggcacttcccgtaaagatctatcaatgcattgcacacagatgcctccttgtcaaaccctgacctcaccgacaacccatgtactgcagccccgctccccaaatcggctgttgctgtacacacggacaagattccggtgactgtgaagctgctgatctccacctcgccctcctccctcatctttctgaagcactccgtagcgcggtcaaagcaaccgagtttgacgaacccattgaccatggagttccacacgacgacatcccggtgcctcaattcgtcgaacaggcggtgcgcgtggtcggcgaggccgaacctcaggcacccgcggagcagagcgctggcacagaacaggtcgtgtgcgaggccgaagcggagggcgagggcatggagcgcgagcaggtgcggcgagctgggggccgaggagaagaggggagggaaggagaaggcgtcgggggagtgcgcgacgaggaggcggcggaagagcgggagcgcgaacgcgtgcggcagggagagcgcggcgttgaagcaggggagcggaggcggcgcggaggcggggaggagaagcgggatggaggagttcagcgcggccgggccgcgagcgtagagggaaacgagggacgtgattgcggcgggggacgcggcgaggcggcccgacacgacgagatgcgcgtggagcgggaggaggaggcccgcggacggaggggacgagcgggagaagatagcctggagcgggacgcgcagcgccgccgccat

SEQ ID NO: 116416 - DNA, 1323 bp, Zea Mays
ggtcacacgattcggacgtctgtgcagcgcgacgaagggcttccaagcgtgtacatttgcaatggccaatgaccaatcgaagaatcacacaccctttttcagctatgcttttccctctcctagtgccgcagatttggaatcaatttcatggccagaagttaacagcaaagctaacacggaaaacaaagcgtggtaaagcagcacctatgaggcaacgaatctcacaccatcgttttcaccggcccacttcgccgtccggctgacctgctcacctttcctcttcatgcaaatggcgaaaacgtcggtggagttctgtgtgatctctgcccgcggcctgggccgcggatcgtcgctgctcaagccgcagtggttctccgtcgcatgggtcgatcccaacagcaagtactgcaccaaggtggatgcgtcagggagctccgacccaagctggggcatgaagttctcggtctcggttgacgagcatggtctgagcaacctgcagcagatggtgctgacggtggaagtgtacaggagagagcccatcttcctcagggagcacctccagggagctgctgttgtccagatgaaggagtatttcgacaaatttcagcacggcggggagcaacctggagtcgttgaggagactgcaagcttccagctaaggaggaagaagtcagacaaagctcatgggtttgtcgacatatccatttgtatctacaaggagaaagatgttcatactcagttttcaggatcacacgatggaccaaagcacccaaaccaggtcggtatcacactagctatagaagatggtccggtttataactatccaccattgtcctcaagccattatagggatcacagcaaaggtgatggtcgctacagcaacaccatgccaaaaagccctaccactcggccagatccatcaccatcaggaagtaatggatatagctatcaacccccactcatcccacaaaccctgccacctcccacttcaaaccccagttacttttccccaccgtatcctacgagagggcaagtgccacagagctacataaatatgccaccaagaaggtttgcaggtcagaacggttcatctaaccttggaatggggctcggagctggagcactggccgcaggaactctgatatttggcgaaaatttgttgccaggaccaaattttattgctggtcatgatggtgtgagcttaactttatcttcagatgcaccattctaacttatgggctactgccaatccatgtgcttgtgtaaccaattgtgtagcacaatttgaaaacttatgagaattctgccagatatattggattt

SEQ ID NO: 116417 - DNA, 2355 bp, Zea Mays
tccagtccaaccgacccggcatcgtctcgcgagccgcgactcgtctcgtcatttccatcgaacgcccagatcccacattcccacctagctctgcgcgatccatcccggccgccacgccaaggaggccctcgcctgacctcggatcaaagcctcctccatccgccttcatcccggccggtggttcgggccgtcacgggaggggtccatcactggttactcggtggagagctcggggctcggctcccatctcacgattctcaccccacacgcgcaccgggtcacctcgattcggcagcctcgcgagtccttgttgcgtgggtcactgcctcactgggttctgaggcaaggaaaagaaggcttcagtagtcaggtctgggtcaagccatgatggagagatcgctgctggaggtgctggccacggcggcgcaaggagggaccgaggggacgtcagtgctgagcatgctcaagtacgccgtgctgcccatcgccaaggtgttcactgtctgcttcatggggttccttatggcctccaagtacgtcaacattctccagcccaacggccgcaagcttctcaatgggcttgtgttttcccttctgcttccatgccttatattttcccaattgggtagagcaatcactatcgagaagatgatacaatggtggtatattccagtaaatattgttgttggcgcagtatcgggctctttgattggatttgttgtggcatctatcatcagacctccatatccatacttcaagttcactgttatccatataggaataggaaatattggaaatatacctctggtcctcattgcagcgttatgtcgtgatccttctaacccatttggcgactctgataaatgcaatcaagatgggaatgcatatatctcatttggccaatgggttggtgcaattattgtttacacatatgtattcaaaatgcttgctccaccaccaggacagacctttgatggttctgaagaggatggaatcccaatcaaggcatctggagagaatacagtgccccaagtaggaaaatatcctatgaacactaacagtagtactgtaccagagaatgaacctttgttatctgctggggaagttcaaaaggagcgtgccacttctgtaggaacaaagataatgggctatgttaaatgtgtggttaagtttctgaaagacaagcagcttctccagccaccaattattgcatctgcttttgcaattgcaatcggtgttatcccattcttgaagaattttgtacttacggatgatgctcctctgttctttttcacagacagctgcctcattcttgggtatctacatgtttcatttctattttgtttttgcgaaaacatctctcttgccaataaagttatcaaactgagatgaatgtatctatcacctaattctgtggcatacttttcagagaagctatgatcccatgcattttacttgctgttgggggcaatcttgtcgatggccctggtgaaggaagtaagaggcttggcgtgcgtaccactgttgctataatttttgcacggttggtcttggtccctcttgctggggttggcattaccatgttagttgataaacttggtttcattcccgaaggtgatagaatgttcaagtttgtcctgctactgcagcattctatgcccacatcagtgttgtcaggtgctgttgcaaatctgagaggttgtggaaaagaatcagctgcaattttgttctgggttcacatttttgctgtgttctccatggcgggatggattatattctatctgagtttgctcttctaagtatgtcacgccctgctaccacaacaatctgcaatttgtgcccgcattccagcctgtcagatgtaactgcattttcttgctagataatgttacttgatctgatttcagtccgctggttcagatgccttactgcgcaggaatatctttgagatcaaatatggtccaaaatgttgaggaagaaaccagtatcatgaactgtacagatatatcgttgcagaggtacaagtgtatctgtacagatatatggatacggtccctcctataatcccatattaccgtggtctcctgctgctacaagccgtgagcgatgggaacactttccctttccctccacgtatcaacaggttcacacccaaccctagattgggatgctggccttcttagttctccataatattatttcatttgtacttcctgtatattgtaaaccttgagatggctgtgttcaaatagtttcttattgggcgagggctgaagtagtagtatagatgtattatactacctatttgagtgttcggttatgccgcaaatgatgctttattatgcagaacttgtg

SEQ ID NO: 116418 - DNA, 2120 bp, Zea Mays
tccagtccaaccgacccggcatcgtctcgcgagccgcgactcgtctcgtcatttccatcgaacgcccagatcccacattcccacctagctctgcgcgatccatcccggccgccacgccaaggaggccctcgcctgacctcggatcaaagcctcctccatccgccttcatcccggccggtggttcgggccgtcacgggaggggtccatcactggttactcggtggagagctcggggctcggctcccatctcacgattctcaccccacacgcgcaccgggtcacctcgattcggcagcctcgcgagtccttgttgcgtgggtcactgcctcactgggttctgaggcaaggaaaagaaggcttcagtagtcaggtctgggtcaagccatgatggagagatcgctgctggaggtgctggccacggcggcgcaaggagggaccgaggggacgtcagtgctgagcatgctcaagtacgccgtgctgcccatcgccaaggtgttcactgtctgcttcatggggttccttatggcctccaagtacgtcaacattctccagcccaacggccgcaagcttctcaatgggcttgtgttttcccttctgcttccatgccttatattttcccaattgggtagagcaatcactatcgagaagatgatacaatggtggtatattccagtaaatattgttgttggcgcagtatcgggctctttgattggatttgttgtggcatctatcatcagacctccatatccatacttcaagttcactgttatccatataggaataggaaatattggaaatatacctctggtcctcattgcagcgttatgtcgtgatccttctaacccatttggcgactctgataaatgcaatcaagatgggaatgcatatatctcatttggccaatgggttggtgcaattattgtttacacatatgtattcaaaatgcttgctccaccaccaggacagacctttgatggttctgaagaggatggaatcccaatcaaggcatctggagagaatacagtgccccaagtaggaaaatatcctatgaacactaacagtagtactgtaccagagaatgaacctttgttatctgctggggaagttcaaaaggagcgtgccacttctgtaggaacaaagataatgggctatgttaaatgtgtggttaagtttctgaaagacaagcagcttctccagccaccaattattgcatctgcttttgcaattgcaatcggtgttatcccattcttgaagaattttgtacttacggatgatgctcctctgttctttttcacagacagctgcctcattcttggagaagctatgatcccatgcattttacttgctgttgggggcaatcttgtcgatggccctggtgaaggaagtaagaggcttggcgtgcgtaccactgttgctataatttttgcacggttggtcttggtccctcttgctggggttggcattaccatgttagttgataaacttggtttcattcccgaaggtgatagaatgttcaagtttgtcctgctactgcagcattctatgcccacatcagtgttgtcaggtgctgttgcaaatctgagaggttgtggaaaagaatcagctgcaattttgttctgggttcacatttttgctgtgttctccatggcgggatggattatattctatctgagtttgctcttctaatccgctggttcagatgccttactgcgcaggaatatctttgagatcaaatatggtccaaaatgttgaggaagaaaccagtatcatgaactgtacagatatatcgttgcagaggtacaagtgtatctgtacagatatatggatacggtccctcctataatcccatattaccgtggtctcctgctgctacaagccgtgagcgatgggaacactttccctttccctccacgtatcaacaggttcacacccaaccctagattgggatgctggccttcttagttctccataatattatttcatttgtacttcctgtatattgtaaaccttgagatggctgtgttcaaatagtttcttattgggcgagggctgaagtagtagtatagatgtattatactacctatttgagtgttcggttatgccgcaaatgatgctttatt

SEQ ID NO: 116419 - DNA, 1519 bp, Zea Mays
tccagtccaaccgacccggcatcgtctcgcgagccgcgactcgtctcgtcatttccatcgaacgcccagatcccacattcccacctagctctgcgcgatccatcccggccgccacgccaaggaggccctcgcctgacctcggatcaaagcctcctccatccgccttcatcccggccggtggttcgggccgtcacgggaggggtccatcactggttactcggtggagagctcggggctcggctcccatctcacgattctcaccccacacgcgcaccgggtcacctcgattcggcagcctcgcggtgagttgagttcttcgcttgtcgggccagtccgcctctcgcttggcgcggttatggattcgcgggtggcgtggcgtcgtccgcgatcgctctagctcgcattgagcgattcgcgagttgcgactccttgttttgtttgctctctgtttttttttatgtcgatggtgatatgtggcggcgggattctgagctcggttgcttctaaccttccgcggagtggtttagctaatcggttttgaagctgttgatatggatgtgccgtgtgcgtgacgaatcgaatgggccgcagcaggattcctacgcagctcggcagcagggggaattggatcctgcgaccatgcgaatttggaaccctggagcagtggagtgctaggaggtctcggtgtcgtcatttttttctaggggcgtaggagtcgacttggttggaatctagttagtcataatttctctttctgatttcattggtctgtccatgcgtctgttttcgtcaaacaagaagtttgttattgccaagcatcccgctatggaggaagctgcctgccgtattgtgttacgcgaatccggtgagctgggctctgcgcgttcctcttgacgccctttgcgcgaacgacgagctttcttccagctcggttgcccctgaacaaccaacgccaaaagcagctccagaattttcctgatgtcgtctctatatttttgccttctaagtcatgcttaatggcagagtccttgttgcgtgggtcactgcctcactgggttctgaggcaaggaaaagaaggcttcagtagtcaggtctgggtcaagccatgatggagagatcgctgctggaggtgctggccacggcggcgcaaggagggaccgaggggacgtcagtgctgagcatgctcaagtacgccgtgctgcccatcgccaaggtgttcactgtctgcttcatggggttccttatggcctccaagtacgtcaacattctccagcccaacggccgcaagcttctcaatggggtgagctttgtctcttgtaataactaataagtgctagctaatggaaggttgtgtaatggacaattgtttttctattgaggaattattttattaagtcaagatgattacccatcttggattttgtttaaagtaggaatatgtgaagcagtagaggagttgattgtctcatttgttttctcgctgtatcaaattagatataacattttcactgtttgttgc

SEQ ID NO: 116420 - DNA, 1792 bp, Zea Mays
gagcatcaaacaacttgtacaagccagttccaaatgatatcatgattaccttcacgaattggacaaagttagagcaggttattgagattcctcctgcatttcctacacttacctactccctcactcacatagaccagatccattcgcgcatcgaccataaagactactatacagatgccattgggatagttacttcagtctcgaatgtttcgccacatcgctcaaaaggacaacaagcttccagcttgaagaggaacatttccatatgcagtgcgagcagaggtgcttcggtcaatgttgtgctgtggggtgcccaagccaccctattcccaggagagcgcatatacgaggatgggcagaattccccacagattgtgctatttgttggcacgctcgtcaaaaaatatgcagatggtctttgtctgactggaagctcaccatgtaagtggtacatcaatccatccattcctgaggcagaaacccttatgtccagcgcacgcggtgatcataaaccagtgaagtggaatgcaactgtcacttcgagccagcttatatctcctgttgctgaggaccaaaaggtgtcgtatatcaagtatctccatccctttgaaaacaagggaaaggaattcttggttactgtcactataaggaaaattgacaacaagtggtggtataactcgtgcagaaaatgtgcctgcacagctgtcactcacggagactcttacaaatgcacaaactgtgattgcgctaacattgctatgcccgtccaaaggtataaaatacttgtcacggcaggagacgagacagctgacacagactttattctctttgggcgcatggctcaaagaattgtcaaaaggccttgcgatatgctcatagcgaacactccatcaggcttcattccagatgcaatcacaaagctgcttgaaaggacgttcatttggaacgttagcttctctgggcacacaattaactctggaaacgtctgcttccaggtcaatgctaccataaaggaactgggcaatcagaatgttgacatttcaacatcaaccgcagggacacaccagtcttcgcttatgttctcacaaggtgcaagcagcagcatggaagacactcctcacaagacagacaccttgtcttcacctctgacacctttgacgcctcagggtagcatcgccactacaaagtatttggaaaccgttgaagctggagacgcagagcgtgtgactactcagacctcgacaactaggaagagatcatgctcttcgcctggcaaatcagtagcgaaaaagttgttcgttgctgacgatgaggaagaaagcatcagtcaatccagtggaggtggtgttggtggacccagtgatgacaaaaataattaggtgttggtgtacgaacgtggatcttttgcctccacagttgtagctatgtgtaattcagggttatcgtctatttctactcttctcaagttcttgtatatgttagctggatgggggagatgtggtacatacttttgtccgtaagaagctaacgatttgcctacacaaacctgccaaggttaactttgatcatgatgctacgcttatcacgcttttgatagactgtcgaccaacgtgaatgcatctcacttagaatcgtgcctgttacctttcctcccccgatgttcatccttagcgacttgtactatgtagtggcagaagaaaaacctactcttttgtatatatcaactgcccgttgctaaaccttttgctacatcgcacggctgcaaactgtgttctacttatttgtatggcta

SEQ ID NO: 116421 - DNA, 506 bp, Zea Mays
gagaagaagaggtgctccaaaggtgatgataaatttgcccaatcagcacgcatgcagtcttcaacgatggttctgctttcttttcacggagtggaggggcctcgacatagacaatgggttcaaacgtttccgtgttttgatatgtgttaattattgtaatgtcatgtatgctttcctgagaactaaaacacacggtcaaacatggtaaacccttttatttctgttcaggaatgctgggaataattaggattagggatcagtttcttacccataaacgaaggaaaagtgaccatttgttcctgaccattatagcagttataatacatttccttcctcttcttaaagttgagctccacgcggctatcctaattagaggcgcttgtggtactagggtcgtaagtaccaaccagagttagttctatgcatccatggaacgtcctgataaatgtttaggaatcttgagttgtggggtcctaactaattacctttacgtcctgtttggatca

SEQ ID NO: 116422 - DNA, 2321 bp, Zea Mays
aattccattttttattcgctcctcacacgtcgccgtcgcttctcgttattaatatcgccgtcgcctcgcacctccctttgttccgtcgccccgcattgctcgcccagagttcttgtttaggcaaaggcaaaagcaggagcaaaaagatttggtctggaccagattttaaacgactgtgctgttcgttgaatctcaatccgccgtgcgaattaactgaatagggtttcgttggcgatggcgagctcgtggacgcttcctgaccacccgaagctccccaaggggaagccggtggctgtcgtcgtgctggacggatggggcgaggccaaccccgaccagtacaactgcatccatgtcgctcagactcctgtcatggactcgttaaagaatggtgctcctgagaaatggagactagtgaaggctcatggaacagctgtgggtctcccatctgatgatgacatgggcaacagtgaagttggtcacaatgcacttggtgctggtcggattttcgcccaaggtgctaagcttgttgatcaagctcttgcctcaggaaagatttatgatggagatgggttcaactacatcaaagaatcttttgaaaatggtactcttcaccttattgggttgttgagtgatggtggtgtccactcccgccttgaccaactgcagttacttctgaaaggtgtcagtgagagaggagcaaaaaaaattcgtgtgcacatccttaccgatgggcgtgacgttttggatggcagcagtgttggtttcgtggagaccctagagaatgatcttttggagcttcgaggcaagggtattgatgcacagattgcttctggtggtggaaggatgtatgttaccatggaccgttatgagaatgactgggatgtggttaaacgtggctgggatgctcaggtgctcggagaagcaccctacaaattcaaaagtgcacttgaggctgtgaaaacactgagagcacagcccaatgctaatgaccaatacttgcccccatttgtgatagttgatgacagcggcaaagctgttgggcctgtattagatggtgatgcagttgtcactatcaacttccgggctgatcgcatggttatgcttgctaaagcactagagtatgcagattttaacaattttgaccgtgtacgtgtccccaaaattcgatatgctgggatgcttcagtatgatggtgagttgaagcttccaagtcgctaccttgtttccccaccagagatagatagaacatctggggagtacttggtgaagaatggcatccgcacctttgcttgcagtgagacagtgaaatttggccatgtcacatttttctggaatggtaaccgctcgggatactttgatgaaactaaggaagagtatgtagaagttcctagtgacagtggtattacattcaatgttgcacccaagatgaaggcgcttcaaattgctgagaaagctagggacgctctcctaagtggaaagtttgaccaggtacgtgtcaacctgccaaatggtgacatggttggtcacactggggatattgaggctaccgttgttgcttgcaaggcagctgatgaagctgttaagatcattctgaatgctgtcgagcaagttggtggtatttaccttgttactgccgatcatggcaatgctgaggatatggtgaaaaggaacaaatctggcaagccgttgctcgacaagaatggtggtatccagattctaacctcgcatacccttcagccggtgccggttgccattggaggccctggtcttcaccccggagtgaaattccggaacgacattcaaatccctgggctcgccaatgtagccgcaactgtgatgaacctccatggatttgaggcccctgctgactacgagcaaaccctaattgaagtggctgacaactaaatactggccagctatgtccaattttggttctatagttttgagaagggatatggccatgccattcaataatttctgtttgcaagcacgttgctcaaactcaccaaaacattgagaaacgccttttgacttgcatttagatgctctatttataccgttgacaatcgtctcttctggcttttagcagtttgatggctatctttacttagctatataatgtatctgagactgcaaactttgtgtcagtcaaactgctcgaggttatatgctgtttgtgtgggtcatcacgtgtgattaccttcgcacgcattgacgcatgaattgtgttcaccattctaattgcaaggcattttgatgggctacaatgtttgggagcaagataatttcagccccttcattcgcctagctctcccaaataa

SEQ ID NO: 116423 - DNA, 2192 bp, Zea Mays
aattccattttttattcgctcctcacacgtcgccgtcgcttctcgttattaatatcgccgtcgcctcgcacctccctttgttccgtcgccccgcattgctcgcccagagttcttgtttaggcaaaggcaaaagcaggagcaaaaaggtttcgttggcgatggcgagctcgtggacgcttcctgaccacccgaagctccccaaggggaagccggtggctgtcgtcgtgctggacggatggggcgaggccaaccccgaccagtacaactgcatccatgtcgctcagactcctgtcatggactcgttaaagaatggtgctcctgagaaatggagactagtgaaggctcatggaacagctgtgggtctcccatctgatgatgacatgggcaacagtgaagttggtcacaatgcacttggtgctggtcggattttcgcccaaggtgctaagcttgttgatcaagctcttgcctcaggaaagatttatgatggagatgggttcaactacatcaaagaatcttttgaaaatggtactcttcaccttattgggttgttgagtgatggtggtgtccactcccgccttgaccaactgcagttacttctgaaaggtgtcagtgagagaggagcaaaaaaaattcgtgtgcacatccttaccgatgggcgtgacgttttggatggcagcagtgttggtttcgtggagaccctagagaatgatcttttggagcttcgaggcaagggtattgatgcacagattgcttctggtggtggaaggatgtatgttaccatggaccgttatgagaatgactgggatgtggttaaacgtggctgggatgctcaggtgctcggagaagcaccctacaaattcaaaagtgcacttgaggctgtgaaaacactgagagcacagcccaatgctaatgaccaatacttgcccccatttgtgatagttgatgacagcggcaaagctgttgggcctgtattagatggtgatgcagttgtcactatcaacttccgggctgatcgcatggttatgcttgctaaagcactagagtatgcagattttaacaattttgaccgtgtacgtgtccccaaaattcgatatgctgggatgcttcagtatgatggtgagttgaagcttccaagtcgctaccttgtttccccaccagagatagatagaacatctggggagtacttggtgaagaatggcatccgcacctttgcttgcagtgagacagtgaaatttggccatgtcacatttttctggaatggtaaccgctcgggatactttgatgaaactaaggaagagtatgtagaagttcctagtgacagtggtattacattcaatgttgcacccaagatgaaggcgcttcaaattgctgagaaagctagggacgctctcctaagtggaaagtttgaccaggtacgtgtcaacctgccaaatggtgacatggttggtcacactggggatattgaggctaccgttgttgcttgcaaggcagctgatgaagctgttaagatcattctgaatgctgtcgagcaagttggtggtatttaccttgttactgccgatcatggcaatgctgaggatatggtgaaaaggaacaaatctggcaagccgttgctcgacaagaatggtggtatccagattctaacctcgcatacccttcagccggtgccggttgccattggaggccctggtcttcaccccggagtgaaattccggaacgacattcaaatccctgggctcgccaatgtagccgcaactgtgatgaacctccatggatttgaggcccctgctgactacgagcaaaccctaattgaagtggctgacaactaaatactggccagctatgtccaattttggttctatagttttgagaagggatatggccatgccattcaataatttctgtttgcaagcacgttgctcaaactcaccaaaacattgagaaacgccttttgacttgcatttagatgctctatttataccgttgacaatcgtctcttctggcttttagcagtttgatggctatctttacttagctatataatgtatctgagactgcaaactttgtgtcagtcaaactgctcgaggttatatgctgtttgtgtgggtcatcacgtgtgattaccttcgcacgcattgacgcatgaattgtgttcaccattctaattgcaaggcattttgatgggctacaat

SEQ ID NO: 116424 - DNA, 979 bp, Zea Mays
ccactaccagcctcaaattaagcagccaacaagacctgtctatagctgcctcgctagccaagcctgactgctacctagcaacgaccagctgggactgggagggggagtccatcgagctcgccccaggctgacgatccgctcgatctcggggacccaagagtttcgatagacgacgcatggcgaaggtccaccccaacgtgctgctgtcgtcgtcgtcgccggctgagggagccgccgcagcggcggcgggcggcgagggcgaggagacgtcgctgacggtgtggcgcaagtcgctgctgttcaactgccgggggtacacggtgttcgacgccaggggcgacctggcgtaccgcgccgacagctacgacgccgaggccgaggtcgtgctcatggaccccgccggccgcccggccttcaccgtgcgccgcaggcgcctcagcctgtccggcgagcagtggctcatctacgcgggcgaggagacgcggcggcccgcgtacgccgtcaagcgcggcggcggcggcgggaagtcggtggcgcgcgtcacgccgtgcgccgccgtgcccgccgcagctggggccgccgcgttgcccgcgtacgaggtggaggggtcctacgcgcgccgccgctgcgtggtgtacgacgcccaccagcgccgcgccgtcgcggaggtgcagcccaaggaggcggtcggctcggacgtgttccgcctcgtggtgcagccgggggtcgacgtgtcgctcgccatggccgtggtcgtggcgctcgaccagctgtttgggaggccgtcgctcctcaggagctggtcctcgccatagattcatgttttctttcttgtgttcaaattcagtttagataggtttttttgcccctggacttggggttgtgaattatcactggagatgctgatgactcgatctgcctgggcatcgtttattggcatgaaagcaattcctgttcttgcgtgcttactcccaaaata

SEQ ID NO: 116425 - DNA, 104 bp, Zea Mays
gcaaataaaatcgcgctggtaatcctagtgcttcagcacttttatttatcgagccccgcaagattaacccctatatcacgctcgcacgttcctggggataagca

SEQ ID NO: 116426 - DNA, 2347 bp, Zea Mays
cggaccgctccttccaatgggcgacaggccccatataagccgtggcctcccggctgcctgtccccactcgttgagcccgccccccgccaccggccggatcgacagcatccatctgaccgtctgcgcgcggcggctctcacaccgaacacacgcagggcgcgcataggcgaggcgagggcccccgcgagggatggtgtggtcggctgggatggcaatgcgaggcgcctccgccgcgctgctcgtgctggcgctcgtcgccaccgtggcgcgcgcggaggacccctaccacttcttcgagtggaaggtgacgtacgggacgaagaccatcatggggacgccgcagaaggtgatcctcatcaacgacatgttccccggccctaccatcaactgcacatccaacaacaacatcgtcatcaatgtcttcaacatgctcgaccagccgctcctcttcacctggcacgggatccagcagaggaagaactcatggcaggacggcatgctgggcaccatgtgcccaatccagcccaacaccaacttcacgtaccactggcagcccaaggaccagatcggcagcttcttctattaccccagcaccggcatgcagcgggcggcgggcgcctacgggctcatcagcgtccacagccgtgacctgatcccggtccccttcgacacgccggccgacgacttcccggtcctcgtcggcgactggtacaccaaggaccacaccgtcctggccaagaacctggacgccggcaaggggatcgggcggcccgcggggctcgtgatcaacggcaagaacgagaaggacgcgtcgaacccgcccatgtacaacgtggaggccggcaagacgtaccgcttccgcgtctgcaacgtgggcatcaaggcgtccttcaacatccgcatccagaaccacatcatgaagctggtggagatggagggctcccacaccatgcagaacgactacgactcgctggacctccacatcggccagtgcctgtcgttcctcgtcaccgccgaccagaagcccggcgactacctgctggcggtgtccacccggttcatcaaggaggtgaacagcatcacggccgtgatccgctacaagggctccaacgccccgccgccggccaaggtgccggagagccccagcggatgggcgtggtccatcaaccagtgcaggtccttccgctggaacctgacggcgagcgcggcgcggcccaacccgcaggggtcgtaccactacggccagatcaacatcacccgcaccatcaagctcgccatgggccgcggcaaggtggacggcaaggagcggttcggcttcaacggcgtgtcgcacgtcgaccccgagacccccgtcaagctcgccgagtacttcaacaccaccgacggggtgttccagtacgacatcatcggcgacgtgccgccctccaagtccgcgcccaccaagatggcccccaacgtcatccgcgccgagttccgcaccttcatcgaggtggtcttcgagaaccccgagaagagcatcgacaccatccacatcgacggctacgccttcttcgccgtcggcatgggcccgggcaaatggacgccagcgtcccggagcacgtacaacctcctggacacggtgagccggcacacgatccaggtgtaccctaggtcgtggacggcggtgatgatgacgttcgacaacgcgggcatgtggagcatccggtccaacatctgggagaggcagtacctcggcgagcagctgtacgtgagcgtcatctcgccggagcggtcgctcagggacgagtacaacatgccggagactagcctccgctgcggcaaggtcgtcggactgccaatgccgccgtcctacctctccgtctagagcatgcacgcatctcgctcggtttccccttccttccatcacgtgcgcacggtgctgtatacacaatttaaaggagcgtgagggcagcggcttctctcgtttccttcttctctagctttgtccccctagctcgtttgttctctcgtcgtcccgtcgtccggttcatttccgcttccgaggaataataatcaaccaaaggggcgggcgaccagggaaattaagaggcgatggtcagctgcaaatgcattcatgcgtaaacacatcgagacgccgtctcgaaccattgtaggagttaagtatatgatgatatataatcctgtctatctaataagtccctcagccaaaaattgttctttatatttatgtatatgtacatgcatgtctcctgattcaactttgatgtttattgtctctttcgctttcgtactgaacttatccgtgtaacttggtattggtatatggatcaatagattgttattcact

SEQ ID NO: 116427 - DNA, 2940 bp, Zea Mays
atggcggcgatgcagcagttgctactcctgttcttgctcttggtatacctccggccaagtttcggtcagacgaacccccaagatgttgctgcacttcaggctttgatgaataattggcaaaacgaaccaccaagctggacaggttcaactgatccctgcacctcctgggttggaatttcctgttccaatggtcgggtgacagaaatgagattaacaggcatgaatctgcaagcatcggacccccttaggccagaggtccgggtggcccgccatgaggaccaaaagccattcccgggggtccagccccctggcataggtgctgagagccctcgtcttcaagacacgtggcaaacccggacccctccactggggttccagagtgctgattatagggatctgtctaataaccaaaatctcgggggtccacttactccaaatattggaaatctgaagcagctcaccgttctgattttgcttggatgcacgttcacagggaatatcccgaaagaaataggcaacttgtcacagctcacattcctggcactaaactcaaataaattcactggtggaattcctccaacacttggccttctttcaaatcttttctggttggacatgtcagcaaatcagttgtcaggacaaataccagtttctccagggttggatcaacttgtcaacacgaggcatttccacttcagtgagaaccagttgacaggcccgatgagcgaaagccttttcagtgataagatgaaccttatacatgtgatatttaataataacaactttactgggccaatcccagcatctcttggacaagtcaaatcacttcaaataatccgactagatcataacattgtcacaattgttgccagccgactagatcataaccaattcagtggtccagttcccaacagtattaccaccctaagtaacctcatggaagtgagcatagcaaacaacctactgaacgggaccgtgccggatctcactaatctaactcagctagattatgtatttatggatcatggtgaacttaatgggacaatccctagtgctatgttcagtctccccaacctgcagcaagtatcattagctaggaactcattcagtgggaaacttaatatgacaggtaacatcagctcacagttgcaggttgttaacttgacatctaatcaaatcatcgaagcgaatgtaacaggctacagcaacacccttatattaacagagaatcctgtatgtttagacaacactagtttatgcaaactcaagcaaaagcagcaagcgtcatatgccactaaccttggcccatgtgctgccattccatgcccctttgatcagtcagcaagtccagtcacttcacagaactgtgcatgcaccagtcccattcagggtctgatgatcttccaagcacccgccttctctgatgtcataagccccacaatgttccaaattgtggagtcaacacttatgcagaatcttagcctggcaccaagatcagttgccatttccaatgttcaattcagccaaggaaaccctctaacattcatagtgagtatttttccggccagtggaacgagcttcaatcgctcagaagtcataagaatcatttctcctctggtcaaccaaacttataaagccccacccaattttggaccatacagcttcatagcgaacacatactttacagttcccagcaataagaagccctcgatgggcaaggctgcaataattggaatatcaattgggggtgttgtccttattcttggccttgttgcagtagcaacatatgctctacgacagaaaaggatagccaaggaggcagtagagcgaactacaaatcctttcgcatcatggggagctggtgggacagacaacggagatgcaccacaattgaagggtgcaagatactttccattcgaggaactgaaaaaatgcaccaataatttctcagaaactcaggagatagggtctggaggatatgggaaggtgtacaaaggaagacttgcaaacgggcaaatagctgcaataaaacgtgcacagcaagggtccatgcaaggtgcagctgaattcaagaatgagatagaactgctgtccagggttcatcacaagaacctagtgagcctagtgggtttctgctacgaacaaggggaacagatgttggtttatgaatatattccttatgggacactaagggagaacttgatgggtaaaagaggagtgaacttagattggaagaaccgcctcaggattgccattggctcagcaaaaggtctagcatacctccatgaacttgctgatccaccaatcatacacagagatatcaaatcaaccaatatccttttggatgaaagtctcaatgctaaggttgccgattttggtctttcaaaacttgtgtctgacacacaaaagggtcatgtttctacccaagtgaagggaacattgggctatttggatcctgagtattacatgacgcaacagctctctgagaagagtgatgtctacagctttggagttgtcctgctagaactagtaactgctagccagcccatagagaaaggcaggtatattgtccgtgagatcaggacagcaatagatcaatatgatcaagaatactatggcttgaagggcctaatcgatccaaaaatcagggattcagctaaattaattggcttcaggagatttatacagttggctatggaatgtgtggaagagtctgctgttgaccgcccaacaatgaatgatgtggtaaaggaacttgagatcatcatacagaatgaaggggcacaattgttaaactcagcgtctttatcagttgaacaatttggaaatgaaaagagacgagatccttatgcagaacatttgcctatgaatgatgaaagcagcagcagcacttttgactacaacagtgggtattcatactcagctgttcaaccaaagtag

SEQ ID NO: 116428 - DNA, 104 bp, Zea Mays
ccttgtgaagctttcggcaatgccagcaagagatagaagttgtccaggcgcgtccaaaactgtatttctgaccaattatataattccgcaaggcggacaagtag

SEQ ID NO: 116429 - DNA, 1078 bp, Zea Mays
attgataaaatacgcaggggttttctttggaggggccagaaggaggcaagaggaggtcattgtcttgtagcctggggtcgagtttgccgaccactgcagcttggtggatttggcatatctagttttctagaattatgttgggcccttcgaatgcgatggctctggctgcaaaagactgaccccacacgcccttggtctgatctccacataaaagttcctggaaaagctagagctttcttcatggaggtggttattactaaggtgggagatggcacaaatacaaagttttggaaggataagtggttaaaatggtaagcgaattaaagaccttgctccaagtttgtataatattatacccaagaggattgtcaatagcaggactgtttatgaggcaattacagatagaaaatggatttctgatattaaaggtccactgacagtgggagtcttaatagattatctccagttgtgcgatatgacttcagtttggcagctgcagcctgaggttgaggataaacatgttttcagtattgctcctaatggcatctattcagcaaagactgcttacgaaggtttctttttggggtttgtattttaccctcatcacaagaaaatttggaaaacttggaccttgccaaaatgtcgtttcttcatctggctggttgcacaaaattgagtctggacagaggataggcttgctaaaagagggctgagtcatcctgagaagtgccccttttgtgatcaagatgatgaaactattgatcatctcctcgttacccgttctttctccaaggaattctggtatctgttgttaaggaaattcggtctgcattctttggctcctcaaccagatgttggctcatatctaggctggtgcgaattggtggggaatattgctactgggttcacaaaaaaaggccttgattcccttatcattctgagagcctggaccttgtggaaacatagaaacaaatgcgttttttatggctgcaaccccagtgttaccatgagtcttagagctgctgatgaggaaaggacgcaatgagagattgctggtgccaaggggctctgccattta

SEQ ID NO: 116430 - DNA, 3258 bp, Zea Mays
gccagcccactgagctagatgggccggcatcatataaaacagtaatctgggcatttgaactgcacccaatgggcccacagacccataggaacagcccgaaccgcccccttacccaataggcccacagaacactggaccgtccggtcacaacgagatatttatctctccatgctccgtccgccgcaccgtgccgtttcggctgcgcgcctgcgccaccccatcccgaggcggggagaaatttgtgattttgggaggccgggagagcggaagcgcaaaaccctctttcagtctttctgctgctccggcaccatgggcggcacgtccaagctgctctcctccctcctcctcacttcctccccgctacgcctccgacccactactgccgccgccgctgcgctcttcctcaccccgcccgcggcggcctcgcgccgcctgctcctgctctcctcgccttccccgccccgcaccctctccacctcgtcctcttcccttccgcacggctccagccaggcctccccggcgccatcgccccgagctccattccccgagtggtcccgcctcgtcgaccggcttgccgccgccggatacggctccggcgctccctttgccgctgacgatctcgcgatcgcccttgcctccggatgcggcctgtcggacggggcgctggccgctgtttccacctgcctcgcattcgcgcgggaccggcctgacctcctcagttctcttccaaggaaggatgtgaagatcctggtggccaatgcggcgccgtccctgttcaaagacggggaggcatcagcgctgcggcttcggcgctaccttgctggggaagaaaccgatgtcattgtttcggacagagctgaaactgtcgatattgttcgatatctgctaagttacacatacggttcttctgtcagcgactcagaacacaagaaacttattgattctgccgtgagaaatatcatggctgagttagtgagttttagtggtctttcccaatcgtccacttttgaggaatcaactcccaaccaaatttgctcgagtcagcttgaacgattttccaggcctccagggcaaaatatcgaaatgaagcgaggtgactggatttgcacaagatgtagcttcatgaactttgcaagaaatgttaggtgtcttgagtgcaatgagcagcggccaaagaagatgctgactggtggagagtgggaatgccctcagtgtgatttctataattatgggaggaatatgtcatgtttaaaatgtgattgcaagaggccagcaacaatcccatcgattcctgcatctgttggttctggtttaggtggtgtggcacagcttcttagtgtaacgagtgctggtaaatctgaaattgagagaaaacttgctgaaagtgataaaaaagcagaaagatggttgagcaaagtatctcaacttcaagattcagctgacttaagtagtctagcagaagatgaggactttcctgagattatgcctatgcgcaagggggtgaataagtttgtggtgagcatgcacaaaacaccactggaaagaaggcttacaaatgcacagtacagaagtaacaatagccccccagcatccgacccaaagataagtcaaactttggacaggatacttgggcgttcaactcctactacagccccaaacaatcaatctgttactagtgatgcacctactgaagctctgaagaaatcaacagaccacctcggtggcattgatcctgttccgtttgtgcccctgtctgcagatctctttgcaaaaccacagactaataatggacagagcaatcagaatggaaaaatcaatgcagaagatgacagttccatggtaaataatgcagtccctttacctgagaggcaaagcacaggatcattagataccgctgagatatggtctgagaaagtagcagaacctgacaatgcaaaggattccccaagtgcagtttctgatgaaaattttcctgagattatgccaataaggaaaggtgaaaaccgatttgttgttagtaagaaaaaagatcgctcattgacatcacaacagtacaaaaggcgcagtattcttgagcaggcagacagttctgattttgtcccatttgttccatttcctcctggctactttgccaagaaagatacaccaatagagagtactacagacacaggaatcgtgcccgaaggcagtcaaccaaaaggtaacctgaataatgggaactggaacataaattacaataagcatcaatcacaatctcatggggcacaatgtaggcctagtggtgctgcatatactggcactcggatcatgggcaactcccaggggaactacaatgggagcaatggtgaatctacttaccatggagctaactttgaacaggaaccttataacaaaggttataggaacaacaactattggagcagtgataacaataacagcaacaatgcctggagtaacaacagcaattttaacaacaataatgactggagtggtaacaattcctataacagcagtactgagaacggtaatagcagctacaacagtagtcatggttataactacaatggtacatggagcgacagcaaccacagtgcatggagcagtagcagcagcaacaataaccagagtggttcatttgttgataataacagtgtcactagcagccgcagttccatgaatgatgcaaatcacgtgagtcacagctcaggttatggaggaagctcaaacagaggttatactggaaagagcttggaaggatctgctgtaaaggatcctgatccactagacatgtccgaggaagctaaggctgagagatggtttaggagggcagctcagataaaggacatctctgagctagcgaacattccggacgaggacttccctgagataatgccgatgaggaagggggtaaacagattcgttgtgagcaagaggaagacaccattggagaggagattaacttccccacagtacagaaggaacctgccaattgtcagatctgaaacggacgaggatgctagctgaaaacagaggtatgattgcctgcataccagtacggcagtataccaccacagccttaactgtgatgcgattgcgatgtaccatttttatttgtgacgataagcgagcgatcggaaacagaaatcatggaaaacaataccccaagatagttttctgtatagtaaaattttgttcgcaagcctgaggtttgcgggattgtctttgctacttctaaactatacagatttgcgttgtact

SEQ ID NO: 116431 - DNA, 119 bp, Zea Mays
ttttttttttttttttttgtctatcttgttcgttaaactatagcaagtgcggtttcaatgtgctactttgtgatctttatcttttgctcttaaatatgtctaagatagacatgtataag

SEQ ID NO: 116432 - DNA, 429 bp, Zea Mays
atggttgttgctggagctatatttggagctgcatttggtggctggatgaatgacaagtttggaaggaggccttccatcatacttgtcgatgcactgttctttggaggtgccgttatcatggcgttttcctcgacacctagagttatcattgttgggagggtatttgtttgtcttggtgttggaatggcttccatgacagctcctctgtacatctctgaagcctcccctgctaggatcagacgtgctctagtgagcacaaatgggcttctcatcactggtggccagttcttggcctacctcatcaatctagccttcactaaggtacccgctcaactaaacattcaactcttgccatcttctacaaatttggaaaacattgttttccaaagaataattgatgttacatccattgcctgtgtagagcggtag

SEQ ID NO: 116433 - DNA, 2776 bp, Zea Mays
gctgaaccaactgcttctgacgaccacgaacaacttgtggttgccatacgtttaatgccacagaagctctcctgcgtatgtttcacagagtaagaaattgcacaatcaacacactagtgataagaaatatgcaaccatgacagtaaagaagaaatggcgcagaagccattttaacatcaagtcatcaatggatggagataacacacactagcgagtagcgacatgcttcagaaagactgtatttgtccatttatatggcagggctgtagtctgtagaagtgtagtgctaggcgatgaagcaacatctctccacatgattcagctcgtggctgaaggttagataattagagatgccattgtgttgacttctccattcaaatcatgactaatgtaccaccctcctctcatcagaggatggccaagctcctagctaattgaaatataaaacagaaacaggaaaggagctcagttcgttatagaggtgctggagatgaggtttgtaactatcattttccaattcaactgtgctggactaagaaaggtccgtccttgatgtttcaacccactggttttaagacatctttaacctcttataagcggtattgttcagtttgttttcttgttcatgtgctccaataacaaacctgtcataagcttcctttgaatttttcttattcataagcttcccttgataaaaggacaagtggtcatctttttagcctaattcaacaaaaaagaaacgatagcagctttctctgcctggtgggtaggatgattgccgatcagccacacatatgaggctatgagctaaccgagattcactgttacagttcgaaagatactaagcacagctgttttctacactgtaacatacactcgccttgagtaaaatcaagccaaataaatgatcatgcagtaaaacttagctactgaatacttgtgaagacattgtttcagtattgtaacatataaggggctttcaatgcggggaacaaatagcagcaaatcattgacatgacctaactagttgtacatgtggtctgaaagattggcctaacatttgcgtaagcgggcagatcatatttcatggaagcaactgccttgagcaatacgatacttcttcaattttgaaatgaataaaatgtatgagccttccgtttcgataaacatgactaacagaaaaaacgttaatttatttactatatatgaaagccggtaagaaacgtgcattcctagccttccacgtcaattgaattattttcagcccctcgatcatcaatcaagggcttgcgtccggtagcgggtaaaaagataaaactctccatgctcccacggtccctctgcctctcgagagttccgtccacacatgcttctagatgcctctcctcgcttcatccacctcgtctcactccggcgtcttccatttggcctccgtgccttctcctcttgcttgtggccacagtctgagccatgccgcgccgacatggtgagcaagagcgacagccagtagaaaccgctctcgagcgcgacgctgcagcaggcacaggcgaggtcacgctcatccagatcgcactggcccatcgacgacagcaacgccttctcgggcaccgccgccgcgacgcagtcctcgcacatgtccccggcgtccacgagccagcggtgggtcctgaagaggctgccaatgccgaggcgggagcagagcgcacacggcggtgcgaggccgaagaagccggcgaaccgagctatgaggattaggattttggttttaagggcaatttttcccaatcactataggctcctatactcttctcaaatattgatgtggtatgcgagtaacaaaacttcttctcaatataaataggtttggtagtgtggccttactgttacgttactttccttcttttaaaaaaaattaaaggtacctacaagatattgaccatggatgtctattgtttgtagcatgctatataattcgaatgtgtgttaatcatggccaggtcacacaatgtgtcatgctatatagtaaactagtatctataatcaggggtccaaaaaagcaatctcaagctcatgtaaacaagcagctcaacatatcattgaagctactgtcttgaccaatatgacactcgtgcaggatgtcctttttgtaatgagttacatacaggagaatccagtcttatggttcttcattatctacatatggtcttttattcttaggcactcattttgtctaggctttcagtttaatatttttattcagcggccatgattattggcaagaactcattgaatctatagtttgggctcataacaaattaaaagttgctcttgctactcagcctaaagccttgagcattatacaagaacgtgctctaggagtaacccactaccttctgggcacttcagtttggataggagtataggacaaacaatggtagatcgttgaccgaattaaccagccatatatgtgatttgaaagaaccatctttgcctgctcgtgtgaacaaacagcttaatatatcatggaaacaacagtcgtaaacatttttttagtgcactgcgaattagatgagtgctcagaaagacgttgtactgccatgacaaaactgtacacatattagctctaataatcacaccccccccccccccccacacacacacaagaacatatgcagacaagccttctaaattattattattttcaaatacatctcttgattgcctaatgttaagagtctaaattgatatgttcttttctttgagacgcagataatta

SEQ ID NO: 116434 - DNA, 2834 bp, Zea Mays
atggactctggacttctggagttggaatgcttcaacgcggtgctcaacatgtcggactgcctgaggctgcagtccctgcacacgaacaggaaccacgccgctgctacgtcccgagcggccgagccccgcagagaaagaacgcctcgcatgcaactgctcaaaccgaaggaagccgccacactcccgcgcgaggccctcgaggcccacatcgtctcgctggtccgccgatgcccgggcctcctcgcgctccgcagcgcgcacgcgcacctcacgcggctccgcctcccgcgcctcaccgccgccttcgcgctctcgaagctcctcgcctcctgcgtctcggcgcccgcaccagccgcagcccaagccgcggcgtcctcctacgcccgcaacctgttcgaccaaatccccgacccgaccgccttctgctacaactccctcatccgcgcgctccccgccgcgggctccgctcccgccctggccgtctaccgccgcatgctgcgggcggggtccccgcgtcccaacagcttcacgctcgcgttcgcgctcaaggcctgcgcggccgtgccagctcctggcgagggacggcagctgcacgcgcaggcgctccgccaggggctagcgactagcgcctacgtgcagaccgggctgctcaacctctacgccaagtgcgagcaggttgcgcttgcgaggactgtgtttgatggcatggccggggacaagaatcttgtcgcttggagcgcgatggtcagtgggtactcgagggtggggatggtgaatgaagcgctggggctgttccgggagatgcaggcggtgggtgtggagccggatgaggtcaccatggtcagtgtgatatccgcgtgcgccaaggcaggggcacttgatctggggaagtgggtgcatgcttatatcgataggaaaggtatcaccgtcgatctagagctgagcaccgctttgattgatatgtatgctaagtgtgggttgatagagcgggcgagaggagtgtttgatgcgatggtggagaaggataccaaggcatggagcgcaatgatagttggatttgcaattcatgggcttgtagaggatgcattgggacttttctcaagaatgctagagctcaaggtgaggcctaacaatgtcacctttatcggtgtgctgtccgcctgtgctcatagtgggttagtggaagatggacggcggtattggtccattatgcaaaatttgggaattaaaccttcaatggagaattatggctgcatggttgatctcctgtgtcgatctggccttctggatgatgcttactcctttgttattggcatgcctgtctcaccgaattcagtaatctggaggacacttctcgtggcttgtaaaagctcgaacaggattgacatagcagaatcagcaacaaagaggctccttgagttagaacctcacaatccagagaactacgttctgctctccaacttgtacgcatccaactcccagtgggacagagtgagctatctgaggagaaagatgaaaggcaagaatgttactgctattgctggacgtagttcgattgaaataaacggccacctgcatgagtttgtggtgagtgatgattcacaccctgaaatcagggagataaggctggttctcagagagatggcggatcgagtgcgacgagctggccacaaaccttggactgcagccgttctgcatgacgtcggtgaagaggaaaaggaagctgcgctttgtcaacacagtgaaaggctagccatcgcatatgggttgctaaagacaagagcccctcatgtcattcgggtggtgaagaacttgaggttttgccttgattgtcatgaagtggccaaaataataagcaaggcatacaaccgagaaatcgtcgttagggatcgtgttcgtttccacaaatttatgggaggaagttgttcctgtaaggacttttggtgatctttttttcttttcttattaatataatagcaaactaggtgagtgcccgtgcgttgcaacggcaacatataatatcaagatggcttatgtacaaatgtgtgtttcattgttatagtaccatgtccgtgcacaattatatttaatacccataaaaaaatatatgttctatacacatttggatcttctatacatatttagatctcgagatgtcccattcccttcatcaacaaaataagttcaagaaattttgtttgaggcctaaatgacctcagaacaaatgtttacgttctgacaaatattttttaagatcctagaacataaaagaaccacagattccaatctaaaaatcagcttgccggcattgacttggctccacgacgtcgttgtcactgccacacagaaacatcggtccttcgtagccgccacaatatgcactccatttgtgtgcaaaacaacgcaacaaaacggtccagcatatagcaataaaaggcaacaatcaaagacatttactaaaaacaatgttgatgcactaaacacttttgaaaaaaaaagaatgaaggtagtaaatgaaatgcataaacgttgaggaataaaatcaaattccctaggagttgatggtatatattaccactcaactcaataagtgcttttgtgcataacctacacatctgttgtttctaggcaaagtcaaattaataaagactaatggtattggttagcagagatgcagtagaccagtagaacattgaaggaattagtcaaagaccattttaaaaataactaacaagatattggttgcaaagtgaatgcaagtataactgtagtgaacacatgtcatattgtaatggtcatattgtaatggtgattaagtacgaaatttctatctc

SEQ ID NO: 116435 - DNA, 1994 bp, Zea Mays
taaaaccctattgggacggcggccacctcttcgtcgtcaagaacgccgccgcagacatgcgccccttccacactccccgccccaaccaacatcaccgcgcacggcccggcggcgacccgggcccgcctcaccttcccggtacccccatgcaccccgccttcccgccacctgtccccaacctcgccgccgccgccaaccccatggctgcagcggcggcggccaaccctttcctggcgctgcagcttctaggccaggcccagcagctccagaatctcggtttcctcgccgccgccgcgctccagaagcagcagcagcaggcgccgttctttcctggagggttcccttcgaaccccaatcagtttgcgcctttcgcgggtggccccccgcctgtcggtttcaatggcggcggggcgtttcgaccgggcggtgcttggatttgtgggccgcggccacccagtcccatgatgagccctgcggggaacggttccaacaacaacaacatcgctggaagcggtggagcgtcgaggccgattttcaacgttgggaggaaggaccacaacaatatagctggcagcggtggcatgccgaggccgattctcgacgctgggaggaaggaccgggatagcagtgctggcggcaacggcgagccgtatcactttgagaatagagcggatggcatatctaattttgtctctgaaaatgggaacaaaataacagaccagaaatcaggatttagcgttggaagagatggtagaggtggcaggcaatttggtgcatttagagggaggggcagaggaaggcatcctaatcaaaatcgtggaagaggaagcaacaactggggagaaataaaatcaaacttcatgggacacaaaagttcagcatcaaagcattgcagtgatattgcagctccagcatctggaggacgccgaaagccccctccaataatttatgatgcaaatgaagttaaacagtgggtagaggcacgaaaaaagaactaccctacaagtgtcaacgtaaataagaagttgtctgagatgaaatcagataatgaaaacaaggacaaagatgcccaactgcgacgtcaggaactgaaggaagtcatagcaaagcaacaagagctgggttttgacccacctgagctaccgcctggctatctatcagaaattggggatcaatgcattgaaaataaaaataataggaaaactcaattcagggattctcattttggaaatcgtttcaataataacaaaagatcaaggtatgagcgtggaggttttcagtctaaaagatctaaggtatggaactgtactcctcacgctgatcacgggatggtcaagagcagagaaccaaccctcctgcagaagcttcttagctctgatatcaagagggatagacatagacttcttcacgtgttcagattcatgaccttgaacaatttctttaaggactggcctgacaggcctttacagtttcctagtgttaagatgaatcagattgaaataggaagcaatattagcacagatgacttggagaatgctgggatgtccaaagacagcatccttggtgtaaacgaaaatggtgattggaaagagttgagctcgattgatgaagaggataccgatagcgccaaccacaatgatgaagacgtcgatgatgacagtgttgacagcagcattgaggatggggccgaggaggacgggtacgaagagcagtttaatgagcctgaagatgatacggcagtctgaatttgactgggccgggtatccacatcaaaaagacaaagcgcttcttcttgagtagagtttttgcacaacacattctgtagctcttcgcatattcctgttccaggagagggtctggtgtttaaagaaactttgtactttgttgtagttgaattgttatgttatcgccgggaatatatatacaatatgcggacgtgttctctgtccttttctgaatgtatacaaaagagtaaaatgtattaggagtctttg

SEQ ID NO: 116436 - DNA, 2038 bp, Zea Mays
ctaaaaccctattgggacggcggccacctcttcgtcgtcaagaacgccgccgcagacatgcgccccttccacactccccgccccaaccaacatcaccgcgcacggcccggcggcgacccgggcccgcctcaccttcccggtacccccatgcaccccgccttcccgccacctgtccccaacctcgccgccgccgccaaccccatggctgcagcggcggcggccaaccctttcctggcgctgcagcttctaggccaggcccagcagctccagaatctcggtttcctcgccgccgccgcgctccagaagcagcagcagcaggcgccgttctttcctggagggttcccttcgaaccccaatcagtttgcgcctttcgcgggtggccccccgcctgtcggtttcaatggcggcggggcgtttcgaccgggcggtgcttggatttgtgggccgcggccacccagtcccatgatgagccctgcggggaacggttccaacaacaacaacatcgctggaagcggtggagcgtcgaggccgattttcaacgttgggaggaaggaccacaacaatatagctggcagcggtggcatgccgaggccgattctcgacgctgggaggaaggaccgggatagcagtgctggcggcaacggcgaggtgattgaatcatgtgccattatttgttgaaattgatatatggccgtatcactttgagaatagagcggatggcatatctaattttgtctctgaaaatgggaacaaaataacagaccagaaatcaggatttagcgttggaagagatggtagaggtggcaggcaatttggtgcatttagagggaggggcagaggaaggcatcctaatcaaaatcgtggaagaggaagcaacaactggggagaaataaaatcaaacttcatgggacacaaaagttcagcatcaaagcattgcagtgatattgcagctccagcatctggaggacgccgaaagccccctccaataatttatgatgcaaatgaagttaaacagtgggtagaggcacgaaaaaagaactaccctacaagtgtcaacgtaaataagaagttgtctgagatgaaatcagataatgaaaacaaggacaaagatgcccaactgcgacgtcaggaactgaaggaagtcatagcaaagcaacaagagctgggttttgacccacctgagctaccgcctggctatctatcagaaattggggatcaatgcattgaaaataaaaataataggaaaactcaattcagggattctcattttggaaatcgtttcaataataacaaaagatcaaggtatgagcgtggaggttttcagtctaaaagatctaaggtatggaactgtactcctcacgctgatcacgggatggtcaagagcagagaaccaaccctcctgcagaagcttcttagctctgatatcaagagggatagacatagacttcttcacgtgttcagattcatgaccttgaacaatttctttaaggactggcctgacaggcctttacagtttcctagtgttaagatgaatcagattgaaataggaagcaatattagcacagatgacttggagaatgctgggatgtccaaagacagcatccttggtgtaaacgaaaatggtgattggaaagagttgagctcgattgatgaagaggataccgatagcgccaaccacaatgatgaagacgtcgatgatgacagtgttgacagcagcattgaggatggggccgaggaggacgggtacgaagagcagtttaatgagcctgaagatgatacggcagtctgaatttgactgggccgggtatccacatcaaaaagacaaagcgcttcttcttgagtagagtttttgcacaacacattctgtagctcttcgcatattcctgttccaggagagggtctggtgtttaaagaaactttgtactttgttgtagttgaattgttatgttatcgccgggaatatatatacaatatgcggacgtgttctctgtccttttctgaatgtatacaaaagagtaaaatgtattaggagtctttg

SEQ ID NO: 116437 - DNA, 2041 bp, Zea Mays
ctaaaaccctattgggacggcggccacctcttcgtcgtcaagaacgccgccgcagacatgcgccccttccacactccccgccccaaccaacatcaccgcgcacggcccggcggcgacccgggcccgcctcaccttcccggtacccccatgcaccccgccttcccgccacctgtccccaacctcgccgccgccgccaaccccatggctgcagcggcggcggccaaccctttcctggcgctgcagcttctaggccaggcccagcagctccagaatctcggtttcctcgccgccgccgcgctccagaagcagcagcagcaggcgccgttctttcctggagggttcccttcgaaccccaatcagtttgcgcctttcgcgggtggccccccgcctgtcggtttcaatggcggcggggcgtttcgaccgggcggtgcttggatttgtgggccgcggccacccagtcccatgatgagccctgcggggaacggttccaacaacaacaacatcgctggaagcggtggagcgtcgaggccgattttcaacgttgggaggaaggaccacaacaatatagctggcagcggtggcatgccgaggccgattctcgacgctgggaggaaggaccgggatagcagtgctggcggcaacggcgaggtgattgaatcatgtgccattatttgttgaaattgatatatggccgtatcactttgagaatagagcggatggcatatctaattttgtctctgaaaatgggaacaaaataacagaccagaaatcaggatttagcgttggaagagatggtagaggtggcaggcaatttggtgcatttagagggaggggcagaggaaggcatcctaatcaaaatcgtggaagaggaagcaacaactggggagaaataaaatcaaacttcatgggacacaaaagttcagcatcaaagcattgcagtgatattgcagctccagcatctggaggacgccgaaagccccctccaataatttatgatgcaaatgaagttaaacagtgggtagaggcacgaaaaaagaactaccctacaagtgtcaacgtaaataagaagttgtctgagatgaaatcagataatgaaaacaaggacaaagatgcccaactgcgacgtcaggttgaactgaaggaagtcatagcaaagcaacaagagctgggttttgacccacctgagctaccgcctggctatctatcagaaattggggatcaatgcattgaaaataaaaataataggaaaactcaattcagggattctcattttggaaatcgtttcaataataacaaaagatcaaggtatgagcgtggaggttttcagtctaaaagatctaaggtatggaactgtactcctcacgctgatcacgggatggtcaagagcagagaaccaaccctcctgcagaagcttcttagctctgatatcaagagggatagacatagacttcttcacgtgttcagattcatgaccttgaacaatttctttaaggactggcctgacaggcctttacagtttcctagtgttaagatgaatcagattgaaataggaagcaatattagcacagatgacttggagaatgctgggatgtccaaagacagcatccttggtgtaaacgaaaatggtgattggaaagagttgagctcgattgatgaagaggataccgatagcgccaaccacaatgatgaagacgtcgatgatgacagtgttgacagcagcattgaggatggggccgaggaggacgggtacgaagagcagtttaatgagcctgaagatgatacggcagtctgaatttgactgggccgggtatccacatcaaaaagacaaagcgcttcttcttgagtagagtttttgcacaacacattctgtagctcttcgcatattcctgttccaggagagggtctggtgtttaaagaaactttgtactttgttgtagttgaattgttatgttatcgccgggaatatatatacaatatgcggacgtgttctctgtccttttctgaatgtatacaaaagagtaaaatgtattaggagtctttg

SEQ ID NO: 116438 - DNA, 3397 bp, Zea Mays
gttacatactcataatgcaaaagtctattttgttaatgatgctcgtgtgccaaaaacatccgacatgtacagcttgcttatcgcggtcccagacgaaacggacaaatggtcgcattagaccgttatatatgcttacggaatcgcacggaacgtacattgcttgtcgacgttgcggtcgtttctcgtaggaattcaatttgacgtcacgacgccgttaaaagctttttccgattaaaaaaaagctccggatccgtcggctttcagccactaattttcaaagccaattttctcgcttcgcctttccttctcccatctctctcgacgaggctcgccatcgccgctattcccattcgccctcccctcctcttctccacccccgcaaaaccctagccgccgacccctccaatcccctaccagcgcccgattgccggccccaatcgagctagggctcgccaaattctggccgggctcgttgaaatttcggccggtcttttctggtgaatcctttggtttatcctgaggggatattttgatttctgcggcgcacgatggggagcagaagggaggaggagaggaacgagaagatcatccgcggactcatgaagttgccgcccaaccgcaagtgcatcaattgcaacagtgtggggccacagtatgtgtgtaccaatttctggaccttcatttgcctgtcatgtagtggaattcaccgtgaattcactcaccgtgttaagtcggtgtcaatgtccaaatttactacccaagaagtgcaggccctcgaacaggggggtaaccagcgagcacgtgacatctacctaaaggattgggattggcaacgaatgaggttgcctatcaacaccaatccggataggataagggaatttatcagggctgtttatgtggataagaagtatgctggtggatcctctaacaaaccagccacagaaagtgagagtatgaagagcaatgaccatgacatgagaagacctagttcttatcattcatattcccagagcccaccctatgattttcaatatgaagatagacgatatggtaagcaagtgaacacacttgctagaaggccttcagatagggcgctcttcgatgggaaacttggcaacctactattcagtccaggtcgtttgcgagatcagatgaatgaagaccgttttgccaatgaaagttcaggatcaaggttttctgacttctcagcctcaagcactggcgacttcagaaatgatgtgctttctcctagctctcaggagacaggctacagtagtccctcagtccaccattcaagaaatgtctctgctgacaatcctcaaacccagaaatgtcctaacgcagcttcacaaatagatttcaatggagttcgacgtccacagcgaacaacttcttctggaagttttggatcatttgatggtagctcagtttccaacaaatcaattgaatcaggttacccacctgatgcaccaacagaaaagtcagtgcattgtgctgtaaaccatcagactgtaccttctcctgaggcctgttcgacacaacaatatgcctccccatccgacaatcacaacttgatacctcacaaacctgctgatttaggtagccaaattgttgccaccaggaaaccagtgcaacatagttgcgctcagattgaaaatgtggtgccgatgcatgctccagtacaaccaacgacttccacacctcttggcctctttgatcaatcaactgtgcaacatcctgtcacatctgctgcaccgatagatctgtttgctggctttaatgaacagttaccagcttctcataatacagatggtgtatccagtcattctgttgttgctaaagaacctgcccataatgttgttcagaagggcataatgccatcagctgaagcactcgccacatctcatgctgtgcaccaagatttgttcagtctgtcaattttgcaggaaccagcaacacccttaccctctcagccaatagatctgtttgctggctttgaccaacatttgccgcatttgtctactgttcagaaaattccatcggcagttccatttcctgctaatgatggatgggctttctttgacgtgcaacatggattgttgacatctgtttcaaatgtgcaaggtcaggtgcctgctgcattctctccatctgatggtattgctaaaggaattgaccaattaacattaccaacttcgccaccaaatgtaattgggtcacaaaattctccggctatgatggataactggagtttaaatgctgaggaagtgaagatccctgtcctcaacgaaaattctcagtcttggaatgcctttggtgaatctactcagagcgcatcaaatgatctgttcacatttaatactatgtctcaagtagaagctcatcaattctctatgccaagtggtccatatgttgaatccagaattccacaggatttagttagggatgagcctgaaaggccaactcctagggatgtgttttctggcttcaatatttcacatgttgaggtggttggaccatcgtctccatcactccagccccatttgggtggcatggtctctcatcctgaaaaatcaacaaatccatttgacatggcatttgaatccgacgttgacgccaatgacatgttcatggatttgacctcactgcaagaaacattaccagatcatcacactctcacagattattcggggagcttaacagagccatggatttctcagaattccactatgtcatatattccttctgggcctcaaggaggtttatcctatgtggcaggacaggactctcacatgttgagttcaacacatcaaggagcttttccacctaggaatccatttgagtgagactagtaaagagagttttgctggatagtggtggacagaagaggaaggcaatcagcaccggtcgaaactcaaatggatactcaggtctactatactagatgcattgaaagcaactgtgcatcgaatctgaaaccctgaggtaaatatgtgtcttggatttcattgtctatggtctctcgtgtatcagaaaggactgcatagaagtctacatggcaggagtgctggaatttttgcccgaagcaaaagctgtcctctactcccatggactaatgtatctctggcaggcagtgctggtccagcatcaaaaaatttctttcatttcgacatttgcccaatagttgtgttcatgttcttgttaaaccctgttgtgaatgagaagggacgacatttacctccttaatatagtaaaaacatgttcgtcaaaagattgaattgctgtcagatgctgtgttgttcagtaatggttattacctttgtatgttgaaggggcctgtcgactctcctgagcaatattaatgctcatcatagtaaaggatcatgatgacattttt

SEQ ID NO: 116439 - DNA, 3202 bp, Zea Mays
gttacatactcataatgcaaaagtctattttgttaatgatgctcgtgtgccaaaaacatccgacatgtacagcttgcttatcgcggtcccagacgaaacggacaaatggtcgcattagaccgttatatatgcttacggaatcgcacggaacgtacattgcttgtcgacgttgcggtcgtttctcgtaggaattcaatttgacgtcacgacgccgttaaaagctttttccgattaaaaaaaagctccggatccgtcggctttcagccactaattttcaaagccaattttctcgcttcgcctttccttctcccatctctctcgacgaggctcgccatcgccgctattcccattcgccctcccctcctcttctccacccccgcaaaaccctagccgccgacccctccaatcccctaccagcgcccgattgccggccccaatcgagctagggctcgccaaattctggccgggctcgttgaaatttcggccggtcttttctggtgaatcctttggtttatcctgaggggatattttgatttctgcggcgcacgatggggagcagaagggaggaggagaggaacgagaagatcatccgcggactcatgaagttgccgcccaaccgcaagtgcatcaattgcaacagtgtggggccacagtatgtgtgtaccaatttctggaccttcatttgcctgtcatgtagtggaattcaccgtgaattcactcaccgtgttaagtcggtgtcaatgtccaaatttactacccaagaagtgcaggccctcgaacaggggggtaaccagcgagcacgtgacatctacctaaaggattgggattggcaacgaatgaggttgcctatcaacaccaatccggataggataagggaatttatcagggctgtttatgtggataagaagtatgctggtggatcctctaacaaaccagccacagaaagtgagagtatgaagagcaatgaccatgacatgagaagacctagttcttatcattcatattcccagagcccaccctatgattttcaatatgaagatagacgatatggtaagcaagtgaacacacttgctagaaggccttcagatagggcgctcttcgatgggaaacttggcaacctactattcagtccaggtcgtttgcgagatcagatgaatgaagaccgttttgccaatgaaagttcaggatcaaggttttctgacttctcagcctcaagcactggcgacttcagaaatgatgtgctttctcctagctctcaggagacaggctacagtagtccctcagtccaccattcaagaaatgtctctgctgacaatcctcaaacccagaaatgtcctaacgcagcttcacaaatagatttcaatggagttcgacgtccacagcgaacaacttcttctggaagttttggatcatttgatggtagctcagtttccaacaaatcaattgaatcaggttacccacctgatgcaccaacagaaaagtcagtgcattgtgctgtaaaccatcagactgtaccttctcctgaggcctgttcgacacaacaatatgcctccccatccgacaatcacaacttgatacctcacaaacctgctgatttaggtagccaaattgttgccaccaggaaaccagtgcaacatagttgcgctcagattgaaaatgtggtgccgatgcatgctccagtacaaccaacgacttccacacctcttggcctctttgatcaatcaactgtgcaacatcctgtcacatctgctgcaccgatagatctgtttgctggctttaatgaacagttaccagcttctcataatacagatggtgtatccagtcattctgttgttgctaaagaacctgcccataatgttgttcagaagggcataatgccatcagctgaagcactcgccacatctcatgctgtgcaccaagatttgttcagtctgtcaattttgcaggaaccagcaacacccttaccctctcagccaatagatctgtttgctggctttgaccaacatttgccgcatttgtctactgttcagaaaattccatcggcagttccatttcctgctaatgatggatgggctttctttgacgtgcaacatggattgttgacatctgtttcaaatgtgcaaggtcaggtgcctgctgcattctctccatctgatggtattgctaaaggaattgaccaattaacattaccaacttcgccaccaaatgtaattgggtcacaaaattctccggctatgatggataactggagtttaaatgctgaggaagtgaagatccctgtcctcaacgaaaattctcagtcttggaatgcctttggtgaatctactcagagcgcatcaaatgatctgttcacatttaatactatgtctcaagtagaagctcatcaattctctatgccaagtggtccatatgttgaatccagaattccacaggatttagttagggatgagcctgaaaggccaactcctagggatgtgttttctggcttcaatatttcacatgttgaggtggttggaccatcgtctccatcactccagccccatttgggtggcatggtctctcatcctgaaaaatcaacaaatccatttgacatggcatttgaatccgacgttgacgccaatgacatgttcatggatttgacctcactgcaagaaacattaccagatcatcacactctcacagattattcggggagcttaacagagccatggatttctcagaattccactatgtcatatattccttctgggcctcaaggaggtttatcctatgtggcaggacaggactctcacatgttgagttcaacacatcaaggagcttttccacctaggaatccatttgagtgagactagtaaagagagttttgctggatagtggtggacagaagaggaaggcaatcagcaccggtcgaaactcaaatggatactcaggtctactatactagatgcattgaaagcaactgtgcatcgaatctgaaaccctgaggagtgctggaatttttgcccgaagcaaaagctgtcctctactcccatggactaatgtatctctggcaggcagtgctggtccagcatcaaaaaatttctttcatttcgacatttgcccaatagttgtgttcatgttcttgttaaaccctgttgtgaatgagaagggacgacatttacctccttaatatagtaaaaacatgttcgtcaaaagattgaat

SEQ ID NO: 116440 - DNA, 1658 bp, Zea Mays
gctgctgatgcgttgtctcgcaatccacagatgtcaagtgactgtttggccatttgttcgtgtattcctcaatgggtttcagaaattatagattcatatacacatgacccatttgccaaagatctccttgtcaaactagcagttgatgcatcggctgtgcctcattattccttacaagatggtcttcttcattataaaagaagaatatgggtgggacagtcagctcctcttcaggatcacctaattgcagcattgcatgtgtcagcagttggtggtcattccgggtttcccgtcacatatgctcgcttgaagcaactgtttgcatggaaaggtatgaaaaaaggagtaaagcagtttgtttcgcattgcctcatctgtcaacaatccaaagctgaccgagctcgtctgcccggcctgttacaacctctgtcggtaccctcatcattatggcaagtgatcagtatggattttatcaaggctcttccacgttcacaatcgtatacatgcatcctggtgatagttgatctcttcactaagtatgcaaatttcttacctcttaaacatccatatacggcattgtcagtcgccaggctctttcatgatcaagtgtacaagcaccatggactaccccaatcgattgtttctgacagagaccgtgtgtttctcaaccatttgtggaaagaactgtttcgcctggatgatgtgcagcttcagatgagcattgtgtatcatcctcagtccgatgggcagtcagagcgtgtcaatcagtgcttagaaacctttctttgctactttgtccatgcctgtccgcaccagtggagtcggtggttgtctgtcgcgcaattctggtataattcttctccacattcagctataggcatgtctccatttcaggcattgtatggttgcacacccaagcagtttggcattgcagatcagactgttattatgtcttctgaattgagttcctggttgaaggagcgtcagctcatgtctgagctggtgaagcagcatttggagcgtgccaaactacggatgaagcgtcaggtggacaaaggtcgttcggagcgtgagttcgcagtaggtgattgggtatttctcaagcttcaaccgtacgttcagtcatccgtggctgttcgagcacatcagaagctggcgttcaagtttttcggaccatttcaagtgttgcagcgtgttggcacagtagcgtataagctacaattaccttcctcttcacgcattcacccagtttttcatatgtcacagcttaagcatgcgttgggcactggtttcactgcatctgtgactttgcctactaaccaatttcattttagtgtgccgatcaagattctgcaacaccgcacagtgatgaaagggctgcaagcttgtgcataggtcccggtccaatggtctcacatgtcgccagaactcacgacgtgggaggatattcaagatctacgacaacaatttccatatgcgtctgtttgggggcaaacaaccagcttaccagggggaatgtcagtgacacaggcgaggcactggaggaacaaagcaaggagcgggagcattctggaccagatgatgcacccaatgggccgcggcggtcgaccaggcccaggcacaacaacaagatggtgactgggccgatgtggatcaac

SEQ ID NO: 116441 - DNA, 1397 bp, Zea Mays
gatctcgtaggatttcattgaggaagagatggggctctcctttgggaagctgttcagccgcctcttcgccaagaaggagatgaggattctcatggtcgggctcgatgccgccggtaagaccaccatcctctataagctcaagctcggcgagatcgtcaccaccatccccaccattggattcaatgttgaaactgttgagtacaagaacattagcttcaccgtttgggatgttggtggccaggacaagatcaggcccctgtggaggcactactttcagaacacgcagggacttatttttgttgtagacagcaatgatagggaacgtgttgttgaggctagagatgagctccacaggatgctgaatgaggatgagctgcgtgatgccgtgctgcttgtatttgcaaacaaacaagatcttcccaatgctatgaatgctgctgaaattactgacaagcttggtctgcattctcttcgccagcggcactggtacatccagagcacttgtgctacatctggtgaagggttgtatgaggggcttgattggctttccaacaacatcgccaacaagtcttgaagcttttcagcagggctcctagcaagaggaagacgtctgaacaacttatggatgcttttttacattttattacaaagatactccctctgtctcgatttactattccttttgggatagtggttgattcatataatatttgatgtatgtgtttaatagatgtgtctagattcaccatcatctattttaatatggacatagatataaagagctaaaacaaatactattttgaaatggagtgagtacaatctatagtagatagtgtgggtgctgtggagagaaaaaaatctgagctttcttttgagtgtttgctagtgtttaccttcggagatgatatggtaaattatattgacatgctttcgcgtaggtcttcaccgatccagtgctgtggcagctacatttcgttcttagatggttaacgtgtgccaacataaatccaatatgttgcttgtggtacgcaccgttttaaaatagctatggacagaccataattgacatcatcttctgtcgaactagcgttgggcttagttaggacttgggatgtcaatgctagatagctagagctgtatagcatctctaaggggtatttggtttgatgttcgatgaatcatctacatattctttatttatttttatttgggttatgatgtggaataggttgatgcatcaccatctcatatctcatatattagaagataactagcaaagtgtccgttgctacagtttttatttatacttgaggataaagtataaaatataaaaatatgtttgttttattggttatttgagtgtgaatgtaagtttaaagcgaataattgtggttcaa

SEQ ID NO: 116442 - DNA, 660 bp, Zea Mays
gtaggatttcattgaggaagagatggggctctcctttgggaagctgttcagccgcctcttcgccaagaaggagatgaggattctcatggtcgggctcgatgccgccggtaagaccaccatcctctataagctcaagctcggcgagatcgtcaccaccatccccaccattggattcaatgttgaaactgttgagtacaagaacattagcttcaccgtttgggatgttggtggccaggacaagatcaggcccctgtggaggcactactttcagaacacgcagggacttatttttgttgtagacagcaatgatagggaacgtgttgttgaggctagagatgagctccacaggatgctgaatgaggatgagctgcgtgatgccgtgctgcttgtatttgcaaacaaacaagatcttcccaatgctatgaatgctgctgaaattactgacaagcttggtctgcattctcttcgccagcggcactggtaagaagttttattttcatacacttttatctccctgtatctgaatcatggttgcttgacattctgatatttgttagtgtatctagttatctacactgcacatatttgcgaggagcgtatctttgaaccacttgttttagtcatcaatcttcatgatgtgacagtatgaattatgcatta

SEQ ID NO: 116443 - DNA, 1179 bp, Zea Mays
tatcagaaacctgtcatttcagttcagtttttcagtatctacggagaacagaacgtcgtgcgcacaattgccacggcctccaacttggacagccggatggcagcgtagtgcgcgagccgtttggcgacaagttacaagttacgacgacttccacagtggatcgtcacaaaagttggagccccgaaaggaccctgagcgagagcggccacatcacccgcatttacacgccaaaccacgctcaatcgctcccaccgaaccaaaacagcaaccaaggccccagcaaaccgacacgtaattacgctgcctgtggagcacacgcccaggacaccgcgcgagctcaaggccaccagcgcccggacgccagcgagctgatggtggcggccgcgtaggagaccgcgtcggctgcggatacgtcaggcacagcggcggcgggagggaattgcacacggacctcgccgggcgcgtcgaacagcgtctcgatgtcgtcctcgaagcgcacgctgtccggcagcgccaggccgcgcagctggtcgtccggcgggcagccgagcgcgcgggcgcggcgggcggggtaccgggcctcgaagtcggcggggtccatgcagagcgccggcaggatctcggcgatggcgtggtccgcgtcgtcggcgtcgcggagcacggggccgggtggcagcgccaggggctcgcccagctcgtactcgggctcgggcttcggcgtcaggaacgtcggagccggacgacgagcctggggcagtggtgcctcgtccaccagctcgaccttgggcttgggcttcggctgggccgtgcggaccgccggttcatgccgtcgctgctggtagtccttgtccgccgtgtagctgctgatgtcgaagttggtgaccgcggcgtgcccccgcagttccagagctgcaaggtcgtaggcccgggctgcctcctcctgcgtccctgcaccagaaaaaaaaacatccaagaagaccagccaacaattcagagacttgttgccacaacaaatgcagatgtcagataatccagatggacaagactgctgaaatgcagcacgatcttgtgatattctgtatagtgtagcagtgatctttgtaacaaaaatatggtttcttgcgattaacagtggtagcactagcaaaatgctgttggagaccaagaaagagacacaca

SEQ ID NO: 116444 - DNA, 793 bp, Zea Mays
ctccgatttttttatatgacgctgtttagtacaaaattgaactgtgcagcgacatatatatccgaacgggaacggaggtagtattttgtgatattattagagaatgggcagaagcaatttcctgacatcgtattctgacaatcaatttctcatgtgccaataaataaataaaaaccaagatactggtgtgctgatccaaatgctaagatagttggcctgatttcttggttctttaatttagatcaatacagctcccatggtaggttcttgtattcgtgtactttgattgagataatgatggatgttatcctatctccatgcgtaccgttgaccccattttgccctgttttgtgttatcttcaggagttggaaaatatacttttctctgagcctcttccggaacccaagtaccaactgaggagaaccggctcagcgactttctgattgtatgcagaatatcttgttttgctgtaggttgtaagtcctgtagcttgtaagtttttttgtctctttggtttagaatcatttgctagcttgggagtttttgtttatcctagctcgatggtttgctctctccctccctccctttctctagactagcaggagccgagcatgtgctgtccgaggccttgctaccagtatagtatgtaaaatcttcaggacacatgtaggtggtcggagcttgtttacatggtgtgacttaacagatggatacatataactatgagaagtatgggagccctttctttggtaaccggagttaaatgacttgactcttctggtcgttgttctt

SEQ ID NO: 116445 - DNA, 1822 bp, Zea Mays
tcactgctgcctaacactaaacaagatctctctctcaggcccccgaccccgatggtttcctcgcacacccatcacatggccgcctcctccccttccacctcctcccctaatggcagatgctaggcggcggcgcccctcttgagaagtgaaagggaaagatttgttttgccgcccgcgccctgctcaggcgctccgcctcggtcgggccacacaaggtagcgccttccgcctcgttgcctgacccattcctgtttcgttcgaagcactgaagcagccccagaccgacgccaggcgcccaggccagtggtcgacgcctgtggtgagctgataggcgatgtcgtcaccgtctccggtgctggcaagggctgcgcgtctcacgtgtaggttgtgatctttctgcccagagatgtgcgatttgtcttcgcttgatctgagtgacagtaaaacggagaccggctagtgttgttcctgaaacctgttgatttatggggagccagacaatcgcatcacaggctgggggaggtggaagaggcatgggtagtagtggtggtgccggtgcagcgcaacgcgggcagatgcagagtctggcaagacaagggtctctgtataaccttacccttgatgaggtgcagagccatttgggagaacccctacacagcatgaaccttgaggagctgctgaagagtgtctttcctgatgacctggaccctgatggtggcactaccagccaatatgagcagagttcgggcctcttgcgacagggaagtatcacaatgccgcctgagctcagcaggagaactgtggacgaggtgtggaaggacatccaggatgcaccaaacagaaatgttggggagagtggtcggcggaagcgggagcggcagccaacgcttggagagatgacgcttgaggatttcttggtgaaagctggggttgtcgccgaaggatatctgaaggacttgaatggcataggcagtgtggaacaggttggtagcactggggctgcgggtttgacagcaggggcacaatggttagaccactatcagcagcggattacagctatcgagccccatcagcacaggcaacatagtttgccaggtgcttacataccgggtcagttaagccttcagtccctgaatgttggaccaagtgctattttggagtcatactctgatggccacatttcttcaccgatgatgggtgcactttctgattctccgatgcctggtagaaagcgtggttccccaggagatgtggctgataagttggtggagagaaggcagaagaggatgatcaagaatagggagtcagctgctcgttcaagggctaggaagcaggcatacactaatgaactggaaaacaaggtttctcgattagaagaggagaataagaagctaaccacgttaaaggagttggaaaatatacttttctctgagcctcttccggaacccaagtaccaactgaggagaaccggctcagcgactttctgattgtatgcagaatatcttgttttgctgtaggttgtaagtcctgtagcttgtaagtttttttgtctctttggtttagaatcatttgctagcttgggagtttttgtttatcctagctcgatggtttgctctctccctccctccctttctctagactagcaggagccgagcatgtgctgtccgaggccttgctaccagtatagtatgtaaaatcttcaggacacatgtaggtggtcggagcttgtttacatggtgtgacttaacagatggatacatataactatgagaagtatgggagccctttctttggtaaccggagttaaatgacttgactcttc

SEQ ID NO: 116446 - DNA, 1695 bp, Zea Mays
tcactgctgcctaacactaaacaagatctctctctcaggcccccgaccccgatggtttcctcgcacacccatcacatggccgcctcctccccttccacctcctcccctaatggcagatgctaggcggcggcgcccctcttgagaagtgaaagggaaagatttgttttgccgcccgcgccctgctcaggcgctccgcctcggtcgggccacacaaggtagcgccttccgcctcgttgcctgacccattcctgtttcgttcgaagcactgaagcagccccagaccgacgccaggcgcccaggccagtggtcgacgcctgtggtgagctgataggcgatgtcgtcaccgtctccggtgctggcaagggctgcgcgtctcacgtgtaggttgtgatctttctgcccagagatgtgcgatttgtcttcgcttgatctgagtgacagtaaaacggagaccggctagtgttgttcctgaaacctgttgatttatggggagccagacaatcgcatcacaggctgggggaggtggaagaggcatgggtagtagtggtggtgccggtgcagcgcaacgcgggcagatgcagagtctggcaagacaagggtctctgtataaccttacccttgatgaggtgcagagccatttgggagaacccctacacagcatgaaccttgaggagctgctgaagagtgtctttcctgatgacctggaccctgatggtggcactaccagccaatatgagcagagttcgggcctcttgcgacagggaagtatcacaatgccgcctgagctcagcaggagaactgtggacgaggtgtggaaggacatccaggatgcaccaaacagaaatgttggggagagtggtcggcggaagcgggagcggcagccaacgcttggagagatgacgcttgaggatttcttggtgaaagctggggttgtcgccgaaggatatctgaaggacttgaatggcataggcagtgtggaacaggttggtagcactggggctgcgggtttgacagcaggggcacaatggttagaccactatcagcagcggattacagctatcgagccccatcagcacaggcaacatagtttgccaggtgcttacataccgggtcagttaagccttcagtccctgaatgttggaccaagtgctattttggagtcatactctgatggccacatttcttcaccgatgatgggtgcactttctgattctccgatgcctggtagaaagcgtggttccccaggagatgtggctgataagttggtggagagaaggcagaagaggatgatcaagaatagggagtcagctgctcgttcaagggctaggaagcaggcatacactaatgaactggaaaacaaggtttctcgattagaagaggagaataagaagctaaccacgttaaaggagttggaaaatatacttttctctgagcctcttccggaacccaagtaccaactgaggagaaccggctcagcgactttctgattgtatgcagaatatcttgttttgctgtaggttgtaagtcctgtagcttactagcaggagccgagcatgtgctgtccgaggccttgctaccagtatagtatgtaaaatcttcaggacacatgtaggtggtcggagcttgtttacatggtgtgacttaacagatggatacatataactatgagaagtatgggagccctttctttggtaa

SEQ ID NO: 116447 - DNA, 1387 bp, Zea Mays
tcactgctgcctaacactaaacaagatctctctctcaggcccccgaccccgatggtttcctcgcacacccatcacatggccgcctcctccccttccacctcctcccctaatggcagatgctaggcggcggcgcccctcttgagaagtgaaagggaaagatttgttttgccgcccgcgccctgctcaggcgctccgcctcggtcgggccacacaaggtagcgccttccgcctcgttgcctgacccattcctgtttcgttcgaagcactgaagcagccccagaccgacgccaggcgcccaggccagtggtcgacgcctgtggtgagctgataggcgatgtcgtcaccgtctccggtgctggcaagggctgcgcgtctcacgtgtaggtaaggttgtgatctttctgcccagagatgtgcgatttgtcttcgcttgatctgagtgacagtaaaacggagaccggctagtgttgttcctgaaacctgttgatttatggggagccagacaatcgcatcacaggctgggggaggtggaagaggcatgggtagtagtggtggtgccggtgcagcgcaacgcgggcagatgcagagtctggcaagacaagggtctctgtataaccttacccttgatgaggtgcagagccatttgggagaacccctacacagcatgaaccttgaggagctgctgaagagtgtctttcctgatgacctggaccctgatggtggcactaccagccaatatgagcagagttcgggcctcttgcgacagggaagtatcacaatgccgcctgagctcagcaggagaactgtggacgaggtgtggaaggacatccaggatgcaccaaacagaaatgttggggagagtggtcggcggaagcgggagcggcagccaacgcttggagagatgacgcttgaggatttcttggtgaaagctggggttgtcgccgaaggatatctgaaggacttgaatggcataggcagtgtggaacaggttggtagcactggggctgcgggtttgacagcaggggcacaatggttagaccactatcagcagcggattacagctatcgagccccatcagcacaggcaacatagtttgccaggtgcttacataccgggtcagttaagccttcagtccctgaatgttggaccaagtgctattttggagtcatactctgatggccacatttcttcaccgatgatgggtgcactttctgattctccgatgcctggtagaaagcgtggttccccaggagatgtggctgataagttggtggagagaaggcagaagaggatgatcaagaatagggagtcagctgctcgttcaagggctaggaagcaggttgcaatattcgtttccttcctttctttgtttttactaattgattga

SEQ ID NO: 116448 - DNA, 1537 bp, Zea Mays
ccactcccactgagcaactcaaaaaggccaaaacccttccccaggggccgtctcgctagtcgctactcactgtaccgcaccgccgccgccgtctcgcacacggggcacaggacgcgcgcgatcccctcgagtccggattgccatggccaccacggcgttcgccgccgccaggttcttccccgcccacctcgactcctccccacgcatcgcgccccaccgcgtcgggcccaccgcgaatctctccttctcaccgctttccgccaactcctcgtccctgcgccgcctccattccccctgcccatccggccccgggggtaggctgcccccgccgccgcgatcgtacggcggcgccggcggatctggcgacgccgcgaactccggtggcggcgaaggccgccgcggaggcatcctcgggctcctcctcgccgggtgggccgcccgcgtcgctgcggacccgcagttccctttcaaggtgctcatggaggagctcgtcggcgtcaccgcttgcgtgcttggcgacatggcctcccgccctaacttcggcctcaacgagttggacttcgtcttctccacgctcgtcgtcggatccatcctcaacttcgtcctcatgtacctcctcgcccccaccgccggcgtcgccgccgccgcgtcgtccgccgcgtccgcgctccccagccacatgttcgagcccggcgcgtactccctcggctcccgcgtcgccacgatcatgtccaagggcgccaccttcgcggtggtcgggttcgcggccgggctcaccggaaccgcgatctccaacgggctgatcgcgatgcggaagcgcatggacccggcgttcgagacgcccaacaagccgccgcccacgctgctcaacgcggccacctgggcgctccacatgggtgtcagcagcaacctgcggtaccagacgctgaatgggatcgagtacctgctcggcaaggtcgcaccggcgccggtgttcaaggtgtccgttgttgctctccgctgcatgaacaacgtgctgggtgggatgtccttcgtgctgcttgccaggctgaccggggcgcagaaatcagacaagccagcgacggtcgcggaagagaaggagaggttgatagctgtgggcaatgccgcagcagatgccatcaacgaggcgaggcatggagagggtaagtaggtggtagaggagagagacgagtaagttgatggtgcatcatctcagactcgtttgctggttcttggacatagaccaagaaactcacctagtcacctgtagagttggttggaataaggagtggagtgaggttcagaacttcttttttaaaaaactctgtttgtggtttatcggtgttgatgatgacatgcttagtgatggtagaataaagtttttttttcctctcatgctcatttgatcgttgactcgatgggtagcctgtttgttaaataccttcagtttttgcatgcagtatatatgattctgaatggtactatgatgtacagatgagaggactcagtgacccaaaggggatttgttgatgatcta

SEQ ID NO: 116449 - DNA, 451 bp, Zea Mays
cttctgggcaatcttctgtatgctgcaaaggttgtagcagagcaggaagggcttgctgatggcttcagaattgtcatggacgatgggcccagaggatctcaatcggtctaccaccggcacctacacgttcatcttctcgggggacggcagatgaattggccaccggggtgagttggtgttgtaaaggtctgtttggttcactgcctaacttgccacactttacctaacttttctgcctaaggttagttcttcaattcgaacgcctaaccttagacaaagtgtggcgcagttagccacgaaccaaacagaccctaagactcaagcaatgacttcgtaaggcatgtgttgttcactcgttagaatttcataatatgctgtcatttgcagtttgctattagggttgcacaaatagtcatcggtagacgctgtcccaatgattttgtgtacggag

SEQ ID NO: 116450 - DNA, 1133 bp, Zea Mays
gcatgccatggtaccaaccggacgcaccgacatgcgtttataaatacccagcgagcgacacatgaacgctcatccaaactcacagcacgctagctcttcagaacttgcggacgaaagactgaccgtgcaccgctagcagatcgatcgaccatggcgtcgtcctctcttctcctcctcgccgccgtcgccctcttcgccgcctccgcagacgcggccaccttcaacgtcatcaaccgctgcaagaacacgctgtggccggccgccctccccggcggcggcgcgcgcctggaccctggcaagacgtggaccgtgcaggtgccggcgggcacggcgcacgcgcgggtgtgggcgcgcacggggtgcagcttcgacggcagcggccgcgggacgtgccagacgggggactgcggcggcgcgctggcgtgcaccgtgtccgggagaacccccgcgacgctggccgagtacacgctcaacaggaacggcccggactacatcgacatctccctcgtggatggcttcaacgtgcccatgtccttccagtgccgcggcaggggccccagctgcaaggccgacatcaacgcccagtgccccgccgcgctcaaggtgcccggcggctgcgccagcgcctgcgagaagctcggcggcgacacctactgctgccggggccagtacaaggacaagtgcccgcccacggactactccaggttcttcaagaggctgtgcccggacgcctacagctacgccaaggacgaccagaccagcaccttcacctgcccacagggctccaactacgatgtcgtgctctgcccgtgagccacatgttcgagagatcaacgaccatgcattcgcagctcgcaacaagtgcacactagtacaactatacacaagaaataagagtcgcgatatttattattatcgcgcgtggagtagttggtaaataaatcgcttattgcgagtattttggcccatgaataaggccttacttactggccatcatttccgacatatatacgtttgttcatgaataaagaaactttgcaaaacagcacaatatataatttagcacaatatataattttggaggaaaaagggatgcacggtcataaaagaagagcggaagaaatttgatgata

SEQ ID NO: 116451 - DNA, 1933 bp, Zea Mays
cccgagaatcctaccattgccctccacacctctacctctagtactggtattaaagccgcgtccagcggccggcgcgtttctcctcgccctaaactaaaaaaaggtaaccgtccccgaagcccaaagccaaaaattcccccaccccaaggccgcatcctcctgcagcctgctcgaaaccctccttcctcctcctgaattcgtcaaccggtctcccaaatcgtagcggcaatcggattgtttggtctcgagactgagctgtgctccagtccgtgagctattcgttgatttttccagcgtgaaggcgccgatttttgggccgttggctgtggtggccggttcggcgtctctggatccggctggcttcccgcgatagatcgggccattggagcagcacaatacttcggattcttgatgtgtccgtagctgcactcgcggtgaccttttttgaggaagccggttgaattcgtagacctgaagatttattagctggcccacgccattttcggcaataaaatattcggctgtttcatagcaatttcagggtccttctcaatcttctgaagaagcgagcagagacggcttttgaaccgggcgatgcaggccaaggctcggatccacgctgacccggtccatgagtttgaccaattcgactgcttgcacgattctcttgtgctgctgatcctgaacaagctcgaggacgtgcgttcactcggcaggtgctctgccgtgtccaagcgattcagtggcctggttctcctcgtccatgatgtgcgtgtcaagatcgaccacgttgtgaccgtggacggcggcgccgatgacgctctgaacctgtcgtcaccgaagccccacaacatcatctcgcatctattcaagatgatgctgttcgcgatcgccaagcccttccatgacatgcggagccccattagcgcagggcggctgctgttccctcagctctctcagcattcaccggtgcaggtgctgaagaacttctcccatgttcgcaatcttcaggtagagctcccctccggagatgttgcagtcgaggagggggttctgctgaagtggcgggctgaatatggcagcacacttcagagctgcgtgatccttggtggaaccttggttgatcgcaaggccgctggcagtgggcatgagccatcaccggatgacaagggaagcatgccagaatctttctataccaatggtgggctgaaactccgtgtcgtatggactatcagctgtttgattgccgcgtcgacaaggcactatcttctccggtcgatcatcaacgaccatccgacgctgaggagcctggtcttggcagatgccgagggacagggcgcactctccatgggggcagagcagctgaatgatttcagggaacaccaattgtcagcctcaccatgttctaacaggacgcaggtgccggcatgcaacatgaagctgaagtacgctcagtacctcgaattgcctggtggcttggcactgcaaggtgcaaccttgcttgtcaccaagcctgccagcgatggtcatggcaatcgcaaggaagttgaagcctttgtttcaagcgcgttcgatggacccttgaggtttgctgcgaaggcgctgatgaagaggcgcacctatctcctggagatgaatgggttctagagaccttgtttttttggtgcttcttatgaggaactcctgtctgtctggtctttgtatatacactatagtcatcgaagcggatggacatgatatcagattaatgcctaaagtaagcatgcgtagagaattgagatgtctcgtgcacggtggcagtttgtgcctactaaaaacacgtgtagcgcgaagtatgtgcgtgtttccatttctcaatggaagtgctgcctactaatgcatgttggtcatccctgagaaagaagccgctctctttcacttgcctgaatatacg

SEQ ID NO: 116452 - DNA, 717 bp, Zea Mays
atggccttctctggtgcagctgaacaagtcatcggaactataggaagctcaaagggggtgtgggttaccttatgggaaatccatgactgggcatgggtactgctcaccaagcactatgacagaagagggcaatatgacattgctttgaataaaatcgatgaggctatctcacatacactgactgtcatcgatttatattccgtaaagcatgttgccgcattagcagatgaagctaggtccatggatcttgctggtcgttatttaaacagcgagtgtgttgtgcagatgcttcaggctgaccagtttttaaaaaggttgttgtcaaatgtgtgtattggagaccattttgatatgacaatgctgggtacaagaaaagggaatatatggagagtagcatttgtccaaaaagaaagtactagagcttcttggcattatatttgcaagctcttccgcatttatctgatttttgtgatgtatcaatgtatgaagtgcatgtggtatgcgctctttctcctctgctatctatcgcctatgtttactctctatccaactacaagatatatatcacttaagtttgtgcctctatccaggatagttggtgatgctgttggcacaatctgtaggtgttatatgaaactacatgattatccaacaatattttctatagaagggaatgatgagatatcaaaactgccacatgctcaaagaaagaagtag

SEQ ID NO: 116453 - DNA, 1594 bp, Zea Mays
gtaactcctgtcgtctagcgcgaggaggagccgtgttgccgtgcacccagcccagtgccgatggctcccagatcagtccatgcccggttccttccgttttccctgacacggttccaactcttctttccctggaactggaacgcaccgcatccgatgggtcggcgcctgggcccccgtgcccgcgcatcgtataaagccgcccctccgccacccgaccttgccgcgtctcccgtgatccccgtctccagctcaggagccagccacagcccacagctattcatcagcttgacctccccgtccgcccgcttctcgcgtcgaggtcggccgcgcgccactctgaatccccagggcaccacaccgccggacaacctcgagaagaagcaccggcaacgacgacgagctagcactagcagtcagtcacagccgggcaagattgattcggacgagcagccgatgatgatgcacgggaacgggcacgggcacggccgtgtccacccggcgtcctccagctccgacttctccggcgagatgaaccagtcggccgtgtccgacccctcctccagcccgctctacagcttccacttcgagaagcccgtcccgccgccgccgcccgcaggcacgtacgtggtgcaggtgcccaaggacaaggtcttccgcgtcccgccgcccgagaacgcgcgcctcttcgaccactacacgcgccgcgccaggcgccgccgccgcggcagctgctcctgcgcgtgcctgctcgtcggagccgcagtcgcgctcgccgccgccctcgccggcgtcctcgcgtgcctggtcctcgggccgaagccgccggcgtacgcggtccaggcgctggccgtctccggtctcgtcaacgcctcctcctccccggccgcgctctcgccggggttcgacgcgaccgtgcgcgccgacaaccgcaacggcaggctcggcgtgcggtacgaggggggccggggccgcgtctccgtgtcgtacggcggcgcgctcctggccgacggcgcgtggccggcgctctaccaggctccccggaacgtgacggtggtcgtggcgagggcgagggggtccggggtacggctgtcgcggagcgtgcgagggcagttggccgcggcggaacggctccggtcggtgccgttcgacatggacgtcgacgtgcccgtgcgcctccagctcggcgtggtcaggacgtgggccgtgccgctgcgggcgcgctgcaccgtggcggtcgacaggctcgcggccgacgccagggtggtgtccaactcgtgcgacgtcaaggtgcgcctcctgtcgtggtggaggaactgacgatggcgccatggtggcggattacatacttgagcacttcttgtttggttttaggatgcgttttcccctcatttgtaagctggtttggttccccaatgtggatcttgtcatcgtagtatcatatcaggaacgctgtcaaatcgtcttgcgactaatgtcatgttggtgagttgctcaagagtcgagactgaagaattgactaatgttttgttcaagtgcaactcaaatttgtacttaccatccaactaatttggacttcaaacaattcttatgcttc

SEQ ID NO: 116454 - DNA, 1813 bp, Zea Mays
gtaactcctgtcgtctagcgcgaggaggagccgtgttgccgtgcacccagcccagtgccgatggctcccagatcagtccatgcccggttccttccgttttccctgacacggttccaactcttctttccctggaactggaacgcaccgcatccgatgggtcggcgcctgggcccccgtgcccgcgcatcgtataaagccgcccctccgccacccgaccttgccgcgtctcccgtgatccccgtctccagctcaggagccagccacagcccacagctattcatcagcttgacctccccgtccgcccgcttctcgcgtcgaggtcggccgcgcgccactctgaatccccagggcaccacaccgccggacaacctcgagaagaagcaccggcaacgacgacgagctagcactagcagtcagtcacagccgggcaaggtactagcacacacgtctccttatcgctctcatctttcacgattggtttgacgctctagattgttggagccagaacatgtcattcccaatgctctttactattctaaaaacacggcatgctttaaatccccctttttttgaatccaagaaacggattcgcagtcagtttcacacccaggaaggataattatatgcatgtatcgtaggattcacaccgttgagtgcatgcagattgattcggacgagcagccgatgatgatgcacgggaacgggcacgggcacggccgtgtccacccggcgtcctccagctccgacttctccggcgagatgaaccagtcggccgtgtccgacccctcctccagcccgctctacagcttccacttcgagaagcccgtcccgccgccgccgcccgcaggcacgtacgtggtgcaggtgcccaaggacaaggtcttccgcgtcccgccgcccgagaacgcgcgcctcttcgaccactacacgcgccgcgccaggcgccgccgccgcggcagctgctcctgcgcgtgcctgctcgtcggagccgcagtcgcgctcgccgccgccctcgccggcgtcctcgcgtgcctggtcctcgggccgaagccgccggcgtacgcggtccaggcgctggccgtctccggtctcgtcaacgcctcctcctccccggccgcgctctcgccggggttcgacgcgaccgtgcgcgccgacaaccgcaacggcaggctcggcgtgcggtacgaggggggccggggccgcgtctccgtgtcgtacggcggcgcgctcctggccgacggcgcgtggccggcgctctaccaggctccccggaacgtgacggtggtcgtggcgagggcgagggggtccggggtacggctgtcgcggagcgtgcgagggcagttggccgcggcggaacggctccggtcggtgccgttcgacatggacgtcgacgtgcccgtgcgcctccagctcggcgtggtcaggacgtgggccgtgccgctgcgggcgcgctgcaccgtggcggtcgacaggctcgcggccgacgccagggtggtgtccaactcgtgcgacgtcaaggtgcgcctcctgtcgtggtggaggaactgacgatggcgccatggtggcggattacatacttgagcacttcttgtttggttttaggatgcgttttcccctcatttgtaagctggtttggttccccaatgtggatcttgtcatcgtagtatcatatcaggaacgctgtcaaatcgtcttgcgactaatgtcatgttggtgagttgctcaagagtcgagactgaagaattgactaatgttttgttcaagtgcaactcaaatttgtacttaccatccaactaatttggacttcaaacaa

SEQ ID NO: 116455 - DNA, 2472 bp, Zea Mays
gagaaaataggtgcccatacgcccacgcccaataggcttctctggcgctgtacctttcagctttataatctgccccccaagcaaatcccacagccaggctcgcccactctctccctcccccctcctcttcctctctctctctatctctctctcagtctctctcttcctcctcaaaactctctctcccagcactgaaaattctccacatactctgctgctgctaagtggtggcatctcgtttaggcgagatccccctcctcccccgctttccactcctctcctccaccctagtcgactccttccctgcaatccgctggccggctcacagtaccagaggagtccaccggaggagctcagctagactcccaccctggtggctcgatcggcaccggccgctgcctgcgagactccgccagcgcgcgatgtaccgggtgaagagcgagggggagggcgagggcgagggcgactgcgaaatgatgctgcaggaacagatggactcgctggtggccgacgacgtcagcagcggaggagggtcgcctcacaggggcgtcggcacgcccctgaagaaggggccatggacgtccgcggaggacgccatcctggtggactacgttaagaagaacggcgagggcaactggaacgcggtgcagaagaacaccgggctgttccgctgcggcaagagctgccgcctccggtgggcgaaccacctcaggcccaacctcaagaagggggccttcacccccgaggaggagcgcctcatcatccagctccacgccaagatggggaacaagtgggcgaggatggctggtcacttgccagggcgtactgacaatgagatcaagaactactggaacactcgaataaagagatgtcaacgagctagccttcctatttatcctgctagtgtatgcaatcaatctacaaatgaagatcagcaactgtctggtaattttaacggtggcgagaatatatccaatgatcttctatctgggaacagcctttatctgccagattttaccagtgacaatttcattgcgaacccagaggctttatcctatgcaccacagttgtcagctgtttcaataagcaatttgctcggccaaagctttgcatcaaaaagttgtagcttcatggatcaggttgaccaagcggggatgctgaaacaatctggctgtgtgcttcctgcattgagcgatgccattgacagtgtgctttcctcagctgatcatttttcaaatgactctgagaagctcaggcaggctttaggttttgattatctgaatgaagccaatgctagcagcaagagtattgcacctttcggggttgcacttactggcagccatgcctttttaaatggcaatttctctgcttctaggcccacaaatggtcctttgaagatggagctcccttcactccaagatactgaatctgatccaaatagctggctcaagtatactgtggctcctgcaatgcagcctactgaattagtagatccttacctgcagtctccatcagcgaccccttcagtgaaatctgagtgtgcatcgccgaggaacagtggtcttttggaagagctgcttcatgaagctcaggcactaagatctgggaagaaccaacaatcatcggtccgaagttcaagttcttctgctggcacaccttatgagactaccacggtggttagcccagagtttgatatgggtcaggaatattgggaagaacagcccagttctttcctcagtgaatatgctcattttagtggaaattctttcactgaatccactcctcctgttagtgctgcgtcacctgatatcttccagctctccaagatttctcctgcacaaagcccttcaatgggctctggcgagcaggcgttagagcctaaacatgagtcggcagcttcacctcgtcctgaaaacttgaggcctgatgcattattctctgggaacacagccgatccatccattttcaataatgccatagccatgctcctgggcaatggcattgatgccgagtacaaacctgttcttggtgatggaattgtgctcgattcttcgtcatggaacaacatgcaacatgcttttcagatggcgggattcaaatgagttccatgcacttgtttgtgatgctgaagggcttcttgttgcttgttttggggtcagtatcagcgaaggccgcattgattgtgacgctgcattcctgacagagggcgtgcaggtgcagcagctaccatatgtgatcttcatgctaatagtccttttgtctaataaagtgcatgaagataaaccggatattttttttttgctttgtattagagaaccgtttttgtcaaccctgtcaggattctgttggaaatgtgtcatgatttttgtttgaacaatttaatatctgtcattgatactgtgctgtgtgctactccttgatgcatttgcttgtggcagcaaattgtttaagtatacactgtcattgctgctg

SEQ ID NO: 116456 - DNA, 2918 bp, Zea Mays
aaatgccaaaccacaacaagtcgcttccgtccctccccacgccgccgagggccgccgaccaggagatcacgcgctcatctctcatggagtccgtctagcttccgctcgtctgcgcccactccaagcagccgcagcggaactcaactactgcaggttgagatgaacggtccatcgaatttcatgcctactcctgaacaggatgttctggacgtcaagcccttgaggacattggctccaatgttccctgctcctctgggtgtcaatacatttaaccactcaaccacgccaccattgatatttgtcactccttctggacaatttcaagggggttttggtgattggaataattctgctgccaaatcatttttcgctttcagcagcaaggatgctcgtggaggcaaggctgatacatttagtgatcagaatactggtactggcaaggctgccacttttggtgatcaggatgcttttggcagccagaatgtttttgctagtgatcacagtactggtactggcaaggctgccacttttggtgatcaggatgcttttggcagccagaatgtcgccactggtgtgcaggatgctgcgaaaggccagactgcaacagattggacagatgtgagtgccaatcctaatggcccaattgatgccattgccatttcagcttacaggtcaacacagcctaatgttatatcactggatgatgatgatgacgacgacgatgatgagccttatgctgctaacaagacatcagcatctggacgcaagatcaagaggccatcccacctcagcggatacaatgtgagtgatgctttggtaagtgacagctccaacagcatgaaggttaagcgccccaaatcctctcacgggaaagctgctgctgacaacgagcatgccttgcttccaccttctgaggatcccagggaaattgtggaggcagttctcatgacctttgaggcgttgcggcgtaggcatctccaattggatgaggcacaagagactagcaagcgtgcagatctgaaggctagtgctatcttgatgtccagtaatatcagggctaaccctgggaagaggataggggttgttcctggagttgaaataggggacattttctacttcaggatggagctatgtattattgggctgcatgctcctagcatggccggaattgactatatgactgccaagtttggtgacgaggatgattctgttgcaatatgtattgttgctgcaggtggttatgacaataatgatgatgatacagatgtactggtttacagtggttcaggaggtaatagcaagaacagtgaggagaagcatgaccagaagcttgagaggggcaacctggctcttgagaggagcttgtccagaaaaaatgtaatccgtgtggttcggggctataaggatccaggttgcttgactgggaaggtttatatttatgatggcctctataggattcacgagtcatggaaggagaaaacgaagagtggaatattttgttttaagtacaagctgctgcgagagccaggacaacctgatggggttgcaatctggaagatgtcccagaaatgggtacaaaatccactgactagaggcagtgttttaaatcctgatctatcatctggtgcagaaaatcttccagtgtgtcttgttaatgacattgacagtgatgaagtgccacaccatttcacatataccactcaggtcgaacacttgaaaccactcagttctgtgaagcctttacagggttgcagatgccttagtgtttgtctgcctggtgatgccaactgctgctgtgcacagcgtaatggaggcagcttaccttacagctcatcaggactgcttgtatgccgcaagactatggtttatgaatgtggtgaatcctgtcggtgttctttcaattgtcgtaacagagtgacccagaaaggagttaggatccactttgaggtctttaagacgggaaatcgaggctggggtcttcgttcgtgggacgctatacgggctggttcatttatatgcgagtatgttggtgaggttattgatgatgctaacattaatctgaatgatattgaagatgattatatatttcagatgtcgtgtcctggtgagaggacattaaaatggaattttggacctgaattgataggggagcaaagcacaaatgtttctgctgatacctttgagactctacccattaagataagtgctaaaagaataggaaacatatcacgtttcatgaaccatagttgtgctcctaacgtattttggcagccagttcagtttgaccatgaagatgatcatcgcccacatatcatgttctttgctttgaagcatattcctcccatgacagagttgacttatgactatggtgacgttggagctgatcctagtggtgtacggtctcctagagcaaagaactgcctttgtgaatcctcaaattgtcggggattctttatctgaccgtggaaaatgcatattctatctatcaacattcaaccctaccagctagatcctttttggtggcacctgaagaaaaagtaggactgttcgaacagcttgcatcactctgtcgttgtggaaccattatattaattaatgtcaatcttttagatgaccattcagcaactaatgcacaaacgtttcttttgtgggggaagaatgttggtcttggaagttcaattttgtgtagtttgtagacttgtagagcatttagtgctgctaaacttgtgcaccttaagtcttttggctgtaaaagagcctcgaggctccagctgaattggttaggcagtctaagtagcatttctttgatcctgaatttgactccacgtgagtcaatttcaagctggagttaaaaaaaacattcttatgttctatactaaagtacagttctaaggctcaaccatgatcatagtcgttct

SEQ ID NO: 116457 - DNA, 2722 bp, Zea Mays
gtgaagtgtgcaaatacaagctaggaagtcacctgtgaattctaaacactgtttattttttctcattttgttaatcaagtattgaagacatgatcattaactgtgttttcttcacacaggaactcaactactgcaggttgagatgaacggtccatcgaatttcatgcctactcctgaacaggatgttctggacgtcaagcccttgaggacattggctccaatgttccctgctcctctgggtgtcaatacatttaaccactcaaccacgccaccattgatatttgtcactccttctggacaatttcaagggggttttggtgattggaataattctgctgccaaatcatttttcgctttcagcagcaaggatgctcgtggaggcaaggctgatacatttagtgatcagaatactggtactggcaaggctgccacttttggtgatcaggatgcttttggcagccagaatgtttttgctagtgatcacagtactggtactggcaaggctgccacttttggtgatcaggatgcttttggcagccagaatgtcgccactggtgtgcaggatgctgcgaaaggccagactgcaacagattggacagatgtgagtgccaatcctaatggcccaattgatgccattgccatttcagcttacaggtcaacacagcctaatgttatatcactggatgatgatgatgacgacgacgatgatgagccttatgctgctaacaagacatcagcatctggacgcaagatcaagaggccatcccacctcagcggatacaatgtgagtgatgctttggtaagtgacagctccaacagcatgaaggttaagcgccccaaatcctctcacgggaaagctgctgctgacaacgagcatgccttgcttccaccttctgaggatcccagggaaattgtggaggcagttctcatgacctttgaggcgttgcggcgtaggcatctccaattggatgaggcacaagagactagcaagcgtgcagatctgaaggctagtgctatcttgatgtccagtaatatcagggctaaccctgggaagaggataggggttgttcctggagttgaaataggggacattttctacttcaggatggagctatgtattattgggctgcatgctcctagcatggccggaattgactatatgactgccaagtttggtgacgaggatgattctgttgcaatatgtattgttgctgcaggtggttatgacaataatgatgatgatacagatgtactggtttacagtggttcaggaggtaatagcaagaacagtgaggagaagcatgaccagaagcttgagaggggcaacctggctcttgagaggagcttgtccagaaaaaatgtaatccgtgtggttcggggctataaggatccaggttgcttgactgggaaggtttatatttatgatggcctctataggattcacgagtcatggaaggagaaaacgaagagtggaatattttgttttaagtacaagctgctgcgagagccaggacaacctgatggggttgcaatctggaagatgtcccagaaatgggtacaaaatccactgactagaggcagtgttttaaatcctgatctatcatctggtgcagaaaatcttccagtgtgtcttgttaatgacattgacagtgatgaagtgccacaccatttcacatataccactcaggtcgaacacttgaaaccactcagttctgtgaagcctttacagggttgcagatgccttagtgtttgtctgcctggtgatgccaactgctgctgtgcacagcgtaatggaggcagcttaccttacagctcatcaggactgcttgtatgccgcaagactatggtttatgaatgtggtgaatcctgtcggtgttctttcaattgtcgtaacagagtgacccagaaaggagttaggatccactttgaggtctttaagacgggaaatcgaggctggggtcttcgttcgtgggacgctatacgggctggttcatttatatgcgagtatgttggtgaggttattgatgatgctaacattaatctgaatgatattgaagatgattatatatttcagatgtcgtgtcctggtgagaggacattaaaatggaattttggacctgaattgataggggagcaaagcacaaatgtttctgctgatacctttgagactctacccattaagataagtgctaaaagaataggaaacatatcacgtttcatgaaccatagttgtgctcctaacgtattttggcagccagttcagtttgaccatgaagatgatcatcgcccacatatcatgttctttgctttgaagcatattcctcccatgacagagttgacttatgactatggtgacgttggagctgatcctagtggtgtacggtctcctagagcaaagaactgcctttgtgaatcctcaaattgtcggggattctttatctgaccgtggaaaatgcatattctatctatcaacattcaaccctaccagctagatcctttttggtggcacctgaagaaaaagtaggactgttcgaacagcttgcatcactctgtcgttgtggaaccattatattaattaatgtcaatcttttagatgaccattcagcaactaatgcacaaacgtttcttttgtgggggaagaatgttggtcttggaagttcaattttgtgtagtttgtagacttgtagagcatttagtgctgctaaacttgtgcaccttaagt

SEQ ID NO: 116458 - DNA, 1119 bp, Zea Mays
aacaaaatctataaccgatatattttgacggatccctcgtttccaggttgcgcgtgccttaattaaactctgcgagatggccaaaatttggcaattgctattctggggcaaggcgaaatggaacaagagcaagcggccaaccgccagcccaacgccaacgcggtccagccaagtccaacccgtacccaccacgccgccgacgccgacgcgtcgccaacgggaacttctcaaagcgccgacggggtccaccgcgcccgttatttcatcaatcgactcaactaccgcggcctcctcctcgcagaccccgaaggccgccgtgcctcccgccccgcccctcgccggcgaccatcggccgccggcgacacccggcatgccgcccgcccgcttcgtccacctcatcctcctcgcgacgctttcgctcctcctcgcgcagaccctggcctcctcgtcccccgcgcccgcctccgccgccacggcgggggagcccggcgacccctgcgcggccgccgtcgcggacggggacggcgacgtcccgctgtgcccggtgcggtgcttccggccggacccggtctgcggcgccgacggggtcacgtactggtgcggctgccccgaggcagcatgcgcgggcgcccgcgtggctcggcgcggctactgcgaggtcggcgccggctccgcgcccgtctcgggccaggcgctgctgctcgtccacatcgtctggctcttcgtgctcggcgccgccgtcctcctcggcttcctttgatgctctccgtctttcccgcccgttcccgcaggtgtattcccctacccgtaatcactgtcccgatctttgtgttggctctttcctgtgctgctgagggctcaggaatggtgatctggcgatttcgtcgagaggactcgtctagagatgtaactcggttctttgaacttctttctcagatatgttgggatcagctgtgctctacattttggagcagagctgtgatgattggttgttaaatgctgtagattgagattatgtaaaaacagttgtaaattctttgctaacaaattgcattgatcaaactgttcttgtccagaaatttgggattggtgggaaaattaaatttgaactgcgattgt

SEQ ID NO: 116459 - DNA, 1261 bp, Zea Mays
agtcaaaatagaaaacagaaacaaaaatcatgagagtgagagttcatcttcttctccaagctgatttctgcttgttagctactcacgtcaacagaaaatctcgcgttcacctcctctccagtctctccgcctcccgcttacttctctgactctgtcctctttggtttctttcctgtcggcgacggctggggtgctgcgccgctctcaccttcaccgccgacgagcattcacaagtagtggtctcttactggtggcggcgtagaggtgacgaaaaaaccttgacaatgagcagcataggcacaggttatgatctgtctgtcaccaccttctctcccgatggccgcgtcttccaggtcgagtatgccacgaaggctgtcgacaacagcgggaccgttgttgggatcaagtgcaaagatggcattgttctgggtgtcgagaagctggtaacctcaaagatgatgctggagggatcaaaccgtaggatccattcagtgcacaggcactcgggcttggccgttgctggtttggcagcagatggcaggcaaattgtttcaaggaccaaatcagaagctgccagttatgaaaaggtctatggagaacccatttctgtgaaggaattggcagatcgtgtggcaagttatgttcatctttgcacgctgtactggtggctcagaccttttggttgtggtgttattcttggaggttatgatagggatggaccacagctttacatgatagagccctcaggagtttcgtataaatacttcggtgctgcattggggaagggaaggcaggctgcaaagactgagatagaaaagttgaaactttcagagcttacctgccgagaaggcattgttgaagttgcaaagataatttatgcagtgcatgatgaagctaaggacaaagcttttgagttggagttgagctggatctgtgaggaatcgaagcgccagcatcagaaggttccaaatgagctgttggagcagggcaaggccgctgctcaggcagctcttgaggacatggatgctgaaagaaacaccattgctaggcccgaacttgttccatcatctttcgttgcttttgaaatctttggtccctttgggctgccgggctgggctggacgtggcaaagaattgtcagattttactttcagttcgatgtaaaatctcatagatgtacctaacgaaactaggctccgttcatcggttcatggaagtttgaatctagacaggagatatcagggccgtgttgaaacagcggc

SEQ ID NO: 116460 - DNA, 1755 bp, Zea Mays
cctgcctctccctcccgccgccacagcgcgaagctctgtcggacaccgaccccgacgctgctctaccgctcgttgcgtcatccctccactggctcacacgtacaccttctcgaccgcgcgtcgtcactccactaccatatcccgaagattgcctcctccctgagactgccccctccacctcgcgtgcctcgcagacgggcgacctcgcatcgcgggctcggtgctcaaccgtggcccgaatttcgcttcgacgtcatcccgaacagctcgagaacaccatcctccatctcatcacagtataatacacatttgttcataagttatcgtggtattatatgattccgttgcaacgcacgggcactgacctagtcaaaatagaaaacagaaacaaaaatcatgagagtgagagttcatcttcttctccaagctgatttctgcttgttagctactcacgtcaacagaaaatctcgcgttcacctcctctccagtctctccgcctcccgcttacttctctgactctgtcctctttggtttctttcctgtcggcgacggctggggtgctgcgccgctctcaccttcaccgccgacgagcattcacaagtagtggtctcttactggtggcggcgtagaggtgacgaaaaaaccttgacaatgagcagcataggcacaggttatgatctgtctgtcaccaccttctctcccgatggccgcgtcttccaggtcgagtatgccacgaaggctgtcgacaacagcgggaccgttgttgggatcaagtgcaaagatggcattgttctgggtgtcgagaagctggtaacctcaaagatgatgctggagggatcaaaccgtaggatccattcagtgcacaggcactcgggcttggccgttgctggtttggcagcagatggcaggcaaattgtttcaaggaccaaatcagaagctgccagttatgaaaaggtctatggagaacccatttctgtgaaggaattggcagatcgtgtggcaagttatgttcatctttgcacgctgtactggtggctcagaccttttggttgtggtgttattcttggaggttatgatagggatggaccacagctttacatgatagagccctcaggagtttcgtataaatacttcggtgctgcattggggaagggaaggcaggctgcaaagactgagatagaaaagttgaaactttcagagcttacctgccgagaaggcattgttgaagttgcaaagataatttatgcagtgcatgatgaagctaaggacaaagcttttgagttggagttgagctggatctgtgaggaatcgaagcgccagcatcagaaggtcccaaatgacctgttggagcatgccaaagctgctgctcagacagctcttgaggagatggatgctgactaagaaacaagatgatatgcccaaacttcatgttttggcgctgttgaaatctctgatccctttggggtgacagactggatatggcaaatttgtcggattttattttgatgtcatgtaaaactcaattgatgtaagtttggatctgaattgattgatgtcatagctgtggctatttacattcaccgcagttgcgtcctttagaacttgctgttgttagactttataggaccttgcacacgaaccattgctactagacggcgattgttttgcgtgtcggacctctttctgtttttgtaggctatgtgaaagaggacggcagccataaggttgttgcgctctcgattagggtgcgagagg

SEQ ID NO: 116461 - DNA, 94 bp, Zea Mays
gcaattgaggagtatcctcaggtttgttaattctgattattgctctaacattttgcatgataagcagctaggttccggtgtcgatctggtgggc

SEQ ID NO: 116462 - DNA, 573 bp, Zea Mays
cctaaaaacaccttgaggggtaaccccgggtgtgcggtcggacccaaaacaccgacaggcggtcatgtcgattacttaaggatgagcgacgaggagctcatggagcagtgcgatatgggcacgttcaaggcgtccggcctcggcggccagcaccgcaacaagcgcgagtccgccatccggctgaaacaccttcccaccggcatcatcgcccaggttgtggaggatcggtcacaacataagaactgagcgtctgctttatctcgacttcgaaccctgattgctcttaaagttaggaggccgataaacctggaagactacactccacctgttgagcttcttcagatattacccctgaagtccagcgttagaggaaaagatgttggcccccaaatcggtccaaataactcaaaattttctacaggaatgcaagcattattagacctgctgtttgctgttgaaggttctgtattagatgcagcaaagattttaggcctaagcactggtgctttgtcaagattgattctgtcagatgattctctccgaacggccgcgaatgaactgcgagcttcgaag

SEQ ID NO: 116463 - DNA, 236 bp, Zea Mays
gatctcggatggcaacagagatatgctcgtttttgtggaagaataatgtcctctcagttcttgtgctacttctctacccctttctctgggtttggactgtgattggaacattgtggtttagcactgcaagaggctgcgtgagttctcttattcttgatataggtactacttgtgttattttatacagtaaattctactaaatgcattttattctttgtagttgccagaggaaggac

SEQ ID NO: 116464 - DNA, 2692 bp, Zea Mays
cggctcagcccattgcggcggcggcaagtcagcaacccgttacccgtccccacgaacggctcgccagcaccgccacctccgattcgcgtgcggcgaccgtcgatggcgaacccgaggcgagccatcgcgctgcacatccagacgcagccgccgcctctccccagcaccgccgccgcccttccacctcacactctggcgtcgtcgctgctccacttcctgaagcggccggcgtccttccctttccttctctcactcttcgtcctcctcacctggctctcgctccgcttccaccacccctcgccgccaccgtcgctcggcggccgcccctccgttgtgcacgagccccaggcaaatctcgtccgcttccccgcggagctctaccccacccccatcgcccgcgacgggcgcgggtggctactggaccccgtcgccgccgcccgtgacgctggccttccaggtggagcactggtctgtttactacttcatgttggacagatccaaccaggtggtttacgtggcaaccatcgtcatcacacttgcaatgaaacattcgtcatctggggcgcaaagacaaaattcaggttggaaaatgctggcataaaagatgaaggatatggcgaagccatgattgctgctgacgaggtcgctattgttgctagtgcaagatccactgcacatgccttgatcaatatggatgtgcgaccaacctttttcttaggatgtcaggatacaccaataaatcccaacagctcaaatactgactacaaggtctggaaagacctatgagaattgctgcaccattcctgtatctgagggtgggcaattgacaggccaagaagatattggaaatgcatcacgtcaagacctacgagaattgctgcattgttcctttatctaagggtgagcaattgacaggccaagaagatagtagaaatgcatgacgccttcaaaattatgttcttaacgtagatagttgtttctatcattctacggtcagatatatgtgcatagttttgggaacactagcagctggttactcatttttatttgtcgtgcctatttttttgtacccttgtttccttctgttgcaatatagtctctctgtctctatctatctctatttgcttccaactttgtttcctgctactttgtttccacaaagtgtcttggacctgcaacatttatctgtggagctggtacttgaaattacatgtttttcagcgacttgtcgttgagttgatattatgcaggttagtgccatcaaacttcacacaatactgagaacgtgatgggtcattcagataagtctctatttttttttatttttttactaacccaatgttttttcagcatgatgagctcagctcaatcacttgcgcagcttcagtttcgttatcattttaagaaggcgaattttgcgaccgtgggttacgcaatccccgtcagcaaatcagcatgttgcacataacaaatcctatgcttgggatcagataagagtgcctgccagatagaaatacagaagaatcagatactaatgccacgaggccatagttgaatgaccactcatcaggcctatcattgggcccttccattcctccgtgtataaagcccagctgcctccctgtcccgcgcaccagcgcagaatcagcaaacgcgccattgacgcgcactcgtagtcttgactcttgcgtgcttccctcgtcttctcggacgttccgttccatcgccatggcggaccagcttagcgaggagcagattgccgagttcaaggaagctttcagcctcttcgacaaggacggcgacggttgcatcacaaccaaggagctcggaaccgtgatgcggtctctcgggcagaaccccaccgaggcggagctgcaggacatgatcgccgaggtggacagcaacggcagcggcaccatcgacgagcaggagttcctgggcctgatggcgcgcaagatgagggacgcggagtcggaggaggagctcagggaggcgttccgcgtgttcgacaaggaccagaacggggtgatctccgcggccgagctccggcacttgatgaccaacctcggggagaagctgagcgagcaggaggtggccgagatggtccgtgaggccgacgtggaccgcgacggccacatcaactacgacgagttcgtcaaggtcatgacggccaagcgaaggagcaagaggacggaggagaaggcgacgcgcggcaagaagaaaccggcggcggcgccgtccgacgccggcaagcgtggccagaaatgcgtgatcctgtgagccggagcttcggttgtccagtacatgctggtgcagtggtgctgcgtgcgtgtcacccgctcgacctctgcttccggcacaccagctgcgggaagctccacttgttctgcaggtgaatgtagctgtttgtaaacttatcagagcgtgtttgggagcatgattgaatgggaaaatccacttgagtaagggattttagtcatctagatctcctctaatctccttgctcccaaacaagccattaaataagaaaaacggaggaagtaactgtttgtcaatcttgtacatgtgctcgtgtagcctgtctggtcttgtagtttcgggctcataggtcagtggtaaaagcaatgtcacaacagaatttgtgatgaatatttaactatcacaataagaaacgatctgatttttacgacca

SEQ ID NO: 116465 - DNA, 964 bp, Zea Mays
attacttccacaaagtacctgcatgattattattctctctctctcaatctaacattatttctcatacaaaatttaactgatttacgaaaaattcatgtatggttattcatttctatgctactcattgaagacttatggtctgaagctgtggaagccccaggtgctgcaaattttctcattgtgcatggtgaaatataatttgacttggcaggttgcatcacaaccaaggagctcggaaccgtgatgcggtctctcgggcagaaccccaccgaggcggagctgcaggacatgatcgccgaggtggacagcaacggcagcggcaccatcgacgagcaggagttcctgggcctgatggcgcgcaagatgagggacgcggagtcggaggaggagctcagggaggcgttccgcgtgttcgacaaggaccagaacggggtgatctccgcggccgagctccggcacttgatgaccaacctcggggagaagctgagcgagcaggaggtggccgagatggtccgtgaggccgacgtggaccgcgacggccacatcaactacgacgagttcgtcaaggtcatgacggccaagcgaaggagcaagaggacggaggagaaggcgacgcgcggcaagaagaaaccggcggcggcgccgtccgacgccggcaagcgtggccagaaatgcgtgatcctgtgagccggagcttcggttgtccagtacatgctggtgcagtggtgctgcgtgcgtgtcacccgctcgacctctgcttccggcacaccagctgcgggaagctccacttgttctgcaggtgaatgtagctgtttgtaaacttatcagagcgtgtttgggagcatgattgaatgggaaaatccacttgagtaagggattttagtcatctagatctcctctaatctccttgctcccaaacaagccattaaataagaaaaacggaggaagtaactgtttgtcaatc

SEQ ID NO: 116466 - DNA, 1496 bp, Zea Mays
cggctcagcccattgcggcggcggcaagtcagcaacccgttacccgtccccacgaacggctcgccagcaccgccacctccgattcgcgtgcggcgaccgtcgatggcgaacccgaggcgagccatcgcgctgcacatccagacgcagccgccgcctctccccagcaccgccgccgcccttccacctcacactctggcgtcgtcgctgctccacttcctgaagcggccggcgtccttccctttccttctctcactcttcgtcctcctcacctggctctcgctccgcttccaccacccctcgccgccaccgtcgctcggcggccgcccctccgttgtgcacgagccccaggcaaatctcgtccgcttccccgcggagctctaccccacccccatcgcccgcgacgggcgcgggtggctactggaccccgtcgccgccgcccgtgacgctggccttccaggtggagcactggtctgtttactacttcatgttggacagatccaaccaggtggtttacgtggcaaccatcgtcatcacacttgcaatgaaacattcgtcatctggggcgcaaagacaaaattcagggtaataataatcgtcacagtttttgttaagagttggatgcttctagtggtgactgtttgtttcacttaattgacagttggaaaatgctggcataaaagatgaaggatatggcgaagccatgattgctgctgacgaggtcgctattgttgctagtgcaagatccactgcacatgccttgatcaatatggatgtgcgaccaacctttttcttaggatgtcaggatacaccaataaatcccaacagctcaaatactgactacaaggtctggaaagacctatgagaattgctgcaccattcctgtatctgagggtgggcaattgacaggccaagaagatattggaaatgcatcacgtcaagacctacgagaattgctgcattgttcctttatctaagggtgagcaattgacaggccaagaagatagtagaaatgcatgacgccttcaaaattatgttcttaacgtagatagttgtttctatcattctacggtcagatatatgtgcatagttttgggaacactagcagctggttactcatttttatttgtcgtgcctatttttttgtacccttgtttccttctgttgcaatatagtctctctgtctctatctatctctatttgcttccaactttgtttcctgctactttgtttccacaaagtgtcttggacctgcaacatttatctgtggagctggtacttgaaattacatgtttttcagcgacttgtcgttgagttgatattatgcaggttagtgccatcaaacttcacacaatactgagaacgtgatgggtcattcagataagtctctatttttttttatttttttactaacccaatgttttttcagcatgatgagctcagctcaatcacttgcgcagcttcagtttcgttatcattttaagaaggcgaattttgcg

SEQ ID NO: 116467 - DNA, 1471 bp, Zea Mays
agaagatgatagaaagacgctgatcctagccttagccaaacaaagctccgacgaggcagcggccacggccagctggcatgctcctgctgcggcgccttgtccgggccggccggtcgtggggcaccgaggcgagaggcctcgcctcgggggccccgcgggaggcggcggacgccgtggtggtgggagcgggcgtcgtcgggctcgcggcggcgcgcgcgctggcgatggccgggcgcgaggtagtcgtggtcgaggcggcccccagtttcggcaccggcaccagttcccgcaacagcgaggtcatccacgccggtatctactaccctccgcgaagtcttaaggctaggctttgtgtaaggggaaaggaaatgctctacaagtactgtgaagaacgaggtgttgcccacaaacgaatcagcaaactcatcgttgccactggtgctgcagaggttccaaagttggacatgcttctcagaaatgccaaagaaaacggggtggatgatcttcagttgatggagggttctgaagctatggagatggaacctgagcttcgatgtcttaaagctttactatcacctagtactgggataattgactctcattcactcatgctctcccttttggctgatgctgaaaacttgggaacaactatatcatataacacatcagttatcagtgggcatgttggatccaatggccttgaactccatgtttgtgaaagcaaagagctgcagaattatcatgaatttgtgcccactcctcactatgcgcgtgggtgttacttcaccctctctcaaaccaagagtcctttcagtcggttaatatatcctctaccagaggatggtggcataggagtccatgtcactttagatttgaatggccttgttagatttggtccagatgttgaatggatatctgatggtggaaaggaccatgtgtcatgttttctgaacaagtttgattactcagtaaatcccaatcgctgttctgtattttaccctgtggtaaggaagtattttccaaatctcaaggatgggtctttggaacctggttattctgggatccgaccaaagctttctggtcctggacaacctccttcagattttgttattcaggggtgggatgtccatggtgttcctggactggttaatttgtttggaatagaatcccctggtttgacctcaagcttggcaattgctgaacacattgtttcaaagtatttgtgatgggagtctcctatacaaagcttcattgccagatgctccatgcactgcagaatgatgaacctgacgtgtcaggaccagggttcaccaaagaaaatcgtacagtaaaaacaacattttgagctgttttttttcttgatcatttggatacttattgcatgtgactgttagaagatgaaattctatgaaagtttcagcgaaacattaatatgatggagattgaacgggtatatgacactttacgggca

SEQ ID NO: 116468 - DNA, 922 bp, Zea Mays
agaagatgatagaaagacgctgatcctagccttagccaaacaaagctccgacgaggcagcggccacggccagctggcatgctcctgctgcggcgccttgtccgggccggccggtcgtggggcaccgaggcgagaggcctcgcctcgggggccccgcgggaggcggcggacgccgtggtggtgggagcgggcgtcgtcgggctcgcggcggcgcgcgcgctggcgatggccgggcgcgaggtagtcgtggtcgaggcggcccccagtttcggcaccggcaccagttcccgcaacagcgaggtcatccacgccggtatctactaccctccgcgaagtcttaaggctaggctttgtgtaaggggaaaggaaatgctctacaagtactgtgaagaacgaggtgttgcccacaaacgaatcagcaaactcatcgttgccactggtgctgcagaggttccaaagttggacatgcttctcagaaatgccaaagaaaacggggtggatgatcttcagttgatggagggttctgaagctatggagatggaacctgagcttcgatgtcttaaagctttactatcacctagtactgggataattgactctcattcactcatgctctcccttttggctgatgctgaaaacttgggaacaactatatcatataacacatcagttatcagtgggcatgttggatccaatggccttgaactccatgtttgtgaaagcaaagagctgcagaattatcatgtagggtctcatgtgaacgcacaacttgttttgcttccgaagcttgtgataaactctgcaggtctgagtgcagttctacttgccaaacaatttcatggccttgaccaggaatttgtgcccactcctcactatgcgcgtgggtgttacttcaccctctctcaaaccaagagtcctttcag

SEQ ID NO: 116469 - DNA, 1074 bp, Zea Mays
accgggcaggcatccagcgacggaccgggcaggcagagaaaagcagaccagacgagacgtcgtgcgtcgcgtcctccctgccgttccccttcttcagttctcccgctgctgctgccgctgccaccctccgtccgcgtccagatcccgccaccccaatcgatctgccggcctccagcatggcggcgggggcgggggcgagggcgaaggcagcgggagccctggcgctggcgctcgtgctcgcgctagcgggggccaactccgagggcgacgcgctctcggcgctgcgccgcagcctcagggaccccggcggcgtgctgcagagctgggaccccacgctcgtcaacccctgcacctggttccacgtcacctgcgaccgcgacaaccgcgtcacccgcctagatcttggtaatttgaacttatctggtcatctggtgcctgagcttgggaaattggagcatctgcagtacctggaactttacaagaacagcattcaaggaacaatcccttctgagcttggtaatttgaagaatctaataagcttggacttgtacaagaacaacatttcggggacaatacctccttcccttggaaagttgaaatcccttgtattcctgcggctcaatggcaatcatttgactgggccgatcccaagggaactttctggaatatctagtctcaaagttgtcgatgtttcaagcaatgatttatgtgggacgattcccacatctggaccatttgagcacattcctctgagcaactttgagaagaacccacgcttggaaggtccagagctacaaggcctggccatatatgacaccaactgctagagggggcaccacgaacaaaagaatcgctaggaagaaatgggcgaacaaggttaccaaaaagtgggcgacatagattattaggtctggttctgctgccactctgtaatcccccctgcatagctcttatttgtaacttgctgtctgcacgaaagttggtggatgttttagcagaatgctttctgcccgtgaaagtaaacttgaaactgcttattatgagtgaaatgatgatgttatttcccttgccatg

SEQ ID NO: 116470 - DNA, 940 bp, Zea Mays
accgggcaggcatccagcgacggaccgggcaggcagagaaaagcagaccagacgagacgtcgtgcgtcgcgtcctccctgccgttccccttcttcagttctcccgctgctgctgccgctgccaccctccgtccgcgtccagatcccgccaccccaatcgatctgccggcctccagcatggcggcgggggcgggggcgagggcgaaggcagcgggagccctggcgctggcgctcgtgctcgcgctagcgggggccaactccgagggcgacgcgctctcggcgctgcgccgcagcctcagggaccccggcggcgtgctgcagagctgggaccccacgctcgtcaacccctgcacctggttccacgtcacctgcgaccgcgacaaccgcgtcacccgcctagatcttggtaatttgaacttatctggtcatctggtgcctgagcttgggaaattggagcatctgcagtacctggaactttacaagaacagcattcaaggaacaatcccttctgagcttggtaatttgaagaatctaataagcttggacttgtacaagaacaacatttcggggacaatacctccttcccttggaaagttgaaatcccttgtattcctgcggctcaatggcaatcatttgactgggccgatcccaagggaactttctggaatatctagtctcaaagttgtcgatgtttcaagcaatgatttatgtgggacgattcccacatctggaccatttgagcacattcctctgagcaagtaagttacattcctactttgcatcttcttgcatactttataaagataaattacacctcaaaacatttagtcttcctctgccagacaagtgcagtaagttcatctgcatgtctgctcctgtcagttcagcatcattatgacacttatttgtattttgcactcatttgtatgtatatgtgattg

SEQ ID NO: 116471 - DNA, 1599 bp, Zea Mays
catcccccatcgccctcatcctctccggggggacggacgccgctgcccctccgccgccccgtcgccatgggcaactgctgcccgggctccggggatgcggagcccgccccggctgcctccgccgacccttcctcccgcctccactccggcggcacgtccctcaaggccggcgcctcggtcagctcggcccccacgcccaccaagccgcccgcgcccatcggcccggtcctgggacggcccatggaggacgtgcgcagcatctacaccgtgggcaaggagctcggacgtggccagttcggcgtcaccagcctgtgcacgcacaaggccaccggggagcgcttcgcgtgcaagaccatcgccaagcggaagctgtccaccaaggaagacgtagaggacgtgcggcgcgaggtgcagatcatgtaccacctggccgggcagcccaacatcgtggagctcaagggcgcctacgaggacaagcagtcggtgcacctcgtcatggagctctgcgccggcggggagctcttcgaccgcatcatcgccaagggcaagtacacggagcgcgccgccgcgtccctgctccgcaccatcgtggagatcgtgcacacctgccactccatgggcgtcatccaccgcgacctcaagcccgagaacttcctcctcctcagcaaggacgataacgcgccgctcaaggccaccgacttcggcctgtccgtcttcttcaagcagggggaggtgttcaaggacatcgtcggcagcgcctactacatcgctccggaggtgctgaagaggaactacggccccgaggcggacatctggagcatcggcgtcatcgtctacatcctcctctgcggagttccgcccttctgggccggcaagggacaggtggacttcacaagcgacccgtggccgcgcatttctccgagcgcgaaggacctcgtcaggaagatgctcacctctgaccccaagaagaggatctctgcctacgacgtcctcaaccatccttggatcaaggaagatggcgaagcgcctgacacgccactggacaacgctgtcatgaacaggctgaagcagttcaaggcgatgaaccagttcaagaaagccgcgctgagggtcatcgccgggtgcctgtcggaggaggagatcaggggtctgaaggagatgttcaagagcatggacgccgacaacagcggcaccatcaccgtggacgagctgcggcgagggctggccaagcagggcaccaagctcagcgaggcggaagtggagcagctgatggcggccgcggacgcggacgggaacggcacgatcgactacgaggagttcatcaccgcgacgatgcacatgaacaggatggacagggaggagcacctgtacaccgcgttccagtacttcgacaaggacggcagcgggtgcatttccaaggaggagctggagcaggcgctcaaggagaaggggctcctggacggcagggacatcaaggacatcatctcggaggtggacgccgacaacgacgggaggatcgactacagcgagttcgtggcgatgatgaggaaagggacggccgagcagaaccccaagaagcggcgcgacgtcgtgttgtag

SEQ ID NO: 116472 - DNA, 204 bp, Zea Mays
ttccccacgggtcccagaggagcaagggggacccgggcatacaagaatgaggatgattttgtccccgttgagctagtcggggcagggatggagattgagtttcggggaacagggggcgccggggcacgttgcactctctacaccccagaagcacccaagaaaaaggcacagaagtcaagccccgtaacgaatagtaaacaatag

SEQ ID NO: 116473 - DNA, 2461 bp, Zea Mays
acacgtgcctgtggcacgtgcctctcaagtctcaactagtatgtagaaattggctagtcgatcggatactccctttccctgcgaagtgttctacgactggtggactctcttggctgtggctgctgatccgccaatgtcaaaggcacgtgcagcagcagttgcccttgcccctgggtctggttgatcgcgatgcacatgaccggagcctgactttggtgcggcgtgagcacgatgatgcgttgcgcggttcggattcgtgagagctgtagtcaaaaggctggaacggatggaattatccgagcagattgggtgggacggcggagggagccctttgcgccgtcacaaatcgcaaccaatcgccgagttgcttgtgttaaatagctcttcgcgtacgacacggcaagcgggctgcgacggcgactttctcatctgctcactgctctgcttctccactccgctccgctggcagcgcaggccatggcgacacaggcgctggcgccctccctccgcctcctcctgctgctaccgctgctcgccgccgccgccgccgccgccgcgttgtctcacccagcgcacgagttctgcgcggtcgggggtgacgcctccggctgcggcggcggaggagacggcacgaggatcctgatcaagggcgggacggtggtcaacgcgcacctcgcggaggaggccgacgtctacatcgaggacggcgtcgtcgtcgccgtccgcccagacatcccggttgatgttgataatgtcagggtaatcgacgcaacaggaaaatatgtcatgccaggtggaattgaccctcacacgcacctggagatggagttcatgggcaccgtgaccatagatgacttcttcagcggccatgctgcggcactggcgggtgggacgacgatgcatattgactttgtcattcccgtggacggcaacttgactgcagggttggagtcctacaagcacaaagccgcaaaagctgccatggattatggctttcacatggccattacaaagtggaatgatgaggttgcaagggaaatggaagtgatggttaaagaacatgggataaattctttcaagtttttcatggcatataaaggctccttgatggttactgatgacctcctcctgcaaggcctacggaaatgcaagtcgcttggtgcccttgctatggttcatgcagagaatggtgatgctgttgccgagggacaacagcggatgattgaccttgggataactggtccagaagggcatgctctctcaaggcctccaattttagaaggagaagcaactgcacgggcaatccgtttagctaagttcatcaatacgccactgtatgttgttcatgtgatgagcatcgacgcaatggatgagattgccaaggctaaaagagaagggcagagagtcatcggtgaacctgtggtttctggactagtgcttgatgattcttggctttgggatcctgacttcacgattgcttcaaagtacgtgatgagtcctccaatccgggaagcagggcatggtaaagcactccaagctgctctttcatcgggaattctacagcttgtaggtactgatcactgcacattcaactccacacagaaagcttttggttctgatgattttcggaagattcccaatggtgtaaatggtcttgaggaacggatgcatatactttgggacagcatggtgactggcaagatttctgtaaccgactatgtcagagtgacaagcacagaatgcgccaagaccttcaacatattccctcggaaaggagcaatcctggaaggatctgacgcagatatcataatcctgaaccctgaaaggagctttgtgatgggtgctctcacacaccattcgaggtccaacaccaatgtgtacgagggcaggaaaggaaagggaatggtggaaataacaatctcaaggggccgagtggtatgggaggatggcgttctgaacattgcacctggttcaggacgatacgtcatgatgccacctttcggctacgtctttgatgggatcgagaagtccgatgcgacctacagagcttccctccgagcccctgtacagcgtggtaaagctgctgcatagctatgacagctgctgatgccattgacagggcagtagccccccatctgattcaagaacgagttgctccaaggtgaacaccgcatcgttccatgcgtattgtctatacagaacagtttatttaagatcagattcaggataggtaaaggcctcagcttgcctatgtacatcaaacacatttgttactagttctggtcaatttgtgcaactagcaattcgctgttccaataaatcatattatcacattcattactcgcattgtaatgttaaacccttcttcctattcatcatgagctatccccaaacatgctaaaagaacatggttactgattgttcatgaaaaggatggcctatgcagtactgtgattctttg

SEQ ID NO: 116474 - DNA, 2348 bp, Zea Mays
acacgtgcctgtggcacgtgcctctcaagtctcaactagtatgtagaaattggctagtcgatcggatactccctttccctgcgaagtgttctacgactggtggactctcttggctgtggctgctgatccgccaatgtcaaaggcacgtgcagcagcagttgcccttgcccctgggtctggttgatcgcgatgcacatgaccggagcctgactttggtgcggcgtgagcacgatgatgcgttgcgcggttcggattcgtgagagctgtagtcaaaaggctggaacggatggaattatccgagcagattgggtgggacggcggagggagccctttgcgccgtcacaaatcgcaaccaatcgccgagttgcttgtgttaaatagctcttcgcgtacgacacggcaagcgggctgcgacggcgactttctcatctgctcactgctctgcttctccactccgctccgctggcagcgcaggccatggcgacacaggcgctggcgccctccctccgcctcctcctgctgctaccgctgctcgccgccgccgccgccgccgccgcgttgtctcacccagcgcacgagttctgcgcggtcgggggtgacgcctccggctgcggcggcggaggagacggcacgaggatcctgatcaagggcgggacggtggtcaacgcgcacctcgcggaggaggccgacgtctacatcgaggacggcgtcgtcgtcgccgtccgcccagacatcccggttgatgttgataatgtcagggtaatcgacgcaacaggaaaatatgtcatgccaggtggaattgaccctcacacgcacctggagatggagttcatgggcaccgtgaccatagatgacttcttcagcggccatgctgcggcactggcgggtgggacgacgatgcatattgactttgtcattcccgtggacggcaacttgactgcagggttggagtcctacaagcacaaagccgcaaaagctgccatggattatggctttcacatggccattacaaagtggaatgatgaggttgcaagggaaatggaagtgatggttaaagaacatgggataaattctttcaagtttttcatggcatataaaggctccttgatggttactgatgacctcctcctgcaaggcctacggaaatgcaagtcgcttggtgcccttgctatggttcatgcagagaatggtgatgctgttgccgagggacaacagcggatgattgaccttgggataactggtccagaagggcatgctctctcaaggcctccaattttagaaggagaagcaactgcacgggcaatccgtttagctaagttcatcaatacgccactgtatgttgttcatgtgatgagcatcgacgcaatggatgagattgccaaggctaaaagagaagggcagagagtcatcggtgaacctgtggtttctggactagtgcttgatgattcttggctttgggatcctgacttcacgattgcttcaaagtacgtgatgagtcctccaatccgggaagcagggcatggtaaagcactccaagctgctctttcatcgggaattctacagcttgtaggtactgatcactgcacattcaactccacacagaaagcttttggttctgatgattttcggaagattcccaatggtgtaaatggtcttgaggaacggatgcatatactttgggacagcatggtggagactggcaagatttctgtaaccgactatgtcagagtgacaagcacagaatgcgccaagaccttcaacatattccctcggaaaggagcaatcctggaaggatctgacgcagatatcataatcctgaaccctgaaaggagctttgtgatgggtgctctcacacaccattcgaggtccaacaccaatgtgtacgagggcaggaaaggaaagggaatggtggaaataacaatctcaaggggccgagtggtatgggaggatggcgttctgaacattgcacctggttcaggacgatacgtcatgatgccacctttcggctacgtctttgatgggatcgagaagtccgatgcgacctacagagcttccctccgagcccctgtacagcgtggtaaagctgctgcatagctatgacagctgctgatgccattgacagggcagtagccccccatctgattcaagaacgagttgctccaaggtgaacaccgcatcgttccatgcgtattgtctatacagaacagtttatttaagatcagattcaggataggtaaaggcctcagcttgcctatgtacatcaaacacatttgttactagttctggtcaatttgtgcaactagcaattcgctgttccaataaatcatattatcacattcattactcgc

SEQ ID NO: 116475 - DNA, 1309 bp, Zea Mays
cctcctacgttcggtagagatgcaaggtatcattgaccatggttggacgatgacatttttaggcatgttatgcacaaaaacgctaatgaagacgtaccactgggatcttggttcatcggattggacgtcgatgatcgccgtctttgctacagcaaaccaccgaattgcgaatgaaaggtgcaggcgggaacgtgtgtgttgcatcctttcactggagttgcagtggcatctgcaaatctgctgatcggatcggggaagtccatcagcgctgcggtgggagtgagaatgcacttttggcaagttgtgttgatttatgtttaattatttaaatcatggctcaaacatggtgtttcattttctatcatttttttcaaaagcagattattgcatgcttgtgcagtttgtggcatttcatcaaaaatgaaaacttctctgtcatttagaaatataattatgtttgttagaagtagtacaaagcctttcattcctttactcatataaggaaacagattttctaaagaacaattaggacatagagatgtatttgggacattataaaccaaaaaaactatttagagctcgtgaaatatctctaaaagatttaaagattagctttttgtctttgaaaaatgtgtgattagttccttttggagtgttcaataaaagatacatatgataacttgaatgcctcaaaacttcctaaatacttttaaatttttatgccataataaatacttatagctagttgaacatatttttcttttctatcaactcagcgactctatattagactgtgagccaattaaattgttgattctgagcttcttttttttgcttgttttgttttagggttgtgattccattgcaatgacatctataatcgataagaaagctaagatggagagtttaatatcttctgtggcttttgtggagggtggcattcaggaggcatgtgatgatgcatacaacatttgccttgaggttttctgtgagagtgacccttctgcagtttggtgtatcattctcagtgacaaagtaccttttaaaatgcattgccctttacactctgacatgcaagacaatggtatatgcattggcttattatgtatagcgagtcatattttgatagacttttggtacatgtttatttagttaaaaacctgtagtgacgcctgtttgatttttacaatatgtacaagattggaagatcctctttattttttgttcttctttatgagttgattgtcacaacatcaactttaaattagtgtcatatgttacctgcattctattttggtttgccattatt

SEQ ID NO: 116476 - DNA, 371 bp, Zea Mays
gtgcgtgcttcgagtccaccgcatcacggcttgggattgctctgcctgtaaggcgagattgcgagaagatggggcagacaaggaaggaggtcgtattggcgctggactctaggttcacaagcatgatgacggaccaaagaagctcgagaactccatgctgcattgctatctcaaccaagaggacttggtggaggaaggaaaggaggaagagaagaaggagaaactgagtaacatgtttgtcctgattaccgtaaaaaacaggtttgtcctgatcattcaactcctcctccatctgtttctcaaaaatctttactatgcctgcctaagacggtaggagatttgccaatgtaagtttctgattggctcaaaga

SEQ ID NO: 116477 - DNA, 1823 bp, Zea Mays
gaaaaccacgcaaggtggagagagatcttgaccgagcgccgcgaggagagctcggagcgggagggtacgggccgtcggatgctcgcagctgccaccgccgcctacggctattttaaccccgcgctcctgccgacgccgcactcgcccccggcctcctcccgcctcccagatctcgctcgctcggcgccagttgcctcgcagtttggatcatctcatacctcggcgaagatgagggagatcctgcacatccagggagggcaatgtggcaaccagattggcgccaagttctgggaggtggtgtgcgatgaacatggcattgaccctaccgggcggtacactggcaattccgaccttcagttggagcgtgttaatgtctactacaatgaagcctcctgcggacgctttgttccccgcgctgttctcatggatcttgagcctgggacaatggacagtgtccggaccggaccctatgggcagatcttccgccctgacaactttgtgtttgggcaatctggtgctggtaacaattgggctaagggccactacaccgagggtgctgagctcattgactctgttctggatgttgtgaggaaggaagctgagaactgtgactgcttgcaaggattccaagtatgccactcccttggtggtggtactggatctggtatgggtacgctgttgatctcaaagatcagggaagagtaccctgaccgcatgatgcttacattctcagttttcccctcaccgaaagtatctgataccgtggttgagccatacaatgccactctttctgtccaccagttggtcgagaatgctgatgagtgcatggttctcgataacgaagccctctatgacatctgcttcaggactcttaagctgaccacccctagctttggtgatctgaaccatttgatctctgcaaccatgagtggagtcacctgctgcctaaggttccctggtcagctgaactccgacctcaggaagctggcagtgaacctgatccccttcccccgtctccacttcttcatggtcggcttcgcgccgctgacgtcccgtggctcccagcagtaccgggccctcacagtccccgagctcacgcagcagatgtgggatgccaagaacatgatgtgtgccgctgaccctcgccatgggcgttacctcaccgcctcggccatgttccgcgggaagatgagcaccaaggaggttgacgagcagatgatcaacgtccagaacaagaactcgtcctacttcgtggagtggatccccaacaacgtcaagtccagcgtgtgcgacatcccgcccaggggcctgtccatggcgtccaccttcatcggcaactcgacctccatccaggagatgttccggagggtgagcgagcagttcactgccatgttcaggaggaaggctttcttgcactggtacacgggcgagggcatggacgagatggagttcaccgaggccgagagcaacatgaacgacctcgtgtcggagtaccagcagtaccaggacgcgactgccgacgaggaggagtacgaggacgaggaggaggtgcaggccgatgacatgtgaggggagggctgttatcgtgtgaagccttgtggtccctagggcaagcggacctcgatgagttcggtgttccctttcgtgttgttgccatctttctactgctagcgtacccaccctcgtggcccattccgtcgctgttgacgtatgtatttttcttgtgctatggaaccttgcttttggtacggtactatcctgctagtatgcttggcgtttgaggttcctggcgtgaaaaaaaagaaccaagggagtaataaaaa

SEQ ID NO: 116478 - DNA, 1750 bp, Zea Mays
ccacacgtgagtccgccggaaaagccgaggcatctcgctcgctcggcgccagttgcctcgcagtttggatcatctcatacctcggcgaagatgagggagatcctgcacatccagggagggcaatgtggcaaccagattggcgccaagttctgggaggtggtgtgcgatgaacatggcattgaccctaccgggcggtacactggcaattccgaccttcagttggagcgtgttaatgtctactacaatgaagcctcctgcggacgctttgttccccgcgctgttctcatggatcttgagcctgggacaatggacagtgtccggaccggaccctatgggcagatcttccgccctgacaactttgtgtttgggcaatctggtgctggtaacaattgggctaagggccactacaccgagggtgctgagctcattgactctgttctggatgttgtgaggaaggaagctgagaactgtgactgcttgcaaggattccaagtatgccactcccttggtggtggtactggatctggtatgggtacgctgttgatctcaaagatcagggaagagtaccctgaccgcatgatgcttacattctcagttttcccctcaccgaaagtatctgataccgtggttgagccatacaatgccactctttctgtccaccagttggtcgagaatgctgatgagtgcatggttctcgataacgaagccctctatgacatctgcttcaggactcttaagctgaccacccctagctttggtgatctgaaccatttgatctctgcaaccatgagtggagtcacctgctgcctaaggttccctggtcagctgaactccgacctcaggaagctggcagtgaacctgatccccttcccccgtctccacttcttcatggtcggcttcgcgccgctgacgtcccgtggctcccagcagtaccgggccctcacagtccccgagctcacgcagcagatgtgggatgccaagaacatgatgtgtgccgctgaccctcgccatgggcgttacctcaccgcctcggccatgttccgcgggaagatgagcaccaaggaggttgacgagcagatgatcaacgtccagaacaagaactcgtcctacttcgtggagtggatccccaacaacgtcaagtccagcgtgtgcgacatcccgcccaggggcctgtccatggcgtccaccttcatcggcaactcgacctccatccaggagatgttccggagggtgagcgagcagttcactgccatgttcaggaggaaggctttcttgcactggtacacgggcgagggcatggacgagatggagttcaccgaggccgagagcaacatgaacgacctcgtgtcggagtaccagcagtaccaggacgcgactgccgacgaggaggagtacgaggacgaggaggaggtgcaggccgatgacatgtgaggggagggctgttatcgtgtgaagccttgtggtccctagggcaagcggacctcgatgagttcggtgttccctttcgtgttgttgccatctttctactgctagcgtacccaccctcgtggcccattccgtcgctgttgacgtatgtatttttcttgtgctatggaaccttgcttttggtacggtactatcctgctagtatgcttggcgtttgaggttcctggcgtgaatttaagccttccgtatgcagtgattggagttggagaccggctgcttcgtccaggcgaagcaattgacagcgacgtgctatacactcaagttt
